United States Patent Application Publication US 2012/0117685 A1 - sequence listing, part 4

SEQ ID NO: 4907 - DNA, 1896 bp, Glycine max
  misc_feature (10)..(14): n is a, c, g, or t
  misc_feature (29)..(31): n is a, c, g, or t
  misc_feature (33)..(33): n is a, c, g, or t
  misc_feature (38)..(42): n is a, c, g, or t
  misc_feature (65)..(65): n is a, c, g, or t
  misc_feature (142)..(142): n is a, c, g, or t
  misc_feature (144)..(144): n is a, c, g, or t
  misc_feature (148)..(148): n is a, c, g, or t
  misc_feature (159)..(159): n is a, c, g, or t
  misc_feature (163)..(163): n is a, c, g, or t
  misc_feature (170)..(170): n is a, c, g, or t
  misc_feature (176)..(176): n is a, c, g, or t
  misc_feature (188)..(188): n is a, c, g, or t
  misc_feature (191)..(191): n is a, c, g, or t
  misc_feature (244)..(244): n is a, c, g, or t
  misc_feature (255)..(256): n is a, c, g, or t
  misc_feature (264)..(264): n is a, c, g, or t
  misc_feature (266)..(266): n is a, c, g, or t
  misc_feature (381)..(381): n is a, c, g, or t
  misc_feature (392)..(392): n is a, c, g, or t
  misc_feature (418)..(418): n is a, c, g, or t
  misc_feature (443)..(443): n is a, c, g, or t
  misc_feature (485)..(485): n is a, c, g, or t
  misc_feature (505)..(505): n is a, c, g, or t
  misc_feature (513)..(513): n is a, c, g, or t
  misc_feature (551)..(551): n is a, c, g, or t
  misc_feature (562)..(563): n is a, c, g, or t
  misc_feature (573)..(573): n is a, c, g, or t
  misc_feature (576)..(577): n is a, c, g, or t
  misc_feature (583)..(583): n is a, c, g, or t
  misc_feature (606)..(606): n is a, c, g, or t
  misc_feature (611)..(611): n is a, c, g, or t
  misc_feature (613)..(613): n is a, c, g, or t
  misc_feature (667)..(667): n is a, c, g, or t
  misc_feature (669)..(669): n is a, c, g, or t
  misc_feature (692)..(692): n is a, c, g, or t
  misc_feature (694)..(694): n is a, c, g, or t
  misc_feature (712)..(712): n is a, c, g, or t
  misc_feature (722)..(722): n is a, c, g, or t
  misc_feature (773)..(773): n is a, c, g, or t
  misc_feature (825)..(825): n is a, c, g, or t
  misc_feature (832)..(832): n is a, c, g, or t
  misc_feature (834)..(834): n is a, c, g, or t
  misc_feature (843)..(843): n is a, c, g, or t
  misc_feature (883)..(883): n is a, c, g, or t
  misc_feature (894)..(894): n is a, c, g, or t
  misc_feature (905)..(905): n is a, c, g, or t
  misc_feature (983)..(983): n is a, c, g, or t
  misc_feature (1005)..(1005): n is a, c, g, or t
  misc_feature (1044)..(1044): n is a, c, g, or t
  misc_feature (1052)..(1052): n is a, c, g, or t
  misc_feature (1057)..(1057): n is a, c, g, or t
  misc_feature (1070)..(1070): n is a, c, g, or t
  misc_feature (1090)..(1090): n is a, c, g, or t
  misc_feature (1095)..(1095): n is a, c, g, or t
  misc_feature (1097)..(1097): n is a, c, g, or t
  misc_feature (1134)..(1134): n is a, c, g, or t
  misc_feature (1154)..(1154): n is a, c, g, or t
  misc_feature (1197)..(1197): n is a, c, g, or t
  misc_feature (1212)..(1212): n is a, c, g, or t
  misc_feature (1265)..(1265): n is a, c, g, or t
  misc_feature (1406)..(1406): n is a, c, g, or t
  misc_feature (1428)..(1428): n is a, c, g, or t
  misc_feature (1432)..(1432): n is a, c, g, or t
  misc_feature (1444)..(1444): n is a, c, g, or t
  misc_feature (1449)..(1449): n is a, c, g, or t
  misc_feature (1453)..(1453): n is a, c, g, or t
  misc_feature (1461)..(1461): n is a, c, g, or t
  misc_feature (1515)..(1515): n is a, c, g, or t
  misc_feature (1530)..(1530): n is a, c, g, or t
  misc_feature (1542)..(1542): n is a, c, g, or t
  misc_feature (1569)..(1569): n is a, c, g, or t
  misc_feature (1572)..(1572): n is a, c, g, or t
  misc_feature (1578)..(1578): n is a, c, g, or t
  misc_feature (1584)..(1584): n is a, c, g, or t
  misc_feature (1599)..(1599): n is a, c, g, or t
  misc_feature (1601)..(1601): n is a, c, g, or t
  misc_feature (1625)..(1625): n is a, c, g, or t
  misc_feature (1685)..(1685): n is a, c, g, or t
  misc_feature (1687)..(1688): n is a, c, g, or t
  misc_feature (1710)..(1710): n is a, c, g, or t
  misc_feature (1721)..(1721): n is a, c, g, or t
  misc_feature (1734)..(1734): n is a, c, g, or t
  misc_feature (1738)..(1738): n is a, c, g, or t
  misc_feature (1740)..(1740): n is a, c, g, or t
  misc_feature (1790)..(1791): n is a, c, g, or t
  misc_feature (1795)..(1795): n is a, c, g, or t
  misc_feature (1803)..(1803): n is a, c, g, or t
  misc_feature (1842)..(1842): n is a, c, g, or t
  misc_feature (1854)..(1854): n is a, c, g, or t
  misc_feature (1868)..(1868): n is a, c, g, or t
  misc_feature (1878)..(1878): n is a, c, g, or t
  misc_feature (1885)..(1885): n is a, c, g, or t
  misc_feature (1891)..(1891): n is a, c, g, or t
  misc_feature (1893)..(1893): n is a, c, g, or t
  Probeset Number=SeqID_14686
ggggcggggnnnnnggtgggggtgtgtgnnntngtgtnnnnntattagtgtagtatacttatatntagatctgtcatcctctcagagccgtcgtgtagatgcgactaagcgggcgagtagaggtggcgccgccgaatgtggngngagntgcacaccccncccncccaacnttcacncctcccactctnctnctagcagagtacagtgcagtatgtggtggttgtgatatggtgtgagatgtgtnactgtccccgnnccccccgncnagctgtgtggaaggacgttgtatgtgctgcatatatgtcgaatcacacctctcatcgttgtatatcttagttgctgctatttgcggtgactgctttactgttcctgcacgctgtngtagcatgatnctaagatagtgtagctgatctgcgcnatacataccgacgtatcacatattntaacaatataagtgatcagtgatgtcatgtctagttgcgcgncgacgtgttgatcattcctnctctacancatgctctatactgaatcgtactgaaataagtacactncctgcaataannagaaatatanacnnagtctncactacgagcctcactgagtcancgtantntatacgacgtactgactatagtatatcatcatcgtgcatactcattacagtcantngctaccaatacatcgtgactatnanatctcgcgcactgctatnactctattanatcatcgatgctatgtgtagtatgtagtcgcgtgatgtgagtgtagtatantgatgggataggcgatgagagtgagatcggaagtgtatatagatgcaatagnacgatgnanatagcatgntaataccatgcgaccactagcagcagacctacactacgantactatataantacatgctatnatactcatacactctatctgtgattcactcatagatacgctaagtacagtgatcgtatatatagccgtatatagcganagtgcgcatatctgtaagtatntgatgtcgacgatcataatcgctcgcgttcctgagagtntgtgactngttantgtaccatccatncacagcagtctctagcattngctangnacgatatgtagagaagatcactcgacgatgcagatgntacgataaggtagcgagatntcacatcgtagtgattcatatcacaactgctctctctccatgncatcacgcacgtcantatggtgcgcagctgaattgcgactgcctgtcactactatcatcgcgtgtacngtccatgacatcataccagcgatgcactgcatcgtcgcacacgcacacagatctgtttagtgtctgtagagcattcatcgacatctaccgatgtgatatgaagcccgactcacactcgtacaccaactatgcggactcatngtatgatgacgtcctgtaccantgtnctcgactcattncactnactntcaccgtnactacgtcactgctactagtgtagccatccatctcgacacactctcacgcccantcatactatcatatngatgtatctacnacgagatacatgatgacgagtgaggcnagncagcgncgattngactactgacacgancngacgcgtgatcgtgtcatcatcantgcatacacacgccgacgtatcacgtcgactctaacatctgatcgtcatccgctgcatancnnctatgcggacagtgccctctcncgtactctcancgctcttcataancatnanctgtcatgtcgtcgtcatgccagtcctgaccgtatcattccaacagccanntacnaccaggangccgatatagtatcatacgtactcgtcgatcagcatatncagtagccatancaatatccaagcancaagacggtncaacgangtgcangncgg

SEQ ID NO: 4908 - DNA, 1614 bp, Glycine max
  misc_feature (14)..(14): n is a, c, g, or t
  misc_feature (22)..(24): n is a, c, g, or t
  misc_feature (26)..(26): n is a, c, g, or t
  misc_feature (789)..(789): n is a, c, g, or t
  misc_feature (1048)..(1048): n is a, c, g, or t
  misc_feature (1251)..(1251): n is a, c, g, or t
  misc_feature (1384)..(1384): n is a, c, g, or t
  misc_feature (1566)..(1566): n is a, c, g, or t
  Peptide Sequence Number=SeqID_7180
  Probeset Number=SeqID_14687
tttatgcagcctanaccagctnnncntcctgtgttgtggcactctgcgcggcgcactattctatccaagaaacaacgagatgtggggctgaccggcctccacctgccgtcggaggtctagactacgataaaggtctacccgcccctcctcccacctatatctactcacaacagagactatcgtgcaacaagtaactcatcgaaggtatcccgtgactgcggctcctgtatgtgtttcgcacccctttatgtcccctcattgctacgctcggccgcacccacctttcgagtgaggtccagacacataactagtcgccgagtctagttgaatattgtatttccttcgcaaaatcctttgcggctgtgtattgcatgtgctaagcgatcacaagcctccttattcatacatgcttgtttgcaatgagtcagattctctatgcgcattatatcggttgtgatgaacgtcgcggatggtgatggtggcataccgccaccgagatatcatctttttctccataagcagctagcgcgctgtctctcaggacttcgtccttagccctgaagctatgttaggtggcggttatcaccgcatccgcgctgtacattgcaattatcttggcgatcgctgtgtttcatacacctatgcacggcattatccgtacacctcgcctgtgctctgatactgtgcctatcctgacgtgataccatcgaggatttatgtatatagatgacgcagatttccactccctggtagccctcaaattgtcactacgaaccgtatcttggctgngttaacggtactatataacatgcgaatgtatccgtcgcgatagctactgataatgtcgtgaatgacttggcaacgtaaatccctagtttcttatggaagcggtaaaatacaacagatgttgcagtgtacaacgagcctctatgacctaggcgcgtaaatcttcatctcctactacgcctcgtatgtcgtgttattcatagcagcacaaactcgatacatatatcttgactcaggtgtcgtgaagaagatccgtatgttncaccgcgcatgcctcttatcctcaagtcacccgcgtctcgatgtacgtcccaccagtctcatctatacgacgattggcacgaactgtcctgacacacacactgatatctctctcgcctattactccgtgagataatgttgtgcgtcaacgactgagagagactcatacgtcattatgttgatatatactctggtcctcgaccnattatttatcgcaggatactcttagacgatatattatgcgcgccacgtcgacgcccgtgcggcggcctgaggcttacgccgaggtaaacgactagacgatcgctcactcgctctatatcgaagagtaagaatncacgatcatatctcaagccatcattatcgcgcagatattctcataggtatactggcacatcatctcgacacgtatctacatcgatgcagggtgtgactatactcgcatgcatatatatatatacggcacaatctctacaatctaagatgtgatgctcaagcatacggttctctatatatatncgtaactctttgccgtgcactgtgtagcaatttcgtcgatataacata

SEQ ID NO: 4909 - DNA, 1578 bp, Glycine max
  misc_feature (1)..(1): n is a, c, g, or t
  misc_feature (35)..(35): n is a, c, g, or t
  misc_feature (42)..(42): n is a, c, g, or t
  misc_feature (93)..(93): n is a, c, g, or t
  misc_feature (146)..(146): n is a, c, g, or t
  misc_feature (164)..(164): n is a, c, g, or t
  misc_feature (252)..(252): n is a, c, g, or t
  misc_feature (285)..(285): n is a, c, g, or t
  misc_feature (311)..(311): n is a, c, g, or t
  misc_feature (317)..(317): n is a, c, g, or t
  misc_feature (325)..(325): n is a, c, g, or t
  misc_feature (327)..(327): n is a, c, g, or t
  misc_feature (331)..(331): n is a, c, g, or t
  misc_feature (496)..(496): n is a, c, g, or t
  misc_feature (561)..(561): n is a, c, g, or t
  misc_feature (579)..(579): n is a, c, g, or t
  misc_feature (584)..(584): n is a, c, g, or t
  misc_feature (636)..(636): n is a, c, g, or t
  misc_feature (804)..(804): n is a, c, g, or t
  misc_feature (1091)..(1091): n is a, c, g, or t
  misc_feature (1278)..(1278): n is a, c, g, or t
  misc_feature (1511)..(1511): n is a, c, g, or t
  Peptide Sequence Number=SeqID_7181
  Probeset Number=SeqID_14688
ngtttgatctaccgatgacgcgcgctacactactngatcgtnctatcacgcgtcatgtgtcgcactgcaaataaatgctgagacgcgcctganatacagtgcagcacgagagcgactcagctcacgcatcgaagtgtcgacgtcanaacatcgtcatcatactntatacacacatacctcgcacgagacgtgcagtgcatcatcgacacagtacgatcatcatcacactacagtcgatatattcagtagtgntcgacatgagcaggaagacagtctgtgaaagcnacagtacagctgatatatggagcacngtactntgtgagcnanctcnttaactaactagactgactcgccgtgtgaggacgagactctatcatctcagcgagtgataagtagacgacaatatgcagtagtgatgttacgtagtaagcatggtgcgacttcttctttacgtattactacattacatatcgtggtcacatggtagtggtacacnctatacaatagaacacatacacgagagatacgcgcagagatcaagtcagtatatcacggtgtagnggccagtacatatgacgntaatncagctatgcacggacacgtcagcagatacaggcgcatctcatacatcgagtnccgctacgcagtctataaatagtatcactacactcacagatgatatatatcaatatataactaatatggttagtgtagcgagacacgcctgtaggtcagcgcagacgtcgtgatctcgtgctctcaagaccactatagagcagcgactggacggccctagaccgtgtncgcagctgcgcaatgccactagacggagattcacacgtggtcagagatgtcttccgtaacaatattatcatcgcgcacactcccatcatgacatcagagcaggctgcacatgatcgctccactcgtctatgatgtgtacgagtatctgtgagcgcctagtcacgcatcatcgacttgacagcgagacgctcctcactagcacctacgccgagaaagatatatagacatacatacgttcctcaccgacctatcacactatcctgcgagagacaagcgacaacacgacnaacctctcctcgtcatccatgtggacaagtccgacatagactcatgcaaggactaagagtaacagatatgatctgtctggcattcctaccgcagcagaggacagatacgatcacataccaatgtaggacaacactgaagaggcatgaacaacttaagacatgcacgcatgcaagccacgccttaagnctgatgtataatatcactagatacagccctgagtaccggctgactaaagtatcttacagctctacgacgacagggtcacgtgcataatcctgatcgagcctctccaggaagatctgctccacagcacagacacctctcccgcgcgagctccgcgagggagcatcctacctaagacagctatggcgctgcccgcggtctgggagagggcgtgaacgcttcagagagtttgtggngaaagacggcctacaactcaccccttacgtgcaatatagaggaagagaggagagaggaggtgtacac

SEQ ID NO: 4910 - DNA, 1414 bp, Glycine max
  misc_feature (1)..(1): n is a, c, g, or t
  misc_feature (15)..(21): n is a, c, g, or t
  misc_feature (25)..(30): n is a, c, g, or t
  misc_feature (44)..(45): n is a, c, g, or t
  misc_feature (47)..(47): n is a, c, g, or t
  misc_feature (52)..(53): n is a, c, g, or t
  misc_feature (277)..(277): n is a, c, g, or t
  misc_feature (1363)..(1363): n is a, c, g, or t
  Probeset Number=SeqID_14689
ntttttttttttttnnnnnnntttnnnnnnttcccgcccatttnnanaaatnnttttataaaaaattatcttatactgtgagccgctaattatctcttggttttcgtcacactcttccactgctgttttataattgtatttaaaactcgcgctgagctaacatgtaagtagggccacatacccgcagcggctgcccccctcgctcttcctctcgccacattcactcgttcgcgctatacagacgcaccgctaccaggggcctatacgcatgacagantaagcatgctagcacaatccgcctcgtgctcttcactcttctggttgactcgtgccatacttgcattacctgatccaattcttctgtccttcctccgccaacatgcccgcggcccagccaattcactctgatatatcccatatcttccacccgcacctactcctactaagagggtggcatcgctctacacgtgacgttgcttgccctttctatgcagcactcgtgtctcactatcaatgtggtgtgtctatatctttatctccagtgtgtaggagagcgatttagtatggataacatcatgaatgtttaatccatgtcgcgcaacaatggcgcataataccagcttccacaacattcctcatttactcatatgccggctccactgctccgatacattaaattttatttaaaaccctctgcgcacacgcctcccactcgctattcgacgatcttacccttccatcttaagatgtcgccacattcactccattctacattgccaccctccagttcacagcaaccacactacaccacatgcttatgtgtgccattctttgacctattacacctgtgcgcagcagcaaccatcactatagcctttccattattataagctaccggctcttcccactcgcactcgtggcagtcggttccctctcatactacatcttctctctcacttactccctctgacaacacacgcattgtcacacttatctcatctttacttctcgggccttgcccgatgtccccccagtttataatacgagcgtttatccatcacaccacatatacaatcccccacacactctcatgatagaccctccgctaaaagtgcgcgggacgaataaacagatctaaacacaagacaaaacactgccacgaaccaaaaacaagagactaatagaaaaatagaggtataaagccctcttcgccaaatagtcagagtgctctttcttgctacaagaaagatatttattgactaaacgactcagtctcacatcccctgtaataggatacactactcaacaaaactccaactcacactatgtagtgaataagagtgggggagacaacccacccacngaggatggttattttaaagttcctctcatcgcctatcacccactcttcaat

SEQ ID NO: 4911 - DNA, 1581 bp, Glycine max
  misc_feature (83)..(83): n is a, c, g, or t
  misc_feature (202)..(202): n is a, c, g, or t
  misc_feature (301)..(301): n is a, c, g, or t
  misc_feature (564)..(564): n is a, c, g, or t
  misc_feature (1080)..(1080): n is a, c, g, or t
  misc_feature (1174)..(1174): n is a, c, g, or t
  misc_feature (1193)..(1193): n is a, c, g, or t
  misc_feature (1246)..(1246): n is a, c, g, or t
  misc_feature (1308)..(1308): n is a, c, g, or t
  misc_feature (1312)..(1312): n is a, c, g, or t
  misc_feature (1338)..(1339): n is a, c, g, or t
  misc_feature (1346)..(1346): n is a, c, g, or t
  misc_feature (1415)..(1415): n is a, c, g, or t
  misc_feature (1449)..(1449): n is a, c, g, or t
  misc_feature (1494)..(1494): n is a, c, g, or t
  misc_feature (1521)..(1522): n is a, c, g, or t
  misc_feature (1525)..(1525): n is a, c, g, or t
  misc_feature (1527)..(1527): n is a, c, g, or t
  misc_feature (1535)..(1536): n is a, c, g, or t
  misc_feature (1540)..(1540): n is a, c, g, or t
  misc_feature (1542)..(1545): n is a, c, g, or t
  misc_feature (1547)..(1547): n is a, c, g, or t
  misc_feature (1550)..(1553): n is a, c, g, or t
  misc_feature (1555)..(1559): n is a, c, g, or t
  misc_feature (1561)..(1562): n is a, c, g, or t
  misc_feature (1565)..(1565): n is a, c, g, or t
  Peptide Sequence Number=SeqID_7182
  Probeset Number=SeqID_14690
tttcattgcacgtatatacactgatatcttcagagagtgatacgagtaggtgaataagaatgttcggagctcgtgttgtgagnggacgaatagagagggagagcatattggtctatatgtagtatctcatgtagatagagagtatgtataggttggaagtcacactagagaccaatacataattagatatcgtagagtagcntttgtttgagctgtcgatcatgtgttgagttctctctattctatgtcttgttgttgcgcatgagtatgtgtttgatgcatgttgacgagatctatatgngatggtgttgtagtttatcgctgaatcgagtatcgaagtgataagagcggtgctatacgtgactagtatagatagaggcaccgagatgcagagatataatataattgatgatgaagtggagactcgtatctcatatcgtattcaacatattaagagagtatcgcgcgcagtgaagcgaagagagggtgagatgtgagaggtgcggatgaacgcgcgcgctatatctcacgtcggcattaacatatagttaagtgtagaagctnttatacgacggtgtgtgctggtgatatgataggttgatctgtgtgtgttggctgtgtttgttgtcgtgtgtgtttgtgtgtcataggaggagaggagtgcgtagggtagcgtggaggagtaagatagggattgtgtgttacgtttcgcgttcgttgtatctttgtatattagacatcgtttctagtctcgcgtatattaattctattttctatcacaaattataatttcgaattttagccgcgtatcgtatatctcgaataggaacaaccgtcaccgatggagatcgacggaggttggaggcgaagacggaggagtttgattaggtacatacggaaacaaagaggacaacaaccgaggcaataacgaacattaatcttatactatctggagcagaataggaggaaaaaagcacatcacagacacgaataaagatatatataaaaaagtataatggagaagcgaggtgaatatggaagtagatatgaaggatagatagtagaaatatgtgcttcggnagcgggatttatttgcatgaagtagagaaatcgcaatgacacatggccaacacgcgaccgcgtcaggcttggtggtggtgctgtggacgtcctnttcccttccacgtactcgnggccgctgcgcgccttatgcccgggtccgtgcgggcggcgtggagaggggagngaggggaaacacgtatataaaagattagacagactcgctaatacacaacataattatgacanaaanattttatgagacataatccgtttttnnatatatntcggtgcctgttgcgcgatctgaggacgaatacccctcctcttgcatgaagacaacaacctagacgcancctacaatatccatacaatccacaccaagagcanaacagaccgagaacagaatcactcacacagcagacctggggggangaggaggagggggagaaaagaaaagannaananaagcaagnnaagngnnnnanagnnnngnnnnngnnagngggggggggggaaaac

SEQ ID NO: 4912 - DNA, 670 bp, Glycine max
  Probeset Number=SeqID_14691
acaaaactacagcataaaccatcattagacaggacaagccaattgctttgctcgacaagtgtagaagcaacgatgaagagtagcacgctcgtggcgrkcctgattctccaggccgtcctggtcatgggaatcctctcacaggcgaacggtacgtgctgattgcctttttgtatggcgtgcagagtttagcttaaaagggatatcaaattagttaatcaccttacaagaccatcccttttgacatgcatttgttaccaaatgaactaatttgtttgattgcacccccgcaaaaaaaaactattttgattgcatgtgtccgtgcagccgagttcccaaagtgctgcgacaactgcaggttcttctcgggggccgtggtctgcgacgacgccggccccaagtgccgcgacggctgcgtgaactgccgcgtcgtgcagacgagccccaagaagacgttccggtgcgccgatgcacgcggcgacgacggcacgccctgcccgccctgcaagaagtactgatcgctcatgctcaataagatggtgcgccgatcataaaagctcggatgggttgagcagagctgttgtggttgtacgtgcacgtggtccacgcccaacaacaattgttgttgttgtcctcagtcgttatcttttcttcttcttaagaaaaactgttg

SEQ ID NO: 4913 - DNA, 436 bp, Glycine max
  Peptide Sequence Number=SeqID_7183
  Probeset Number=SeqID_14692
ggctgaagcacagctgccagaccaacatggtaaccctgtcccgctcaccgatcaatacggtaatccggttatcttaactgacaagcgcggcaatcccgtgcaactcactggtgtcgctaccaccgctaccggcacagcaggttctgggtttgggtcctatggaaccggtgcttaccgtggtggtgcaagtgcaaccaccgaggcagagttgttggcaacctaaccaaggactggcagggaagctatagagctacttcgttccttcagttcaagctctagctcgtatgaggatgattggcaaggtgtgacgatgaggaatggtatgaatgatataattaaagataaacaaccataggtaggaggatgcatttataatatggagcatgtatacaatatatctgatccatactccgtggctaatctctctgtaggtcag

SEQ ID NO: 4914 - DNA, 326 bp, Glycine max
  Peptide Sequence Number=SeqID_7184
  Probeset Number=SeqID_14693
atgcgtcggaacacagcatcctccagaccaatcagccccggatgcgtcggttcgttgcgtaagcggctcagcagccggtccagcctgtccgtcaaagcatcgcacatagcgggcagatctgagcaacagcgacggagcagccgcaacgctatggcgccgtcttcgtcatgccgggcatatccttcatcatcgcgtcatggtcttcgggcgcactggctattgccgcctgatattgggcgggtgacatacgcggaagttgccttacgaaagccaccatatcccagatcagttcgtcgctatgggtcttaccccaagctggcatcgcg

SEQ ID NO: 4915 - DNA, 2453 bp, Glycine max
  misc_feature (1)..(1): n is a, c, g, or t
  misc_feature (2451)..(2453): n is a, c, g, or t
  Peptide Sequence Number=SeqID_7185
  Probeset Number=SeqID_14694
ngcacaaatatggagatgagattgaaatacattttaatagttggaactttcttcggtattaaaacacagtcctttaaaagccctcgtcacatgataagcaccaaccaagaacaaggcatgataatcaagaacattttaagttaaaaatcatccaatattcaatcgagagacatgcattggttccaattaaagtgcagagagacacattgaaacatgcgtaaatagttcccccgattagtaacagccgcgaagaatgctaccaagaaaataaaaccatacagggcaaagtggttctcaaagattacttcttctcctcctcgtttgatggcttgtcgtcattcttctgttgaggatttcactgatcattacttctttgctctgattttgttttgtcttgccttttcattgtgttttctgatggatcatgcttgttctaaatttgggttgacttcaattctttgtcttgagtttttctgcagaacttgatgcatggtgcattgatgctgcttagtttgcttttggcaatttgccttttctttatcaagtttttgtcttgttgataacatctttctagattttgtaatttattatatttttttttcaatttggattctgtaattctgatgctgattatttgtggtagtaagttttaatcaaagctgaatgtggctacacatggaaagttttcaccttctgttactggaacattcttttatttattttttattttttttatgtttatttgcaattcataatcctgaataacatcaaaacttgaatgagggagaatgtataaaatagtcattagtatgacctcaaactaattgggagagtaacgctatgagagatccctgaatagatccctagaatcaaaacagccgtgaaaaatattaacgggtttgttaaaagaaacaatataccgtggggtgatcatagtttttaccctattcttatgatgggtgactcagagatggcaaagttcggcttaaaagtcgggaagaatgagaaaaatgggtttccaaggggactagatcctgcaatatccaagttttttgtgcagctccaaattgttgttaagtcacggctgagtagattagcaaaacaggatggaatgagtttgatgagttctgtccaaagaaaaggggagaggtctttcagttactctgaagctgaactgaatgagcaactgcaagcatggagagaaaatccatcttgggtcgacaagcctccactaataaaggtcactggtcccaaaggttctctttgcaaccttgatgtagaagttgatgttgggcttcgccctgatgcagtatataatatagtgatagatcctgacaataggcgagttttcaaaaatatctaaaaggtggtatccagtcagggttttgttgatcagggtcataggctggtgctcgattctgccattgaaactctttagcaatatccatgttgggccgcaactttagctactcgccatattgtaaaccggaaaccaaacagctgctctgtgaagttcaaccacaccaaaaccacttccatctaacccatcaccagtcaaaataggcgtagatacaattacattagatgaagcaatgtgccctcactttaagtggataatgaaggtagaataaattgcatgaacaagagccagaggtagaaccagatttaaagttagtcccgaacacttacttcagccatacttagtacctcccccctcccctatcatggtatttaatgggaattactgcacggacaactgagatgcttaataactatatgcttgcagaaactgctagaataagaggcggatatgaggcttaaaagtctaagtcagaggagcttaagttaaaacctggtgaaaatgtggaccctggtttctaacacaagtgacaataaagaaagtgggaaattgcctaaaaaaaatgcaaagcacacgggtcagaatcctcctgacaacatcgtctttctatgccagttttagatctccaactgtctatctaggtggtaacctgcagtctagttacaggattaaaatgtaagcctgatattataagctgttaatcggagtaggatcgttttttccgtcatgcatccgttcagaattgttgatacagatcatcgaagccgtgagcaccattgttgatcattcagaggcaaaagtgtgaaagaagtttaattctgtgctgcaaccgagtgcttaattcttctcatttacccccttatgtcgtcttctcactgccgaattattgccaaattagttccctcagactgattttgcatggaagccagcaaatccttgacagaagggtcatttgggtcaaccccaggaagcgatgcaaggatagaagatacaaaggattgatcagctaacaatttgctcatgtctgactggcttgattgatcctttgcactatctgttattgacaattgaagtgctgcaagcaataaatnnn

SEQ ID NO: 4916 - DNA, 1396 bp, Glycine max
  misc_feature (14)..(14): n is a, c, g, or t
  misc_feature (71)..(71): n is a, c, g, or t
  misc_feature (93)..(93): n is a, c, g, or t
  misc_feature (213)..(213): n is a, c, g, or t
  misc_feature (557)..(557): n is a, c, g, or t
  misc_feature (681)..(681): n is a, c, g, or t
  misc_feature (951)..(951): n is a, c, g, or t
  misc_feature (1182)..(1182): n is a, c, g, or t
  misc_feature (1198)..(1198): n is a, c, g, or t
  misc_feature (1380)..(1380): n is a, c, g, or t
  misc_feature (1396)..(1396): n is a, c, g, or t
  Peptide Sequence Number=SeqID_7186
  Probeset Number=SeqID_14695
tgtgttttcgcctncttccctctctccctccgcacaccacgtaataaatcatacaatgatgttgttgtggnttggtggatatgatgagtattncttaggcgacaattagactatgtatttatgtaattatcacacaccaagacaccgagaaaagagaggatgagagcgaagtcgtatctcccgcgcgaccgcgacagcagttccgtcatcatncattccgcgtctgctatgagctctttactctatcactgtaatgcataactattattattgtctatgtcttctctgtatatactacatcaccactctatggtcactacatcgagaggatgcgatacaggtcgcgcgccgcgtgtctatgtgcgtcgaggtgcagatggtgtatcattatctacgtatgaaatagatctatcaagtcatataatgtaattaatatatcagtgtctgagtactctgcttatacgctgccacgagtccgttcccagtcgagtctctgtgctatttcgctttacatgtcacgtcatgtatgagagctcagcaatcactaagtcgccgcntcactacgagcatgatcgctgcctactctgatctcgctcgcgacgcgcgcggcgcgagcggcaccgtccgtgccgtcacggaggggtcatacaagacgaccggacgtgtatgactctcgtagancctcccacccgcccacctacactatctcacgacgtcagtgcggacgcggacgcctacgcgacctcgtcacgtggtctgctgatgcacaaccactgcgctcagaaggtcgcggagtcgtctactgatgatgtatgtggatcgtgattgcgaccaatatgggcgatagactgcagacgtgcgaggcagcacatctatagaatggtgcatgtcactgtccagcgctgaagctatgcaacgtcgtcatttgcatctgctccatcatactcatgntatagtacgctcacgactactctcgactcgacatcacggcttcaatgagtacagacagctacggagatggcgcgaacatagcgactggcatgcgtacagcgccacgcgatcagtgctgtgatatcgtcgcctcccatgaatacctatgacgacggctcaggtgatcgtattatgatgttatacgacacacgctgtcgactcagccactgctacgctccactaacctcagtngagtacgacgtcgagncgtgcggccagtaatatgcgataggccactctactactctagacacatgcgagcagtgtgtcactgcatcactcgtacgcggacgtgaccatcgctcttgctccagatgcgtgcgatcctgcgcacgtacgtcatgtgtcgtgtagttcttcatactcacatgcagatttatctcatcttgntatcctaccccgaacn

SEQ ID NO: 4917 - DNA, 323 bp, Glycine max
  misc_feature (81)..(81): n is a, c, g, or t
  misc_feature (228)..(228): n is a, c, g, or t
  misc_feature (237)..(237): n is a, c, g, or t
  misc_feature (295)..(295): n is a, c, g, or t
  misc_feature (313)..(313): n is a, c, g, or t
  Probeset Number=SeqID_14696
tgggtggccctcttggggttgctgggtggccccgcccctctgggtgttggtgtttgtgtctttgccccgcggtggcttgcnggcgtctctctttggtgttggtgggggggggtttgcgtttgcgttgggggcgccggttttgccttgtgttggctgttgcttgtgctttggtgttcttgcgctttggttgtggtcctccggtgttccgtggtgttctcccgccgggcnctgttctgnttgtttctgtgtggcgtgggttggtgtgtgggtttggcttgtctaggtttccgcccgncgccgcgtttggtgtggncttgttttgc

SEQ ID NO: 4918 - DNA, 1333 bp, Glycine max
  misc_feature (24)..(25): n is a, c, g, or t
  misc_feature (27)..(29): n is a, c, g, or t
  misc_feature (78)..(84): n is a, c, g, or t
  misc_feature (87)..(87): n is a, c, g, or t
  misc_feature (219)..(219): n is a, c, g, or t
  misc_feature (547)..(547): n is a, c, g, or t
  misc_feature (1177)..(1177): n is a, c, g, or t
  misc_feature (1246)..(1246): n is a, c, g, or t
  misc_feature (1297)..(1297): n is a, c, g, or t
  misc_feature (1321)..(1321): n is a, c, g, or t
  Peptide Sequence Number=SeqID_7187
  Probeset Number=SeqID_14697
ggtgtggggggccgttgcctttanncnnntacctcaccctacatacactatcataacgcattattatgattataaacnnnnnnngcncaccgcagggtgccgagctatcttcccctcggcgtggagcgccgcgcctcgtccatactagaacaagatggatgatacctccgcctcgggagagtagacaggaagaaccatccttatattataattatcttnatatattgtatataagcttatacaataataacgtatcatataaacatagtcatacatgcctagagtcgagatattgaagcagtgtgtagaggcgtcactctaactcttctcatcactcgagtcaagaatccactatcagatagctcacatgtcttatctgcctctacggcgcggtctacagcactctcctctacatactgggatattagtgctagtacatcacaagagacatacagagtattcatcaggacgatatagaaatcttcgtatatattacctcatatccctatacacaatccaagaatagcggaaggaggaaaagaacaangcacggtttgtcgaatagtactcatctatgcgtcctctccgaatctcattcccttagagatagagctaataaatagaagatctgcgaaattataaatgaataaataaatacaaaacaaaatccaaacggagacacaccttacataattcgtaatatgaagcataactcttccgtatatcctaagagctactgtatagttgagatgtaaagttggttccccctcacccacacagtgtaggcagtggtcatctcttatacttctatgatacatcacactttctcttcatatatcatcttttctacaaacatctcactaatagtataatacagcgcatcataccgcgagaggcggtcaggtttccttcatatgtcactaacttgctgtctccctgtcgccctactcccacatcccatctggactccactgtactaactctcaagatacacaacttattctcccacgaacctctatatccttgagccttaattaattgtatggctgtcatacgcgcagtctccagactactacgctcctctcctctcttaacgtcgtcgtcagattagaatgctatactgacctatatctgctcagtatcacctcgtcacgacttagtaatctcctcgactaantgtgtaatcacagtagctgtcgtagtgacctctatctctctgtagatatctactaatcaatgtgtgagnaatcttcactctacacgtgtgacagagagaatactctctactagaatactntgagcagcttgctactatctcagncagtctatctaa

SEQ ID NO: 4919 - DNA, 1338 bp, Glycine max
  misc_feature (11)..(12): n is a, c, g, or t
  misc_feature (14)..(27): n is a, c, g, or t
  misc_feature (32)..(32): n is a, c, g, or t
  misc_feature (34)..(34): n is a, c, g, or t
  misc_feature (41)..(41): n is a, c, g, or t
  misc_feature (443)..(443): n is a, c, g, or t
  misc_feature (849)..(849): n is a, c, g, or t
  misc_feature (1129)..(1129): n is a, c, g, or t
  Probeset Number=SeqID_14698
ttttgtttgcnngnnnnnnnnnnnnnnccagngngtagggnctgggttcggtgccccccggggcgagaggaggaggagggggagaggaatggagaggtagttatcgtagggggccccctgttgatttattgattggggaggttatggccaccccccctccacccaaataacacaaccacacaacacccctacaatagataaaatattaagttatttagttaccttatatccccccccccccaccccccccacaaacaggggatcgcatgagtggggggggaggagccccccttgggggagtaaaaagaagtggtcagatcaaggagtccactggacaaagagccggcggggggggggtggctgtgggaggaagatgagtctcctcagcaccccgcgcgagcttagcacaagaggggggaggggatgcagtaggggtggagagnaaaagaaaaaagaagcaacgatgaaaagagatgtaagagttaggaagggtggaaaacagcccacggcgggaatcgattgatagtagagtaatccactagtgatataaaaaaacaattgggaacccaccgacagactaccatccatatgacaaaaaggaggtaaactgtatggcacactggacgccgagcgggggcgggggaggtcgggggaacaaaagacacttaatgaaggtagtcacacggtgcgaaatggaacgactaaccgaccaaagcgaccataaggctagacagggaggaccggaggagatggacgaaccagtcacaaccagtcatagtctcacactggaaggcgggagagggagttggaataatagtgagtacataagaaaccccacccccacaactntcctcttttggtgcgaggaccggtgctgccgcgagccttgtccagagaagagacggggcggtggccggagatgagggtgggtccgtgatgggtgtaggatcttttcctgcgtccgtacaagcgccaggttaatgtgtacgagtcgtgccgggtgcaatgcgtatggtagtgttacatgctcgagagagatgtagagagaaatggagatgtggacaagtaacggagcacacagaggagagcaaggtgcagaggcgcgacggtctgggccattggacccggncactgagcgtgaggaaaagagagagttgcgcaacgcctgttggcgtcagcggacagccaactgctatctggcagagtctagcgtgcatagcgcaatcgccatgatgtgactatgcgtgtgtctcgtaaaacatagctcagagaaccaagttcgcagtactatagaatcaatgactacggtccctattgcatagagtcacgaagcccacg

SEQ ID NO: 4920 - DNA, 1347 bp, Glycine max
  misc_feature (180)..(180): n is a, c, g, or t
  Peptide Sequence Number=SeqID_7188
  Probeset Number=SeqID_14699
caagatatatactcaccagtcgatacatcgaccaccaagatctagcacacctacctaacacaagaccacatcaccaacaaatagggaggatagaaggtggctctccaccccagcagtgaggggcgagtggttagtattcagcatcccaccctcactcgtattctcgtgtgctgtctggcnctagtcaacgcgagcgtatagaccgtagagcattggtgacgacatataccagagatatagtcgaaaagatccatagagcagaccgcgtctgacgctgtctcatatcacagctgaggaggttcgggggctcccgtgctgaaacaacaccagatatcccgccgctaacgctactgtatcactcgaaacatctagcatcacgcagacacaccgcactcgactccctcacgctgcagtagcctagctcatcgcgaagctcggcagtagacgtacgagttctactagagtatgacacctgcttcacgcatctccagcgggcgccagggcccgtcccaaggctatacgccacacacagcggctccgccttagaacctcaacccccccaccacctcacacactacgatcgaccacctctcctccccctcgcccacactagcctacacgcatcgaacataaccctcacgtctgcgatggccgccatctattccctcccgccgccagccgccgatctcctcttgtcgttcggcatctatactcaacaatcgagatatatacagcagactcaccataccataaccctctcgccctacacgtaaccactacccacgcattactcacatcgagccagaccacctctacagcccgcgctgaacagtctctgatatccctaccaccctattcctttccagatacacataagatccgtgaacctgcacgatacacgtcccgcacgattctattggcgcgactcggtatactctccagctgcacgaacttacgctacttagactaaagcatacctattgcggcttccccgacgccacgacgcgcacttcctactgtcaccactagacattattctttatacacattgctcgtatgtcgtaccgacccaggcttcgcatactatacaggtagaacccaacaacacttcagccaatagcaacgcaagacgaatgcggcacgtagcgcacagaccacaatatcgacatcaatatgtacgccgcactgtctagaatactctctacatgatccatccattcgtaatctctccacattcgctctgccgcagcgagatagcgcaaccgcagccatcgcgacaagccgcagtaccatcaccacgcgtcgctcaatatctacgatttcatcacacgcgccctctcaccaccg

SEQ ID NO: 4921 - DNA, 1626 bp, Glycine max
  misc_feature (1)..(30): n is a, c, g, or t
  misc_feature (35)..(43): n is a, c, g, or t
  misc_feature (46)..(52): n is a, c, g, or t
  misc_feature (59)..(59): n is a, c, g, or t
  misc_feature (67)..(73): n is a, c, g, or t
  misc_feature (75)..(78): n is a, c, g, or t
  misc_feature (80)..(81): n is a, c, g, or t
  misc_feature (83)..(83): n is a, c, g, or t
  misc_feature (93)..(93): n is a, c, g, or t
  misc_feature (100)..(100): n is a, c, g, or t
  misc_feature (105)..(105): n is a, c, g, or t
  misc_feature (196)..(196): n is a, c, g, or t
  misc_feature (437)..(437): n is a, c, g, or t
  misc_feature (478)..(478): n is a, c, g, or t
  misc_feature (956)..(956): n is a, c, g, or t
  misc_feature (1030)..(1030): n is a, c, g, or t
  misc_feature (1174)..(1174): n is a, c, g, or t
  misc_feature (1394)..(1394): n is a, c, g, or t
  misc_feature (1462)..(1462): n is a, c, g, or t
  misc_feature (1568)..(1568): n is a, c, g, or t
  misc_feature (1599)..(1599): n is a, c, g, or t
  misc_feature (1605)..(1605): n is a, c, g, or t
  misc_feature (1617)..(1617): n is a, c, g, or t
  Peptide Sequence Number=SeqID_7196
  Probeset Number=SeqID_14700
nnnnnnnnnnnnnnnnnnnnnnnnnnnnnnccccnnnnnnnnnccnnnnnnnccccttnaacccctnnnnnnncnnnncnntnactcagccanttcttcnacttnttcctcacatctggtgtgctagccgtgcgggcttcctctctccttctgtgaggggtcgtgtctttgtgtatatccgcgccccacacgcccntcgccccctcgcgtgtatgtcgcgatgtgtgggcgggacatatcaacttaaactattatccgtgtgacttgtcacacactatcaaagagacaccgacacacagaggatcgccgctcatcacacggacacgtcgccagaagacagctttgcacgcctcttcatacacatacgctcactcaacacacaaacacactactcgtcgttcttccataccagtcgtctatctatctacacctatgcncctcgtctggggctcagcttcttgtcctgtcttctgcttgntttaggtatatctcttatcttatgactctggtggtcttgttctatgtctctagattgtgtgcggtctgggagggtgtctacgttcgatttctgtgttatattctttcctatcgctcttcttcttcactaccacccttgtatcgtatcactttgtgaatgaaagcatatccgtcttgtctgatcataccatagtttgtctgatataaatgagtcggcatccttgtggtgtcacccgccacggccaaggagggcgcccgagaagctgcgggcaggcgaaacgtgcacaccccgctgccgaccagcctactcacacgctacctgcactccaccatgacgcgacgcactcacacctcatctcttcccctctctactcctccttctcttgcctccgcacatctaacccgcctgctcaaccactacaccgacgacaccgctcggtcccccgctcgcgcgcgctcacccactccatcgtagtganttatggtgaatcatgtaccgaccatcttcacccgcgcgtcattacgcagacttccgactacgtcccacactctncaacacactctcaccagatcactatagctaagttcgaatgatgctatcaacactcgcagcgacatgcgcgcgtaactactatgcattatagttatgttagcgaccatgctcgctctcacacgcgctcccgcattccaccgcganacgggcacgtacacgcttagtctatgcggtgtcgactgcgccgcgtgcgctccacgatgtgcgcatacaccacgcagctttgtcaactctcgtattcccgcaactcgcgaccgctaaacaccacagatacacagtggtgcctgagcttgggggaatggatacacctgctcgcgcatcagggatgcatataccgctgatcctcctactagtacagcgcgcncctcgatatgcctcactcagaacatccatcctgctgacgctccacacgatactcaactccaccgccgngcactactccggctgcaccggttacgtatccgcgcgcgcgcgccgtcacgccgtccgcacacacatacgtctgctgaactccaccatcgcactgtccatgctcgcnactcagcgaccaacagcaccatccaccatcntcacgnacgctcgagcancgccgtgtg

SEQ ID NO: 4922 - DNA, 1461 bp, Glycine max
  misc_feature (1)..(1): n is a, c, g, or t
  misc_feature (22)..(22): n is a, c, g, or t
  misc_feature (39)..(39): n is a, c, g, or t
  misc_feature (82)..(82): n is a, c, g, or t
  misc_feature (206)..(206): n is a, c, g, or t
  misc_feature (397)..(397): n is a, c, g, or t
  misc_feature (569)..(569): n is a, c, g, or t
  misc_feature (612)..(612): n is a, c, g, or t
  misc_feature (722)..(725): n is a, c, g, or t
  misc_feature (773)..(773): n is a, c, g, or t
  misc_feature (775)..(776): n is a, c, g, or t
  misc_feature (953)..(953): n is a, c, g, or t
  misc_feature (1205)..(1205): n is a, c, g, or t
  misc_feature (1270)..(1270): n is a, c, g, or t
  misc_feature (1375)..(1376): n is a, c, g, or t
  misc_feature (1430)..(1430): n is a, c, g, or t
  misc_feature (1440)..(1440): n is a, c, g, or t
  Probeset Number=SeqID_14701
ntcatcgacggcaagaatgcancattcaacatgtatagngagtttgagtcgcgcacagtggagagtatacacgcacatgctngcacgcacacatcatgtgtcgagcacaaccaatgaatagatgtatccacacatacgatatgtagagatgatagggagcagctatagtaagatgcagagatgctcggtggtagtcatgtattagnggtcggtgggcgcgatagagaagtctaggagcagacgcgatcacgacaacagcaggagagcgagaaagtatgacagaaacacaagacagtgcacagcgcacaacacgcgagagaggcacagcacaacacgcatcgcactcacagaagtagaggcggctacagcagattgtagccacacatatagagcgagnacggagaggaaggtgatgagaggagaaggagcccacacaacacaattacatcacagacagcgagacggctccgcgccagaagtacgagagcgcgagccgagagcaaagaagagtggcagcgttcacatctataagatggcgtagccaccacgccacacaccaacacattgtnggcacacacaggtgaccgacgacactatatgcaccgatgtggngcggggtgtgagggctggcgtggaccccgagagggcgcacacacacagtaaagctagctataagtcggcggtggagcggagaaacggagtgcatacttacatatgttgtnnnncccctcccacacccaacttgtatggataaataaatatcttcatatatntnnctctccttgtatcatatataaccactagtatcctacaatcagacacgcccacacacacaccacaattctacacccatgtgtgcaccaccactccaattgttattacaaatctctcatttattactacgaataatgagtagactgtactatgcaaaaaggaaagcaccaacaacagcnatatggtggtcaagactaagtctcgccatcacgactaccacgccgagccttaagtgcaaaggagcacacacaaaaatgaagattgattatatacacacatatagccgacccgtccaaagtattacgaacaccatgtgtcgaatatgatagatacgcgggcgcggtcatagaaccgcacgaaaggtgtgttacacctgcctgtgcacaattgcaaggcgtgcccacacgatagacacccacagcacacacgcngcgacgcaagggaggagacttacattgatatcacggtagtataacaagccacaaacaacacaatnagaacacacccaagggagtcgcctcgttacgacgacgcgcgcgaagaccacagaggatgccaagcacccctccgccccacctacgtgagtataccaaccactaanntaacacagatgaccacgccccaacctcccgatgcacagatagtgctacgccgtntcccaacatnagccaccccccctcttatctc

SEQ ID NO: 4923 - DNA, 1935 bp, Glycine max
  misc_feature (212)..(212): n is a, c, g, or t
  misc_feature (410)..(410): n is a, c, g, or t
  misc_feature (435)..(435): n is a, c, g, or t
  misc_feature (598)..(598): n is a, c, g, or t
  misc_feature (698)..(698): n is a, c, g, or t
  misc_feature (752)..(752): n is a, c, g, or t
  misc_feature (780)..(780): n is a, c, g, or t
  misc_feature (810)..(810): n is a, c, g, or t
  misc_feature (840)..(840): n is a, c, g, or t
  misc_feature (912)..(912): n is a, c, g, or t
  misc_feature (914)..(914): n is a, c, g, or t
  misc_feature (921)..(921): n is a, c, g, or t
  misc_feature (973)..(973): n is a, c, g, or t
  misc_feature (993)..(993): n is a, c, g, or t
  misc_feature (1027)..(1027): n is a, c, g, or t
  misc_feature (1157)..(1157): n is a, c, g, or t
  misc_feature (1286)..(1286): n is a, c, g, or t
  misc_feature (1345)..(1345): n is a, c, g, or t
  misc_feature (1563)..(1563): n is a, c, g, or t
  misc_feature (1593)..(1593): n is a, c, g, or t
  misc_feature (1611)..(1611): n is a, c, g, or t
  misc_feature (1659)..(1659): n is a, c, g, or t
  misc_feature (1713)..(1713): n is a, c, g, or t
  misc_feature (1760)..(1760): n is a, c, g, or t
  misc_feature (1767)..(1767): n is a, c, g, or t
  misc_feature (1789)..(1789): n is a, c, g, or t
  misc_feature (1794)..(1794): n is a, c, g, or t
  misc_feature (1870)..(1870): n is a, c, g, or t
  misc_feature (1872)..(1872): n is a, c, g, or t
  misc_feature (1915)..(1915): n is a, c, g, or t
  misc_feature (1922)..(1923): n is a, c, g, or t
  misc_feature (1934)..(1934): n is a, c, g, or t
  Peptide Sequence Number=SeqID_7197
  Probeset Number=SeqID_14702
ggcgccccactgccacaccacactctcccacgacatctacgcgcgtcaggcccttcatcgacccagcatgagcgaagtttctggtgcgtactgagattgtcggtgtgcgtgtaggcggtcgtgcttcgccgcggtagggacgtgttatgagcgccgagtgtgatgctgtctactacgaggcgctcgctgcctgtctacctatcgtaggtgtntgtgtggtgtctgctgtgtctggtagagtctatcacgcggcgtcgtgcgacgcggttcgtggtatgctcttcgcattatacgccaccgcgctcaacgtcgactctataatcactcatgtcatatcgagattgatggtagtaatcacggaggaatacatatcgcagagcacagaatgaccgagacggcgatgcactggngagatatcgatatgtggtgctctcnccgtgttgattgagtcgtgagggtgtgatggctcggtcgtgtcgctctaatggtatatcgacgatactaacataatatgcgtctgaatcgcaaggagatagtgtcgacttcatcatctaatcagagcctgctgtgacagtgagactgagtcgcgtcacgacgnaggtgccagtgcacatcgttacgcacttgtgtacgcaacgtataagaagacagaacgcgcgaggagtgcgtacgcgacgcatctctacatatctcttctntatacgtgctgatcatctcctctgctcgcaacgcgcggaacggtgatgctacanagttgttgcgatatggtgtgagcctgcnatcgcgacggtgtacgggtggtgtgatggntgtgtgtataggtgtgatgtgaagagactnagagtcagtgagatcgtcgacaggcgtctgagaggctgtacgcagtggcaaggtgcgtgtctcgtgtagatngngtacacncacgcgcagctctacgagagtagcgtcgactctgatagcgctcgctcacaantaaatagactgtctcgactnctctataatcattggatgtacgctgcgctatctngttgcgtctgtggtgggctcgtcgcactgagtatatattctgcatagtcgcggcgtcagtctgattcttcacgtgtctagtaacgcgagtgcaggatatgatatacgccatgcatcttctctgtaggcgncggcacacgcgacgagtagatgtctatgatttggctgtgcgtgtgatatgaccgcgatcgctgtgatgtcggactggcgcgtctgcatggtcgcgagaatatgcgtcgactcttagatggatgtcactntagtgtcgctgtctgacgcgctccggccgcgtacgctgagtactaatctcagtggtgtnatgatcgatcagtgttgcggcgctgatagctagcggcacgaacgcatacagatcacgttcgatccgcgctgaacctgtacgatctaactaagccaatgtcgtggttatcagatcgatgacgaacgagaagcgtatcaagtgcagagcgacttcacgttacgctactctttacaacgccatgcgcatgcactgatatatgtcactgtctgcggtattantcgcgtgtctactgcatatgtgacgttcgnaccgtgtcgtcgcggccntgcgtgttgtccgagaccgtgatatgtcaatatcgagagagcagtttngagacgtgcacagatcaccgacgcatagacgcgatctgcgacgtgagtagatcntgcgagcgttgatccatatagtcgtagcgtcgcactgcgctgcgcgnggcttcntctacatagagctgtcctgtgntgtcnagtaataagtgagtctgttgcgtgctgatagtatagcagtgagatacgacaatcacgcgacgtcgtcgagccgtantnagtagtccatcagctacagtgcgtcagcatacagcctcgactncgacganntagacagctcng

SEQ ID NO: 4924 - DNA, 701 bp, Glycine max
  misc_feature (104)..(143): n is a, c, g, or t
  misc_feature (176)..(180): n is a, c, g, or t
  misc_feature (340)..(345): n is a, c, g, or t
  Probeset Number=SeqID_14703
gagtttaagtgcatcgttgatactataagatgtaaatgtgtaggagtttcttcaagcctcggaaccatcattttactcctcgttttgtggtggttgaacaaagnnnnnnnnnnnnnnnnnnnnnnnnnnnnnnnnnnnnnnnncttcaaacaaaatggaggattattgttaaatcnnnnnctctcttcaggagaagccaatgttgacaaaattaaactctttactctaaaggacttagacaaggccactgatcactttaatataaatagagtactcggaaagggaggccaaggtactgtttacaaagggatgctagtagatggaaatatagttgcagtgnnnnnntttaaggtcaacggaaatgttgaagaattcatcaacgaatttgtcattctctcacaaattaaccacagaaatgtggttaagttgttaggatgttgtttggagaccgaaatcccattgcttgtttatgaattcattcccaatggtaacctttatgaatatttacttggacaaaatgatgagttaccaatgacatggggtatgcgtgtgagaaaatacactgaagtggtgggagctataatgtatttgcccttgtaggctttgtgaacccgtccactcatgggccttgcagaccatatctatcgctccggaggtgaaaaggcaggaaaaggactcgttccagctctcacgaggtcttg

SEQ ID NO: 4925 - DNA, 1335 bp, Glycine max
  misc_feature (25)..(25): n is a, c, g, or t
  misc_feature (28)..(28): n is a, c, g, or t
  misc_feature (79)..(81): n is a, c, g, or t
  misc_feature (133)..(133): n is a, c, g, or t
  Peptide Sequence Number=SeqID_7198
  Probeset Number=SeqID_14704
attgggagtttggagtcgccccccnccnccctgcccccctccgttgttcctttccccccccacacacaaaaaagaagtnnncctgagtgagaatagtgatgacacacttattctaatttcattctttcgttgnctttgaatttcccactctctcctctctttgtgtgtgccactcgcctattttctccctctactttttgtgcattgtacatgttgtaaaaggtggaaacagagccggacagatgggtgttggcggtgttttgtgggtgtggttgagttgcacagaccagtcttcattgttgctgcggcccgctccgctgcatccgtcccccgctcattgtttatttatctatattgttttacagacatgacaacaccatgtgaaacgaacgcatcacacaagtcatcgtagccgccctatcgcacgattatagatactctctgttgaatatattatcagagatcatatacatacagtatttttcttttcttctcaccccgcgccccacacccacacgagagagtggtgttagtagatgagttatattctagctcctaagaaacaaatatgtatatatgattgattattacaaacataatattagtgtctcctcgctcgcctcctcccccgcctcacttctaatatctaacataatatcttcaatatatttttagtgtctcatttctgtttatatcgtatattaataaaacaattgcaacacaacatactcacactcatgtttctgctcgcactcctatttgtttaagattcatcactcctgatcctgtgtatgtagtctattatttgcactcgtgtatcctgcgctacatatacattccttctgagcactctgtgtttatattattgtatatctctttttttgtgtctctatttacttcctttctctctcattgttctctcgtcttgcttcttattctctcgtcacttgactgcttatccctctctcgtctcgccacctcgccctcctactctcgcgtgatcatccacggtgtcatgtctattatatgcgtgcatactactatcattatatgtactctgtcctactccgccgagctacacatactcctgcgatcagttatcatgctctctcgtccgcttgtgtatccgcccacatcaccactcatgccaacacctctcgcaactctcatcctacatatcatcacttactataatattcatctaatatctctctgatctcttacctctgcgtcatcatgtcactctatacatctctcctactcctcatctccctttactgcgtatcttcctctcgtctctctccatgtctccatctctcatctcttctctcgctg

SEQ ID NO: 4926 - DNA, 1744 bp, Glycine max
  misc_feature (11)..(11): n is a, c, g, or t
  misc_feature (39)..(39): n is a, c, g, or t
  misc_feature (278)..(278): n is a, c, g, or t
  misc_feature (373)..(373): n is a, c, g, or t
  misc_feature (415)..(415): n is a, c, g, or t
  misc_feature (425)..(425): n is a, c, g, or t
  misc_feature (481)..(481): n is a, c, g, or t
  misc_feature (1677)..(1677): n is a, c, g, or t
  Probeset Number=SeqID_14705
ccaaccgctcnatgctcacgatccgctcaatctaccacncgcacatcatatcatgctcgcgctacgtcactcattccctcgcgtcctgggcacagtctctcatctttatcgtcaagcattccttgctcacgaccttctacctcctatcgtactgcgtagacgccacacactagtcagtcgatatgaatatctcacacgcttgctatggagaagcgcgtcgatgctctcataatacacacatgctccagtgctccgtcgtacggtaatctcaccgttanctccgcagccgtcgtataccagcgtcgcagtgctctgcctctcgtactgggtcacgtatcactcgcatatgctgtctcggcactgatctacctanctgtactcgacctgtgcgagtgtgtacgtctgaccgacagtngcgcgccgancgatgctgtcgtggagcctccacgagataactatatatcagttgcacgcgcgctantcgtaaatactagcccgtgacgtggccgcgcgatatatatatataaactacatctcgcagcgcgactactgagtctcagtgcactccgggtcacgtaagagcgacgagacaagacatgacacgcagatactatcgtccggcgagcgccgtgctggcgctcgcatgcggtcctatctacttataacacgcacgcgctccctcgctctccggcctgaccaccatcgcatctggcgaatgcgcgcacactacagattctcgcttgccgaccgccgctcagcgtcgcgcgggaatcacgaaatcaggcacctcggactcaacggcgtggcagtctcgcaccaatatgtgcggcttacgtatcgttggcgctcggcgtcgcgttacgattagtgctcggtcggacttcattcgttgcaggcgcacgaattctatcgtgattcgtccttcaccccgtcgcccgcatcataacaacgtgcgcgtgtgccgccaccatacccggtactacacatatcaaatccagcgcgcgcggggcggcattgctgttaattctgcacttttattcctgtggctcggttcactgggccggtgaagcaagtggctcggtcgtatgttatgtctgcttgtctctacgcttttatcgacgctgcgaaggtgcggcgttgcgcctgccgacgtaattttatttattagatgatctcgtatagtgggggtgtgctgggtatatcggcgtccgtgtaattaatgagtttcggtcttccggcctcacccctcaaccacggggcccgggccggccccccgcgttggagctatttgcgttccgcggtcttgcgcagcctaaatattagtctccgggcttagtaaccacccaatgggcggcaagaatataatgctcaatcggtgatatacatagatgatatattggtgcaattttattcgtgtcgaataactaaattaatacgttcccggtcccacctggcattatagttgcggggtatataagaggtttgtgcgctcttccatgcgttcagtcctatatataacggaccgttgcgtacgcgcccaagaccctcgctccgccgcggggggaaatattccggtgtctctcacctcactctctttcttctttgtggggaaaatactctgcgccctttttctttcccccctccgacctctccccttcctacacacccgcaaccgtnggcccatccgcatccccactcgcgccacacccaagtcacaccctcccagacttcctctctcctcgcc

SEQ ID NO: 4927 - DNA, 1780 bp, Glycine max
  misc_feature (11)..(11): n is a, c, g, or t
  misc_feature (14)..(14): n is a, c, g, or t
  misc_feature (27)..(27): n is a, c, g, or t
  misc_feature (67)..(67): n is a, c, g, or t
  misc_feature (87)..(87): n is a, c, g, or t
  misc_feature (90)..(90): n is a, c, g, or t
  misc_feature (113)..(113): n is a, c, g, or t
  misc_feature (127)..(129): n is a, c, g, or t
  misc_feature (335)..(335): n is a, c, g, or t
  misc_feature (631)..(631): n is a, c, g, or t
  misc_feature (636)..(636): n is a, c, g, or t
  misc_feature (672)..(672): n is a, c, g, or t
  misc_feature (715)..(715): n is a, c, g, or t
  misc_feature (722)..(722): n is a, c, g, or t
  misc_feature (793)..(793): n is a, c, g, or t
  misc_feature (795)..(795): n is a, c, g, or t
  misc_feature (888)..(888): n is a, c, g, or t
  misc_feature (925)..(925): n is a, c, g, or t
  misc_feature (959)..(960): n is a, c, g, or t
  misc_feature (962)..(965): n is a, c, g, or t
  misc_feature (982)..(982): n is a, c, g, or t
  misc_feature (989)..(989): n is a, c, g, or t
  misc_feature (991)..(991): n is a, c, g, or t
  misc_feature (1034)..(1034): n is a, c, g, or t
  misc_feature (1055)..(1056): n is a, c, g, or t
  misc_feature (1069)..(1069): n is a, c, g, or t
  misc_feature (1087)..(1087): n is a, c, g, or t
  misc_feature (1103)..(1103): n is a, c, g, or t
  misc_feature (1109)..(1109): n is a, c, g, or t
  misc_feature (1133)..(1134): n is a, c, g, or t
  misc_feature (1136)..(1136): n is a, c, g, or t
  misc_feature (1175)..(1175): n is a, c, g, or t
  misc_feature (1229)..(1229): n is a, c, g, or t
  misc_feature (1261)..(1261): n is a, c, g, or t
  misc_feature (1265)..(1266): n is a, c, g, or t
  misc_feature (1270)..(1274): n is a, c, g, or t
  misc_feature (1302)..(1302): n is a, c, g, or t
  misc_feature (1305)..(1305): n is a, c, g, or t
  misc_feature (1330)..(1330): n is a, c, g, or t
  misc_feature (1333)..(1333): n is a, c, g, or t
  misc_feature (1348)..(1348): n is a, c, g, or t
  misc_feature (1354)..(1358): n is a, c, g, or t
  misc_feature (1360)..(1360): n is a, c, g, or t
  misc_feature (1382)..(1382): n is a, c, g, or t
  misc_feature (1388)..(1391): n is a, c, g, or t
  misc_feature (1398)..(1398): n is a, c, g, or t
  misc_feature (1429)..(1429): n is a, c, g, or t
  misc_feature (1431)..(1431): n is a, c, g, or t
  misc_feature (1460)..(1460): n is a, c, g, or t
  misc_feature (1462)..(1462): n is a, c, g, or t
  misc_feature (1464)..(1470): n is a, c, g, or t
  misc_feature (1485)..(1485): n is a, c, g, or t
  misc_feature (1507)..(1510): n is a, c, g, or t
  misc_feature (1513)..(1513): n is a, c, g, or t
  misc_feature (1534)..(1534): n is a, c, g, or t
  misc_feature (1536)..(1536): n is a, c, g, or t
  misc_feature (1539)..(1539): n is a, c, g, or t
  misc_feature (1541)..(1542): n is a, c, g, or t
  misc_feature (1555)..(1556): n is a, c, g, or t
  misc_feature (1559)..(1560): n is a, c, g, or t
  misc_feature (1576)..(1577): n is a, c, g, or t
  misc_feature (1582)..(1582): n is a, c, g, or t
  misc_feature (1584)..(1584): n is a, c, g, or t
  misc_feature (1609)..(1609): n is a, c, g, or t
  misc_feature (1611)..(1611): n is a, c, g, or t
  misc_feature (1613)..(1616): n is a, c, g, or t
  misc_feature (1618)..(1620): n is a, c, g, or t
  misc_feature (1623)..(1623): n is a, c, g, or t
  misc_feature (1637)..(1637): n is a, c, g, or t
  misc_feature (1671)..(1678): n is a, c, g, or t
  misc_feature (1680)..(1681): n is a, c, g, or t
  misc_feature (1693)..(1696): n is a, c, g, or t
  misc_feature (1698)..(1698): n is a, c, g, or t
  misc_feature (1713)..(1713): n is a, c, g, or t
  misc_feature (1718)..(1718): n is a, c, g, or t
  misc_feature (1723)..(1724): n is a, c, g, or t
  misc_feature (1764)..(1764): n is a, c, g, or t
  misc_feature (1766)..(1766): n is a, c, g, or t
  misc_feature (1770)..(1770): n is a, c, g, or t
  Peptide Sequence Number=SeqID_7199
  Probeset Number=SeqID_14706
gtgtttttttnttnggtgttgtttttncctgtggctggttgcgacatcggtagagctccgcacaggncttgcgagagtagcagaagnagntgtgtgagataatattagtattntgggtggccgccannnaacactagtatgtcccgcaatataatgagcgctgagcggtgcggcctccccttcgtctgtagtatgtgtgctgagcgaggagcgaggcgcaccgctcccgcacctcagatagattcttgtaggcatggacatatgatcagaacgcagaaagtactggcgatccgcacgaccggcttgtccgcacaaccggttgtggtgttaggggnagtcacgtcctcactcacggtgacactcatagtgtgatgtagatagaggggcgtggtgtattgatagagagagaggtctgtgtgacgcaagagccgctgatgtcaccatacctctcttcctacatcgtcccatacggctgcgagactaggtatgaatacgtggagatgtatacaaccctcgtgatgtgtaggagttgaagacgaaccctcttgattcatactcgcgatccacatgtggttgtgcctgtgagtgtacacgtcactctgtatggtgagaagcgaggatcaatctgccnatgcnagcatcttgtcgtagcatggtatgtattgatgcgtnctcactatatacgtcgtaatctcaacaatatatatttagtctngtgtgcngtgcgggtcgtgtcggcgtcgtgtgccgtgcgcgtggcgtgcggcgtgagtctgtgtaccgttgtgtttcngncgcgagacgatgtcgcattaattgactgactcgacgacagaatgtgtgtgtcgacgtatatagtaatacctatgtacattttgtgtgatctgnctcagcgtttagtgcagtagacagctatgagcagagncgcagacgcagacgcccgcgacgtcttacataannannnntattatcataatgatcnagacgcncncggacgtgagtggttgacgcgcgacgagtcagacgcggactgngagatgacttatggttgtgtnnatgagtatattgnatgctccgcacacgagtntatgacagtgtgtatntgatgnacgcgcgtgatataagtactgacnncncgactatacacgatcgctccactcgagctgtcgcgcgantgcattcttatatgactgtactacataactgatagtctcgtcgatctgttgtcngagcgagagcgtcgagcgtactctataaagtntcgnncggnnnnncgcccgctgcagcgatgtcacgcgcgtngcntactaggccgtatctagcgcgagcnccntacgtatgaatgctnactcgnnnnntngtcgctcttcactatatcatgngtcttnnnnttcgtcncgttgtgcctgagtagctaagtgctgtgctncnactgactactcactaccagagtctgaagntngnnnnnnntgtgacaccgcgcgncgcatacactactgtatgtggnnnncgntctacgaacgagatatcgctncngancnncgtggtagatatnncanntgcacatacacagtanntttgntntcatagtttacatcacgacacatcntncnnnncnnnacntcaccctgaactcnagactgtatagaatgatgtgcttcatggctgcgnnnnnnnntnnctcactatcccnnnntntcgatgaacgactanctcangtgtnncacgttgaatgctactgctgtcatgctagcgacagtacgnancgtncagataacgg

SEQ ID NO: 4928 - DNA, 277 bp, Glycine max
  Probeset Number=SeqID_14707
aaacggatccgatctaggtcgtctcttcttcttcttcttcttcttcttcgatatctatctccatcgtggatcgaagagctaaggtggaacatggacaaaggcaaagcagtgatgggtgctggccggagatgggccgtcgatttctccgatcaatctaccgttccatcttcccgcgacatcctcgatccgcctggcttctctcgtgctcctcccgaacaggatgattcagcaacgagccgccaaaagaaagacgctgaagctaattggaaacttcaga

SEQ ID NO: 4929 - DNA, 594 bp, Glycine max
  Peptide Sequence Number=SeqID_7200
  Probeset Number=SeqID_14708
tttttttttttttttttttataggaaaaagtaatcgtttatatgaataaaaaaagattttcgaacaaaaaaatttatcatattaactaatactaacaacatctacttagtacaataattcagcaaaaaaatttacttagtacaataatttataaaatcacttataaaaatagataataaaatgtactactaacaaacgtgaattaacatttctctcacgcgacaaattagatgtctccaaagtcattattcacctacaggggagccacttacgaaattgagttagttacgctgatgcatcatcaaccaatgaggtgccaccaaaagcaaagccaatagaataggagtctccacttcaagttgcaccaaaaaaacaaggtcaaaactaaaaggaaatgtgaagtttcataccatcaaggaatgggaacccaacacaagaacgtggaatttaaaattgaacattacagaaaaaacatctccaaatcgatctacaccctcttatatatttaaagatggtagtactaatctctaaggcaacaaactgaaccagagccaacccttttcttctcccttgttttgaacaccctcctcgtgc

SEQ ID NO: 4930 - DNA, 500 bp, Glycine max
  misc_feature (23)..(23): n is a, c, g, or t
  misc_feature (137)..(138): n is a, c, g, or t
  Probeset Number=SeqID_14709
aattaatgttgagtggtggactntgtacagggtcacaactctttaggcttctactccatctctaatatttagtcttagtagagtgagatttctcttcaacaataggaatatctagtttgatacaagttaacggtganntttaattataagaaaatttcgctagggtatagctgacgctctctttaaattccagatcgcgcccgaccacacacccacaaaattcaattcgattaagagagcatacttttactctttaatatgagaatagatattttcttccgcttaacaggtgtaactttatatcttgttttagttaccagacgagagaaagtctcttctctatctctaaattgtacaattaaagactatgtgggtgttgcaccaactcgaaaccatataatttgatacaaagatagaagaatggtaaagaatgtatatatataagttaagatagtctgaatgggaaaactacattcacactcgagccgattcggctcgag

SEQ ID NO: 4931 - DNA, 1466 bp, Glycine max
  misc_feature (1)..(3): n is a, c, g, or t
  misc_feature (8)..(28): n is a, c, g, or t
  misc_feature (40)..(40): n is a, c, g, or t
  misc_feature (43)..(44): n is a, c, g, or t
  misc_feature (53)..(54): n is a, c, g, or t
  misc_feature (62)..(62): n is a, c, g, or t
  misc_feature (68)..(68): n is a, c, g, or t
  misc_feature (1172)..(1172): n is a, c, g, or t
  misc_feature (1379)..(1379): n is a, c, g, or t
  Peptide Sequence Number=SeqID_7201
  Probeset Number=SeqID_14710
nnnccccnnnnnnnnnnnnnnnnnnnnnaacccccccccnccnnccgcaccanncccaaaantaacanctaaacaagctgggtagactccaccgacgaggtgcgcgagcgctcgtcttagtaactaaatggggatgcggcccgggggctgcggcgtaaattccgggccgcagtagtgatgtatattagggtggaggcgcgggaggcgaagagagacgggagcacgcgacagcacagcaaccccgcagagaggctccgcgcgcacaccaacacccagaatcagcgactattctccacacaacacacgccggacataccggagacgagccagagaggcgcagtactaggcacgcccacccaacacacgcaacaccacgcgcttaccccgctcgcccacagcaaagggcgtcttgtccccgaaggccgcacgcaccccaccacagcacagatacacaacaaaacaaatacgacacgccacaaacaaccccccctgcaacgccccacgtattccctccaatctctattcatctattacaggccacaacatacctcacaaaataacaccaaaaactaacgcttctccctaccctacctaccctcgctataacgctcctaattatatctatcaccgcccacaaaaaatattatacatagacagaactaagaacaacaaacattaaagacagattccacactctcattttacaatacacatacccctacattagtcaaatatattaataaccttcagtttgtacgcatagagagacgacgcggacgcagcgcgcgtgggcaggagaggataggggtagcaagggtgtggcgggccctggcgaaccggcacaccaactgttcgctctatttaataatccccccaccgtatttatcgggctggtattattagggggtgcggcggagcgaggagggagtgagaggggggtgagcctcagcggcatgaagagagatagaggatttgtatgttcatgcgagtgggaggtgcgaccggtgatcggatcctaatgctggctccgcgagtgtgccacgccgctcaccaaagacgagacgagcaccgaatcaatgtcgtgtcccagggtaaggtatgcatacaggagcgcgtggttccgccgccgctcagcgggtggccgcaccacccgcgctgaagcgtgatctaanataatgcgggcgcggccactacccagccttaccagtgctccacagtgaaacaccaacattccacatccgggcgcacgcgcacccgtaatactacccatactactaacgctatacaatcattgatcaatcgctcctaagatctctttactttccgctctccactcaccacgcagcggtagtcgagactgtcagtgggatgtaccgtgntggtgtagtcggtgggtcgcgtttgttagcggtctatattcaatgatgtatcatgctacatacgagcgtgccaggcacataagtatg

SEQ ID NO: 4932 - DNA, 1367 bp, Glycine max
  misc_feature (1)..(1): n is a, c, g, or t
  misc_feature (128)..(128): n is a, c, g, or t
  misc_feature (541)..(541): n is a, c, g, or t
  misc_feature (577)..(577): n is a, c, g, or t
  misc_feature (1149)..(1149): n is a, c, g, or t
  misc_feature (1245)..(1245): n is a, c, g, or t
  misc_feature (1298)..(1298): n is a, c, g, or t
  misc_feature (1301)..(1301): n is a, c, g, or t
  misc_feature (1316)..(1316): n is a, c, g, or t
  misc_feature (1337)..(1351): n is a, c, g, or t
  misc_feature (1361)..(1363): n is a, c, g, or t
  Probeset Number=SeqID_14711
natcgtattggcgtatagaggtgtgatttagatgtagtcgatcgagtcgtcatatgtattatctattttcgatccaccactgtcgcgttcatctcattgtgtatgtatacgatggtcatattagtgtngtgagcgccgtagcatgcgcgtaagtgatgactcgagaggagtacacggtaaatctcggagtgagtattctatcagtgatcagtcacgagtgaatatgagtggtgtagaggtggtgtcgtatgagtagtctatcgacgatcacgagcggcgggactctcagtatataccacacaggcgcaatagagttatcattctgatggagataaggagttattgtagggatcatagcaagataccgcagagtgtcggacctgtgacggacgtgaatatgtgtcctctcactagcaggccgagagggagcaggacgccagagcggcgcgtgactccttctgaatatccgcctcgaggcgagcagtcgcatcttataaatatcatctatcagtttcttttgaggggtgtgaggttcggtcgncgcgttttgtgaggttcgttgccatgcatagtaggngattaaactcaaacaaaactaactatcagtatatgcgagcatgtgagaggctccagacacccagcgcgcattaacacacctataagatatgtaccgacctcacttgtgtcttgccgtcataaaccgcgacatagcagagcccgcaagcaacaggaagaggagcggaacacgcgaccaccaccgtcgcgccccccacccacgtccacaccacaccgcgccaccgcagaacagcacggaaagcataccgcagccaagacacagccgagaggagatactaatccaatatcaataaatagtataatatcactaattaaatagcgacagcaccacaccaagcgcaggccgtcgagcgcacgggcgacgcgcacccgccctagcagagacacagcgccggcgccgtacagagagtgataatgagtgtttctatatcttcccatatagcatctgtgggtcttgtgtcccctcccctcgcgtacgacattccggcgctcgaattggtctaatagacgcgaaatccgcgtctattctgctacatttctcccccgccatcctattcttcacctgcgcgtgantatgagagtattaggtgaaggtgagagtgttacattcgttcattaaaattacccctcaccagatacgcatcgaccgccaacgtctacttccactantacgccgcacagccgccgagacaactagctgatattaccttaaattatattgngtntgtttgggtttaacnaaaaccccatccttccacaannnnnnnnnnnnnnnaacacccttnnncccc

SEQ ID NO: 4933 - DNA, 424 bp, Glycine max
  Peptide Sequence Number=SeqID_7202
  Probeset Number=SeqID_14712
gtctcttcaaaatcttaaccaagaggatggacatattcaagtacaggttctaactggacacaatcaaactggctctttccagactcaccctaacatgaataaagaattttctgccaatgattatatacttggcctaaaacatcccaacaggcctcttcccactggcaaagcaagtgatgcagcaggtgttgatttttctacttgtataatgcatactactgattacttaatattgtcttttactatcatctgctggacttgttcttctggaaaccaaacttatgtctgcattgaatatgaggctatatcaatgtaggatctgaataatggtgtgatcttactacctcttccatctcttctagaagctccatactgtatgcacactgatggtgaatggatgtattatcttaagcattccatattg

SEQ ID NO: 4934 - DNA, 372 bp, Glycine max
  Peptide Sequence Number=SeqID_7203
  Probeset Number=SeqID_14713
atctcttcaagtggtgttctcacagctcaacatgattggacttgttcaggtttgtttgttggccgtggtggctgtgacactcgctgccccccagaacaagcccatcgccatcctcagacaggaatctgacggccccaaccctgatggatcataccgctatgcttttgacactgagaatggtatccatggagaggagtctggacagctgctgaacgctggatcagaagctgaggccatcgccgtacaaggcgccagcagctacacgtctccggagggtcaagtaatcaacttgcagtacactgcaggcgagcagggcttcgtccccgtaggtgatcacctccccacatctcctcccatccctgaggctatcca

SEQ ID NO: 4935 - DNA, 339 bp, Glycine max
  Peptide Sequence Number=SeqID_7204
  Probeset Number=SeqID_14714
ccacaaaaattttagtaaatggttgctggatgggactccatcgtgaccctgatgtgtaggcgagaacattgaaaaagctcttacgtcatgctgtcgtaaacactgaggggggagggggatgagatatccgccgacaaaaattgcgtatatatacaggctgtggacgctgcagacgtgctttgttcattgaggctacgcattagctttttataaggaataccgacatacctgctttacagacggatggcgatccagcggccactgccagtcatctctgtaggttgcggaatcaccgagcgcatgctcgctagcatgtgatacgtgtttcccgagtgaaag

SEQ ID NO: 4936 - DNA, 1418 bp, Glycine max
  misc_feature (24)..(24): n is a, c, g, or t
  misc_feature (136)..(136): n is a, c, g, or t
  misc_feature (144)..(144): n is a, c, g, or t
  misc_feature (164)..(164): n is a, c, g, or t
  misc_feature (285)..(285): n is a, c, g, or t
  misc_feature (304)..(304): n is a, c, g, or t
  misc_feature (338)..(338): n is a, c, g, or t
  misc_feature (663)..(663): n is a, c, g, or t
  misc_feature (734)..(735): n is a, c, g, or t
  misc_feature (741)..(742): n is a, c, g, or t
  misc_feature (812)..(812): n is a, c, g, or t
  misc_feature (962)..(962): n is a, c, g, or t
  misc_feature (964)..(964): n is a, c, g, or t
  misc_feature (1322)..(1322): n is a, c, g, or t
  misc_feature (1329)..(1329): n is a, c, g, or t
  misc_feature (1331)..(1331): n is a, c, g, or t
  misc_feature (1337)..(1337): n is a, c, g, or t
  misc_feature (1377)..(1377): n is a, c, g, or t
  misc_feature (1383)..(1383): n is a, c, g, or t
  misc_feature (1391)..(1391): n is a, c, g, or t
  misc_feature (1398)..(1398): n is a, c, g, or t
  misc_feature (1402)..(1402): n is a, c, g, or t
  misc_feature (1418)..(1418): n is a, c, g, or t
  Peptide Sequence Number=SeqID_7205
  Probeset Number=SeqID_14715
cgacgcgcgccgcagctgacgacncctcgctagtcacgtccgctacgcaccgcagacgtccacggctccatcgaagcactgctcccgctccggtccgatataacccatccactgcacatgccacgcaagcggcgtnagtcgganagagctagcagacgtgctantcgacagtggcagcgccgccgcgctgatagcaatcacaacaccaacaatacaaacacacagaagatcatatatgtaacggcgtgtagcgagatatatccagtagacaatgactgcctaagncgatacagagtatatatancggtacgcacacgccgcccgctgtgctgcgcacngtgctcgtctacacgacggcgccgcacgagatgatcttcgcgccccgggtcttagccagcgtataatgcttcatccgagctgacagcgaatgtaactctgcccgcacgcacgccttcgtctgggtgatgacgcggtatatcgcacgcatgccgcatatcacacttctatacacgctaatgataatgcaacagatgagagcgataggtggcgggttgctggcccacgcgcgcgcacacgcaccatacatatctatttgtatattggtgcggagcgaatcacaccacgccccacaccaacacctactacgtctgccataagtggatngtgatgaggagagaggaagagcagcgagagggcaccgctgattacatagtgagtggttgtgaatattatannttccgnntatagtgttatattttacactataaacataacaacatcagaacgtccctccaccagccacaccacatatntatttatagtatttatgagtgagccgaatgaatggtgatcgcggtcggctctcgtcgttcttgcaggttaagcgaacagaccatagcacgagcacgtgtgatacaacataattataatatgcaatgaattccgaggacaacgaaggagangnaagaagatgacagtgaaaggggagcacgcgagacgctcgagaatagcaaactcacagatggagatttagtagttgcaatgagagagcagaaacaagaatgcacaatagaaacatacgtaccgccgaccaaggatatatgtcctcaccttgtaccttcgttttgccaccatacacacaatatgaagagaacgcgtactgctatatgattatattagtatgccgtacgattgcgcacaacaacggagcagaaaacaagtaatcatgaccaacgtgcgcgcacgggtacgccgaaacgcaagtgttagaggcgcgtcctccgcttctctgcgggcccagctgttgtgtttgtccgctaggnccgcctngnatgagnaaacaagaaagaaaaagaacccagcctcctcttttaatantccctntttacacnccacaanaaanaaattaaataaaaaan

SEQ ID NO: 4937 - DNA, 1607 bp, Glycine max
  misc_feature (1)..(19): n is a, c, g, or t
  misc_feature (24)..(26): n is a, c, g, or t
  misc_feature (38)..(38): n is a, c, g, or t
  misc_feature (55)..(55): n is a, c, g, or t
  misc_feature (82)..(82): n is a, c, g, or t
  misc_feature (86)..(86): n is a, c, g, or t
  misc_feature (448)..(448): n is a, c, g, or t
  misc_feature (770)..(770): n is a, c, g, or t
  misc_feature (978)..(978): n is a, c, g, or t
  misc_feature (1215)..(1215): n is a, c, g, or t
  misc_feature (1228)..(1228): n is a, c, g, or t
  misc_feature (1234)..(1234): n is a, c, g, or t
  misc_feature (1242)..(1242): n is a, c, g, or t
  misc_feature (1246)..(1246): n is a, c, g, or t
  misc_feature (1252)..(1252): n is a, c, g, or t
  misc_feature (1297)..(1297): n is a, c, g, or t
  misc_feature (1318)..(1319): n is a, c, g, or t
  misc_feature (1351)..(1351): n is a, c, g, or t
  misc_feature (1357)..(1357): n is a, c, g, or t
  misc_feature (1466)..(1466): n is a, c, g, or t
  misc_feature (1510)..(1510): n is a, c, g, or t
  misc_feature (1520)..(1520): n is a, c, g, or t
  misc_feature (1522)..(1522): n is a, c, g, or t
  misc_feature (1582)..(1584): n is a, c, g, or t
  misc_feature (1598)..(1598): n is a, c, g, or t
  Probeset Number=SeqID_14716
nnnnnnnnnnnnnnnnnnnccccnnnccaaaccctttnccggggcctccggaganctgccacccacacaacattggactttnagcncgagttatgttagcctggtgtatcctgcgcgagggagtcgcggcgtactgtcgtgtttggcatagtgtgagctgggatcgcgcatcgacgccgcgcggtgtggattgggggtagtacggttgtgtcaggaccgtaagctgttagtcatctcgcctcgtgacactttcttatgatctcatctatctgtcgctgtgtttgtatgtgttacgaatgaggacgcacatcgcaggcgcgaactgagagctgtcggaatttgccagtgatctgtagtgcatgtggattgctagtgggtgtggctgcgcgagagccacaggcaggtgcgggagaggtgtgacggatgaagatcgacagtataactcaanagacgagccagataaagagaccacaacgactcacacgggtcagtcctctgcgctatgtgtcgcctcgcacttcagctcctccgcgtgaggcgcgcagtgtttggttgtgtgattgtgtcgtctccgagacgtgtccattacctgtctctccactccattaccttgtctcatgccctctgctctctaggagagtttgcagtggacagtttctacgattattatctattaccatatcattatcactctctctaggctgtgtaccctctctaccctcacaacactcgtctgtcagtggtggcaaagcgaggtgggcgcggcaagnggacgactgagagaagacatcgagactcagacgacatctccgcatctcgaagcgtcgtcgcgagtgaggcacgttacgcgtgcctggattgttatagggtggtagatgtgtgtgttggcttcgttgtgacgtgtgtgtcgctggtgatgctgtgacgactgaggcgatgatgaattatcacgtcgctgtcgctcagctgctccgcggntactatggtcttgccgcgcgttgagaggcgtgcggcgcgcgagcgcgggtgacgtagggtggtgggcggagtgctgagtagtgaaagtggagatctgagaggacattatgatatagtgaagccgagtgtcgaacttcgtgcgtaccgacatacagaccgtgcgtcacactgtgaccgtatgttgtgacttatgacggcacgcgcgacacggacatgaggtatatactcgcgcgacantacgatagcgcgncacacntcgtggantgantcgttnttacatctctcagcgcctacgctcagaggtcgagcgcggagaggnagcaggctgagggggtccatnnacagcggagagagctagtgtgtgaggtaggcntgcgtnggtcgtgacatcgtgcgcacacagtgagcggtacacgtcagcgtagcgtgggtcgcgcgctatcttcgacctggtagggacagacgacggtgtacccactcgagtgtgnagtgcgtgagcgagtgtgactgcagcgtcgggacgttgagagantgaagtaggngngatcgcgacggcgggacggatatgggcgtcgcagcgcggagcgattgcgtgactgagaannnatcatcgccttgtnagcagtaag

SEQ ID NO: 4938 - DNA, 448 bp, Glycine max
  misc_feature (417)..(417): n is a, c, g, or t
  misc_feature (424)..(424): n is a, c, g, or t
  misc_feature (432)..(432): n is a, c, g, or t
  Peptide Sequence Number=SeqID_7206
  Probeset Number=SeqID_14717
aacatcttatcttttcctctctctctctctttgggggattatttttttttcaatcggatcgcgaagatgatagatatcagtcgagtccagaaagagctccaagattgcgagaaagacagagactcctcgggcatccgggtctgcccgaaatccgataaccttacccgactcaccggaaccatcccgggtccaatcggaactccttacgaaggcggaacctttcagatcgatatcaccattccagaagggtatccctttgagcctccaaagatgcaattttcaaccaaagtttggcacccgaacatcagtagccaaagcggggcaatatgcttggatgtcttgaaagaccagtggagtccagctcttactttgaagaccgctcttgtttcagtccaggcattactctctgcaccagancctaaanaccctcangatgctgttgttgctg

SEQ ID NO: 4939 - DNA, 725 bp, Glycine max
  misc_feature (622)..(622): n is a, c, g, or t
  misc_feature (633)..(633): n is a, c, g, or t
  misc_feature (635)..(635): n is a, c, g, or t
  misc_feature (637)..(637): n is a, c, g, or t
  misc_feature (664)..(664): n is a, c, g, or t
  misc_feature (678)..(678): n is a, c, g, or t
  misc_feature (682)..(682): n is a, c, g, or t
  misc_feature (684)..(684): n is a, c, g, or t
  misc_feature (697)..(725): n is a, c, g, or t
  Peptide Sequence Number=SeqID_7207
  Probeset Number=SeqID_14718
gcttcagcatcaacagcactactttttggcacaatccttggtctcattcaagctgcagttcttatatttgcaaccaaacctctgttaggtgttatgggtgtcaaacgagattctcctatgctaaaacctgcagagagctacttaagattgagatcgttcggggcaccagcagtacttctctccttggccatgcaaggcatctttcgagggttcaaggatacaacaactcctttatatgtcatcgtttcgggatatgcattgaatgtcatattggacccaatttttattttcacattgaagttaggcatcaaaggtgcagccattgcacatgttctctcccagtacatgatggcattcactctcttattgatattaatgaaaaaagtgcatctcctacctccaagaataaaggatttacagattttccgatttcttaaaaatggaggattgttgatgctaagggtaatagcagtcacattttgtgttaccttagcacatcattggctgcaggctaggtcaattcccatggctgcatttcaaacatgcctacaggctggtgacatcgtccttcttgcaatggttggctgtgtgtcagcaatctactggtctttatggaaaactntagaaacacancncncacaggccctcaatgatttgttggagngggccttttgtgtnctgntnattgggcgggggnnnnnnnnnnnnnnnnnnnnnnnnnnnnn

SEQ ID NO: 4940 - DNA, 1412 bp, Glycine max
  misc_feature (1)..(1): n is a, c, g, or t
  misc_feature (51)..(51): n is a, c, g, or t
  misc_feature (70)..(70): n is a, c, g, or t
  misc_feature (72)..(72): n is a, c, g, or t
  misc_feature (104)..(104): n is a, c, g, or t
  misc_feature (178)..(178): n is a, c, g, or t
  misc_feature (181)..(181): n is a, c, g, or t
  misc_feature (273)..(273): n is a, c, g, or t
  misc_feature (340)..(340): n is a, c, g, or t
  misc_feature (558)..(558): n is a, c, g, or t
  misc_feature (600)..(600): n is a, c, g, or t
  misc_feature (612)..(612): n is a, c, g, or t
  misc_feature (617)..(617): n is a, c, g, or t
  misc_feature (619)..(620): n is a, c, g, or t
  misc_feature (622)..(622): n is a, c, g, or t
  misc_feature (624)..(624): n is a, c, g, or t
  misc_feature (626)..(626): n is a, c, g, or t
  misc_feature (628)..(628): n is a, c, g, or t
  misc_feature (632)..(633): n is a, c, g, or t
  misc_feature (636)..(636): n is a, c, g, or t
  misc_feature (642)..(642): n is a, c, g, or t
  misc_feature (710)..(710): n is a, c, g, or t
  misc_feature (790)..(790): n is a, c, g, or t
  misc_feature (801)..(801): n is a, c, g, or t
  misc_feature (844)..(844): n is a, c, g, or t
  misc_feature (851)..(851): n is a, c, g, or t
  misc_feature (1024)..(1024): n is a, c, g, or t
  misc_feature (1033)..(1033): n is a, c, g, or t
  misc_feature (1074)..(1074): n is a, c, g, or t
  misc_feature (1078)..(1079): n is a, c, g, or t
  misc_feature (1081)..(1081): n is a, c, g, or t
  misc_feature (1103)..(1103): n is a, c, g, or t
  misc_feature (1180)..(1180): n is a, c, g, or t
  misc_feature (1233)..(1233): n is a, c, g, or t
  misc_feature (1341)..(1342): n is a, c, g, or t
  misc_feature (1344)..(1347): n is a, c, g, or t
  misc_feature (1350)..(1350): n is a, c, g, or t
  misc_feature (1352)..(1356): n is a, c, g, or t
  misc_feature (1361)..(1361): n is a, c, g, or t
  misc_feature (1369)..(1372): n is a, c, g, or t
  misc_feature (1378)..(1378): n is a, c, g, or t
  misc_feature (1390)..(1391): n is a, c, g, or t
  Peptide Sequence Number=SeqID_7208
  Probeset Number=SeqID_14719
ncacacactgagagacgcgtacatgacgtcaccgcgtgcatgtgtctgtcntgcgtgtgtatgtgtcgtntngtctgttgtgttgtgtcgtgtcgtgtgcgtantgcgatgcgcgtcgtgtcataatgtatccgcgtgatgtgcatgagttatcagatataggatctgtgacatatantangtgactatgtaccgataatacgatagcactctatgagtgcagataaggcgagaggcagtcagaatatgtagagtggtgatgtcgcggtctgntgaatagtcacattgtatgagccgcagtcagtgtaatgtgtcatgtaagtgtataggatgtagcacntgcagaatcactccacaatcagagcgcgcgcgcctgagcagctcaggcacgcgtacggacactgacacgcactgtacgtgcaccgtcaaggcagataatgatgatgaatctcgtatgtgacgtgcgatgactcgatcgatggcagatggacatggtcgagtaagatggtgatccgtcacggtagagggaggatcatcactgacatgtcttgtgtgttnttacatgtatgatattgcatgtgatagtatactcatttcatntcttttggtgtnggttntnntntntntntttnnttntctccnctggtagaccacacactacatcgcactgatattcgatatatgcgcctcacgtcatcctaccacttctnctatatgccgcgcttctctagcggtcgtgactactgatctcgactgttatcgtagtcttcaccagctcatttcctctcancaccagagtantatcacgtatcggatgcactcgctcgcgcgttctcgacgccgnaaaatancgcggtggtcgtaacataacaacagcgcgaccttctttcgtgtctctcgcgcgctggtatcatctccacatcacatacacatcacaatactgacatcgagcgtacgccgagcagcagcacggcgggcggtggtgtcgtgttcgtgcgctgttcgtggcagtcctgcgcccagncggactcgncgagcaacgcgtgcatgatagacaagggagaaggatgtgantagnnanaagcagtattggtacggagtanctttgacagatgcaatcagtcagcagagaggcgtatgtagtgcgttggcatgatattagtgtgcggtttgtggtttntcgttcgtcgtctctgtgcgaggtgcaccgcgcacgccgtacatggcgtatgngagggtttagttgtgtggtgtgattatataataatgttctgtctgtcgtgtgcagagggtagtgcatcgtcgtggtctgcgttagctgtagtaagcgtccgcttctcnntnnnnctntnnnnntgggnggtggggnnnngggggnggagggggaggnngcacaacagaaaaacacaaaa

SEQ ID NO: 4941 - DNA, 591 bp, Glycine max
  Probeset Number=SeqID_14720
cgggaggtaacagcagatgatagtatcctgtagagtttggtggcatcatcagatactcctgttgttgtcaacgagggttagtaggctgctccggagaagagcagcagcagctgtcaagaagcataatctgtggtgatgcacgatgatgatcgtattttaggagcagcgtcagcagaagaggtcatccatcattgggcgtcttcttctccaagaagatcatcaagaagggaggtgatgctcctcatagtcagcagtgggaggagctggagtaatgggggggattatgatgattattgttcatcagcccgaggaatatcatcaagaggaggcttcagaagagaagtaagtatcatgtagggtgggaggaggaacaatgatggtgaagaataatagggggaggaggcgtcttttccccatcataggcagtagtagaggaaatagttgttcgtggtaggattctccacccaacaatgatatgatgggaggatattgtggtggggggcatcatttgattattctgtgaagaatataatagtggttgttggctgctcttctgtaataataggcgggaggaataatactacgtcaact

SEQ ID NO: 4942 - DNA, 534 bp, Glycine max
  Peptide Sequence Number=SeqID_7209
  Probeset Number=SeqID_14721
acttaatttattatacaatgtagtgattttgtaattaaatagatgatatactatcgatcagtacaatctattttttttaaataataatattgaattttttcatcgtcattgtttagtttataatagctcttttttctgtcattatatcacatcttacatttatcacttttttttatctctcccttctctaaaagtatatatataaatccttgaccaatgtgagaaaatagtttttttaaactaaaaatagtatatatagtttagttttaaagttagaactttaaaaaaaaaaattacggtgtagattgacttcctgaaagttgactatgcttttgtaaaactaatttttggcaacatttaacagtagggaaaattgggcgtataaaaattactagaaaattaatggtcaaaattggcagaaattgatttcacataagcaaaatcgactttcaagaagtggatttgcaactgcaagtaattttttttgaataaaatttactatcttagtaattttaactactaaaccattttttt

SEQ ID NO: 4943 - DNA, 1458 bp, Glycine max
  misc_feature (21)..(21): n is a, c, g, or t
  misc_feature (109)..(109): n is a, c, g, or t
  misc_feature (249)..(249): n is a, c, g, or t
  misc_feature (286)..(286): n is a, c, g, or t
  misc_feature (868)..(868): n is a, c, g, or t
  misc_feature (993)..(993): n is a, c, g, or t
  misc_feature (1103)..(1103): n is a, c, g, or t
  misc_feature (1217)..(1217): n is a, c, g, or t
  misc_feature (1234)..(1234): n is a, c, g, or t
  misc_feature (1302)..(1302): n is a, c, g, or t
  misc_feature (1404)..(1404): n is a, c, g, or t
  Probeset Number=SeqID_14722
agcgtgtcgagtctaagacgnagtgagccatagtactacagagtactcagtaggggctactccactcatcacagtaagtagcgcactagcaggcagagtccgcagagtngtctcttctcctacagagtgcacgatgctcaccacaactcactaggtcgggaccgtaactcttgatatcgtccacaacgtcgagtccgcatctaggcagtgtctaaccacgtcaaaagcatacatgagctattcatagtngaacacacgaaggtatgagatgagggcgcccgttggngaatcctactcgcgtcagagcgacccacatgatgtaacgcccactatggagcacaagtgtaaagaatatacagagatgggtggagagaaggagagccacatgcacacgtatcctcaatagtcttagaacacaagcgaggcacggtgatcgaccatcctagccaacgcatctattcgcgattattttcgcgggcgaggtcctagcgctgagatactcatcgtacatccgacatggggtgcggagctctaatagaatggagggggatcatctgctcgcatgtccttcactacacgtcgcgatcggcgaggagcttaattctgcaactccatctatacgtctacaccagctctccgggcggcgacaattgctgtaggatagcgtgagagagatcatacttcatagcgcttatgcgagacgatcgctgcgcaatctagcccgggtattctaactcagatcggacatacatcttcaagaccagtcagagagtgtatggacatgggcgtcaaagatagcactcgctctgctgaacacaggtgctagcacaattcgatatactctactccatatgtaccttgcgcctancaaagagacaacaggcatcgcgacggcgcctatgtatcccgtgtgtaaacgtcacgtgaagcgtctagcgtgttcactaggctcattactactatagctctctttagtgtatacactagcagcancgcgcaggccgaatgggatcaccaccaacaatgtacgcgcgtgtgatgtactaagatctaactgacatgacatgcgtggtctactatgaatcccactgtctatgacagangctacactactcatcactatgtcacagtgctagggctccggcgtagccactaaggatatgtagtaatctatctggcccatacaagagcctccgtgtaagaaatctcacacacangcatgggacaggtgtgngccaagcagcatgtacacatgcgcacgtctcctcgcgctcgtggctacgcggaggtagaatccgctanctaagtctgcctaagtaccgctcaccgcggcccagagaaaggaagggtaggacgctctcacgagccttattggggtcggtgtgtgggggcatataataccantaacagccgctgaagaagcgaaactcgatagagagaatggcggcgtggaggggc

SEQ ID NO: 4944 - DNA, 937 bp, Glycine max
  misc_feature (1)..(101): n is a, c, g, or t
  misc_feature (109)..(109): n is a, c, g, or t
  misc_feature (111)..(111): n is a, c, g, or t
  misc_feature (124)..(125): n is a, c, g, or t
  misc_feature (132)..(133): n is a, c, g, or t
  misc_feature (136)..(136): n is a, c, g, or t
  misc_feature (140)..(140): n is a, c, g, or t
  misc_feature (144)..(144): n is a, c, g, or t
  misc_feature (150)..(151): n is a, c, g, or t
  misc_feature (157)..(157): n is a, c, g, or t
  misc_feature (168)..(168): n is a, c, g, or t
  misc_feature (182)..(182): n is a, c, g, or t
  misc_feature (186)..(186): n is a, c, g, or t
  misc_feature (190)..(190): n is a, c, g, or t
  misc_feature (195)..(195): n is a, c, g, or t
  misc_feature (202)..(202): n is a, c, g, or t
  misc_feature (206)..(206): n is a, c, g, or t
  misc_feature (211)..(211): n is a, c, g, or t
  misc_feature (215)..(215): n is a, c, g, or t
  misc_feature (227)..(227): n is a, c, g, or t
  misc_feature (236)..(236): n is a, c, g, or t
  misc_feature (238)..(238): n is a, c, g, or t
  misc_feature (240)..(240): n is a, c, g, or t
  misc_feature (242)..(242): n is a, c, g, or t
  misc_feature (261)..(261): n is a, c, g, or t
  misc_feature (263)..(263): n is a, c, g, or t
  misc_feature (267)..(267): n is a, c, g, or t
  misc_feature (271)..(271): n is a, c, g, or t
  misc_feature (280)..(281): n is a, c, g, or t
  misc_feature (284)..(284): n is a, c, g, or t
  misc_feature (291)..(291): n is a, c, g, or t
  misc_feature (293)..(293): n is a, c, g, or t
  misc_feature (296)..(296): n is a, c, g, or t
  misc_feature (341)..(341): n is a, c, g, or t
  misc_feature (351)..(351): n is a, c, g, or t
  misc_feature (384)..(384): n is a, c, g, or t
  misc_feature (397)..(397): n is a, c, g, or t
  misc_feature (416)..(416): n is a, c, g, or t
  misc_feature (420)..(420): n is a, c, g, or t
  misc_feature (487)..(487): n is a, c, g, or t
  misc_feature (493)..(493): n is a, c, g, or t
  Peptide Sequence Number=SeqID_7210
  Probeset Number=SeqID_14723
nnnnnnnnnnnnnnnnnnnnnnnnnnnnnnnnnnnnnnnnnnnnnnnnnnnnnnnnnnnnnnnnnnnnnnnnnnnnnnnnnnnnnnnnnnnnnnnnnnnnncataaaantntttagaaaaaaannaatcctnnaantttnattnaaattnnacaggncacaaaaggtncagggataaaaatnaagncgtnatgcnaaatttngtcnaaganagtntgatcagtgaancttgtagcnantnanaaagaaaatgtgttatttngnccanaacnggatcaagnngtngtcccanangtnggcccacacagtgatgcgcccaaccattaaatcttcagtttgganccaaccacanccttgcaaatgtggtccttcatccaaggtcatntccatgatttagnatccgccatccacagtcgncagnaatgagggatcatcactccatatggttatggagcatccaccattaccggccgaccccaactgccaantcatgntggggatatggtgcctttgacacatcagaccctgcaaataactccacatcaacaaataccaataacacagcaagccccgcacctcctactttccgaccacttcaaccaccaggaatggtgtactatactaatcatcagcattcgatacatgctaccctgggacgggagctggcaaatgttggaagcaagactatcacatccctgggacgtgaaactctcttgcccaatattttaactgagttactgattcagtcgaccgaccctaatgcgaacggggatctcatgaaccaggcactgataccatcacccccccaaaaagcaaaaaacaaaagcaatagaagaacatgataagaatgaaataaacaagtgttttgccggaaaacttttaatataatgtccttataattggccaataaaaaaaaaaaaaaagaatctcagccggga

SEQ ID NO: 4945 - DNA, 1342 bp, Glycine max
  misc_feature (1)..(1): n is a, c, g, or t
  misc_feature (147)..(147): n is a, c, g, or t
  misc_feature (160)..(160): n is a, c, g, or t
  misc_feature (235)..(235): n is a, c, g, or t
  misc_feature (253)..(253): n is a, c, g, or t
  misc_feature (275)..(275): n is a, c, g, or t
  misc_feature (953)..(953): n is a, c, g, or t
  misc_feature (955)..(955): n is a, c, g, or t
  misc_feature (1154)..(1154): n is a, c, g, or t
  Peptide Sequence Number=SeqID_7211
  Probeset Number=SeqID_14724
ncgatgggtgctgactctcgcgctatgtattacatagttgtgtgactaaccttatctgcgtcttctcatcactgcactactattcgttagacttatcgtaggtaaggctatgtcagtgtcgagtcatgaacagcaatagtaatttanaagcaccttacgncgtgagtcatccacggctttcgtcgtatccagtgtgtgtgctttgattgctccttcttatgtctatgttactcangtcctctcctcagtctancgaagtagccgtacaaattatngtatgagcgatagtattcaatatcaggcgctgcgcagctcacttatgatagtgccgtgccgccggcggtgctaacaggagtacgtcgaggaggagtgacctccccttatcacgccttatgatctgttattatacctcgaccaccctattctttcccccctatactaatagtaatatgtacagactttcacacatcatatgactaattgtgataactacactagcgcgactaccaagagcgcagagttatggtgatactcttcactgaacatggatggttcagtgcatgaagcgacaccggtcgagcaataaagtgaagcaagattgtccggtttttgcgcgactaaatcaaacaacccattcagacaattcgagcctcctcacatttatcagtttatttgttggcacgttatacgctataatcactgcaaataatcccctcacaacatgtttgctcgtacatgtgccctcatcatatatatctagcatgagcacgcggtgaacaaggaattgccccatcattctaacatactatgctggtatgcccctatccacaccgcagagcagcaagtgtcagcttatgacattaagccaggggtgagtgtaatgcaccgcagctgacgcgagctaaccaatgacacgatacattcatgaataacttgaacagcaggctgtggtngntgcgggctcagacaagcatcgttcaagtctgacccgagtgagtcgctcatgccccaatgtgaggtgcatcatatatattgactcaaagactcgtgcgttatctacgttgaggggtcaacttcatataaataaatgcctacctatatacaagatacttcatctactcagcagatccatttcagaaaatcgtcttgcattnagcgttgcctcattacaaacccacagacagatatacgtcaacttataccacccattagcctgtgtctccattgttggggtgccccgctatctaccttacagcgagtggtgcaaccccgtaccccaatacttcctactacgattagtgatagacggacgagtatgtggcggaaatgtaatgtggaggaa

SEQ ID NO: 4946 - DNA, 1740 bp, Glycine max
  misc_feature (1)..(2): n is a, c, g, or t
  misc_feature (24)..(29): n is a, c, g, or t
  misc_feature (31)..(35): n is a, c, g, or t
  misc_feature (37)..(41): n is a, c, g, or t
  misc_feature (94)..(94): n is a, c, g, or t
  misc_feature (97)..(97): n is a, c, g, or t
  misc_feature (108)..(110): n is a, c, g, or t
  misc_feature (117)..(117): n is a, c, g, or t
  misc_feature (122)..(123): n is a, c, g, or t
  misc_feature (127)..(127): n is a, c, g, or t
  misc_feature (129)..(130): n is a, c, g, or t
  misc_feature (134)..(136): n is a, c, g, or t
  misc_feature (149)..(149): n is a, c, g, or t
  misc_feature (180)..(183): n is a, c, g, or t
  misc_feature (188)..(189): n is a, c, g, or t
  misc_feature (192)..(192): n is a, c, g, or t
  misc_feature (194)..(196): n is a, c, g, or t
  misc_feature (200)..(200): n is a, c, g, or t
  misc_feature (209)..(209): n is a, c, g, or t
  misc_feature (245)..(245): n is a, c, g, or t
  misc_feature (265)..(265): n is a, c, g, or t
  misc_feature (311)..(311): n is a, c, g, or t
  misc_feature (317)..(317): n is a, c, g, or t
  misc_feature (323)..(323): n is a, c, g, or t
  misc_feature (330)..(330): n is a, c, g, or t
  misc_feature (333)..(333): n is a, c, g, or t
  misc_feature (356)..(356): n is a, c, g, or t
  misc_feature (358)..(359): n is a, c, g, or t
  misc_feature (368)..(368): n is a, c, g, or t
  misc_feature (373)..(373): n is a, c, g, or t
  misc_feature (377)..(377): n is a, c, g, or t
  misc_feature (381)..(381): n is a, c, g, or t
  misc_feature (387)..(387): n is a, c, g, or t
  misc_feature (401)..(401): n is a, c, g, or t
  misc_feature (409)..(409): n is a, c, g, or t
  misc_feature (411)..(411): n is a, c, g, or t
  misc_feature (420)..(420): n is a, c, g, or t
  misc_feature (438)..(438): n is a, c, g, or t
  misc_feature (443)..(443): n is a, c, g, or t
  misc_feature (448)..(448): n is a, c, g, or t
  misc_feature (470)..(470): n is a, c, g, or t
  misc_feature (485)..(485): n is a, c, g, or t
  misc_feature (615)..(615): n is a, c, g, or t
  misc_feature (678)..(678): n is a, c, g, or t
  misc_feature (722)..(722): n is a, c, g, or t
  misc_feature (802)..(802): n is a, c, g, or t
  misc_feature (808)..(808): n is a, c, g, or t
  misc_feature (816)..(816): n is a, c, g, or t
  misc_feature (823)..(823): n is a, c, g, or t
  misc_feature (826)..(826): n is a, c, g, or t
  misc_feature (829)..(829): n is a, c, g, or t
  misc_feature (838)..(838): n is a, c, g, or t
  misc_feature (847)..(847): n is a, c, g, or t
  misc_feature (853)..(853): n is a, c, g, or t
  misc_feature (873)..(873): n is a, c, g, or t
  misc_feature (879)..(879): n is a, c, g, or t
  misc_feature (909)..(909): n is a, c, g, or t
  misc_feature (933)..(933): n is a, c, g, or t
  misc_feature (1303)..(1303): n is a, c, g, or t
  misc_feature (1367)..(1367): n is a, c, g, or t
  misc_feature (1422)..(1422): n is a, c, g, or t
  misc_feature (1550)..(1550): n is a, c, g, or t
  misc_feature (1637)..(1637): n is a, c, g, or t
  misc_feature (1740)..(1740): n is a, c, g, or t
  Probeset Number=SeqID_14725
nngggggggggggggggttggggnnnnnnannnnntnnnnntggtgtagggggtgtgtgcgtgtggtgtgtgaggtggtggtgtgtgagtgatnggntgggttggggnnnggatgtngttcnnattngnnattnnntgtttattgattnggttatatatgtggctatgttctattatctnnnngctcnnccngnnnacanaactacacntaacggacagcgacgtcgaccgcgctgtacctgcgngcccacggagaaggcgatanaagcgaggcggcacacgcctatctgctagtacactattctcctctnctcatntgtgtnacatttngcntcttttatattctatgttttttntnntttttcttngtctnattnatgnctgatnctatggcagagggngtgctcangnatgagacgntcggcgcgtagctggtgnctgcntgcgnccgtggagtaatactgggatgngcagtccgctggccngagccacagtggtgtctcattcttgtctgtctctatctctctatgagtgtttctcttgtatgtatctacgtcttcttgatcctcatctacgcgattatatataaaattatgtctatttatctcatcagcnacctcatctattatcatattctgtcaactttcttatctgtgtgtggtagctctcgacttgcantatacctcactctgatattagccttgagcagatatattctatangtgctgtcagctgtcgtgtttcttcgtcgtgcgttgtcgctgcactctcctgcacgtatgctcaaacgaagagaatacanacatanaagacganagattantgngantgacacgtngcaaataanataaantattgtagtgtagtatatantatganatatctataattacaatggatagtaagaanagtggaagacagcagaagagattnatgcatatatatctacatctctgaaacgatcatcctctatatacttactgattatatagaagtaaatgattgtatgtacatatgtaatatattcgataatatagcatcacacgtaaaatcgaaacgcaactcatatgagtactacttatattgactatgtagatgttatagagtatatcatataaatatgatgtgctataggctgcggagcgcgctcgacccgaccccatctctcatgcatcatcaccactatctacatgacactatacttgatcagtgtatgatagcgaatcctctgtacagccacaccgtcaacactcccgcatctcagctcatcccactattacgctcatctcgccgtctcctgcancgcaacgtcctcctgatatctcgtctcaacatcgctcgagtattcacctgtgctgtgctcagtnataacttctctccatctgcttcactctcgatcacaccaccacgacacgctgtcantccgcgcagtaccgtacactgcgtcgacactagtcatctcatcacaacacactgacgtcgcgccacttcacgctactactactcatcctaactcagactcatcacactatacatcactcattaactcntatactatcactagatataatctcactatattactatatagcactatctatgactatactatcatatactcgatcatacacactccnacgctcactctgactgctgcgcagtgcttcgatatcgcactgactctaagctatctactctcatcaccacaccactctcactcaatcgctatcgtctctctcn

SEQ ID NO: 4947 - DNA, 664 bp, Glycine max
  misc_feature (637)..(658): n is a, c, g, or t
  misc_feature (663)..(664): n is a, c, g, or t
  Peptide Sequence Number=SeqID_7212
  Probeset Number=SeqID_14726
ttttttttttttttttttgtttaaatttttcatcaaagtttagatgtttatagcagcgtacaagtttatataataaccatgtacgattaatagcattattatttaaaacataaaaaaagctttaaaactaataatatttatgaaatttaattaatttaatagtggcaaagaaacacatagaaaagacaatattaaggtcttcaatttttatattcttttaaagagtcttctatttcatttgataagcccttgtttataaactttttaaacttcaaacatcttttggtgactttaaaggttcatttctttcagaagcgaaacaaggtccagatgaaaacatagcctttagtactccctttttcttcagctgtttatgcatttttcctttctcttttagcattacttcatgtttgtcttgccattgaattttactacccctatttcctgcctcttgcttctttccttcacctttctcactgttatccaatgctccattaatgcctgctgacattaccataaaattcctgagctgaaggtccttttgagcttgtttttgctatattaggagtttcaggcttccatattttcttcttagggtcgacactttcagctaaagtagtacgagctgctataaaannnnnnnnnnnnnnnnnnnnnnggcgnn

SEQ ID NO: 4948 - DNA, 489 bp, Glycine max
  Probeset Number=SeqID_14727
ttacctaggctacgtgatgaactacatcttctccgtaatcaacaaccgctccattgctcatgaggctcgtgggggtgatgtgaatgctctcaatcgtctcatttacaatcagacacgtgcatgcgctaatatcttttggacacccttattgacgtcacagaaactgcgctgatcatgctcggagataccactgttactcgttatggacggtggcccatactgcttgatacacatggactgacgctctatatatctgatgggttatgcttcaacatagcatggcaaagccctcgagaggaacacgatgaatgttgatgctgatattaccattgccataggaacattgttcccaatgtgtggtgttaatgtggcgtaagatcgtcagctgattggacctgcaatgtactttggactcatgggtgatggccaacctattggacgatacgatgatatgtgggctggatggtgtgttaaggttatatgtgacca

SEQ ID NO: 4949 - DNA, 1412 bp, Glycine max
  misc_feature (164)..(164): n is a, c, g, or t
  misc_feature (497)..(497): n is a, c, g, or t
  misc_feature (556)..(556): n is a, c, g, or t
  misc_feature (659)..(659): n is a, c, g, or t
  misc_feature (892)..(892): n is a, c, g, or t
  misc_feature (894)..(894): n is a, c, g, or t
  misc_feature (958)..(958): n is a, c, g, or t
  misc_feature (1062)..(1062): n is a, c, g, or t
  misc_feature (1396)..(1396): n is a, c, g, or t
  Peptide Sequence Number=SeqID_7213
  Probeset Number=SeqID_14728
ggtcgcgatgcgagggcgtgcgtagacgataatgagtagagaggcaagaggagatctcctacagcgtatgggtgagcgaagcgaatagggcatacgagtgcattatgtgggtgttataccacaccgtggtgcggaggagtgcactcgccgggcgatgtgctctnacgcttgcagaaatagcgcacgtgctccttcggatgacgactctatctactggatccgtgcgtgagatcgacacacactgttgtcgtctcgtgcagggtgcgggggtccgtcgacgtgactgctctcgaacacagcgtattaacgcatcgaagggcggagagtgtcgcggctgaggcgtgagtgcacctctgagcgcggcagagagcgcacaatgaaactacatcggcgcctagagtgtgcatacggtcactctcagagtatacaccatcaaagtagtatgtggcagcgaagggttctcatagcactaggacgagacgcgaggaaatgtaagnaggagcatactacgtctcttatggattgcgcgccggaagtgtaggatatgcccgcttgnctcttgtctcggatacgtagtctcgcgagcaaggacactctacactgcgcccgagggcacctctgagtatagcgatggcacgagcctaagatctgtcgtgagncgtggacgctgtcacgggctctaggctaatagatagaaagtggaggaggcgtggcagtgacatcgcctataatagcagggcctctcttcttctccctactatagtacatcggcttcgggtcgtgctgtcgctgcggaactgctactgatggagagaggactcaggctgcttatttaatgaacttcactggaggtgtacgtcgaagaccactcccggagaggctaagaaacagnanaggctgtgcgtctcaggtggggtcatcctgactctgctatactagagatacgtggggtcccatncaggatcttagatccggcgacagagttccatggcgtagagtcgcacaagggcaagagttgcgtaatacgcttcgtactaaacgtgtgcagagggagggctgcanggtagcattagtatggggatgtcctacagcatcgagacctctctctgcgcttgacatacatgcaacacacctagaggctcaatagtatggagactagaccataagaagcggtcctgaccgctagccctctgcatagagcatgaaggagaaagtactccattctgaggggctacctaatacttagttgaggagatctctgcgacactctcgcggcgggctcgcgcgggagatatcctaatatgttgcggcgccgcgccccgcgtggagggtccgcgacttttccggctttgggtatgtggcgggcacctagaggacagaagtgggtagaggaganatggggtggtggtggc

SEQ ID NO: 4950 - DNA, 1531 bp, Glycine max
  misc_feature (12)..(13): n is a, c, g, or t
  misc_feature (18)..(18): n is a, c, g, or t
  misc_feature (22)..(22): n is a, c, g, or t
  misc_feature (301)..(301): n is a, c, g, or t
  misc_feature (459)..(459): n is a, c, g, or t
  misc_feature (462)..(462): n is a, c, g, or t
  misc_feature (790)..(790): n is a, c, g, or t
  misc_feature (869)..(869): n is a, c, g, or t
  misc_feature (1258)..(1258): n is a, c, g, or t
  misc_feature (1359)..(1359): n is a, c, g, or t
  misc_feature (1372)..(1372): n is a, c, g, or t
  misc_feature (1387)..(1387): n is a, c, g, or t
  misc_feature (1466)..(1466): n is a, c, g, or t
  misc_feature (1490)..(1490): n is a, c, g, or t
  misc_feature (1531)..(1531): n is a, c, g, or t
  Probeset Number=SeqID_14729
ttcctttttttnnctttntttntttttttactcattctctctctcatctctccctcatctgcccgctgacctatctcaccttcctcgattattgtccagcaatactactcaccgagggcggtgtctttgttgttttatatgtgtactagtatatatcatgtgtcgttacagtcgtactataagcactgaattaattcacgattctcgctcgtcacttctctcgcctcgacttcatcggttcgcgcgagatcgttactgcgtctaatataacacaggacgagagtgagtggggcgacatatnactcaaaaacgcacgataatgtgtatagttataacactctctgtcgattgtatgacatatgtgctcactctaccttgctatcctccgtatgcttcctcggcagcctctcactcctcttcctggttgtcgtctctctgaacaccggcctcaaataccgnagnactcccgacaccactcttccatcaatatcagtgagacgatgaacgctcgtccgtggttactgttctcgccacgttacaaacggcgtgcattgccctcatctcctcctgcctattcagccgcctgcaaataccgataacaggaaacaatccgcgactaagttagtaacgacactactgccactacctagcaataccaactactcgcccattcgctagcgacctatgacatcacgcgcgactatgctatacatcattcgtgatataaatgatcttacagacgttcagttgtcgagtacgagaatgagtgtaccagcaccaccaccctctngcatgcacttttacctgactcgcccgtcgacgcggtacaagatcaccacacacacgacactactgagcgacgccgcacngcgacaccctctcttcactctcattatgcatctctcacacactttcatccgtccagaagaacatcacacaccataatacacatcctccttgcgtccgagcgcacagcctacctcatgaacgctggacataacatacctgtctactgagtataacgtatagtttgacacctgtgattattaatacactcgatcgacatataataatttatatagcccgtgtgacgatcgcgtcatattacttttcttatatattctctcttccatcctcctattcgttgtctcctattattactatactatgtacaacactcagagtcgcgaatcaatacacatgactctcctgatcgctacagaacgacgatctacccacaccgctctcactcaaatantccttgctcactctcgttctctgtcgtggtactgtctactataggaagacaaggaaggttatagttcgggagacaagttatgtcagatatcgtgagtcctnctcgttcccacgntcgacatgatctatnccgaacatacattacagaattcacgatgtactagtagcgtcacgattattcagtcgaatgcacacattcatactaacancacacatactcactatgcatctanattatgatcgactactgtcgatgacatgatactgaccgtgn

SEQ ID NO: 4951 - DNA, 836 bp, Glycine max
  misc_feature (620)..(836): n is a, c, g, or t
  Peptide Sequence Number=SeqID_7214
  Probeset Number=SeqID_14730
actctttgcagagattttggatggagatgtgtacaagtactatgctgatggagaatggaagaaatctgcttctgggaaaagtgttgccatcatcaaccccactaccagaaagactcaatacaaagttcaagcttgttcacaagaggaggttaacaaggtcatggacttggcaaaatctgcccaaaagttatgggcaaagaccccactatggaaacgtgctgaactttttcacaaggcagctgctatccttaaagagcacaaagcaccaattgcagagtgcctggtgaaagaaatagcaaagccagccaaagatgctgttacagaggttgtaagatctgaggatctggtttcttatactgctgaagaaggtgtaaggattctgggagagggaaagttcttggtgtcggatagctctcctggacatgaaaggacgagatattgtctcacatccaagattgcacttggagtgatgttagccatgtcaccttttaactatcccgttcatcttgctgtttccaaaattgctcctgcgctgattgctggagactgcatcgtgctcacgccgtcaactcagagagctgctactgctcgtcatatgttcactgctttcatcggctggnnnnnnnnnnnnnnnnnnnnnnnnnnnnnnnnnnnnnnnnnnnnnnnnnnnnnnnnnnnnnnnnnnnnnnnnnnnnnnnnnnnnnnnnnnnnnnnnnnnnnnnnnnnnnnnnnnnnnnnnnnnnnnnnnnnnnnnnnnnnnnnnnnnnnnnnnnnnnnnnnnnnnnnnnnnnnnnnnnnnnnnnnnnnnnnnnnnnnnnnnnnnnnnnnnnnnnnnn

SEQ ID NO: 4952 - DNA, 1426 bp, Glycine max
  misc_feature (184)..(184): n is a, c, g, or t
  misc_feature (598)..(598): n is a, c, g, or t
  misc_feature (1024)..(1024): n is a, c, g, or t
  misc_feature (1104)..(1104): n is a, c, g, or t
  misc_feature (1409)..(1409): n is a, c, g, or t
  Peptide Sequence Number=SeqID_7215
  Probeset Number=SeqID_14731
cagtcagcgactcgcggacagcgctggacttatagcgatgttcgagcaacatatataaatgcacaagataaccacgcgcacagatgtctgctcctcgctgatattataatcaaatacacagatcagcgacacagtccaagaatggcgcagctggtcgcatagagcgatacatgccgaagagtgngatagactataaagactgggtaactgtgacgatactacccaccttacaatatcgccaagcgggtcgtgttactataagacgaggcagtatatacctagttccattcacacactgggtatctctcggagcatttatgatgcgcgcgaagcaataaccgagtgcgctactgtagagaataatagagagaataggagaaccaacatgtacgcagtaacaatatcacaacgccaaaggcggggcagagctgcagacgctgaaaagagtacagtctctcctatcgcacgctggcgtggggggcgatataacctacacgtcgaaacgtaataaccgatttcgtacccacatttaaagagatagataaaacataggcggagccgcgggaggtatagtggggcggataggattaaatcaacncgcacgcgcacaacacgacgagcgcgcactgacgggtcagattatataatgggggatggtgtcgacggattcatatcccaccgtacataacatcgggatctctaggatgagtgttgcccatattctgtatgattgggtatagcggataaagggagtgggcggcatcggcgactgtgcaaatgggttaacatagcggagtgctctcagcagacgaccagtcttcgacggagagcgcataattaccgcgctattcactctgaccagtactgatgaagtaggtgcacatctatttttcgtccaatgaataaaacaataaggtgtgtatagtcaggttaagacccgctaacgtctatgggtggagggatggcacagccgagatcttaatgcccgctcgcctatatactcgcggcgagcgcattaatcttnactcgactgtacacgcgagctagtattcatcgtagtatacgtaatcgctgaagcgcgcaacatatcaacatgagcatacnataagagaatatctttgagtctcacgctttgtatattgcgggtacctatcatattcttgagcggagagcgggagcggtcagatgtgaaggtatcatggtacgcaacttatccacacgcttgatatgtggtggggtatgtgcgcacaataatagacatcacatctctcttcccacatgagagtaggcgcctcacaatatcaccaaattaatgtttagcattgatagtgctttcgtgctcagacacaaataaggaccgaataagcatatagataagaggcgacgcgcgaggacacggcgaagcacgngacacacacaaaccaca

SEQ ID NO: 4953 - DNA, 239 bp, Glycine max
  Probeset Number=SeqID_14732
gcctgcaggcttacgtccgatggacaggatttcttcacatcctacgatgaggtttatgacagttttgatgctatgggcttgcaagagaatctcctgagaggcatttatgcatatggtgcagaggagccatcagctagcatcagagcggtatagttccattctgcaagcatcttgtcgtcatccttcaggcccagtatgcccctcggagacaggcgcctttctgtcatgttattctgcag

SEQ ID NO: 4954 - DNA, 1879 bp, Glycine max
  misc_feature (12)..(16): n is a, c, g, or t
  misc_feature (21)..(21): n is a, c, g, or t
  misc_feature (23)..(24): n is a, c, g, or t
  misc_feature (27)..(28): n is a, c, g, or t
  misc_feature (35)..(36): n is a, c, g, or t
  misc_feature (41)..(45): n is a, c, g, or t
  misc_feature (48)..(49): n is a, c, g, or t
  misc_feature (52)..(52): n is a, c, g, or t
  misc_feature (57)..(57): n is a, c, g, or t
  misc_feature (59)..(59): n is a, c, g, or t
  misc_feature (63)..(63): n is a, c, g, or t
  misc_feature (66)..(66): n is a, c, g, or t
  misc_feature (85)..(86): n is a, c, g, or t
  misc_feature (99)..(99): n is a, c, g, or t
  misc_feature (101)..(101): n is a, c, g, or t
  misc_feature (106)..(106): n is a, c, g, or t
  misc_feature (109)..(109): n is a, c, g, or t
  misc_feature (115)..(115): n is a, c, g, or t
  misc_feature (125)..(125): n is a, c, g, or t
  misc_feature (130)..(130): n is a, c, g, or t
  misc_feature (133)..(133): n is a, c, g, or t
  misc_feature (179)..(179): n is a, c, g, or t
  misc_feature (187)..(187): n is a, c, g, or t
  misc_feature (201)..(201): n is a, c, g, or t
  misc_feature (217)..(218): n is a, c, g, or t
  misc_feature (248)..(248): n is a, c, g, or t
  misc_feature (269)..(269): n is a, c, g, or t
  misc_feature (275)..(275): n is a, c, g, or t
  misc_feature (314)..(314): n is a, c, g, or t
  misc_feature (317)..(317): n is a, c, g, or t
  misc_feature (329)..(329): n is a, c, g, or t
  misc_feature (340)..(340): n is a, c, g, or t
  misc_feature (347)..(347): n is a, c, g, or t
  misc_feature (361)..(361): n is a, c, g, or t
  misc_feature (371)..(371): n is a, c, g, or t
  misc_feature (462)..(462): n is a, c, g, or t
  misc_feature (587)..(587): n is a, c, g, or t
  misc_feature (648)..(648): n is a, c, g, or t
  misc_feature (675)..(675): n is a, c, g, or t
  misc_feature (768)..(768): n is a, c, g, or t
  misc_feature (840)..(840): n is a, c, g, or t
  misc_feature (895)..(895): n is a, c, g, or t
  misc_feature (961)..(961): n is a, c, g, or t
  misc_feature (982)..(982): n is a, c, g, or t
  misc_feature (989)..(989): n is a, c, g, or t
  misc_feature (998)..(999): n is a, c, g, or t
  misc_feature (1020)..(1020): n is a, c, g, or t
  misc_feature (1022)..(1023): n is a, c, g, or t
  misc_feature (1029)..(1030): n is a, c, g, or t
  misc_feature (1035)..(1036): n is a, c, g, or t
  misc_feature (1038)..(1038): n is a, c, g, or t
  misc_feature (1045)..(1045): n is a, c, g, or t
  misc_feature (1061)..(1061): n is a, c, g, or t
  misc_feature (1063)..(1064): n is a, c, g, or t
  misc_feature (1067)..(1067): n is a, c, g, or t
  misc_feature (1069)..(1069): n is a, c, g, or t
  misc_feature (1075)..(1075): n is a, c, g, or t
  misc_feature (1090)..(1090): n is a, c, g, or t
  misc_feature (1141)..(1141): n is a, c, g, or t
  misc_feature (1197)..(1197): n is a, c, g, or t
  misc_feature (1224)..(1224): n is a, c, g, or t
  misc_feature (1332)..(1332): n is a, c, g, or t
  misc_feature (1417)..(1417): n is a, c, g, or t
  misc_feature (1419)..(1419): n is a, c, g, or t
  misc_feature (1449)..(1449): n is a, c, g, or t
  misc_feature (1498)..(1498): n is a, c, g, or t
  misc_feature (1524)..(1524): n is a, c, g, or t
  misc_feature (1536)..(1536): n is a, c, g, or t
  misc_feature (1594)..(1594): n is a, c, g, or t
  misc_feature (1606)..(1606): n is a, c, g, or t
  misc_feature (1733)..(1733): n is a, c, g, or t
  misc_feature (1765)..(1765): n is a, c, g, or t
  misc_feature (1784)..(1784): n is a, c, g, or t
  misc_feature (1794)..(1794): n is a, c, g, or t
  misc_feature (1797)..(1797): n is a, c, g, or t
  misc_feature (1802)..(1802): n is a, c, g, or t
  misc_feature (1830)..(1831): n is a, c, g, or t
  misc_feature (1844)..(1844): n is a, c, g, or t
  misc_feature (1851)..(1851): n is a, c, g, or t
  misc_feature (1872)..(1872): n is a, c, g, or t
  Peptide Sequence Number=SeqID_7216
  Probeset Number=SeqID_14733
ttttaaaaaaannnnnggccntnnggnnggttggnngtgcnnnnnttnnttngtatntntttntcncttcgtgtatacgccgatnntcgcgccagcccncnccccnccncccctnatattcgctngtttnacntagtgagtgtccgttctcgccgctcccgatgctaggtctgtgtggnttacactntcatgtatgtgtgnatgatatgtccactgnntctctgtcgtgcgtagttaatgtacacacnatatgtgtaatgatttcgtanatactnctactggtcatcgtatgtataagatagttataggtgatngangtgtggctctanatcgatcgtcnatgctgntagtgactattacnccctctgtcntctagatatgcaacctgatgctatgcacactctctctcacgcacgcacctctcggcagactgatgtcgagtacacgatagactatagatanatcatgctcgtcggtcacccttacacgtagcgcgagaatgtatcgccactctggtggctcgatagctctccacatctcacatcgctatataattcttaatgctcatacatctgcatcacctaccnctcactgacagtatgcgcaatattgtcttagtcattgcatacgtgtgatacacagaatagngccccctcgctgcgattgtcgcggctnacctccattacacacgtactgatatagcaagtacttcgtgccgtcccttccatatcaatatattcgctactccttagtcctcgatggtcgagnagatgtcatctcatgattatggtcgccatcacgatatgtctctctcagcaaacgttgttctgtgcgtcgtgntgttaggctatatgtgagtaggtgtcaggcacgcatgagcatactcgcactcttntctatggctcaggtacgatattccatcagctcacatatatgatgatgtggtcgatctgaggtagtnaagataaagtgatgattgaanattgtangggtaagcnnacaaatatgagagagaaaaanannaataannaaaannancgacganaatcatgcaattaaanannaananccagancatcgaagaccttcntcttgtactcgcgccccacgtggcgcattgttaccatctctctctcacgcnccactctattagatgtatgacgtctctccgcgcgctctctctacacaccactcccncatcatactcttaatacttagacattntgctgtccttacatctctgtgagctatgactcttgaacgagatgctactattcgtacgagtgagcgcgtgcataccgtcgactctgccagacatcctacggcagagantaactcctctatctactacctccactcctatcgcactgcgtatgaaacaatctatagtcacgccacctttagtcgcagccagtcncnactctatacattagtgagacgcacttcctncgctctctgttcattctctgtctgtctccgcgcgtattttagtgtaccngctataacatatactactcgttcgcnacacactactanaccctctcttacgtatcgtatcgatgatcttgtgatcgtatatgatacatagctacantcgttctgccancacacgactcctatcgcaccgtctatctacatgttgtgagtgcgtcgactgcaactcatctctgacacacacctgcgtcgacagatgatgcgatatgtactgtgctctgtactgatctgacatcaanactctcatctacctctctgactttgtatctgntgagctgactccctccccnctatgacgantcnacagntactatgtacgtctgatacgtccggtgnntctcgagtacacngctccanatatctactatactggaaccntgcgcga

SEQ ID NO: 4955 - DNA, 1576 bp, Glycine max
  misc_feature (1)..(1): n is a, c, g, or t
  misc_feature (23)..(23): n is a, c, g, or t
  misc_feature (134)..(134): n is a, c, g, or t
  misc_feature (241)..(241): n is a, c, g, or t
  misc_feature (245)..(245): n is a, c, g, or t
  misc_feature (413)..(413): n is a, c, g, or t
  misc_feature (450)..(450): n is a, c, g, or t
  misc_feature (501)..(501): n is a, c, g, or t
  Probeset Number=SeqID_14734
natcgagatcagatagctcgacnctttcatgtgtcgattatataccgtccgtgacaactacagtgcatgataatcgaaaccatacatcgcattatatacgccgcgccgtagagcgcgcgcgcacgcgatatagncccactcatatgtctctcgcccaccgcgcctcaccgcgatcatactaatcacacgtcacgctcgtgtagtatactcacgcccggccgacaatcaagacacagtgtcntgtngggcgtcgttagtgcatgcggttttatcacgagtatcgcgcgcgcacgacgatcagacgacgcgtcgtatattgggtatagacacgcacataggatagcagggccgtagcgagcagagcacgtgtatttttcgccacagcatctatcagattgtataccgtcatattntcgccgacgccgcgcgcagcgtgcgtacgcgacagantgtatgtgatacattatcatcgtgtcatatagccgcatcgcaggagagagngtatatatatatgtcgccgcgccggccgatatgtatatattctgacacaccatgatggccgcagcgcgataacaacgagcgcaggcgagggtgtgaaatatataggcgagaggcggagcgtgtgcaccgatatctcgcgcggcggcgtaattcaatcgtgggagataatatgacacgcacacgcctcttattttcttgtgctagcagcagaatatcatcatactgagtattagtacgaaaagtctgtgatgtgtttagcgaaaccgcttgttctcacaacactatgtgacgccgccgatttgctggtaacacataagcgatgccgacgctttcaacaccatctcgtttgtgaggtggttgaagtgggtagcgcaacgcacctattatcacgtgctttttcccggcgggggcgtgttctcacatcacccctatttcgtgtcccgaacaatagccggcggttttattcagttgaggggagggaagagattatatatacccgagcgcggggatggtatgatatgattaggcgcggagatataaccaaggctgcgtggagaaaatagaacaagtagagcgggttgtgggcgagagacgtgatccgtggatggatatcattattcctttatcttcccaatgcgcgcgctggcgcggggagcgacttataaacagcggggcggggtatcacatagtcgcgggtggggggggagagcggggcgacaccaaacgccctacggttaatggccggcgatgcctagccgatcagagaacagccgcaacaaaaataataaggcggagcaagggatatataaaggacatggggtgctagaagggaggggcgggcatgtttgtaaatgttgatgccggatacatttggtggggtaattttgtggccaaaggagggatgcccgagtgatctggttggtgggccgatctaaagattacttacatcaagttgcggggtgggacaaaaataaatattaacatcctcgccctcgccggcgaccaccagcgaaccgcggagggcgggtcgggccgagtatcgcgcgcggcttagagggcgcaggcgggggccctc

SEQ ID NO: 4956 - DNA, 971 bp, Glycine max
  misc_feature (955)..(955): n is a, c, g, or t
  misc_feature (971)..(971): n is a, c, g, or t
  Peptide Sequence Number=SeqID_7217
  Probeset Number=SeqID_14735
acaaacacatttcttcttttaacaacttacaaacacattcttaatataggcaacgatggcagaaactacgcagaggaagagggaggtgtttgcgaccaagaatgaattgtcggtagcattggctaagtacactgctcatctctcggccaagttctgcaaggagaaaggaattttcaccgttgttctctccggctgtggcctcatcgattggctcggcaagttgttggaatcaccatacaaagaatcagtcgaatggtcaaagtggcacgtcttttgggtggacgagagggtctgttcacatgaagatcaaaacagcaactacaaactcgccatggatggttttatctccaaggttgggattccgaaggagaacatctacgcaatcgacaaacaatgtgccgctgatggtgacgcggagcgttgtgcgacgctctacgaggagtgcttgaggaacctggtgaaggaaaagatactcccactatgtccaaatggccaatttcctcagttcgatctccagctccaagggatgggtcctgatggccacatggcgtctctcttcccggaacgtcctcagatcaatgtgacggacaaatgggtcactcacattaccgactccccaaaaccgccaccaaggagaatcacattgactttaccggtcatcaactcgtctttgtacaatcttgtggccgtttgcgacgacaacacagagcaatgtgcacgctccatcgctgatatctttaagcacaacaatctcgccttacctgctgctcatcttactgcccaagtcgaacaaatgtggtaccttgacaaagcagctgcttcattgctttagagagctaaacacattaataaatggtgtcctttatatgaataataaaataatctctccaagtcatgctttgtggagcgtgttgttggagtttgcttgcttgcatgtgtgtcgaataaccggctnaataatgcattttgcn

SEQ ID NO: 4957 - DNA, 1443 bp, Glycine max
  misc_feature (15)..(15): n is a, c, g, or t
  misc_feature (77)..(77): n is a, c, g, or t
  misc_feature (82)..(82): n is a, c, g, or t
  misc_feature (107)..(107): n is a, c, g, or t
  misc_feature (109)..(109): n is a, c, g, or t
  misc_feature (123)..(123): n is a, c, g, or t
  misc_feature (126)..(127): n is a, c, g, or t
  misc_feature (129)..(130): n is a, c, g, or t
  misc_feature (314)..(314): n is a, c, g, or t
  misc_feature (425)..(425): n is a, c, g, or t
  misc_feature (460)..(460): n is a, c, g, or t
  misc_feature (1004)..(1004): n is a, c, g, or t
  misc_feature (1238)..(1238): n is a, c, g, or t
  misc_feature (1410)..(1410): n is a, c, g, or t
  misc_feature (1443)..(1443): n is a, c, g, or t
  Peptide Sequence Number=SeqID_7218
  Probeset Number=SeqID_14736
ctgggcaccatgtantagtatgcttatagagagatggagcatgtgatgtgacctatggtctcttcagacgtctctcntcctntctagacatatcatgtactatgatncncactatatggtccntannannaaagaataataaatatattaaatagtattatattgttatgaatataataaatataagaatcaacataatataacatataaaagataatagagacgtatatatcaatacaacacaacatataacaatatacaacatatccattcttgacacaatacaagatactatgtgtataagaactgacacnatacagtggtgtctctctctgtcctccctatcctccatctcgcctccctctctctgccttagaccccgtcacctcgatgtacccggtgtgttaggcttagctccgggtgtnaggccgcccacgcctctccctccctcctctctccnactctcttcccactgtcacacaccatatacactctcaccacgcaaccgctcccgcgccgcccacccccttcctcgcttctcgcacctccttcccgccgcctgcgtccctccacccactcgacgccctcgccgcccgcgcgccgcacccttcgtgcgcctccgcgcgccctcgcctccccccccccccgcccggccggccttagctcttccacccaccgcgctccacgctcgccccaccgtggcacccgctggctcgggcgactctaccggctaacccccccgcccccgccccgtccgcgcgctcccccacatgcgccgcgcctccttgcgcgcgcccgcccctcgccacccacgcccctcgcaccgcaccccgccgccctttctcccgccccgcgcacctccttcgtcgcccgcccttctcgtcgtctctctccgcccctccacctccactcgccgccgctccggcacgcaccccgccttcctccacctcaccctcgccccgccccgtcggtccccggcgcgtgccccgacgctgcgtatatcncatctccccccctccccgcgcgggctcgcccagcctactaccacgcggtctctctttctctccccccccgctcctcctctccccgataactcgcccgcccaccgcggcgcccaccctcctctccccctctctatcgctctctccgtaggcctctccttgcacgccccccgccgcccgccctccgcccgctccccacgcgccctccgccaccggcgcgcccgccgccgtgggagnacgcccccaccccctccccacctctcccgcgcccctcgcgcgccgcacacccacacgccgcgcgtgcggcccacacctcctctctccgagccacctcctcgcctctccccgccgcgcgtcttcctgaccgccttacccgcgcgccgcccctgcttccctcacgtgcccgcangctatcggctcgcccgccaccgccgtccatcan

SEQ ID NO: 4958 - DNA, 1547 bp, Glycine max
  misc_feature (1181)..(1190): n is a, c, g, or t
  misc_feature (1286)..(1286): n is a, c, g, or t
  misc_feature (1383)..(1384): n is a, c, g, or t
  misc_feature (1389)..(1389): n is a, c, g, or t
  misc_feature (1396)..(1396): n is a, c, g, or t
  misc_feature (1400)..(1401): n is a, c, g, or t
  misc_feature (1403)..(1403): n is a, c, g, or t
  misc_feature (1420)..(1420): n is a, c, g, or t
  misc_feature (1423)..(1423): n is a, c, g, or t
  misc_feature (1431)..(1431): n is a, c, g, or t
  misc_feature (1433)..(1433): n is a, c, g, or t
  misc_feature (1446)..(1447): n is a, c, g, or t
  misc_feature (1449)..(1449): n is a, c, g, or t
  misc_feature (1458)..(1459): n is a, c, g, or t
  misc_feature (1464)..(1464): n is a, c, g, or t
  misc_feature (1467)..(1467): n is a, c, g, or t
  misc_feature (1469)..(1469): n is a, c, g, or t
  misc_feature (1471)..(1471): n is a, c, g, or t
  misc_feature (1476)..(1477): n is a, c, g, or t
  misc_feature (1479)..(1479): n is a, c, g, or t
  misc_feature (1483)..(1483): n is a, c, g, or t
  misc_feature (1492)..(1492): n is a, c, g, or t
  misc_feature (1496)..(1496): n is a, c, g, or t
  misc_feature (1498)..(1498): n is a, c, g, or t
  misc_feature (1500)..(1500): n is a, c, g, or t
  misc_feature (1506)..(1506): n is a, c, g, or t
  misc_feature (1509)..(1509): n is a, c, g, or t
  misc_feature (1512)..(1514): n is a, c, g, or t
  misc_feature (1517)..(1519): n is a, c, g, or t
  misc_feature (1521)..(1524): n is a, c, g, or t
  misc_feature (1536)..(1536): n is a, c, g, or t
  misc_feature (1538)..(1539): n is a, c, g, or t
  misc_feature (1546)..(1546): n is a, c, g, or t
  Probeset Number=SeqID_14737
cgcggcgattattacggcgtatttgatgagaaccgaacgtctatctgtagaagatgcccttgaatcgttgaggcagagctgtgaatttgtttgtcccaatgatggttttcttgagcagttgaaaatgtttgaggggatgggtttcaaggttgatcactccagccctatatacaagcgctttcgtctaaaaatactatatgaaaatcatttctcagggttgaggatagacagttccaaacttggtgcagatcctggcatgcctgttgaaatttcttcagaggcagaagaaactactaaagttgaaaataatcatagtcctacatatcgctgtaagaagtgccgacgacttgttgcattgcaagaacatgtcatagaccatgttcctggtgagggtgagagagcctttgagttccacaaacggagaggtggcaaccctttcaacaaatctgatgaatttgagtgttcatctgtatttattgagcctctacggtggatgaaagctgttgaggaaggtgcaatggagggaaagctgtcctgtgctcattgtgatgcccgtttgggatacttcaattggtcaggcatacaatgcagctgcggaagctggataactccagcttttcaactccacaaaagctggatagatgtgagtcccatgtaatcattgttgcgccattttatgcctaagggatgccactgccaaattctttgtcattgtttttggacttatattctgctcaaattctccaagctggtccactgccaacaatgaagttgtggaaggaaggaatggagtcttgctcttttgacatgctcaagttttccaggctgaactaatgcagttatatggaagggaggattattatagttttacactttttgtgcttcttccagaatgactttttggagctgtgattgtagattattactgctttctagtaaatggtgaatcatgagttaggattccaatattagggcttgttccctcgatgattctaccgtaagcaaccataatatttgtttcgtcaaaagaaaatgagtgttctccattgtaccttcttctattattctcaatatacaaattttattctttgctctgcacaaactttcaacttctcctcactggcacaagaatataaatcgagtgattgaatacaggcccatgaccgagtcagctacgtagnnnnnnnnnnaattgatgaacgtaacaaggagtgggagagtacacccaaaatttttcaattcaaagatgctggggtgaattgtgtggctgttggaagctccccaangtttaaggtttatgacattgattttgggtggggcaagccagataatgtgaggagtggaactaataacaagtttgatgggatgatttatttgtacccnnggaanagtgganggannancatttaatgtggaactnacnttggagcntncgctattggcganntnccgcctatnncatcnatntntnttttnncnaacncttaacttncttntngnttttgnctntcnnnagnnnannnntttttctgtggncnntgaagtng

SEQ ID NO: 4959 - DNA, 1485 bp, Glycine max
  misc_feature (39)..(39): n is a, c, g, or t
  misc_feature (312)..(312): n is a, c, g, or t
  misc_feature (1036)..(1039): n is a, c, g, or t
  misc_feature (1041)..(1041): n is a, c, g, or t
  misc_feature (1043)..(1043): n is a, c, g, or t
  misc_feature (1121)..(1121): n is a, c, g, or t
  misc_feature (1172)..(1172): n is a, c, g, or t
  misc_feature (1175)..(1175): n is a, c, g, or t
  misc_feature (1185)..(1186): n is a, c, g, or t
  misc_feature (1268)..(1268): n is a, c, g, or t
  misc_feature (1295)..(1295): n is a, c, g, or t
  misc_feature (1366)..(1366): n is a, c, g, or t
  misc_feature (1372)..(1373): n is a, c, g, or t
  misc_feature (1379)..(1379): n is a, c, g, or t
  misc_feature (1381)..(1381): n is a, c, g, or t
  misc_feature (1432)..(1433): n is a, c, g, or t
  misc_feature (1445)..(1447): n is a, c, g, or t
  misc_feature (1453)..(1453): n is a, c, g, or t
  misc_feature (1457)..(1457): n is a, c, g, or t
  misc_feature (1467)..(1467): n is a, c, g, or t
  misc_feature (1469)..(1471): n is a, c, g, or t
  misc_feature (1479)..(1479): n is a, c, g, or t
  Peptide Sequence Number=SeqID_7219
  Probeset Number=SeqID_14738
ttgtatttcccgcgccaccaccgcgcccaccatatgcgncatttataagtatatcatcactagatatagtatgatataatttatgagatacaggacaatgatacatcgatggtctatgaaataaataatatatagaggagtgggtagtgtggcggcagtgacggagtgggatgaggtggtagtcgcccaccgtcaccttcgctctatcaccgcctcacagatatgattgaatatgagtaccgaatatatatcgaacataacgtattatatatagcagcacagtaatcgcggcacaacatcaactccgcgagncgatcttattcaacagatagatttatatcggggtcacgatcgaatatgtgcatgtggcaaaatgaagaagaaacatgcgcgtgaatagtgatgggcggtccgcagcgccacagtaggcagcacgacagtatttaggcggcgagttgtgtataggcgggtggaatatactaataaatatgcgcgtacaagttagaatatgtctatatgactataaggtatatttacgcgatgctggtgtgtgggtcgacatagttaatagacagtatacattgtacgggccatgtagaagagaggagagaggtaatgaatagaggggttgggtttccctatttcccgctccgtccaatttgaacgccgtgtttaatataattatacagatctatgacatctttaatcgactcttatattcgagtgatgtaaagtagggtatcgcagtgggtggggtagagcgattgtagctagcgcgagagaagtaatgagaccggagaggctatagaaggatgagcggcaccagtattagatcgctgagctcgcagggtgtgtgataacccccgcgccagtagtgtggaaatacgacacgagataaagtaaatgaataccgtccgttttttatttattgtactatgatgtctaatattctgcatctgccgcgccctcaaagcgaggaacagatgatataaataacgcaatccatgatagtattgtcaatagcgtgactgcatannnntncnctagttgttaactcaaaaagaacgtccgcgcctatactatatgcaccccgcctaataaacatatacgcaccccatcancctgatatacatgtcgtacccgccacgatgatatatgctacccataaaagnagnggctcagaanncgctttacgtggacgcaccccacggtaagggaccgcccgtcgaatagaacgatttctcttttgtgtcctactagtatgtcgntgcgtccctcgctgtgtgtttgtgagnaagcttcttccgctgttcgtgtcctacagtcacggtttgttataacagagttctgtgataatagtaggggngtgcgnngtaatngngtttatgtggtggcaggggctcgggcgacgccgcggtatagccttaagggnngggcactgaagnnnacgacncacnccccacacanannnaccaccanaaacac

SEQ ID NO: 4960 - DNA, 456 bp, Glycine max
  Probeset Number=SeqID_14739
cagttcaagtaaaatatatccaaatatccaatcggaaaaactttttagttgcaagagactttattatacatatacatatataacaactttaacaatgtatatttggaacatttaatcccaaaaattgaccatatccccatatcatatttatattagttgaaatatacccatgtgcttcttagagcgtgcatcaaaatttgagatttcacattagctctgtcagcatagtcatctacaagggtacacatgcatcaaatttatctaaaattgattccggagaatgatagtatgttaaacttacaagtatctcctcatcgagataagaaatcatgaagagtctttgaaagctcccaccttcaaatatgagaaaatttagtgtttttcacattgaaatttgaataaaggagcaaattgtatacacacttgtctacacacattataaccataagtcaatta

SEQ ID NO: 4961 - DNA, 594 bp, Glycine max
  Peptide Sequence Number=SeqID_7220
  Probeset Number=SeqID_14740
atcttatctaagcatttgaaaataaaccctgatttcaggaaggggcactgaaatttcccttcgtgcatgtcattgtcatctttgaggcttcttttctgaatcactccatggttcgcttgtgtaaccaaactggcagaatttgaggttcctgagtgatcttcgtcctggattcagaattttaggtgacagatctctgctcggacttccataaatgcatatctgtggatatgttccaccttggttctgtcagattctcgcttgcatgggagcagaggttgtctgggatgcttcccaaatccaaaaggccatgccacaaataaagacaacagatcagaagatttttggagcagcagcgcatttgaaatagatcagagtgcacttcagtcccagaaaagcatctcatcaattggcataccttctgatcctcaaagtagtgctgacattcagattgattcttctgaatatgtcaatcatggcaagtattctgttatagtctgcttatctattatctctgttggcttattagttagtctcatacgttatcaaagggtgcttgtaatcttgtatcatcctggtagccattttctctgatgt

SEQ ID NO: 4962 - DNA, 284 bp, Glycine max
  Peptide Sequence Number=SeqID_7221
  Probeset Number=SeqID_14741
caaccaccaatcaaaaaagctgcggttactgatgtgggttgtgtttggaacgattcccacaccggtactgctggctgcaatgcacggaaagatcgcctgtgtggaaaagctccttgaagccggtgcaaatgtactaatgtttgatgcttgttaccgaagaacctgcttgcacttatgcccatattttggacattcctgttgacataaggcagatttttctggcgctcaattcagatcattggctgcttcttggttgggccttttttttggttttgcctaaaatt

SEQ ID NO: 4963 - DNA, 411 bp, Glycine max
  misc_feature (4)..(4): n is a, c, g, or t
  misc_feature (8)..(8): n is a, c, g, or t
  Peptide Sequence Number=SeqID_7222
  Probeset Number=SeqID_14742
gcgnacgnaagcacggagaccggcgtcgagcaagcaggcggctaattatactaagcggccacagatgatctgttgtctcatatcatacattacagcacattgagactggagattatactgtgcaagaaccatctcttttaccaacaaacacctctcaaaatttaaaacttcaacgcgcatggaggaatcattgttgctttcaactgtcaaggggctggttgggaccctaagatgaaaaacatcaagggtttctctgaatgctacaggccaatttattgtactgtgcatgtaactgaggttgaattggaccacaagaaagaagcagttcacatgggtaaggcacaggagtatgtcctgtatcttaatcaagctgaggaactgcattttattacccccaagtctgaaccactc

SEQ ID NO: 4964 - DNA, 1679 bp, Glycine max
  misc_feature (33)..(33): n is a, c, g, or t
  misc_feature (39)..(40): n is a, c, g, or t
  misc_feature (47)..(49): n is a, c, g, or t
  misc_feature (52)..(53): n is a, c, g, or t
  misc_feature (56)..(57): n is a, c, g, or t
  misc_feature (59)..(61): n is a, c, g, or t
  misc_feature (63)..(66): n is a, c, g, or t
  misc_feature (68)..(68): n is a, c, g, or t
  misc_feature (78)..(79): n is a, c, g, or t
  misc_feature (156)..(156): n is a, c, g, or t
  misc_feature (258)..(258): n is a, c, g, or t
  misc_feature (348)..(348): n is a, c, g, or t
  misc_feature (649)..(649): n is a, c, g, or t
  misc_feature (668)..(668): n is a, c, g, or t
  misc_feature (700)..(700): n is a, c, g, or t
  misc_feature (867)..(867): n is a, c, g, or t
  misc_feature (1003)..(1003): n is a, c, g, or t
  misc_feature (1012)..(1012): n is a, c, g, or t
  misc_feature (1014)..(1014): n is a, c, g, or t
  misc_feature (1020)..(1020): n is a, c, g, or t
  misc_feature (1036)..(1036): n is a, c, g, or t
  misc_feature (1065)..(1065): n is a, c, g, or t
  misc_feature (1074)..(1074): n is a, c, g, or t
  misc_feature (1175)..(1175): n is a, c, g, or t
  misc_feature (1199)..(1199): n is a, c, g, or t
  misc_feature (1399)..(1399): n is a, c, g, or t
  misc_feature (1440)..(1440): n is a, c, g, or t
  misc_feature (1470)..(1470): n is a, c, g, or t
  misc_feature (1480)..(1480): n is a, c, g, or t
  misc_feature (1519)..(1519): n is a, c, g, or t
  misc_feature (1549)..(1549): n is a, c, g, or t
  misc_feature (1596)..(1596): n is a, c, g, or t
  misc_feature (1613)..(1613): n is a, c, g, or t
  misc_feature (1621)..(1621): n is a, c, g, or t
  misc_feature (1679)..(1679): n is a, c, g, or t
  Peptide Sequence Number=SeqID_7223
  Probeset Number=SeqID_14743
tgtgtttgtttgttgggtgggggggtggggggnggtgtnngcgtggnnntannaanngnnnannnnantttatattannaatatatatatttatatattacctctgtctatacataatatcttatgttattgcgccaactgcgcgccgcgcgacanctgcgcgacgaggacattgggcgtaagtcgtcatgaggtgtaagtgtggaggtgtgacaacatcaacactctaacacaaataaccctccctcttcatctctnagctcgctcgcatctctcactgtgacgcgtcgctgcgacccgtcaacgtcctctgtcgggacgtcgcctttgcttataactattcctttngtctcttattctttctcttgttagtttattaactatgtatagattcttctcttttaagttggtctcatgaatcgggggtgtagagtttgtatatatgtcaagagaaatgattcacaacaactctaataaggcagaaatgaggagggtgcctgaaggcaatatattacaccactatacgagccaatcttgtatataccaactactaatagtcgtaatccctcaccgcacacacccagcgcttgtgtttatcttgagtatagaggaaattaagagaagaggattataagaacgaagcctctgnagtgtgttcgggtggagtngtatggcgaaaccacagccatggcggaactcncatcaccaataacataaagcatctaatagagattatcaacactactacaacacatgatgcagtaggaaattagtgagttgagtattacgcaatagagagatgtgatggatgatgatgtgcgactttggcgtgaccggctttagtgagtaagtcgttgtagactcctngcgctgtactagcctggtgttggttatatgtgtacgtagtatattatatgtatgtctaagggagagttgcgagatatgagacacgacatgtagtgagttttgttcgtcgctagcgacaccaccacaccaccacccncataactcnanagcganacaacatatctaacangagaggatatagggaggagagagataggnatagcatgngcgtgatgggaaggatgtacgaagggcgaagaactagcacgccggcacacctgatgctctcatgttgtgctatgaacatatcgtcgcatctgtgtgctcgnggcctctcactctcgtgtgacacnagtctcgctgactcccctatcactgtagaagagtcggatagctatacatgtgctctcgctcctctctctatgtctgtctcttgtcgcatctacccgcatttcgcagtaggccgccactcacgacacgttatgacaaccagctcagcgtagctagtgtgtgagtatgacttgtgctctgcaacagatgatggcagtcacgngagcgatcgtgtcttgtagttgtatgtgcgtgtaactgtangatgacgacgacgagcttggactcacatcnctaatatacnctatactgagacacacgcacacatatcatgctatgatgnaaactacacaataatcattactagagagtnctgcttgatgctatggttgcactcgttgtagcgatccttcagtgatntgcgttcgtctgcgaancaggagantgctacagatatctagatcaggtcgactacagtcgacatactactgatacacacactn

SEQ ID NO: 4965 - DNA, 1717 bp, Glycine max
  misc_feature (4)..(5): n is a, c, g, or t
  misc_feature (16)..(16): n is a, c, g, or t
  misc_feature (23)..(23): n is a, c, g, or t
  misc_feature (33)..(33): n is a, c, g, or t
  misc_feature (48)..(48): n is a, c, g, or t
  misc_feature (86)..(86): n is a, c, g, or t
  misc_feature (93)..(93): n is a, c, g, or t
  misc_feature (267)..(267): n is a, c, g, or t
  misc_feature (291)..(291): n is a, c, g, or t
  misc_feature (316)..(316): n is a, c, g, or t
  misc_feature (320)..(320): n is a, c, g, or t
  misc_feature (919)..(919): n is a, c, g, or t
  misc_feature (1139)..(1139): n is a, c, g, or t
  misc_feature (1149)..(1149): n is a, c, g, or t
  misc_feature (1301)..(1301): n is a, c, g, or t
  misc_feature (1345)..(1345): n is a, c, g, or t
  misc_feature (1382)..(1382): n is a, c, g, or t
  misc_feature (1418)..(1418): n is a, c, g, or t
  misc_feature (1440)..(1440): n is a, c, g, or t
  misc_feature (1455)..(1455): n is a, c, g, or t
  misc_feature (1467)..(1467): n is a, c, g, or t
  misc_feature (1477)..(1477): n is a, c, g, or t
  misc_feature (1496)..(1496): n is a, c, g, or t
  misc_feature (1542)..(1542): n is a, c, g, or t
  misc_feature (1613)..(1613): n is a, c, g, or t
  misc_feature (1618)..(1618): n is a, c, g, or t
  misc_feature (1628)..(1628): n is a, c, g, or t
  misc_feature (1663)..(1663): n is a, c, g, or t
  misc_feature (1696)..(1696): n is a, c, g, or t
  misc_feature (1717)..(1717): n is a, c, g, or t
  Probeset Number=SeqID_14744
tttnnttttttttttnttttttnttttttaggnggggttgggttgttngtgtgattttgggtgttcgtggctttgtgttgcggggngaggagngtacggagagtgatatgcgtaagcggtagggagcgcactgcccgagcaacgtgcgatgcggcgcgtgattctttcgctacaccgcgcgaccccaacaaccaagaaaatttcgaacgatatatataatcgcataccaataatataataacacaacacccgaccacgagaacacanccgtagacacagatcagcatagtnacagagtaatattaataatgatgantcangatcctcaaaatggcaaacgacacgccacgtgttttacatttctctattcactaattaacactcacagatgataatatcgaactatcatcatcatcttcattacctgttttttcatacttcactccctactccgcgccacctatctcctatccatacataaatgccactccaatcctcaccaatatctcgacaccacgctgcatccccgcacacctcttctctgatctccctctacgccgcgcccttgctccgcggagggccgccacgaccgctcgtcgctcggtttatcacgccgctcccccgccggcacctcacgcgcaccgcacgtcgcctggccttcttagcatatttgtattcagcctctgtcttagtctgtgtttccgaccgtatgtcgtgtgccgcggattccgacctatctctagacgcgcgtgctatagcatgacgacgagcaccagtctcagtctcgcctgtatcagatcctgtcgtcgtcaacaccatacatatctctgcgtttgctcgtatcgtagtcacctcgcgcagcctaacatatagatcgacctcgacatcaactatgagagatatacatgacgccgcgttntgtaatatgatatcaataagccgtatgacgatcgatacggtgtcgtcgtgtactgtgtctcaagatgtgtcatgcgcatgtcgtatcagtaattatgccgtctagtgtacaattaatatgttgattgtctctcttcacacatatctactaccgtgttcttcgcatcacacactacggcacgcttactcatacatctacatcgacgcgccgcatgaacacnagatgtgtgnatgactcgtgagttgtcacgtgttgctcgtgcgcgctgcctcgcgccgtgcctcactcgtaattagacctcactctgacgctgacagcacatgtacatacacactaatcatgatcgctacactctcaatcacttatatcgacgcgacatacncatcgacattacacacacgcctactctatcgtctccagatgcantgcgtatccgacgtagtatcccataacattcatgctngtgtagcggagtagcgccggcgcgtccgcgccacantaccccatgctcgtctagactntcatcgcagcccgcngtgaacacgaanctccgactcntcatactcatctgagcatntagaggtagctcacactcaacatgctctcatactgtataagcgacnactacgatcctagtggatgtatacagcgacgcagtccgtcatacgacgtgcagcgagatgacgttgcgcgnagctncgtcgcacantacgtgacagcatgcatcgtgtgagcgtggtgggngatgctagtttagaacgacatcgcctgctattnaccatcgctgcggatcttctn

SEQ ID NO: 4966 - DNA, 963 bp, Glycine max
  Peptide Sequence Number=SeqID_7224
  Probeset Number=SeqID_14745
acagacgcgagcgcgttaaacgagagaagaacagagagacagatcagacaacaatggcagccaaaccagacctgaagttgttgggcatgtcggtgagtccattcgtcatccgtgttcgcatggcgctgcacatgaagggcgtgagccacgagtacatcgagcaggacctcttcaacaagagcgagctcctcctcgagtccagcccggtggagaagaaggtgcccgtgctcatccacgacggcaagcccgtatgcgactcgccggccatcgtgcagtacatcgacgaggtctgggccgccacggggccgccgatcctccccgccgacccctatgagcgcgccgtcgctcgtttctggaccgcctacgtggacgacaagctattccctgcttacgctggcactgctaaggcagccacggaggaggagaggacgcaacagattaacgagatgttcgcggtgatggggcagctggaggaggcatttgcccagtgctcaaacgggaaggccttcttcgccggcgactccatcggcaacctcgacatcgccgttggatgcaatctgctcttgctcgaggtgctacgcagtatgtatggcgtggagttcgtcgacactgggaggaccccgctcttggcagcgtgggcgaagcggttcggggaaaccgatgcggcgagggaggtggtgcccgacgtgcacgtcgccgtggagtacgccaagaagcgtcaggcttattgggctgctgccgcggctacaaagtgacatgattcagatcagatcagtccgagtactacggactgaaaattatctcaagtccataggatgttgctccaacaataaagaggacaaatcatggatacaccatcttaaacatgatgattaacttacctcacggggttatccaacaatcgctgatttagttattgatcctagtagtagtctagatacgcaacgaagtgacatttttttc

SEQ ID NO: 4967 - DNA, 264 bp, Glycine max
  Peptide Sequence Number=SeqID_7225
  Probeset Number=SeqID_14746
ctccatagaatacttcataatcccctgccagactgatgattcagggggcagcacaggtgttgttgtatatggaagggtacgccacctgatagacgcttatcttctatccgagaaaggactccccccagacttagatagatcttatatcacacatgtttctgggagacccccggattacaatccatgtgaggagctggacaacctgcgcctgcttgcacgtacattggtgctggaatgaacctagtccttccaagtaaatagcct

SEQ ID NO: 4968 - DNA, 465 bp, Glycine max
  misc_feature (14)..(14): n is a, c, g, or t
  misc_feature (16)..(16): n is a, c, g, or t
  misc_feature (234)..(234): n is a, c, g, or t
  misc_feature (245)..(245): n is a, c, g, or t
  misc_feature (249)..(249): n is a, c, g, or t
  misc_feature (269)..(269): n is a, c, g, or t
  misc_feature (271)..(271): n is a, c, g, or t
  Peptide Sequence Number=SeqID_7226
  Probeset Number=SeqID_14747
agctacgtaggccntncccccccccccatggagaagccagtaaagtgacggatgaaagtgtattatgtgcagttccttgcttacccaaaattggatcttctaatgatgtcaagaagatgaagtttaatgcaggcagtggacgaagtaagagattgagccctactagcaatgtgcttagtggaagacacatccatactcaacatgatgaaacatttctcttcagtctcgggattncttttgggatnatancttccatcttggcaaataananagaaatggacaagttaatagagttgttgaagcagactgaaagcttggttcaagatctacaacaggaacttgaaatgaaagattcaatgagagtgaaggagttacataatgaaaattatgattcacagggtacttgtgatcattccttctgtgataaggagctaaatggattttcacctgaaaagcacacagata

SEQ ID NO: 4969 - DNA, 423 bp, Glycine max
  Peptide Sequence Number=SeqID_7227
  Probeset Number=SeqID_14748
ccataaaaaccaccgtcgaatcctctctctccgccgtatctcctccgtcgacggagatcgcttccgtctcttctccggtgatctcgcctctcgttcagaacccatcagctgaactggaggtgacgacgaaaaacgttccggcgacgttgactccgccgccgtcgcagacgacgacggaggacaagcagctgaaacgaccgaatcgctgcacgacgtgcaggaaacgggtcgggttaaccgggtttaagtgccggtgcgggacgactttctgcggtgtccacaggtacccggaggtccacggatgcacctttgacttcaaatcggctggtcgtgaagagatcgcgaaggcgaacccgttggtcaaagcggcgaagcttcagaagatttgatctgggccgttcgatgcgttgacttttctgtctt

SEQ ID NO: 4970 - DNA, 446 bp, Glycine max
  Peptide Sequence Number=SeqID_7228
  Probeset Number=SeqID_14749
attttaaagccatcttccaagattgggtgtttcccctgattggccttaacacactccggggaaccgcaagcgcatttcccgttttcgccaatccaccacaaagggaaaatcttcaatccggctttagcataaacaagcgcgaattctgattttgtcattttgccgccaatccagtaaacgtaatttcgattccgtacatcttaccgatttctcgtaatgcggcaaaatattttttatgggggtgtatacccgtcgaggtgtaccagtagttgataacagactggtcaaagtctggaaaacccatatctcttaggtgtttagccaccgtgccgggcgattgcatatgctggataagtttatcaaattccgccgttaccatgattcatccgttgacgttgacaatgtttttatagtgtgtgagcataccaccaccttttggttgaagg

SEQ ID NO: 4971 - DNA, 845 bp, Glycine max
  misc_feature (845)..(845): n is a, c, g, or t
  Probeset Number=SeqID_14750
ataaaaaccctaaacacaaccaccgtcctcaaccaccatggcagagcgtgaccgccgcgaacgagagagggatagagaccgtgagcgcgaccgcgatagacgccgtgacagagacgaccgtgaccgtgaccgtgggattcgaagcaagaagtcccgatctcgtactccagaccaccaccaccacgctcgccctcctcgccacgtgcgctctcccgagaggtatcgatcccggtcccgctccgctgaccgtgaccgtcatcgccaccacagcaggcgcaggactccctctccagatcccccgccgcggaaacggcctcgccatggctcagcggaagacgacaaggaaaggagtcgcaaacgagaggagactgcgacggagcaagctaagaagaaggagaataaagaaccaagcggcggcggaggaggagaagcggaaacggatgtgaatgagatagagatgatgaagatgttagggatccctactggtttcgactccacgaaagggaagcatgtcgaaggcgctgacgtcagcgggattagggctgttaccaagcgccagccgaggcagtacatgaaccgtcgcggtggctttaaccgtcctttgcctgctgagcgtaaccgctaaaggtccttgtcaatgctgtcttaaacacgaggtcagatgatgagagttcgagcttgtatttactgcaattcttccccagacgctgttctaatgtccttagagaacaaacatgtactctctggagttagaaacatcttatctctttttaggggtttagagttgtgaatgatgttatgtgtattaatttcccggctctaacttttagactatgatttagttn

SEQ ID NO: 4972 - DNA, 1676 bp, Glycine max
  misc_feature (81)..(81): n is a, c, g, or t
  misc_feature (118)..(118): n is a, c, g, or t
  misc_feature (142)..(142): n is a, c, g, or t
  misc_feature (144)..(144): n is a, c, g, or t
  misc_feature (234)..(234): n is a, c, g, or t
  misc_feature (239)..(239): n is a, c, g, or t
  misc_feature (290)..(290): n is a, c, g, or t
  misc_feature (327)..(327): n is a, c, g, or t
  misc_feature (329)..(329): n is a, c, g, or t
  misc_feature (348)..(348): n is a, c, g, or t
  misc_feature (354)..(354): n is a, c, g, or t
  misc_feature (360)..(360): n is a, c, g, or t
  misc_feature (526)..(526): n is a, c, g, or t
  misc_feature (578)..(578): n is a, c, g, or t
  misc_feature (597)..(597): n is a, c, g, or t
  misc_feature (599)..(599): n is a, c, g, or t
  misc_feature (709)..(709): n is a, c, g, or t
  misc_feature (774)..(774): n is a, c, g, or t
  misc_feature (780)..(780): n is a, c, g, or t
  misc_feature (835)..(835): n is a, c, g, or t
  misc_feature (850)..(850): n is a, c, g, or t
  misc_feature (927)..(927): n is a, c, g, or t
  misc_feature (967)..(967): n is a, c, g, or t
  misc_feature (990)..(990): n is a, c, g, or t
  misc_feature (1032)..(1032): n is a, c, g, or t
  misc_feature (1043)..(1043): n is a, c, g, or t
  misc_feature (1084)..(1084): n is a, c, g, or t
  misc_feature (1099)..(1099): n is a, c, g, or t
  misc_feature (1146)..(1146): n is a, c, g, or t
  misc_feature (1170)..(1170): n is a, c, g, or t
  misc_feature (1188)..(1188): n is a, c, g, or t
  misc_feature (1235)..(1235): n is a, c, g, or t
  misc_feature (1256)..(1256): n is a, c, g, or t
  misc_feature (1308)..(1308): n is a, c, g, or t
  misc_feature (1350)..(1350): n is a, c, g, or t
  misc_feature (1383)..(1383): n is a, c, g, or t
  misc_feature (1419)..(1419): n is a, c, g, or t
  misc_feature (1453)..(1453): n is a, c, g, or t
  misc_feature (1457)..(1457): n is a, c, g, or t
  misc_feature (1488)..(1488): n is a, c, g, or t
  misc_feature (1515)..(1515): n is a, c, g, or t
  misc_feature (1517)..(1517): n is a, c, g, or t
  misc_feature (1566)..(1566): n is a, c, g, or t
  misc_feature (1589)..(1589): n is a, c, g, or t
  misc_feature (1595)..(1595): n is a, c, g, or t
  misc_feature (1634)..(1634): n is a, c, g, or t
  misc_feature (1638)..(1638): n is a, c, g, or t
  misc_feature (1646)..(1646): n is a, c, g, or t
  misc_feature (1652)..(1652): n is a, c, g, or t
  misc_feature (1676)..(1676): n is a, c, g, or t
  Peptide Sequence Number=SeqID_7229
  Probeset Number=SeqID_14751
ttataatataataatgtatgatagaagaatatagttgattaattaaaatcataatatcacttcctacacagagctatagancgaggacgcgatagcacgagtattatctagatcctgnctacccccccccccaccctctgtnanccggtcgtttattctttatattataataccccgctagctagggctcgcggcgacatacgcataatatgctggtcgctgtctacgctgcgnactcngctccttcgcgaggctgaaggtatgagagtgatatataacacatcttatcntatatatatatataactatatgaaagagtgttgagcntncagcgacgatatgttatcnagagtnaggttnagaaagagtatattatatagatatgcaggtgtgtatgtatactctcgtgtatctaggatgaaagcaatagagacctcaacctctacggtcgatctcttgtcttatctctctgcttactacgtgtcactcacgtgtgcgtaagtcatgatattgtagtgagtttatnaatgtggatgtggcgttcagccatattctgtcgatgtagccaccggcgtatntactaccacagtgcgttanangagagtatatgagagacaagtcagagtaactacacatacgagaatacatgacatagacatagacggttacctacgcatcgctcgatcgctcactacctacatactcgcangcagcagtctattaatgtcagaccgcgtgtatgagtgagagtgcagtcacacaccgcgcacgatnccagangtaatgacgagtagaaatagcgacattactactcacatcgatctagatatgatgngtgatgtatgatgantacaacgcagaggtgtggtcgcgtgcgctcttcatgtcgcgtcttagtgtacgatacatagacgagctacataagtngttgcatgatgacgcagtcagtcgcttcgcctgttcatantatattatcatgctgacgttatntgtgcaacacagtgacatcgacgtcaatgaatgtatatatantatatgtgatntcgtacgctgcaaataaggtgtgtgggcgcgcacgcacacntcatcgtaggaatgnactagatctctatcgtagaacgatcgagatacctgatcgaagagcanacactacgtatcatcatctcatanaataatcgaattgtatangataagatgaaagtatataactcatctatcgtacttatattgaccgncatgcacctcatcacgcactnatgacgccacgtgcatagagtgcgatgttcgctgcgtagtataatatcgagngaatgtaaggactcgctacctatcgcggcacgttgtgtgtgnatgtgttagtatgcgctcacagtgtcgtaatanagcacgtgtggcaattgcacgtgtagtgcgaccacngaggctgtacgatcatacgagagatgtcgcgcgnagangagcggatgtcgagtgctgatcgctccactngcgtagagccgcgcggatatatgattntntacacacacacagccatacgccatacgtgtcatctgcgaggaatggtgncacgatctcacgaacactgtaancacatncgattagttcacacgctaaacaactgaacgattatactnacanctagcganacgagnagacagcgacagagacagacgcgn

SEQ ID NO: 4973 - DNA, 1537 bp, Glycine max
  misc_feature (1)..(1): n is a, c, g, or t
  misc_feature (3)..(3): n is a, c, g, or t
  misc_feature (84)..(84): n is a, c, g, or t
  misc_feature (148)..(148): n is a, c, g, or t
  misc_feature (165)..(165): n is a, c, g, or t
  misc_feature (365)..(365): n is a, c, g, or t
  misc_feature (477)..(477): n is a, c, g, or t
  misc_feature (806)..(806): n is a, c, g, or t
  misc_feature (830)..(830): n is a, c, g, or t
  misc_feature (889)..(889): n is a, c, g, or t
  misc_feature (968)..(968): n is a, c, g, or t
  misc_feature (989)..(989): n is a, c, g, or t
  misc_feature (994)..(994): n is a, c, g, or t
  misc_feature (996)..(997): n is a, c, g, or t
  misc_feature (1095)..(1095): n is a, c, g, or t
  misc_feature (1333)..(1333): n is a, c, g, or t
  misc_feature (1387)..(1387): n is a, c, g, or t
  misc_feature (1397)..(1397): n is a, c, g, or t
  misc_feature (1520)..(1520): n is a, c, g, or t
  misc_feature (1522)..(1523): n is a, c, g, or t
  misc_feature (1528)..(1528): n is a, c, g, or t
  Probeset Number=SeqID_14752
ncntatcacgacggagcatgatcatacttcgtcgcgaccgggccgatggagtccgctacgtcagtctaatcacaatagggtcancatgtcaggatcacatgtccgagacactctatcaaacgctgactcacataacatgacagactantcacagtcacgtcaganacacgtgcgcgacagaatgtatcgtcttgagtatgtatgtatgctcactattgattaatatggtgtccattctacgttcatcgtttgcttcaactcacgacaggatactgtgacgcgtgagtctctgtaggtcgacaaaaatcagcacgaacatacaatatcatgagtccaagatgtcgagcaccactacagaatcgtcngtgaatggtatgtgatataaacgaatattatatgtagagatagtctatgcgaactatcgtcactgcaagtcaggtagggagtgtatgtagtatcagtgtaaagtatagtgtnaaacacagatatgtgagtacacatctgacgtcgtgctaccacacctacgcccacatcatacgagtacgtagtagaatataatagctgtaggagacgaagacgagaatcgacgtcgcgacgcgtcgcttgctgttctatttatgacacacgaactgaggtaatcaataatgatgaggagatcggcgtgctcgtgaggcgtgtcgcacaacatcaatatgatgatactatagtcgacgcacacacgtacagagtactgacacgtgctgcatcgatacctgcatcatagatatatatcatatcaatccgtcatcatccgcgcacgtgacgcnttcgtcaatcacagcataccgctncactggtcttgtctctactacgccaatcgcgtaccgacgatggagacagtatatatgcntactcatctctagtactatactactatgatagtgaggatctcttaggcagttgtgtatcttactgactatgcacacatnttcgtctcactccgtgcggtntcgcngnngatgctcctgtctatctcatactgtctcaatctctcatccactacacagtactgcactcgtgtctctcgttcgtcgatccgatgacgatagctctaanttaattaacgttgaagtagtatatgagtgtctaccgcacgcagcacatacgatcaccgcgacgacgcgacgacactcacagcatacatcgctcactcagtgacttcgcgtacatatgtacgcgattgcgacgcttgttatatatatagtatgacatcatatgtcgtctatctcagcgtgtgataggacgcatggactcattagacgtcattgagttatgtgtgatcagtaccgcaagngtagacagagtacgagcacgaggagagcgtgtcagggaggcgttgaagtgatgngaagagtcgngagcgccgtggacgtgagaacgagacgatgcacctatacatcataattcctacgagagtacgcgtcacacggtaacctcgccagcaacatacactagaaagctatagaaagagcaaacaatanannaaaanatagaaaaa

SEQ ID NO: 4974 - DNA, 1601 bp, Glycine max
  misc_feature (18)..(19): n is a, c, g, or t
  misc_feature (22)..(22): n is a, c, g, or t
  misc_feature (24)..(24): n is a, c, g, or t
  misc_feature (26)..(30): n is a, c, g, or t
  misc_feature (32)..(33): n is a, c, g, or t
  misc_feature (135)..(135): n is a, c, g, or t
  misc_feature (307)..(307): n is a, c, g, or t
  misc_feature (489)..(489): n is a, c, g, or t
  misc_feature (1034)..(1034): n is a, c, g, or t
  misc_feature (1192)..(1192): n is a, c, g, or t
  misc_feature (1579)..(1579): n is a, c, g, or t
  Peptide Sequence Number=SeqID_7230
  Probeset Number=SeqID_14753
tttggttttttttgtggnntgngngnnnnntnntggcgtctgaggaggttgagaagatagtataggtatgatgtggatattaataatattatgtttttatgaaggagagggaggaaaaaggaaagggagagtggnaggcgccccgcttgtctgtgcgtgtttgcgttttgttgcgctcctccaccatcttcatataaaaatattgttacagtatgcgtgccagcaagttgcggaggacgaagaatagggggacaaagaaataaatacaaaaaaactcccacaccactccgcaaacaatataagacanattaacaactattattattatatactagttctggtaattttattatatatatatattatgtatggtatgtggatgtaattactgctatacttctaccgcgccctcaccggatcttcttcccccctattatgcacttcattaattatagctatagagcgagaccgggaccaccagtccctctncaagtatctctgttgttctcgtgaaaagactagaggtatgatgagagatggaattgtacgggtggcgtgcgcggtggtgggtgcgagtttagtgtgtgtattgttatcgtttgccgcgcactcgcgcgccgtcgctgagcagtgcaactgtggggtgagcgtcaccacctttactcctcctagtagttttgctgtctagatgcgcttatcctagacacctatcgaccccgtcgacccacaccgcaccgcaagcgacagcagtagggcaccccaccccaccacgaattctcgggggtggacctactactaagtgtcggggcgcaagacgccgtggcttctgtatggtatagatagggacagcaggccgcgatgtctacctgtgtgacttgcctgcgttcatgtatgtaagcgagcgcgcgtatgatgactaaccttctcaagactctatagtcaagtgcggtaggttccaccgagtcataaaacttattattatagtatgcatcagttctcgaggtcattattttattggctgctgccttcaccgngtgcgccaaagtcttcacactcactggcctatgatactactgtcccacatgcccccgcgcacaatgcgacacacagacacaccaaactgcactgatctatgtatgctaagcacatcgtcgtactcaggtattactagttgatacacatctactacganaatactataattcgctgtcagtgcgcatgttcacaatcgccgtatatatttccattctatactctcatttatgtcgctatatcgctcactcctatctatattaaatctaactatatatctcaccgatgctctcacgtcgatcaccacgcagcacacacacacatctctactccattataacctcataaatacatcactcacgagaacataaaacacgtgccagagtgtctactaaccgatatatatcgcatcagacagcagagactcgccgctcgaacgagacctgcacctcgctattcggagtacctattgtgagatgaatacataataactatgccgcactacggtaagaagagacgcccatttgcaacatcaaccaccgagagnacgctctatgttctcccatctc

SEQ ID NO: 4975 - DNA, 679 bp, Glycine max
  misc_feature (679)..(679): n is a, c, g, or t
  Probeset Number=SeqID_14754
tcgtcaaaaaaccccaagtcacgccgatacgacggaggaagagaataggagatttgtcaacgcctaaagcctccgataatggcgtggatgcaaatgatacagagcgcgagatctcttctaaggacaactcaaccttcttcgactccatgcctctccagattctactccaaacctgctccttatgccgtgaaagttgggattcctgagttcttgagtgggattgggggaggagttgagactcatatcgctaaacttgaagcagagattggtgatctttcgaaactgcttgtgactcgtacactcaggctcaagaagcatggcgtcccttgcaaacataggaagctgatactgaaatatagccagaagtacaggctagggctatggaaacctagagctgacgctataaaggcctgattggttcctttcttctgtcgaattgcgagtgtgtcatgcgttgttttgctacttagttgtttttcagagtggtctaggcatagcaatgttgccagttacttgaaactcagtcattgttttttctgcattcatgtagtttagttatctccatgggtctggaaacgttaaagccaggtctggaaatcatgaaggagtaggtttctgaagtggtgaatgttttgtattggggctcaacatcgttcagaaatacatgtttgtttcagtn

SEQ ID NO: 4976 - DNA, 1718 bp, Glycine max
  misc_feature (36)..(37): n is a, c, g, or t
  misc_feature (105)..(105): n is a, c, g, or t
  misc_feature (204)..(204): n is a, c, g, or t
  misc_feature (1151)..(1151): n is a, c, g, or t
  misc_feature (1215)..(1215): n is a, c, g, or t
  misc_feature (1236)..(1236): n is a, c, g, or t
  misc_feature (1245)..(1245): n is a, c, g, or t
  misc_feature (1341)..(1341): n is a, c, g, or t
  misc_feature (1486)..(1486): n is a, c, g, or t
  misc_feature (1548)..(1548): n is a, c, g, or t
  misc_feature (1590)..(1590): n is a, c, g, or t
  misc_feature (1644)..(1644): n is a, c, g, or t
  Peptide Sequence Number=SeqID_7231
  Probeset Number=SeqID_14755
accacctatcttacccctatcacgtcgttcgtatgnnttatagtttagtttatcgtggtgggcaggaaatatcgagaagttggggggatcggaggtttaattacnccttcggaggtgtaggtttatacgtagggggagccctccgtcgcccccctggggtgtcgttggtgttgtttccggttttgcatgggctagtttgtcagngggattggcagtatatatcagggagagtcttgacgcggtatgtagaaaatcgctttttattgtccgcctccgtgtaggaaggacactgcctaaagcgttcgcattgcttgttgactgcgcgtggtggtgaagtgagaagctgagtcttaatgagggtatacgtgctcatgttacgcgggtcctcggtagcgacactgcgccttatatagttgattataggtagtataacataataacatgtcaatctttctcagccattactcggagctcgggtgactgtctgcgttgggcactcgaaatgagtggagagtatgacacggcagactgccgcgagccgactggattgtactgactcactagtgtgtctattgcgcgcctgttaatagagggatgtgagactcatatggtgagagacaatatcacgcacttaacagacacctacatgcagactatctcttagtgtttatatctctcgaattccatcaacatgagctagacgcgtcatgatgtcagtggcggtaggtagtgtacatatggataaactatgtggagtgagacttcgcgtcgcagtagtcctttctcgttcctcgtatctgtgctgttgatgaggagaacaatcggttaatatacaagcagagacatgtaggtctgacagggttaattgtgtgtacgatatagccagagaggactgcggagatgtaactacagtgcagaagcgtcaatcaactgtctcgttctctagccaagctcatatttatgctagacatgaggtctagggtgtatctcattgtgcggattaatacctgtcacatctcgatacggatgctatatggcggctcgctgaattattgctgtgactacacctctgagtaatagctatgtgtgattatagtgaatacaagagattacaactatctagagcgagccgactgagctgggtgtgacgncgagtcgcatgcttgtgaagcatgaatgtggagcagtcgactacgcgataactctctcagctangtacgctcatttcctaattanctatattgnttgctcatgctctagtccacgcgtgtgacgtgagagtgagaatcagtgatcacgtcaagagtggtagtgtcgttaatatttgaattcgcagcgtgncgtatggtcgaacgctgctcactctacttgcagagctcatagcgatacagtactgacctatactatctatgcactaagagataagcgagatactaaactagtgccatgtgctacaccatatactgtcaatctatatgtcgtgganacagtcactgacgaccgacgcacatatatgggtgctgtgccgcgtccgcgatcgtcagattngatacatgcgtcaagcacagacgtgtatcatgcgatgtgtanatgtgctctcaccgtataccgctatctatatctaacggacatatctcgcatgcnctgattgtagagctctcgacagattgacaaccgcagcacacatcgactgtgattctgcgcggaccgctctcgtt

SEQ ID NO: 4977 - DNA, 814 bp, Glycine max
  misc_feature (316)..(316): n is a, c, g, or t
  misc_feature (409)..(409): n is a, c, g, or t
  misc_feature (418)..(418): n is a, c, g, or t
  misc_feature (500)..(500): n is a, c, g, or t
  misc_feature (529)..(529): n is a, c, g, or t
  misc_feature (535)..(535): n is a, c, g, or t
  misc_feature (548)..(548): n is a, c, g, or t
  misc_feature (571)..(571): n is a, c, g, or t
  misc_feature (604)..(604): n is a, c, g, or t
  misc_feature (620)..(620): n is a, c, g, or t
  misc_feature (622)..(622): n is a, c, g, or t
  misc_feature (642)..(642): n is a, c, g, or t
  misc_feature (646)..(646): n is a, c, g, or t
  misc_feature (669)..(669): n is a, c, g, or t
  misc_feature (678)..(678): n is a, c, g, or t
  misc_feature (681)..(681): n is a, c, g, or t
  misc_feature (699)..(814): n is a, c, g, or t
  Probeset Number=SeqID_14756
gattgctatcctctctcacgaaatttatcacctcccctccctcttggctacgtattgtacctcccgtaaagcaagagatagagctccattgatagacgacagtctaaggcttgcagttgcaagacaacaacgccgtatttcattaaaatcgcaacaacttcatgtccaaattgttttcaaaagtaaggaaggaagaaaagcaagaagagaataatacaacacaagattttgaagtaatcagtaatcaaatggatgcactggtgttacaagattttcaaaacatggtgttggatcagtttgaaaagttggtcattgngggcactggtacatttggacgagtatatcttgtcagacacaaacccacaaacaaatattacgccatgaagcacttaaaaaaacagaggttgtncgactgaancaagtagagcatatcaattcagaaaaatcaatctttgcagtattagaccccatcatagtaattattcgtcatccaggatganaaatttggttatgatatggagacgttatngggggngtgtctccctgcncggcaggcaatcacatgaagccnccctttttgcggaaacggctgcctaaatttgcnggtggatttgggccananccacccaaattttgtgttcnggcnctaaattctcttggtgaagggtnaaaaatgcntgnggccaattacctaatttnnnnnnnnnnnnnnnnnnnnnnnnnnnnnnnnnnnnnnnnnnnnnnnnnnnnnnnnnnnnnnnnnnnnnnnnnnnnnnnnnnnnnnnnnnnnnnnnnnnnnnnnnnnnnnnnnnnn

SEQ ID NO: 4978 - DNA, 1743 bp, Glycine max
  misc_feature (184)..(184): n is a, c, g, or t
  misc_feature (319)..(319): n is a, c, g, or t
  misc_feature (472)..(472): n is a, c, g, or t
  misc_feature (475)..(475): n is a, c, g, or t
  misc_feature (482)..(482): n is a, c, g, or t
  misc_feature (539)..(539): n is a, c, g, or t
  misc_feature (543)..(543): n is a, c, g, or t
  misc_feature (599)..(599): n is a, c, g, or t
  misc_feature (669)..(669): n is a, c, g, or t
  misc_feature (708)..(708): n is a, c, g, or t
  misc_feature (741)..(741): n is a, c, g, or t
  misc_feature (824)..(824): n is a, c, g, or t
  misc_feature (828)..(828): n is a, c, g, or t
  misc_feature (861)..(861): n is a, c, g, or t
  misc_feature (935)..(936): n is a, c, g, or t
  misc_feature (939)..(939): n is a, c, g, or t
  misc_feature (964)..(964): n is a, c, g, or t
  misc_feature (1023)..(1023): n is a, c, g, or t
  misc_feature (1025)..(1027): n is a, c, g, or t
  misc_feature (1100)..(1100): n is a, c, g, or t
  misc_feature (1102)..(1102): n is a, c, g, or t
  misc_feature (1149)..(1149): n is a, c, g, or t
  misc_feature (1175)..(1175): n is a, c, g, or t
  misc_feature (1208)..(1208): n is a, c, g, or t
  misc_feature (1218)..(1218): n is a, c, g, or t
  misc_feature (1276)..(1276): n is a, c, g, or t
  misc_feature (1292)..(1292): n is a, c, g, or t
  misc_feature (1315)..(1315): n is a, c, g, or t
  misc_feature (1331)..(1331): n is a, c, g, or t
  misc_feature (1341)..(1341): n is a, c, g, or t
  misc_feature (1352)..(1352): n is a, c, g, or t
  misc_feature (1395)..(1395): n is a, c, g, or t
  misc_feature (1402)..(1402): n is a, c, g, or t
  misc_feature (1417)..(1417): n is a, c, g, or t
  misc_feature (1427)..(1427): n is a, c, g, or t
  misc_feature (1474)..(1474): n is a, c, g, or t
  misc_feature (1476)..(1478): n is a, c, g, or t
  misc_feature (1499)..(1499): n is a, c, g, or t
  misc_feature (1523)..(1523): n is a, c, g, or t
  misc_feature (1535)..(1535): n is a, c, g, or t
  misc_feature (1550)..(1550): n is a, c, g, or t
  misc_feature (1553)..(1553): n is a, c, g, or t
  misc_feature (1556)..(1556): n is a, c, g, or t
  misc_feature (1606)..(1606): n is a, c, g, or t
  misc_feature (1618)..(1618): n is a, c, g, or t
  misc_feature (1649)..(1649): n is a, c, g, or t
  misc_feature (1669)..(1669): n is a, c, g, or t
  misc_feature (1680)..(1680): n is a, c, g, or t
  misc_feature (1682)..(1682): n is a, c, g, or t
  Peptide Sequence Number=SeqID_7232
  Probeset Number=SeqID_14757
cttcatagaataggttgttctactctatatcatccaacactcacgcatcaatagacacccgctccctcgcgtcagcactaactcgtctgcggcgtcccgggcgtcccgtctgcgacgcgaccagccgtcaatagacaacttggatagattatcacaccaacgtgggtccatgctatcgctattntctctacttcttatttatcttcccatctcgtctctaccactctactacgcatacaattggatgtcaccgtgtatcttatgagtaagcagtgaagcacgagtgacatccatactcactaacctctctatgatcgtnatccgtctatcatctcaacacgcagctattctctcacatatctcatacatccatcgcaactgcttacttcataacacacatactctcacgcacacgcaccaaccaacgcgtcactgagactgcgcaatgacgagtagctatgtgagacatctnctnccgtctngattgtgattatgacgagcatatttagagtatacatttcatgatggaatacatgtgntgcngtgactctaattatacagcctgacgtcatagatgaccgatgcacgactcttacgantctacgctatacatctctatactctgtattgcttgcgtactgcacccttacatgatcgtagacgcacacncactggcacagaccatctccgcattagtgactcacgctnctaccaccatctatctatctcgggtctctctcnacactgacacgcatgatacaaatctacaggctactatttgcatagctcgagactgatagtacagacacgatcgacgtgcgtanttcnttactatacgaggtgtatatgtatgatgagctnagttgtgtcgcgcatgtgtagctagcgagtagcagtcggcatatgcgtcactatatccagcgtggtcgcgcccnnctnttatctatcttacaaatagcacaanatacgcgcatcagcttatgactagactctccactccttctaatagtatactactaggangnnnacagcgaggtacgatacccactcctccctctactcacgagtactatcacctagagtcgcacgcatcgcttgcncntcgctatgagcatcatatgctacagatctctctggaccactacgtcnctacaatactgtgcatagtatatgtncaaaaccaggtcagcaaaccacgtcagcgcccntgtgtagatngacgatggtcgcgacgcgagtccgatctctcatccgcactgagtgtacgtagtgcgtnctgccgactacacgcntctcgactcacatacgcgctacntgcactagcactgtgnacgactcgcntcctgatcgcngacgacgagcgatacgatcgtcacacagaactcagattaggancatgcancacacgatatcaganacagttagtntacttatgcgatacgaagcgccgtatctatcgtatactgttccgccncnnnctgtatgtgctgaattctaantgatctcatatgcagacatcatgnagtacgaccganctatcattgtagtcncanatnttaacagtaatcgatctcgtactactgtgctccctgctgccacgcaccantgcactgcagtnacacacttatacgtgatacactatcatcgcncatatctatagtatagcgangtcctacatananctactactccccatctacagtactatattatctcatcacggctctgctgacgctgtagtag

SEQ ID NO: 4979 - DNA, 541 bp, Glycine max
  Probeset Number=SeqID_14758
gttgattaatatctcttaactataactgcgttaacctctgtcagtctggaacatatatactgtgactggctaggcatggttgagcttcggggtaatcataagggctgtgcaattgccaacactgttgattctgaggggggttcctcattgtggggaattttcacaaagctgaggccagagattagacatcacaaatgggaggtaaagtttttgatttttatgacccctgattgctgggaggaaggctgagggttgcaatgaatgagaggggctgcgggacccaccatgcagagcgcaggagggtgagtgccattgaagttcaaggtaacaatagttaagagacagaaaaccttaacatgcgctggggcgggataagacagattggaactgcttggtttgatggaacaaaaggggaaacagaaggagccatattgcctggagacacatttatttatcagattgaggtaaacaggcctggaacatatctataccacacacactatggaatgcaagaataagcggggctatgtgggatgattgg

SEQ ID NO: 4980 - DNA, 1529 bp, Glycine max
  misc_feature (19)..(20): n is a, c, g, or t
  misc_feature (22)..(22): n is a, c, g, or t
  misc_feature (26)..(33): n is a, c, g, or t
  misc_feature (35)..(39): n is a, c, g, or t
  misc_feature (48)..(48): n is a, c, g, or t
  misc_feature (51)..(51): n is a, c, g, or t
  misc_feature (55)..(55): n is a, c, g, or t
  misc_feature (95)..(96): n is a, c, g, or t
  misc_feature (120)..(120): n is a, c, g, or t
  misc_feature (160)..(160): n is a, c, g, or t
  misc_feature (183)..(183): n is a, c, g, or t
  misc_feature (242)..(242): n is a, c, g, or t
  misc_feature (307)..(307): n is a, c, g, or t
  misc_feature (404)..(404): n is a, c, g, or t
  misc_feature (431)..(431): n is a, c, g, or t
  misc_feature (490)..(490): n is a, c, g, or t
  misc_feature (525)..(525): n is a, c, g, or t
  misc_feature (552)..(552): n is a, c, g, or t
  misc_feature (578)..(578): n is a, c, g, or t
  misc_feature (1038)..(1038): n is a, c, g, or t
  misc_feature (1483)..(1483): n is a, c, g, or t
  misc_feature (1507)..(1507): n is a, c, g, or t
  Peptide Sequence Number=SeqID_7233
  Probeset Number=SeqID_14759
ggtgtgtgtgtgtggcccnncncccnnnnnnnncnnnnnttggtcgtntgngtgnggctctgcgtggtcccgtccctctgcgtgtcgtgctgcgnnggggttctcggcgctagagtagangtgttggtgggtggctcctctccttcctatatgtaacggnaacgagtcttatctcatcacganaaaaaagagactctctcacatcctatcatacgttcacccgctcacgcggagagaaggtnagtagtggctcctgctgggcgctcgtgctactctgtgtggctcagtgccactggagccagtcgcnctcgtcgagcacagcaaatgccgagtaagacgatccaacgacgagataggtgtacgctcgtgtcttctccacgccgcgagtagttgaatataaaccnagcactacaacaaaacatacacacaanagaacagccacgcaattgtacctctcatgccgctggcaagacttcaaaaacattataancttaattctcgtcctcgcttataagactcagttantagagatgttgagggaagagttaatcnaccttctgcctatcctctatggaggngaggaaggagcaggttcagcgcgccactcctacacgcgccgccacggcagccccggccatcgatgcatctgtatagcatatacagaacacccgacgcaagagacacgtgagcccgcaataatgtcttatcctcgaccagtagtgtgtgtgatatactatagtctctatacatttgtatagattgttattctgtctgtgacctcacgcgcagataccacacgacacataaataagatccacagcctgtctctcgctgagatggcctgatcatgtcggaatatcccacaacataagcattatgttcacgacgtggagtagcgcgtctcttatctctcctctcctcacaccgtgatgagagtgaagctactcgtgcccctcccacgacgacgagcggaaagacacgagatctaccacggacaggcacatggactgctatcttcatactctactagtatctcanaccactcgttgtacacgggtatataactactctctactatccagtggtatgtccgacgattcagtcttattttggatatcaaccacaccccttccaatcatcactacatatataacgtgagaataatgagatataggtgtgttcttgattgtgagtctgcaccatcaccgccctcgttatccttcttctgtgccaatctctcactcatcagtatatgtacgagttgcgtcgagcgcacacgggcaccacgacacatcgactgagtcctatgtgtaaatacacatcagacaagacacagaaacaacaccgaggccacgaactgcactccgtctctaccgttctcctcgctgcgccgctcacacgtagactaacttatatatctgcttgagtcgcgatcctgatcttcgtgtgatgaagaggcgacctcagtcactgctcatatgangacatgcgtctgatgtgctcgcgngcattaatcctcactcctccac

SEQ ID NO: 4981 - DNA, 1431 bp, Glycine max
  misc_feature (916)..(916): n is a, c, g, or t
  misc_feature (964)..(964): n is a, c, g, or t
  misc_feature (997)..(997): n is a, c, g, or t
  misc_feature (1049)..(1049): n is a, c, g, or t
  misc_feature (1108)..(1108): n is a, c, g, or t
  misc_feature (1324)..(1324): n is a, c, g, or t
  Peptide Sequence Number=SeqID_7234
  Probeset Number=SeqID_14760
gttgttagtgtggcctatctctatctccaccccttctctccctctccctcgctcttcggttaatggcgtgccatccgtgttttcggactaacattgtctctctgctccctctcgttttgtgtcgcggacgagtgctgccgatcattggaggggttgtatgccccgcacgcgccgggggagtgcgagaaaggacggcggagttggtctcttaaccaattcatccacgttgtattggtgtcgatggttacaaaaagcaacgctctgaaacacaacccgcacgctgtttgtatatctgtcataatccccacaaaccgcctcccgcctgttatgccctactcaattagaagagtgtgagggatggcggaggtgcgttatatgccggcaggcgcggccggtgcgtctgtgcgatgctcgagaatgttaaattagtaatccagcaccatggtatacgcggcgagggagagaggagttttgtatgggggagagcacgcgcggccagcgccccgtgatgatgacacgctttataatactgccgcgctccacgatattgagctaataaaggatagtgacgcacgatgtcgcgccgcgtccgtctttctcctattattatcatcacagagtcgcgcgcacgctcacagtgacatcgatattacatctccgaccgccctcgcgtttactacgtggagttttatggcgccgagtttcggcggggaggtgttgtatcggacccacccggtgacatgtgtggagaccggcctcactcatcttaacgactagtaaggtgataggtgccgattagtgtacgtcgagacgtgggattgaacactgtagagaaggcgtgtgtggtggcagttacacacacacgcacatactggtgtgagatatcaatgaacgccggatagagatgtaacaacanattggtacgtaacgcgccgaaggccgccgctcgcgctctgagtgttgncacgcgcgttcgtgatcgcacgccaaccaagcngagagcgggcgagttgctgtggtgagggtggcttggtttccgctccccggcntcgcacgcttctcaacataataattatttataagaccacgtgtgttggacgtgaacacncgttactctgtgtgagatgacaacgttgcgcacgccaccagccactgttctagcttggtctgcctggtacatgagccctataccttattagtggagttagtatcgttcaaccgattatagacccgagtgaagttccgtgatagatgcgtttggtgtgctggcgtcagcacgcggatgctagatggggtgcggatatatctcatagacacgagactncgacggaagaacaacagttttatacaatatatatatgaacgataccgacactagttaatggcgcagtcgggtagatgcctgtgtctattgagatactgtgtgtgtat

SEQ ID NO: 4982 - DNA, 257 bp, Glycine max
  Probeset Number=SeqID_14761
agagtgttggtggtcaacacctcaatacgcttcagggttcgcaaggtatcatcaattttggattgccctatcaagaggaagtggagaaaatgcaggggtttgtgacagggcttgctaatctgcaaggagctactcttagggctaaagatattgctcaggctgctctttatcttgctagtgatgagtccaagtatgttagtggtcataatcatgttgtggatggtggagtcacctcctcaagaaaatgcattggtttg

SEQ ID NO: 4983 - DNA, 169 bp, Glycine max
  Peptide Sequence Number=SeqID_7235
  Probeset Number=SeqID_14762
aaagtctcctgcggagtccaggttagctcagctatccgtgtaagagttttgatcccaacaatacttgggtcctccgaaagacccaaacagagaggaggagccgaggaacgacggtcgactcggctgcacgttcgcgggttgcgtcctagagcaaaaaaaaaaaaaaaaa

SEQ ID NO: 4984 - DNA, 520 bp, Glycine max
  misc_feature (194)..(194): n is a, c, g, or t
  misc_feature (223)..(223): n is a, c, g, or t
  misc_feature (232)..(232): n is a, c, g, or t
  misc_feature (238)..(238): n is a, c, g, or t
  misc_feature (242)..(242): n is a, c, g, or t
  misc_feature (249)..(249): n is a, c, g, or t
  misc_feature (252)..(253): n is a, c, g, or t
  misc_feature (259)..(262): n is a, c, g, or t
  misc_feature (265)..(265): n is a, c, g, or t
  misc_feature (268)..(268): n is a, c, g, or t
  misc_feature (272)..(272): n is a, c, g, or t
  misc_feature (274)..(278): n is a, c, g, or t
  misc_feature (283)..(283): n is a, c, g, or t
  misc_feature (287)..(287): n is a, c, g, or t
  misc_feature (292)..(292): n is a, c, g, or t
  misc_feature (295)..(295): n is a, c, g, or t
  misc_feature (300)..(303): n is a, c, g, or t
  misc_feature (305)..(305): n is a, c, g, or t
  misc_feature (310)..(311): n is a, c, g, or t
  misc_feature (314)..(314): n is a, c, g, or t
  misc_feature (323)..(325): n is a, c, g, or t
  misc_feature (327)..(327): n is a, c, g, or t
  misc_feature (344)..(344): n is a, c, g, or t
  misc_feature (346)..(346): n is a, c, g, or t
  misc_feature (352)..(352): n is a, c, g, or t
  misc_feature (354)..(355): n is a, c, g, or t
  misc_feature (362)..(362): n is a, c, g, or t
  misc_feature (374)..(374): n is a, c, g, or t
  misc_feature (379)..(379): n is a, c, g, or t
  misc_feature (381)..(382): n is a, c, g, or t
  misc_feature (386)..(387): n is a, c, g, or t
  misc_feature (391)..(392): n is a, c, g, or t
  misc_feature (394)..(394): n is a, c, g, or t
  misc_feature (397)..(397): n is a, c, g, or t
  misc_feature (403)..(403): n is a, c, g, or t
  misc_feature (409)..(410): n is a, c, g, or t
  misc_feature (413)..(413): n is a, c, g, or t
  misc_feature (415)..(415): n is a, c, g, or t
  misc_feature (418)..(419): n is a, c, g, or t
  misc_feature (421)..(422): n is a, c, g, or t
  misc_feature (424)..(424): n is a, c, g, or t
  misc_feature (428)..(428): n is a, c, g, or t
  misc_feature (430)..(430): n is a, c, g, or t
  misc_feature (433)..(434): n is a, c, g, or t
  misc_feature (438)..(439): n is a, c, g, or t
  misc_feature (444)..(444): n is a, c, g, or t
  misc_feature (447)..(447): n is a, c, g, or t
  misc_feature (451)..(451): n is a, c, g, or t
  misc_feature (453)..(453): n is a, c, g, or t
  misc_feature (455)..(456): n is a, c, g, or t
  misc_feature (463)..(463): n is a, c, g, or t
  misc_feature (466)..(466): n is a, c, g, or t
  misc_feature (470)..(471): n is a, c, g, or t
  misc_feature (473)..(473): n is a, c, g, or t
  misc_feature (476)..(476): n is a, c, g, or t
  misc_feature (479)..(480): n is a, c, g, or t
  misc_feature (483)..(483): n is a, c, g, or t
  misc_feature (491)..(492): n is a, c, g, or t
  misc_feature (494)..(494): n is a, c, g, or t
  misc_feature (496)..(497): n is a, c, g, or t
  misc_feature (500)..(500): n is a, c, g, or t
  misc_feature (503)..(503): n is a, c, g, or t
  misc_feature (506)..(507): n is a, c, g, or t
  misc_feature (509)..(509): n is a, c, g, or t
  misc_feature (513)..(514): n is a, c, g, or t
  misc_feature (518)..(518): n is a, c, g, or t
  misc_feature (520)..(520): n is a, c, g, or t
  Probeset Number=SeqID_14763
aaaaaattctctcctccatcaaaactctccaaagatgacaaccgtagccgcaacaggcatcaacgtcgcgactccacgactggtcattcgaccagcggctcgtctatacgccccggtccgtttgaattacccgtggaaattcggttcgatgaaccggatggttacgtcggtgaaggcgacatcggaaggagggntgatatcggataaggcggcgcacagtatncaggtcttngcaggngacntggcgtngannttattnnnnctncangtancnnnnncgggngggntcccnctnccgtnnnncnccccnnccntctgctctnnntnatattactccgtccccntntgcccnannctccgcncttcgtcttccnccctngnngccnnctanncngcngtcccnatccgnnatntnacnncnncncatncnccnngccnntcttncancctncntnntcctccntangacnncnagnctnncantcccgggnngntnngtnccnttnntnctanncctntn

SEQ ID NO: 4985 - DNA, 600 bp, Glycine max
  Peptide Sequence Number=SeqID_7236
  Probeset Number=SeqID_14764
aaaaacagtgtgccattaccttttaatttgttgtgcccttcctgtttgtcgtgcgcacgccggccctagcaacctccttcgtagcctcgtaaccatttgcccttcatctccggcgtcgtgccctcccttcatctctgagttgtagtgctctgaacatactccattctcgactctgtctgtcaaactataccgttttgcaattcatcgaacgatagcgtgttcatttccttttctttcacttagacccatgaattttatcagttggcatcactggcattctgcctacttgttgcttgggtgtgtcttctacttgtgcgtaaaatctttgaattctaggacttgaacaactttgacagtgagcttgaagagtttgccagaatattctacaaggacacagtttgacattggcttctcatggacgagaaaatatcaagttgaggaattccatcattcaagggtctggatagcttgtgtaagcaagtggtgaatgctttgttggtcggtgaaaatcttgaaatgatgatagatcagactaatggacgaccttactgtgtgaggacagcacccaccgccgtggccgaagcatccattttaatatga

SEQ ID NO: 4986 - DNA, 1510 bp, Glycine max
  misc_feature (14)..(14): n is a, c, g, or t
  misc_feature (119)..(119): n is a, c, g, or t
  misc_feature (149)..(149): n is a, c, g, or t
  misc_feature (184)..(184): n is a, c, g, or t
  misc_feature (260)..(260): n is a, c, g, or t
  misc_feature (344)..(344): n is a, c, g, or t
  misc_feature (365)..(365): n is a, c, g, or t
  misc_feature (454)..(454): n is a, c, g, or t
  misc_feature (556)..(556): n is a, c, g, or t
  misc_feature (805)..(805): n is a, c, g, or t
  misc_feature (839)..(839): n is a, c, g, or t
  misc_feature (1324)..(1324): n is a, c, g, or t
  misc_feature (1398)..(1398): n is a, c, g, or t
  misc_feature (1455)..(1455): n is a, c, g, or t
  misc_feature (1458)..(1458): n is a, c, g, or t
  misc_feature (1465)..(1465): n is a, c, g, or t
  misc_feature (1473)..(1473): n is a, c, g, or t
  misc_feature (1479)..(1481): n is a, c, g, or t
  misc_feature (1491)..(1491): n is a, c, g, or t
  Probeset Number=SeqID_14765
cactcgagtacgtnctacgttagtgagaccgcatgcgtgcgctactcatgagttctagtaggtgtgcagcgtgtggtacagaggtgctacgtatctgtcatatcgactgtctgagaagntggactgacgctatacacgcgcgtcacggncacacacgcgtgtgagctggtttatgttagtgcgncgtcgtatgtcttgcacgcgtgcgtatgtgtaggcggagcactcgactgatgtatctacagaatcacgcatctctnctgagagggtatgtgcacgcgtgacgtcgggcgctgggcgagtacgaggtgcgtggccgcggcacccgacgaacgcacatcgcngctatgcgacacaccatgatnatgacgccactctacacatcaggagtccgcggtggctcgcgcgtgatcgcgaggtgatacgtacttagcagaaagcatcagtgctacanaatatatactcactgtagaagagtgtgtgtgtgttcagttgttcgatctacgcgcgatatcatataacattaatatacacctaatttgtatcgcgtgtatgngtgttactgcgcagtagcggtcggccagctgcatcagtacatactcaccaccacgctgttgtgggggacgggggtggtgtgtgttgcttccgctgtacttctgacaagagtgtatataatcattatatcagcctatcttatgtattgtatatacgagcgtatgagcgagatattccgtgcgtgtgtgtgtggccggtcgcagctcgactcactttgtgtagtcgcggggtgctggtgtggtggttggcngcattgtagaggtatattcatagatattgtgatngtttttattttatctttacttttttctctctttttatttatataagtatcgtttatcttctctgcatatacatacactacacatagagtgtattatatctacatttattattactgctttgtcttctctcttttactatttctgtcgttatctctctacatctacgcctatcagccatacctcgccggtgcatagacgagatataactcaagaggtcatacacgatacaaccttaagtacatgttcctccatcattaacatcatgaaactgttcgctcctatccgtccacctacactccatctctttctcctcactttctcttccttcaacttaaaattgatagtaatataatattctacatcgctctcacctagcttcatatatagaatgagtagatgtaccaagatacatcaacctcacccgtgccgggcctggatggtattagtgggggccaaccaaacaaactatatcataaataaatatnatctcctcagccctactcatctctgccccctatgtgtacggtatgtggtcagtcgactttttataatattgtangtggtgaggtatgttggctctgcgtgctggatgcgagaaaggaggagtggaggtagncancgccgcnccgtgctnccgccnnnaagacaaaanaaacaacacaccccacccc

SEQ ID NO: 4987 - DNA, 412 bp, Glycine max
  misc_feature (396)..(396): n is a, c, g, or t
  Peptide Sequence Number=SeqID_7237
  Probeset Number=SeqID_14766
cagattttgacaaaggtatctgggttaagaaatacagcatgccttcacatgttgctaggtttggcaatccttttctgatgttagatgatgggagaattttcttcaatcggttggattatggactaggtttctttagtgctggagagcatggtgagggatttctgcaaagttatgatccaacaaatgacacttctggtgaggcactaaaactgaaagagtccaaatccattggcgtttacacaggaagcctgctgagtttatagagtagctgtcagtaatgaggtgaataatgcatcgaactggctggtcaccttatgttgtatatgtgaacaattagtgagagaatgttctgatgcatgcattgatgaaaatgtaagtgtgcgttcaaagtatgtnatgttaatctctgatg

SEQ ID NO: 4988 - DNA, 1382 bp, Glycine max
  misc_feature (13)..(13): n is a, c, g, or t
  misc_feature (36)..(36): n is a, c, g, or t
  misc_feature (49)..(49): n is a, c, g, or t
  misc_feature (52)..(52): n is a, c, g, or t
  misc_feature (152)..(152): n is a, c, g, or t
  misc_feature (194)..(194): n is a, c, g, or t
  misc_feature (320)..(320): n is a, c, g, or t
  misc_feature (730)..(730): n is a, c, g, or t
  misc_feature (815)..(815): n is a, c, g, or t
  misc_feature (838)..(838): n is a, c, g, or t
  misc_feature (924)..(924): n is a, c, g, or t
  misc_feature (1119)..(1119): n is a, c, g, or t
  misc_feature (1198)..(1198): n is a, c, g, or t
  misc_feature (1283)..(1283): n is a, c, g, or t
  misc_feature (1286)..(1286): n is a, c, g, or t
  misc_feature (1336)..(1336): n is a, c, g, or t
  misc_feature (1340)..(1340): n is a, c, g, or t
  misc_feature (1355)..(1357): n is a, c, g, or t
  misc_feature (1377)..(1377): n is a, c, g, or t
  misc_feature (1382)..(1382): n is a, c, g, or t
  Probeset Number=SeqID_14767
aagtagatgagantgtagagagagcggacgcgcacncggagaggagtgngtntttgtaggcgcatgggcgagcgcgcgagagtggagtgagggtaagtagagcgcgcagcgaggaggcggaattgttgtgtgcacgcgtgcggagatgtcgntacagtttctagtcgtcgcccgcgtattgtgtgtagagtacnggagccgcgcctcgcattatggatgatgttatgatgtgtgtgtggcgcagcgcacgcgcgcgagaagggatggcgtcagtatgtagtgcgcggtagagggagtggagaggataaggagagggtccnagggagcgcgcagagattcatggttgttagagccgcgaccgttcgcacgcgaagcgcacgaataagagggatggcagtaggatgtacaacgacacagcacgaggatgtgtggtgagacaacacaaccaagtatatttgaatacggaggagaagaggaaagtggtggggagtgggtggtgagggggtgggccagcatcgagagcgcagctagttatacaagttgtatataggcagagggagaatatgagtagtatgagaatgataggaaggcagcgagaagtgtgagtagggtaagtaggaggcgacacgcagggctgtcgagagtcgcagtgtgatatgtagggaagcgacgcgcgctgtgagtgttgccgcttgtgtggtgtttgttatatattccacccataatattnttatatcaccgatataatctccaccaccccaatatagagtagcaggcggggtgtgtgtagtggtggttggccgcggtcgcgctgnggcggagcactatgatagtggcntcgcatatttgttggtgtggattggtaccggcaaccagtgggtgatagagatagagaagagacagagaagaagtgcggagaagacnaaggggcaaggtggtggttgaggtaggacgcgtgtgtagtgtacgagagatatattggtgtgttgcgtggtagagtggacacgcacgagacagagttgtgatgctctcagcgcgtctagtgtttatattttaagtatttgtgtagcgcacggaggagggagtgtgtgagtacgcgaaggaataggtgggggctcngtcgttggcgcgcacacgcatctccggcggcggggtgtgcgcgaggtgttagtatttagcgcaagcgcggctgtgtganttggtggtcgcgcgagaggtatgtatgaggagagcaagaggcagaggttttataaataacagccgactgtaccgcgggcgccgtngancgtgggggcgcgacgacactcatgttaccgcagagttcgcggtttctccncgantgattgagaaagatnnncgagaaacaagggggggggnttttn

SEQ ID NO: 4989 - DNA, 1362 bp, Glycine max
  misc_feature (239)..(239): n is a, c, g, or t
  misc_feature (475)..(475): n is a, c, g, or t
  misc_feature (485)..(485): n is a, c, g, or t
  misc_feature (517)..(517): n is a, c, g, or t
  misc_feature (661)..(662): n is a, c, g, or t
  misc_feature (678)..(678): n is a, c, g, or t
  misc_feature (704)..(704): n is a, c, g, or t
  misc_feature (706)..(706): n is a, c, g, or t
  misc_feature (718)..(718): n is a, c, g, or t
  misc_feature (730)..(730): n is a, c, g, or t
  misc_feature (741)..(741): n is a, c, g, or t
  misc_feature (745)..(746): n is a, c, g, or t
  misc_feature (748)..(749): n is a, c, g, or t
  misc_feature (785)..(785): n is a, c, g, or t
  misc_feature (794)..(796): n is a, c, g, or t
  misc_feature (800)..(800): n is a, c, g, or t
  misc_feature (802)..(802): n is a, c, g, or t
  misc_feature (807)..(808): n is a, c, g, or t
  misc_feature (811)..(813): n is a, c, g, or t
  misc_feature (817)..(817): n is a, c, g, or t
  misc_feature (819)..(819): n is a, c, g, or t
  misc_feature (839)..(839): n is a, c, g, or t
  misc_feature (841)..(841): n is a, c, g, or t
  misc_feature (851)..(851): n is a, c, g, or t
  misc_feature (861)..(862): n is a, c, g, or t
  misc_feature (876)..(877): n is a, c, g, or t
  misc_feature (886)..(886): n is a, c, g, or t
  misc_feature (929)..(930): n is a, c, g, or t
  misc_feature (938)..(945): n is a, c, g, or t
  misc_feature (948)..(949): n is a, c, g, or t
  misc_feature (993)..(993): n is a, c, g, or t
  misc_feature (1000)..(1001): n is a, c, g, or t
  misc_feature (1006)..(1006): n is a, c, g, or t
  misc_feature (1038)..(1038): n is a, c, g, or t
  misc_feature (1045)..(1046): n is a, c, g, or t
  misc_feature (1050)..(1050): n is a, c, g, or t
  misc_feature (1144)..(1144): n is a, c, g, or t
  misc_feature (1167)..(1168): n is a, c, g, or t
  misc_feature (1201)..(1202): n is a, c, g, or t
  misc_feature (1216)..(1216): n is a, c, g, or t
  misc_feature (1239)..(1239): n is a, c, g, or t
  misc_feature (1243)..(1243): n is a, c, g, or t
  misc_feature (1266)..(1266): n is a, c, g, or t
  misc_feature (1277)..(1277): n is a, c, g, or t
  misc_feature (1292)..(1292): n is a, c, g, or t
  misc_feature (1301)..(1301): n is a, c, g, or t
  misc_feature (1310)..(1310): n is a, c, g, or t
  misc_feature (1338)..(1338): n is a, c, g, or t
  misc_feature (1342)..(1342): n is a, c, g, or t
  misc_feature (1358)..(1358): n is a, c, g, or t
  Peptide Sequence Number=SeqID_7238
  Probeset Number=SeqID_14768
actcccctctccctcctcactctcctctctccggttcttgccactgtcagtttgaatgcaccttctctctcggttatgtctagaagtataggcctcttccagctgcccgtcggtgctgggccagcattcttggcaaactatactacctccgcgcgccgtgtccgaggcaggccagtatccacaacatatacccttcttataccctctctctcgaggcctgtgtagtggatattctctcngctacgatattatagcctttattatggccggcgcagccagaacactagaagtatagtgcagaaagtcagtagagttcacacagtggttacgtcacccgctatcactctctgtctggtctatccactctagaggccgttccgcgacgaactcacgtaggatgtatccccttgaccgcctcgcctcctaagatacgtatgattgtacgaacaggtatagaatgttattagtagacganatcgcatctnatatgagcgtaccgcagggtatccgatataantcggtactactccctcgtcggtagtcccggccatcgagcgagagacgctcgactgccgtgcttcgcccgtgacgtggagagcgagtacgacacgcagacgcgcccggtcgtgttggaattgagagattacacccccccccctcnnaatgacacttggccgnggggaacggggtgggaccgccaccgngnacacgactaagncctttctgattnccaaaacactntccnncnnctccacccacgcgccatctcccttggactcttaagnacgccgcannncgangngcgcnngannntggncntgggcctgaagcgcgccccncntccgccgagngggccgcgcnnccgtggtcttaagnnacgcacagncaagttagggcggcccacctcactgtcgtcgggggcatggtgnngggtggtnnnnnnnngannaagcctgtctgaggcgcccgtgggctccctggagtgattggtgngtggcgnncccgncaccccgggcccagcggctgtatctaattggncccccgnngcgncgattcagcgcgccgtacacttgccccctccttcatatcgcgccttggcgttcgtgtctgtgcaactagcgtcatagcttacccattgtacacncgcctctcatgtatcatcgcggnngcggtcgcggagtccgtccggaaggcgagacgnncgatgtatgtgcanagatctattgtagtgactggtgntagntatctctccgctccttcgtcctnctctcgcacgnatatcgatatcatanagagagganacgacacancgccgcgcgctggagagtgagacatcantgtntagagctcgactctancaat

SEQ ID NO: 4990 - DNA, 747 bp, Glycine max
  Probeset Number=SeqID_14769
aaaagtcaaaacactctagtcagcaatgtggagcgtcaccggagctttgtgcgtggcggtgcctaccgccgccgcattccgtccaaaaccctttctcgtctcctctaaccttctccccaaccagacgaagaagctccatctctctcctcggcagcctccggctctatcatcacatttctcctcgtcttctttcaaaaccgccgctacttccgttcaacaacagtcagatgataaaaagggggagaagggcactaagtactacttccttgttgcaaacgctaagttcatgctcgacgaggaggagcactttcaggagcaactgtttgaacgtcttagatactacggagagcgtgacaaggaacaagacttctggctcgtcattgagcctaggttcctcgacaagttccccaacatcactcagagactccgtcgccctgctgttgctcttgtttccaccaatggcccctggatcacgtttatgaagttgagattggatcgagttctagctgaatcatttgaagcttcatctctggatgaagccttggcctctagtcctacaactctagagttcgaccagcctggaaactgggtggctccgtacccaaagtatgaacctggatggtgggacaccttcttgcccaaagcaaaacaagaatctctagcatagaactttgtccacctttgtcttagtgctttgtagtttgtattactgagcttcttgtgttatccaaaatatgattgcaaccc

SEQ ID NO: 4991 - DNA, 1571 bp, Glycine max
  misc_feature (330)..(330): n is a, c, g, or t
  misc_feature (490)..(490): n is a, c, g, or t
  misc_feature (667)..(667): n is a, c, g, or t
  misc_feature (813)..(813): n is a, c, g, or t
  misc_feature (1031)..(1031): n is a, c, g, or t
  misc_feature (1405)..(1405): n is a, c, g, or t
  misc_feature (1510)..(1510): n is a, c, g, or t
  Peptide Sequence Number=SeqID_7239
  Probeset Number=SeqID_14770
cgaagagcgtgattcgagtcagtgcatgcgtccgcgcggagatgagagatgttgcgcgatcgatagatagtcgctacgtgctgagtaattaagtatcgagatcttattgagattgctctgaagttaacatttctatgctctgcggtcgggacttgctcactcgatagtgcgcgacgtactagactgtcgtgtcgtcacgaacagtctttcgccagcgcgcgcgcacgggtgggctgcgatcggtccgtttcatgatgcgaggcagacgcgtgggctgctaacgatgcgtacaacacttagagcagatgagactcatgcgtcgctaccgcnttctctgacacgagcggacgagtagctaatgatattgtatgagctagctaggagtatattcaagtggcagtcaagtgtagagagttgcgccgagcctcacgtgcgcctggtatcacggtagttattgccagcgcacacctggtagtgcgcattatgagtnttcatatcaggataggtgacaggtcgatggactgcgcacactcgtacggcgtttatgtcatcggtgcgatctaatatagtactctagcgagtgcagcgttacggatgacgtgttgttacgagagctgacacacgtgcacacagcgtgtgagcacatatagctgcgtatggtcagacntataaatatgtgtaatgggtgtgtgtcgaaggacagcgagtatgacgtgtctagctgtcgatgcgttgcaactggaccgtagtcatacgcagtggcggtatcggaagtggggaggcgtggcgcggtaattcgctagaataagtatngacgcatccacgataagaatggcgtcggcgcagcgagccatttgtgggtgactgttgtggcggggtatatcgcttatctttgtctctaggatgtcgatatggaggtcaggggagaggcgggtgatattgtactctaatagcgatccactgactctcgatggtctcacgtaaagatcatattcgagttcattaggtatcactcagagcagagctagagnggccatagtgacgatgcacacgggcacgcttcgtcacatcgtagagccatctggtatatattctatacgtcttatctcagttagttaatattcgcgcgtgacagacggatatacacgagaaagatagccaacggtcgtcatcacactataagaggaagtcggtggaagatgtaggcggtgggtgttaccgatcgtgcgtcatcgagatccctcagacatgagtctagacactcacctcgcgatatataacaagacacctcgtgtgacaaaccgagtgagcgttggagctggagcaggaggacagcgagagcagcgaagaatgttataccaaaatacgtagagttcgtgctcctctgttgttatggtagcggtgngtcaacgatcaccacggatgagaacagaagtagaaaacgtttacagattaagaagtcgccatctctatgaaaggaagaaagcgctgaccaccaatcatctacatncatggcgatgtacgttaggtgggagagagaggacgaggggcgaggcgtggcgcacatccac

SEQ ID NO: 4992 - DNA, 1712 bp, Glycine max
  misc_feature (35)..(35): n is a, c, g, or t
  misc_feature (204)..(204): n is a, c, g, or t
  misc_feature (220)..(220): n is a, c, g, or t
  misc_feature (224)..(224): n is a, c, g, or t
  misc_feature (278)..(278): n is a, c, g, or t
  misc_feature (292)..(292): n is a, c, g, or t
  misc_feature (341)..(341): n is a, c, g, or t
  misc_feature (394)..(394): n is a, c, g, or t
  misc_feature (437)..(437): n is a, c, g, or t
  misc_feature (443)..(443): n is a, c, g, or t
  misc_feature (467)..(467): n is a, c, g, or t
  misc_feature (529)..(529): n is a, c, g, or t
  misc_feature (665)..(665): n is a, c, g, or t
  misc_feature (674)..(674): n is a, c, g, or t
  misc_feature (723)..(723): n is a, c, g, or t
  misc_feature (725)..(725): n is a, c, g, or t
  misc_feature (737)..(737): n is a, c, g, or t
  misc_feature (839)..(839): n is a, c, g, or t
  misc_feature (975)..(975): n is a, c, g, or t
  misc_feature (1145)..(1145): n is a, c, g, or t
  misc_feature (1224)..(1224): n is a, c, g, or t
  misc_feature (1256)..(1256): n is a, c, g, or t
  misc_feature (1297)..(1297): n is a, c, g, or t
  misc_feature (1333)..(1333): n is a, c, g, or t
  misc_feature (1335)..(1335): n is a, c, g, or t
  misc_feature (1481)..(1481): n is a, c, g, or t
  misc_feature (1536)..(1536): n is a, c, g, or t
  misc_feature (1569)..(1569): n is a, c, g, or t
  misc_feature (1597)..(1597): n is a, c, g, or t
  misc_feature (1646)..(1646): n is a, c, g, or t
  misc_feature (1666)..(1666): n is a, c, g, or t
  misc_feature (1673)..(1673): n is a, c, g, or t
  misc_feature (1704)..(1704): n is a, c, g, or t
  Probeset Number=SeqID_14771
agtgtgtcgccccgccgtgttgttagtcgcgacgntatagtgtcatatctggtggtgcggtcgagcgaccctccaaatacgtcggccagctcggcgagagaagacggggaggatatatatgcgatatgaacagcgtgtgtcgtgtgcatgaacatatactacgtcttcgactcaccctcccgatgcgaggatattctcgatttnatgatctctcgctctnctcnccatctcggcggtgcgctgccgcttgttattgtgtgctggtttgcggatcggtngcgactgtgtgaanataatcgccgctcactcgcttgggacgcaatggtgtggcgacggtagtngcgtggtgtgatagacatagctgcggtgattcgccgagctcctatctcagtanatcgacgcgctgcatatatatctgtgtgttatcacccgcgtgngataantgtctctatatgtacgtgacagtnatgattgtcgcagagcggtacgtgcgtggagcggtggcgctctgtcgatgatactcggtggnattagatacatgtgggtgagatattggattactcgtcggacgaacgagccgcagctcgaacacgacgtactgtaatataggaatatgtgtggcgcgcgtgtgtgatgttgagtgatacgttgttaagcttacgtgngtcgctgcnctcactgacacgatactcctcaccaccctactctcaccaccgactgctncnggcaggcgaggntcgtacgcgtacgcggtgtagcgcgtgtatagtgtatggcgggcgtgtagtgaaccgtagcacgcgaatgtttacgcgtagcgtgctctatcgcgtatatantcggccgcgagccgatatatagcgttgaagttagtacgcacatcgctctacgacggtgtcgcgcgtgtatagcgctgagtagttgtagtggtgctgtctgtagttagcgagacattgagcgtgtgttaatgttatntgcgtgtgtgtcacgctaattatacaccgatacgctacgcggcacgcagctataaggaaattcgttccgctatatcgtgatgttgactccatacggtgtcgtgagactacacgccgcgctaacgttagcgcgtgcgatatatatagctatttttcattgcactgtgatantagatagtagatacgtagaatcatcgtaatacgtcacgacgcgacccgcgccgtcactgcgcggtacgcgccgagatangtatacgcgagctctaacccgacaccacgcgnatctgtagcagtgagataactatcgatgtcgtacggtatcnattgttacatatactgttgtatagctcgacgcgcgntncatgcactgcgtcgatatatgttcgcgttataccggataatagcgtatttacagtgacgatcgcgtcagcagcatgatgtcgtgagagcgaactggctaatatatgatatgtatcgaatcgcgctacgcagtcggcgcgtctacanttcatactagtattggcgatgattgtatgcgcggtatcgttgatcatcagagcgngtagcgggagctacgatgtacgaataaaattanacgtactcatccgcgtcatatcttgtgncactccgcttgacgcatatagtacacgagcgactactatatattactantcactcgcacaggcgtgtgntcctctntatggacgtaattgcgcggcgaatatgctcnactagacg

SEQ ID NO: 4993 - DNA, 1577 bp, Glycine max
  misc_feature (17)..(17): n is a, c, g, or t
  misc_feature (54)..(54): n is a, c, g, or t
  misc_feature (86)..(86): n is a, c, g, or t
  misc_feature (101)..(101): n is a, c, g, or t
  misc_feature (198)..(198): n is a, c, g, or t
  misc_feature (282)..(282): n is a, c, g, or t
  misc_feature (284)..(284): n is a, c, g, or t
  misc_feature (286)..(286): n is a, c, g, or t
  misc_feature (289)..(289): n is a, c, g, or t
  misc_feature (329)..(329): n is a, c, g, or t
  misc_feature (355)..(355): n is a, c, g, or t
  misc_feature (450)..(450): n is a, c, g, or t
  misc_feature (569)..(569): n is a, c, g, or t
  misc_feature (573)..(573): n is a, c, g, or t
  misc_feature (594)..(594): n is a, c, g, or t
  misc_feature (607)..(607): n is a, c, g, or t
  misc_feature (728)..(728): n is a, c, g, or t
  misc_feature (784)..(784): n is a, c, g, or t
  misc_feature (1121)..(1121): n is a, c, g, or t
  misc_feature (1176)..(1176): n is a, c, g, or t
  misc_feature (1311)..(1311): n is a, c, g, or t
  Peptide Sequence Number=SeqID_6920
  Probeset Number=SeqID_14772
ctctctcatctctcacnccggcgtcgtcgcgcagttgcaaccaccgccatacangtatcttcatactatgtacggcgcgtacaatncagcacgcgcgacgncgcgcatagcgcacatgacacgattaatatagtctactcgcatgtgactgtccgcgacatggaatagactcatatccaaacagacgcgatatatctnttctgtgatacgcgcgctcgtggcccgcgtctagtacattatataatataggcgtgcggcgtctcagctgtcgtgacgtgaggnancncgntcatttatcatcatgcttctctataatcgtctattatcgntcccttcgagcacgtcgggccgcgantgtcatgtctacgcgtacatcgtatgcggacacagactctgtatatatcgacgctgatgcatgtgtagtaggaaacaacgacgaacaatatattnagcacagatcgtgatgatcacacgggtgcgcgtgtcatacatcatacatcatgtgagctacaccacgtatagtcgcgcgcctgcatatatagtgtatattatcggtacgtgtgtatcancgcnccgctcatatactaacaacangtaacccgtctgncacgctataatgagtaacgtaattctacattagccgagcacatcggcggtatcgtagatgatgtggcgtcatacacgtgcactatcatattatcacgacgatgatctgcgatcaagagagncgaggtatgatcaatcgtcgacacgcggggatatatcttatacgtacatcgcgacntgacgcccgcgtatcatgcgcactccgaatataagcgatcgagggatcggcacgattgtcggctaccgttatgatagacggtcatccataagcagcacaacgcttcaggataagattagtgggttgtgagcgtgctatatagattctatattaagctcactacggcggcggcgcgtctgaacacacgagaatcatataggaccgcgtgaaaatatacgagtaacggtcgtgaggtgtgtcgcgttctttatcacagtatcgtgatatggggacagattaacactagtcatgtttatctcaggacacggccctcgtcacagcgtgttccgagcctatncgcacaaccacaatccatataacgtatgcgtcgcatatacacaatttcacatcgngacagtcttacatatagcgcagattatatggccgtcttgtctatggtacgcagacaactgatggagcgaagtacgaggtcagcgagaatgcgagcgctgatattcgactatccgctcatctcgtcactcagccantaatatcatacgcggcggcacgcgtgtgtacggcgtccgcggccgcgcattactatacgataaccctctcgcgtcgcgcgcgcagacgcgagacgcactcacctatgagcggacagctacagcgcacatacacatgtaatatatgtactcggtatgaatatgcggagcgcttggtcggtaattgggcgcatacgcgtcgcgcgcaaattcgttatactcctgggttagcgcgcggagacaacgggcgacgggctcccgacccacac

SEQ ID NO: 4994 - DNA, 652 bp, Glycine max
  Probeset Number=SeqID_14773
atgaagttgtttgttttctttgttgctgcagtagttttggtagcatggccatgccatggcgcaggctaccaaaggttccctctccgaatgaaaactggctatggtgagcgttcttcggaggtaaaatgcgcaagttttaggcttgctgtggaagcacacaacatccgagcctttaaaaccattcctgaagagtgcgttgaaccaacaaaggactacattaatggcgaacaatttagatcagactctaaaacagttaaccaacaagctttcttttatgctagtgaacgcgaagtccatcacaacgacatatttatattcggcatagataacaccgtactctctaatatcccatactatgaaaaacatggatatggggtggaggaatttaatgaaaccttatatgatgaatgggttaacaagggcgacgcaccggcattgccagaaactcttaacaattacaacaagctgttgtctcttggcttcaagattgtattcttgtcaggacgatatcttgacgaaatggccgtaacagaaacaatcctaataaggctggctttctcacatgtgagctagtaattcttcatgatgcacatgctataactccattgcactttatactactcagcattgcgataccatctgttgaggccgg

SEQ ID NO: 4995 - DNA, 1374 bp, Glycine max
  misc_feature (1)..(1): n is a, c, g, or t
  Peptide Sequence Number=SeqID_6921
  Probeset Number=SeqID_14774
naagtattattgtcttatttttctaaactttccttaggtagttttcatagttagactttgaatttttgtctgaaaatttttgtgctatcttttcatgattttagggtgttgctcacaaaatttcagctcatttggatatcgtttgtctatagttgtagttttaaccctcccctggtgcttgtttgagaaacacatgatttgatgcatatagtgcatgactaggggcaatccaggtgatttacaaccctttgatccttaaatagatacaacctttcatagattacttaggcatagtgtgcatcctgatcattctgtgcatcttgagcattttgagcattctgagtattttgttgctggtgattctgaacattctgattttgagcattcaactactaattttcatactgagaacatggctcaacctccacctcgtgagaggactcttagggagatggttgcacctgatttcacttatgaaagcttgtgcaatcaatatcctgatgaggatgttccatatgttctcaagactggactaatacatttgttgcccacgtttcatggtcttgtaggtgaagatcctcataagcatcttaaggagttccatattgtatgttccaccatgaagccccctgatgtctaggaagatcatatctttgtaaaggcttttcctcattctctagagggagtggtgaaagattggctgcactcccttgctgccagggctatcatcggcggggatgaccccccgcgggtgggcgcggaggagaaccaccctgcatgcaggaccacgggcatgagaaggggcaatccaggcgacaggcaacccagtggagcaggcatggatgggacctgggaaagattcgagagggcgagtgcgcgccgtggtcaccccgagcattctgagcaaccccttgagggagattccgaagaggcagatagcgagcagacgaggagtaagattgatgctgggagcgggggagcccctggagctcgggcgcggactgagggggggaaggtggcaccggagatggcttccgacagccagcgcatccgagcacgagatgagggtgttgcccatggaggcgagcctggggtggccccagagccgcccacgtctcctggacatgcaggcgagggggcacacaagcagcctagggcgacccagaaagtcagttcgcccaggaagcgccctgaggaccaggagcaagagaccgtggtcaaggttcttccgcagaccccggagggggtggcagacgatcggtggaacaacctggcgcccaggagcaacctgaagcgggacgagcatacgagggtgatcgaggcgcacagcagcccagccaccaggagcagaaccatcaggaacgacacacgcgc

SEQ ID NO: 4996 - DNA, 484 bp, Glycine max
  misc_feature (463)..(463): n is a, c, g, or t
  misc_feature (480)..(480): n is a, c, g, or t
  Peptide Sequence Number=SeqID_6922
  Probeset Number=SeqID_14775
acgatcaagaaaagcaaataaaaaaacctctctcttaataaagtgctctaacctctctcttaccaaactaggtcaagccgccgtcaagcttcgtttccggcggtcgctgtgccggctaaggcgaccgccgggcctccccttttcatttgcgtttctctgctcctccctctccgtcggtcctcgacgttctgcggcttctaaggcgtgtccaagcttctcatccggagtagatctggagcgttctcttcaccggagccaggccgtgggtctttgcagcgctcgaggacggcgttcgcgtctcaccggctctgtttcttcgactggaggaaggctctttccagatgaggttttcccagtttggacgtggcttgggttgagttatggtgtgtggcggtttggagaagcccgagttgttcgtcttgtgctctaccggttggtttcacggcggtagtgtccggcgaantaggttcgggttgggtntgag

SEQ ID NO: 4997 - DNA, 524 bp, Glycine max
  Probeset Number=SeqID_14776
tcctcccttagcatatttttccccgtctcccccctctcctccctctatcatcttttttctttctctttccttctccccctgcaagtagaagagagctaagcatgacgacggttggcagcagttgctcttcaagcccctcctgtgagcctcctcgtcgctcctctcctctgagccttcgagccgctcctaagccttacaaaaacccttccttcaaaacctccctctctgcgcctttgctttccacaaatgttgtgttgggagagagtaaaaaatcttttttttgaaacattgcaaatcttgggagttcttgtagaagaattggatcttcccatgaagatctaacaacctgcttcaatcatgaatcttagcaagatcaaatcttgaggttaagatttccttacaagaatccttattgaagatgctcttagtatctaatatatcttactaatactcaaaaaaataaaataaaaagagatagatcaaggatcacattttctaatttaaaaaacaaaaatacattcctt

SEQ ID NO: 4998 - DNA, 1519 bp, Glycine max
  misc_feature (70)..(70): n is a, c, g, or t
  misc_feature (85)..(87): n is a, c, g, or t
  misc_feature (92)..(92): n is a, c, g, or t
  misc_feature (94)..(94): n is a, c, g, or t
  misc_feature (104)..(104): n is a, c, g, or t
  misc_feature (106)..(107): n is a, c, g, or t
  misc_feature (124)..(124): n is a, c, g, or t
  misc_feature (146)..(147): n is a, c, g, or t
  misc_feature (172)..(172): n is a, c, g, or t
  misc_feature (175)..(177): n is a, c, g, or t
  misc_feature (229)..(229): n is a, c, g, or t
  misc_feature (346)..(346): n is a, c, g, or t
  misc_feature (368)..(368): n is a, c, g, or t
  misc_feature (467)..(467): n is a, c, g, or t
  misc_feature (667)..(667): n is a, c, g, or t
  misc_feature (681)..(681): n is a, c, g, or t
  misc_feature (766)..(766): n is a, c, g, or t
  misc_feature (839)..(839): n is a, c, g, or t
  misc_feature (857)..(857): n is a, c, g, or t
  misc_feature (939)..(939): n is a, c, g, or t
  misc_feature (964)..(964): n is a, c, g, or t
  misc_feature (970)..(970): n is a, c, g, or t
  misc_feature (1009)..(1009): n is a, c, g, or t
  misc_feature (1073)..(1073): n is a, c, g, or t
  misc_feature (1176)..(1176): n is a, c, g, or t
  misc_feature (1228)..(1228): n is a, c, g, or t
  misc_feature (1258)..(1258): n is a, c, g, or t
  misc_feature (1265)..(1265): n is a, c, g, or t
  misc_feature (1270)..(1270): n is a, c, g, or t
  misc_feature (1292)..(1292): n is a, c, g, or t
  misc_feature (1497)..(1497): n is a, c, g, or t
  misc_feature (1517)..(1517): n is a, c, g, or t
  Peptide Sequence Number=SeqID_6923
  Probeset Number=SeqID_14777
tggttttgttttgtttgtggtgtgccccctcccttcttctgactacctcatcatttctgcattcacaggncggcgcttaaaaaannngaaananaaaaacaaangnncgcgacgagcaaaaacntttgtgttgatcaacattgtcnntttttacgtaatagttgtggaacanaannngacacaataacatattggtgtgcacttaggttgacgataatctgggttgtanatgagctgggcgattctaaatctgcggcgcgagatataaaattgaattaagtgatccaaatcggactctatgagaggagtgaaatacactctgggacatgactactcgttagtctcncgcgttgtgctatatctgtgtntcgctttcgtcgggcgtatccctccatttctgctcgctgtggccggtgccgcccgtgtgcagggcgcgccggccatggagaaaacccgacactacgagngggcggtgggacaacctctactttgactttcttcttctgttcaccaccccaccaactgtcggtctatctaacacacgcgagaaataaaaaaaacgcacacaagcaatcgacgacacaccaagacgcaatataggtgtattatatatataatatattcaatatcgtcactataactattcaatacatcaatcacaacattnctacatatcacaanaacccgtgcgacaaacacccctccggaaactacaaagcgctcctggagacttgtatatgtggtgataattatttattatatggtnatcaaaactaccggcatgagtatactataccactcacacctcgataggtcttcaacacctccgtgcatgatancatactacactcacaacnacaacttgtagtcataaagagcacggtcggtagtatgtaaccgggcggtgataatatatagtgatgcgaccacaacaacacngatgtggtatagtacactcataaanacacanatactaaatacactgacgtcttgcgcggcaccaatacancccgcacatctcgctctctttaagtactacccccattctctcatgctgtcttatggtgcaatcntcacgcgtcacgatgatatatacgctctgcgtgagtataattactattgacatataccgtggtagtatgtgcgcactattcaccatctgtccttatgatcaanagagacaccacctgccctcgatatgttatataaggtattgtctgtggtgcgncgtcatgatacaacacaagccgcgataganaattaanacacnagaccacgacgatcatatcacnacgttggatatcatatattatgctatgtcgtcataacaacacatactctccggcttactagattttcatactcacacatgcgtgatatggttcatacatagacaccaccacataccacaatcgcggtatgagatgtgaaactcttactatacactctactctctatccacatgtgtgcgcgctgcacgcaccaaatacacaaacngtggctagagcgtgctcggntg

SEQ ID NO: 4999 - DNA, 2157 bp, Glycine max
  misc_feature (1)..(1): n is a, c, g, or t
  misc_feature (1790)..(1790): n is a, c, g, or t
  misc_feature (2124)..(2157): n is a, c, g, or t
  Probeset Number=SeqID_14778
ngccgcgcctggaaaaaatccgcggccaattggaacccccacaccggccagttgtaaagggggaagggtttaagattccgtgctccatgaagggcccgccgcgcagggtgttgtacccccgtgtataggtctttcacgggggcacgcgagatgtatgacgccggcccaatttcagttatgccgggggttgggccgtttttctcaccccgcggggagagccgggctaatggaccccctggaattttaccgccacagagcccgccgccagaatttaaatccccctccacccttaagaagggcggagcccaaaaaaggccggtgggagggcttccctccgccgcgggagggcgggccccgcttcctaggaaatttaggggggatgcgcccccggggggtgccaaggaaatttcggccgggggggaccctttgcctctaggaaaacatatccgggggggaaaaaatttttttttcgatcgcgacgagctctcctggcccatttccctcgctgctgctgctaatcccgacccgaccgtcaccgccggcctttgcatcaaacgccctgacagcgcgcgtcgcatcgccacaacacgacggcctcgctcccttgatcgcctccctcgctccctccctgcctacttgcgtgtctacctatctacctgcctacctataccctataccctaatacaccacgcccatcgcccgcgacctgcagcttcgtccggcatctcttcctcacattcacaatggcatcaaagtttctccgagaatacaagttggtggtagtcggcggcggtggagtcggaaagtcgtgtttgactatccagctgatccagagccacttcgtagacgagtacgacccgaccatcgaggattcgtaccgcaagcagtgtgtcattgacaatgaggtcgccctgctcgatgtgctcgatacagcgggacaggaggagtactcggccatgcgcgagcagtacatgcgcacaggagagggcttcctgctcgtctactcgataaccgacaggcagagcttcgaggagattatgacgttccagcaacaaatcctgagagtaaaggacaaggactacttccccatgatcgtcgtcggcaacaagtgcgatctcgacggcgagaggcaagtgtcgacacaagagggccagactctggcgcggaactttggctgcaaattcatcgagacttcggcgaaatcccgcatcaacgttgacaacgccttctacgacatcgtccgagaaatccgcagatacaacaaggaaatgtcctcgtacacaggcgcccctggctcaaacggcaacgggccccagaagacgacattcgacacggacgaccaggcggagaagaagggatgctgtggatgcgtggtaatgtaaggatatggaagccactgtcgttgttgtcgttgttgtcgcgcacgctgtcagagagatacctacaccgctgggttcggttacccgccctggccattggcggtgctgcttggtccagcagaagaaaacacgcgatgctgctgttgcgtactgccagtacaccttctcttcgatactgtcactttgggttcgcattacggggtaacggattcacgtctgctggatgcgcctccgaacaccctacttctactactggtatcgactccatctttcctatctggtggcgctcttcgtattcgccttcatcatctatctagaccgatttctttatggcattttgatcggtactctgaaaaaaaaaaaaaaaaattttttattccttctacccgggggaaaagaacaggggggttnttttttccccccatcccccccctcctctctctcaaaaaaaacaaaaaccttccctcccccgggggggggcgaggccttcccccctccgcacatacctcactcgctcgcagataaaaatcgcgttagtgaagaacaactccttcttcatcccactatgccttctctatgtgagtacatcccgccccccataactaacctcctactccacctttgttaacaccataccgtagtgacatctcctgctcacccttcgcccgccgagccattctccacgacctcccacgcctcctcttccacttcctccgccccctccacctcccccccctccttcccnnnnnnnnnnnnnnnnnnnnnnnnnnnnnnnnnn

SEQ ID NO: 5000 - DNA, 1832 bp, Glycine max
  misc_feature (1)..(1): n is a, c, g, or t
  misc_feature (110)..(110): n is a, c, g, or t
  misc_feature (125)..(125): n is a, c, g, or t
  misc_feature (191)..(191): n is a, c, g, or t
  misc_feature (251)..(251): n is a, c, g, or t
  misc_feature (276)..(276): n is a, c, g, or t
  misc_feature (280)..(280): n is a, c, g, or t
  misc_feature (346)..(346): n is a, c, g, or t
  misc_feature (367)..(367): n is a, c, g, or t
  misc_feature (457)..(457): n is a, c, g, or t
  misc_feature (522)..(523): n is a, c, g, or t
  misc_feature (525)..(525): n is a, c, g, or t
  misc_feature (555)..(555): n is a, c, g, or t
  misc_feature (590)..(590): n is a, c, g, or t
  misc_feature (627)..(627): n is a, c, g, or t
  misc_feature (751)..(751): n is a, c, g, or t
  misc_feature (869)..(869): n is a, c, g, or t
  misc_feature (902)..(902): n is a, c, g, or t
  misc_feature (1034)..(1035): n is a, c, g, or t
  misc_feature (1089)..(1089): n is a, c, g, or t
  misc_feature (1101)..(1101): n is a, c, g, or t
  misc_feature (1155)..(1155): n is a, c, g, or t
  misc_feature (1479)..(1480): n is a, c, g, or t
  misc_feature (1495)..(1495): n is a, c, g, or t
  misc_feature (1526)..(1526): n is a, c, g, or t
  misc_feature (1528)..(1528): n is a, c, g, or t
  misc_feature (1553)..(1553): n is a, c, g, or t
  misc_feature (1633)..(1634): n is a, c, g, or t
  misc_feature (1636)..(1636): n is a, c, g, or t
  misc_feature (1656)..(1656): n is a, c, g, or t
  misc_feature (1660)..(1661): n is a, c, g, or t
  misc_feature (1665)..(1665): n is a, c, g, or t
  misc_feature (1668)..(1670): n is a, c, g, or t
  misc_feature (1722)..(1722): n is a, c, g, or t
  misc_feature (1738)..(1738): n is a, c, g, or t
  misc_feature (1781)..(1781): n is a, c, g, or t
  misc_feature (1784)..(1784): n is a, c, g, or t
  misc_feature (1786)..(1786): n is a, c, g, or t
  misc_feature (1788)..(1788): n is a, c, g, or t
  misc_feature (1790)..(1792): n is a, c, g, or t
  misc_feature (1794)..(1795): n is a, c, g, or t
  misc_feature (1802)..(1803): n is a, c, g, or t
  misc_feature (1807)..(1807): n is a, c, g, or t
  misc_feature (1819)..(1819): n is a, c, g, or t
  misc_feature (1821)..(1821): n is a, c, g, or t
  Peptide Sequence Number=SeqID_6924
  Probeset Number=SeqID_14779
ntgtggggtgatgaagcatcgcatgctgcaggcaggaggatgatatatgacatggatgcgagtgtctatatgtcatacgtgagtactatcctgcgagtacatcacggcancgtccccaagccatntatcatctaatatattgtgcatgcctctgatgctatccgttatctcgtactgagtgtggtcttgtntaattatagtatgtgtgtgatgtgtgtagtctcatgtcgtgctacataactcatccgtcnatactcacgacaatatcgtcgctgngatncatcgatatcgaatcatatcatgcagcgattcaatcgtctagcgcatatgtaccgggtagtgtgtncgagagctctgtggagtacgntatagtatatatcactcgctctctacgacatgcgtcattatagtgcgagtaggcgtcgcgtcgagcgagctgagtgtgagtgagtgcatntagtgtagccggtagcatgcatcggtgcaatacgagcagctatatctgagcgtcactctattagnnangatagtatcgctgataggagtaatgtaatntagcttcgcgtagatggaaggcgatgcttaaccancatatactagcacttgatcagatgtagtagacaactngatctgtacgtaggtgtgtagtgtttagtgttttattgtatatatagatgttgtagtttgtctcgtcagtatctcagtaatcatcacatacacatactacgcaggtcgtatatatagcgattcngcagtcagatatactgctacatacatactcgagactgcggatgcgagtgtgtacgatgatgcatctagtcatgtcacactgagcgccgtacacatgtcactatcgtgataataaatgnttgtgttcgctatatatgacttagactgatgtnttgatgagtgtagcctatattcaagcactgatcatagcgtcacataacatgagcacatgtaacgtcctactatccatcatgtatggatacttcgtgtatacgaagttagtgtgttatgtgtagagtaatcanntatactatatttgtgatattatgagtcagacaatgagaggagagacaagccganccacaacagcangacatctaagacgggcgcagctcgaacgcctctctcatgcgtagcatcacattntgtcataaaagacaagtagagcacgacatactagtcgtgtatagactagatgaggtatgctagtcaatgttcacacatggtactattaatatcatcccgacatgttctcgtctatttctctcaatttcccagtgattatacgtaagtcataaatcagtaatatgctcttgcatatgatagatgatattgtatcatatatcgtgtagtgagacataaagtcgaatcgcgaagggtgttgagatcgagcagcagatggcttatgcgcggtgagcattcattacatcatataacatcagatattgttgagtggttgtgtacatagannctgatttataccatntagataatgactgctcgcgacgtcgtgacgncncgcatcatgtcatgatctctgactnttccgtctctttgtaccacgtcgccgtgcgtgtgctcggtatgttctttactcgtgagtgatatcggtgctgagacgagnntnggatagagtatagtaagagngaannaganaannnaaggggggggggcccccccccccacctatcatctcctacgcacacaactctncactcctctcacccanacacgatctctgtctgtgtagtagtttatggtttactctcttnttntntntnnnanntaaattnnattnatactatctacntnttctactattt

SEQ ID NO: 5001 - DNA, 490 bp, Glycine max
  Probeset Number=SeqID_14780
aggaacgtggttataggcgtccactcaatctgttttattatcatccggccggctagctgtcctgcagcgcctggagcagcgccgagcggaggtcgtcggcgtcctgcatcgaggttggcacgtccacgaggacgtcttgcagggtcacgccctgcacgtggctaacgcaggcatgctgcacctgcagctccagtgaccggagggcgcccatcagctgcgcgggagcgtgggtggcagtggtggtcacacgcacggcggccccgtctcgtcccaccatccgcacgtccaccgtttcatctacctgcaggaacttggaagctgtaccaccgcgagaagcggcggccgcagctcccttctccaatgtcttgttggcctcgtcctcgaggtgcgctacgcgggtgcgtagctctccgatgtaggtggcagcgtcagcaaggagtgatgccttgtccatacgggacacgttggggacgacagcgcggaggtcgca

SEQ ID NO: 5002 - DNA, 562 bp, Glycine max
  misc_feature (25)..(28): n is a, c, g, or t
  misc_feature (56)..(57): n is a, c, g, or t
  misc_feature (69)..(70): n is a, c, g, or t
  misc_feature (84)..(84): n is a, c, g, or t
  Peptide Sequence Number=SeqID_6925
  Probeset Number=SeqID_14781
tcagctacgtaggcccccccccccnnnngatggtgaaagaaacaagattttatgannttcttggagtgnnacctcaagcatcancagaggaaatcaagaaatcatacaagaaattagctcttaagtatcatcctgacaaaaatcctgatgaaggccacaagttcaaagaaatagtccaagcttatgaggtcttgtctgacccagaaaaacgaaagacctatgatagatttggagagcaggcaatcaaggaaggagcttcaaatggaggtggtggatttggcgggggtgttgacatgttcgacatgttcttccgtggtggtggtggcagcttctttggaggtggtggaagaagtgaaagagccagacatgcgaatgatgtagttcatcagcttaaagtatcattggaagagctgtacaaaggaaccacccgcaaactccagttacaaaaaaatgttgtctgtaataagtgtgaaggcaagggaggcaagaaagtggaaaccttgcccagtatgcaagggtgtgggtgtacaaattcaagtgcagcaacttggaccgaatattg

SEQ ID NO: 5003 - DNA, 862 bp, Glycine max
  Peptide Sequence Number=SeqID_6926
  Probeset Number=SeqID_14782
tcagctacgtaggccccccccaattttatcgcagatgataaacctgttgtcgtttgtctctgttgataaaccatcacggccgtgctgcggtcgtttccgtgaatgccaacttgactgcaggcttggagtcctacaagcacaaagcagtaaaagctgccatggattatggctttcacatggccattacaaagtggcatgatgaggttgcaagggaaatggaagtgatggttaaggagcatgaggatggtgatgctggacaacagtggatgattgacctctggatagctggtctagaagggcatgctctctcaagacctccaattttagaaggagaagcaactgcacgggcaatccgtttagcgaagttcatcaatatgctactgtatgttcatgtgatgagcatagacgcaatggatgagattgccaaggctaaaagagaagtcagatgccgagatctggaaattgcgactacagttgcacgtagcaatggtctacattgcaccacgcttgatggtagtcttggatttttacatttgagctgtcgttgttatttcaattctaaaattgtcaattgaatctgtagttagctggttcttgtatcaggtgatcaggtagggaaaaagggtgctatgacagcaggtttctatgattctagatgctcaaaactaaagtttgtgaagataataagggataacaagacaacaattaataaaaagatgggcatctggagattgtcgaaacaggctaaaagatatcctgctttggtttaattgtagtatactcttccattcacatgaagctgattcaagattgttacatcctgtaattatttcctgcagctgaatattgaatatttattttg

SEQ ID NO: 5004 - DNA, 920 bp, Glycine max
  misc_feature (876)..(920): n is a, c, g, or t
  Peptide Sequence Number=SeqID_6927
  Probeset Number=SeqID_14783
ggggaccgggccccccctcgagtcagcttcctaggccccccccccagatcagaagaataagaagttatccacacatgaaaagactaagaaagagactaagccaattgctaataagcataacactgtgcgtatgagtcagccggctactcccaactataaaaatgtcgaatcaaagataaaggatgagatcaactatcataaagaactggccaagcagtataagaaaatgaaacaatctataggccaatgtggcggatttgatgaggaacccttgaatagaggctcgtctagacatgaacagactagagagaatacaagagataagtttgcgttcacaacagataaggaagcaaatagagaagtagaagtaaattcgagatataagatgcccaagacattagagttaggaggttcagcacaacagcgatcttccctaactatgcaaccaaatgcttacgtcgttgaaaaagctcctttatatcatcacaaatccagaaatgacaaggaaaatgtggtagtagaaaaaaataaggaaaatgactataaaggaagtacaagtcgaggtggtatcttagatattgccaacagctttttgaactcgcctttgatgcagcatatctcgaatattgatacatctctcaaggaatcaatctctgccgttagtaatgccaccaggactcctgctgaattaagagttcaaatgggttcggtcggtctattaatggtgtctcagatatcgaagatgatgtgagacttcaaagcagcaatggtttccagcagtcaaaatactcgaactggggaaatggaacatatcaacctgataaaagtgtgagaagcacaggttctattttaaaagattctactattaggaatatnnnnnnnnnnnnnnnnnnnnnnnnnnnnnnnnnnnnnnnnnnnnn

SEQ ID NO: 5005 - DNA, 1844 bp, Glycine max
  misc_feature (49)..(50): n is a, c, g, or t
  misc_feature (66)..(66): n is a, c, g, or t
  misc_feature (110)..(110): n is a, c, g, or t
  misc_feature (134)..(134): n is a, c, g, or t
  misc_feature (161)..(161): n is a, c, g, or t
  misc_feature (164)..(164): n is a, c, g, or t
  misc_feature (173)..(173): n is a, c, g, or t
  misc_feature (204)..(204): n is a, c, g, or t
  misc_feature (215)..(215): n is a, c, g, or t
  misc_feature (229)..(229): n is a, c, g, or t
  misc_feature (246)..(246): n is a, c, g, or t
  misc_feature (439)..(439): n is a, c, g, or t
  misc_feature (586)..(586): n is a, c, g, or t
  misc_feature (599)..(599): n is a, c, g, or t
  misc_feature (688)..(688): n is a, c, g, or t
  misc_feature (1565)..(1565): n is a, c, g, or t
  misc_feature (1641)..(1641): n is a, c, g, or t
  misc_feature (1643)..(1643): n is a, c, g, or t
  misc_feature (1679)..(1679): n is a, c, g, or t
  misc_feature (1683)..(1683): n is a, c, g, or t
  misc_feature (1702)..(1702): n is a, c, g, or t
  misc_feature (1723)..(1723): n is a, c, g, or t
  misc_feature (1747)..(1748): n is a, c, g, or t
  misc_feature (1770)..(1770): n is a, c, g, or t
  misc_feature (1784)..(1784): n is a, c, g, or t
  misc_feature (1801)..(1801): n is a, c, g, or t
  Peptide Sequence Number=SeqID_6928
  Probeset Number=SeqID_14784
catgacaccgtgtatcagcacttaataattcattaccgtgcaagtagtnncatactgtcaatcagnatagcagtacgatgctgagaatatgacgcatattacacgaacantagagcaagctataaagacgtcanatggacaaactacacatcccacagctnacntatcaggancgcgtaacacaatgtcatgatatcatgcacntacaacactancacacgtatgtganacaacagcgacactatnttcgtctgacgcatgtgtctatacatcacagcgatcctatgcgtccctcacatgcgcgcagtaggtagtctcggtatgatcgaatctatcatcacgtatgtcgcttgtcacgtgactgcgagctgcgagccgatacgcgtcgcggtgctctcgtcgtcacaagatcgggcttggagcctacatgtggcatgtngcatcacgtgcgtagtcggcgtgctgcgtcgtctgtgtcgcgcttgtgtcaacatacgtgcatatcgactctcctgtgagtgtgttgtgtcatattcttgcgttcatctcgtcgtgccatgccttctcgacctcgtggtgtcttccnatctcgtcgcgcngaggttgtctcgtgcggtgctcctctccgcatacgtgtatccggcgtgcgcaggcgatgcgaccgacagcctaagtcgtctctattgangtgacggtggtcagcacacgcagtcagggacgcactcatccaatactacgatgcaagtgcaggcatcctgagatggataatgctttatcatgcggagagactggacttgcgcggtgagacagagagcactcacaattcatcatctcgcacgccgtcagtccatactgacgcaggcgcgaagctttacgctagtatatattcactatcttatcgtgcaataattcatctagtatatcaccgactcgtttatcagtctattcgtacaaccaatcatcatctggctgagccaacttggacatcgctcagtcgacatcaccgttatacctcatccagcaaatcatgcataccgtctgtcctgctcctgagtcgtgtacagtggccagtgtcatggcttcacattcttcgcaatacttgtctcgacatacatgtgctcacagttaacaagctgactatacacaatcgtcaacaatgtcagacaccaacatctcgttataatatagccctccattctacatacatatactaccataccccatccatctcctagcatttcattctcattcagtatctatcttatcccttttatatcagtacccaacacatcacgtcaccatccggctaaccttccgtcccgccccgttccctcaccccgtgcgctctatttcacataccgttagtttgttgttaggatgcaatacttagttcgtaatactgcataaatttatttctactgctacttcattcttttattctacaataagacatgacattatctcccctgcccaacttctatctctgtgagcctcgaacccagcatccgtctccgagaaatatagagagagtccgacccactctggtttgtcgttgtgtgctgtanggggtgatggggtgagtgtacgggagtgtggacgtggattccagtagcgtcggctgcgctgtgctcgaacgatatntntttgacatgagtctcaggaaataaatgcagaagaanttanttttaaaacccacacacancacccacacgaaataattatntaaaatatgaaaatataccccccnnaaaaaaataacaaccactccancaccccaggaagangatgaaaaatgatcgcngagataggatagaacagaacaagacaatcaacagaaatagaca

SEQ ID NO: 5006 - DNA, 1072 bp, Glycine max
  Probeset Number=SeqID_14785
gtggaatgacaggtgatggagtcaccgatgctcctgcattaaagaaagcaaacaattggaattgctgttgctgatgctacagatgctgcaagaagtgcttctgacattgtcctcactgaacctggtctgagtgtcattattagtgcagtgctaaccagcagggcaattttccaaaggatgaagaattatactatctatgcagtgtcaatcaccattcgtatagtatttggtttcatgtttattgcattgatttggaaatttgattttgcacccttcatggtgttgattattgccatactaaacgatggtaccatcatgacaatatccaaggatcgagtgaaacgatctccaatgccagacagctggaagctgagggagatatttgccactggtattgtgttaggaagttacatggcactaatgacaatagtatttttctgtataatgaattataccgacttcttctcggacaagttaggtgtgaggtctataaggaacatccccggagaaatgatggcagttatcttgggacatgtaagcatcataaatcaagcattaagttttgacaaaaggtcccgcagctggtcctatgttgaaaagtactggtcttcttagagtacacttcttttttgatagcccaagtagtctcccaaccttttcaatgacaaaaatagctacagggagctttcagagattgctgaacaagccaagagacgtgccgaagttgcaaggcttagggagcttcatactctaaagggacatgttgagtcagtggtgatgctgaaggggctggacattgacacgattcagcagcaccatacagttgaacgagcctggacacactacaaagagagactgtgccatggaagagagagaagcacagtgggcaactgcaaagaggactcttgatggtcttcacccacctgaaacgaccgatcattgcaatgtcaatgagggttatagggaggggtctgagattgagtatgtaactactagtcgagccagagcttctaggactgaaaatcctgaaaacgttgatgggacatttttaggcaggcttgctggcccaagg

SEQ ID NO: 5007 - DNA, 1458 bp, Glycine max
  misc_feature (6)..(8): n is a, c, g, or t
  misc_feature (16)..(16): n is a, c, g, or t
  misc_feature (41)..(41): n is a, c, g, or t
  misc_feature (47)..(48): n is a, c, g, or t
  misc_feature (52)..(54): n is a, c, g, or t
  misc_feature (57)..(57): n is a, c, g, or t
  misc_feature (76)..(76): n is a, c, g, or t
  misc_feature (204)..(204): n is a, c, g, or t
  misc_feature (218)..(218): n is a, c, g, or t
  misc_feature (263)..(263): n is a, c, g, or t
  misc_feature (350)..(350): n is a, c, g, or t
  misc_feature (394)..(394): n is a, c, g, or t
  misc_feature (622)..(622): n is a, c, g, or t
  misc_feature (643)..(643): n is a, c, g, or t
  misc_feature (826)..(826): n is a, c, g, or t
  misc_feature (853)..(853): n is a, c, g, or t
  misc_feature (867)..(867): n is a, c, g, or t
  misc_feature (875)..(875): n is a, c, g, or t
  misc_feature (877)..(877): n is a, c, g, or t
  misc_feature (980)..(980): n is a, c, g, or t
  misc_feature (1306)..(1306): n is a, c, g, or t
  misc_feature (1392)..(1392): n is a, c, g, or t
  misc_feature (1458)..(1458): n is a, c, g, or t
  Peptide Sequence Number=SeqID_6929
  Probeset Number=SeqID_14786
aaaaannngggggttntttggttgatgttttttctttttancgatgnnacgnnnttnattctcaccaacaccacantactaaaaaaaaaaaaaaagaacaaaggagatttaaaatagagattagaaaatatcgcggttgtaaacgaaaacaacgaaccgtcggcgtcaaccagactcctcagcagagaaaacacgcatccatanaattatggcaagancaggcaccacgcttactacaatatccctacttcatctcctataanctcttatccaccgctcctccgagtaaaacacccgcgcccgtgtgcgcgcgtgaataataagaataattctaaactaaacgcagagangtgataagacacagccaaacgaccaacacttgtgcacctgaggnatattatattggtgaatataataatagagaataaaatcggtcgtgaatacaccctatagatatatcaggggggtggtctgtatattatgtttcgttgcggtgcgtcggatgtcgtatgtttttgtggtattgataacagaatatatgatagatataaatataatataaatagggtgtgagaacaataaagatgggtggataccataagaataaaatagatataaaagnatagagagcgagaaaaaatanaataaatacaaaatacacatgtaagataaagactcgcgtaggtcattgcaattcataacgataaaaacagacaaggcaaaagcacaaagaaagtgaacggatagtgggaagaacacagagaaataagagagagtcgaatataaataataatgagaatagatgcggcgcgggaacaaatagagngggcttatataacaatacccaaacgcngccaccacacaaanaaaaaaancnatttgtgttggtgtttgtgtggcgcatgtgacaatgtgtatatacacactagcgtgcgagtgacgagatagagaagatatgaaaaagtaaagacaacatgggnctcgtcaatatcttaatcgcaaacacagacgactaacatgtaactgtgtgtccgcgctgtatcggcggcgagaataaacacacagagacgagccagaaaacaatatagtggtcagtgtcattcgatgtcgtcgtggcctcggatatcatatctagatagcgggcggcgggcgagagcacgcaaaccgatctctgatagaaagacataatgtccgagtctcttctccatatgttcgtctagcatctatacacatagtgcagcgagcatctatctcgtgcgagatataaaaaaaaaagagattacgcatgattacagaattatgatanacatacatatacgtgtcacacatacaaagtaccgacatagttctgtcgcgtgagtgtgtgtcgtctctaccgacactcagcacccntcgcgcactctcgcgtgatagatgactatctacatatgcgtagctacggtatactaatatatatan

SEQ ID NO: 5008 - DNA, 487 bp, Glycine max
  misc_feature (469)..(469): n is a, c, g, or t
  Probeset Number=SeqID_14787
gtgagtgagtgacagagagagatagaaagattaagacaaaatgccgccgaagttggacccatctcagatcgtcgacgtctacgtccgcgtcaccggaggcgaggtcggagcagcgagttcactcgcccctaagatcggtccactcggtctcgcgcccaagaagatcggagaagacatcgccaaggagacggcgaaagagtggaaaggcctgagagtcaccgtcaagctcaccgtccagaatcgtcaagccaaggtcaccgtcgttccctccgccgcggctctggtcatcaaggccttgaaggagcccgagagagaccgcaagaaggtgaagaacatcaaacacaacgggaacatctcgtttgatgacgtcatcgagatcgctaagatcatgcgaccgaggtctatcgccaaggagttgagcgggacggtgagggagatcttggggacttgcgtctccgtggggtgcacngtcgatgggagagaccga

SEQ ID NO: 5009 - DNA, 1309 bp, Glycine max
  Peptide Sequence Number=SeqID_6930
  Probeset Number=SeqID_14788
gattaatcaactcaacttatcaagttaactttaaccgcctttgtttaaaaaatgccccagaaaaagactttttcgggttaccttggtgattgcagtgaagaacaacttcaaacacttgctcaattccgcacaaaggtcgctgaaatgggatgttcaaaccctacttatgatgacacctacttacttcgatttttgagagcaagaaaatttgatttaaaagatacaatggcgatgtggacaaattatatcaattggcgtaaagaaaaacgagttgatgagatttgtaagatggagatttcagagatgattgaggctaagcaatattatcctcatttatggttccgaactgataaactgggacgaccaatctatatcgaaagagtcggcaaagtgaactttgataaattaatgaaaattatatcacttgaacgagtagaacaacattttattcaagattccgaacgacttattcacgaaatcttcccagcatgttccaaagcaaagggtgagactgttcaaaatacttgctatattatggatatgaagggtgctgcagctaagatgatgtcctcaaaagtctgggatctgttaaaaatgatctcaaagattggacaagattactatcctgaaactcttgggcatatgtttattataaatgtgcctttatttttttatggtatatggaatgtagtgaagcattttgtcgatgacaaaacgcgcaaaaagattcacattcttggctcaggctataagaaggaactcttccaatatgttgatgaaaaagaccttccagattttctaggtggcaaagctactgttgaagactatggtgagaatttaacaaaagaacaaggtccttgggtgaaaggtgataatgaattggtaaataattcaccagtgcaagaaatgaatagaaagataagtacagaagcaggtgaagatgatagaccttcattggttcttgatattccagagactgaacaaatgagaacaaagagtgttccagtgttgccaaaatcatcgacttcgattgaaagtttgaatgatatggaaggatatgatgtggcgacagaatcaccattgaaggttagagtaaagagtttgcaaaccaagcctagtatgagttttaatacattaagaagttttggagtgatataagatttgattaattgttgatgattgattatgtatttgtaaatttaattattaaatgttgagagattattcctcttttatatgaaagaataatcttcttactttattacttactattttgattctatttttcttaaaaagaaccaaataaatt

SEQ ID NO: 5010 - DNA, 1574 bp, Glycine max
  misc_feature (1)..(1): n is a, c, g, or t
  misc_feature (4)..(4): n is a, c, g, or t
  misc_feature (6)..(6): n is a, c, g, or t
  misc_feature (21)..(21): n is a, c, g, or t
  misc_feature (50)..(50): n is a, c, g, or t
  misc_feature (63)..(63): n is a, c, g, or t
  misc_feature (115)..(115): n is a, c, g, or t
  misc_feature (135)..(135): n is a, c, g, or t
  misc_feature (185)..(185): n is a, c, g, or t
  misc_feature (191)..(191): n is a, c, g, or t
  misc_feature (234)..(234): n is a, c, g, or t
  misc_feature (243)..(243): n is a, c, g, or t
  misc_feature (342)..(342): n is a, c, g, or t
  misc_feature (366)..(366): n is a, c, g, or t
  misc_feature (368)..(368): n is a, c, g, or t
  misc_feature (386)..(386): n is a, c, g, or t
  misc_feature (405)..(405): n is a, c, g, or t
  misc_feature (441)..(441): n is a, c, g, or t
  misc_feature (450)..(450): n is a, c, g, or t
  misc_feature (503)..(503): n is a, c, g, or t
  misc_feature (662)..(662): n is a, c, g, or t
  misc_feature (710)..(710): n is a, c, g, or t
  misc_feature (735)..(735): n is a, c, g, or t
  misc_feature (1067)..(1067): n is a, c, g, or t
  misc_feature (1310)..(1310): n is a, c, g, or t
  misc_feature (1368)..(1368): n is a, c, g, or t
  misc_feature (1386)..(1386): n is a, c, g, or t
  misc_feature (1450)..(1450): n is a, c, g, or t
  misc_feature (1500)..(1500): n is a, c, g, or t
  misc_feature (1542)..(1542): n is a, c, g, or t
  misc_feature (1547)..(1547): n is a, c, g, or t
  misc_feature (1554)..(1555): n is a, c, g, or t
  misc_feature (1560)..(1561): n is a, c, g, or t
  Peptide Sequence Number=SeqID_6931
  Probeset Number=SeqID_14789
ncgnantgagtcggtcatagnagagcgtagagacgagactatgagatagngatgcgtctacanatacgacgatctgtcaggtcggtagcgcgcgaacgcgtaggacgacagggtnatgatacagcacgatgtagngtggaatgcgagtcgagggaagagatcgacgcgtctgtcgcgacagtgtnaatatnaacattactacagtcagagacgacagctaggtgtaggtgatanatactatangaagagttagtatgctagtcgagatgtatacactatcagtgcttagttaattagcaagtatatattaatatgtccagcaggttaactcattctcacgtntagtacgtcgaacgatatgttgtnangtaatattctattcgatnagtactagatacgtatgtnatgtcatcattgttacgatatacgtcagacatagtnaatatgagntaatatgatatatatgagtgatacactgtatattatacttattcatatcgatntgcgttcgatattaaatgtatgttgttattgcgacgacgtgatgtgtgtatatcgttctatatatcgtagtgagattggtgtatatacggtatactatggtgtatgaagagtctatgacacgacggtgtcgtgtggtctgtgtctctcattctcgctgncataccaaatcaattatcacaagctacgagatagtgacgatagcgatncgaacaatatcgacgcgggttgatncatcacatacatcacgagtagtgttaatctacagcaggaatgtatccacacataccgacacacaaacacgcgaacattacagtgtgagaaatgatagtatagacacgatacatgatcgacagagcgcaagaatgacagatattgatacatatagatgagagaagaaatagaataacacacgagatgtatgtatgaaggagacagggacatgaagacagaaacagtgaatatgaaagtaggaaagatgggtagactgaatcaagacaggctattctaagaaccaaatatcagaaattatcactaccaccaaacttatatgatagatacattantatgcagatattatatgagactgtacacacaccgacatatagccatatatagatgatgttagctagacgcatcttatctatacgcgccagaagagtatgcacacgcacgacataaaatgttcataacggccgcacgcgccacgagtgatattcacgacgcgcgagtgcccgcacgtagagaagagtggtttacaccgacacaacaagatgtaacaccccgcaccagattaatatagtacacgncagatgtaagacaccaacaaaataccaactacacagacacacccctttcaaaccgctngacacaaacaatacaagngagtagaaagtgtagtcccttgtattgcagcaaacaaacgagcatgagtacaccacacacaacncagccagcacacgcctaccgcccctctcgtgtctttcttgtcttcatagntataaaatataataacacaacacagagagaatatgaccgccnagcgnaccaggnnggggnngcgaggccccttt

SEQ ID NO: 5011 - DNA, 1443 bp, Glycine max
  misc_feature (1032)..(1032): n is a, c, g, or t
  misc_feature (1124)..(1124): n is a, c, g, or t
  misc_feature (1176)..(1176): n is a, c, g, or t
  misc_feature (1300)..(1300): n is a, c, g, or t
  misc_feature (1397)..(1397): n is a, c, g, or t
  misc_feature (1433)..(1433): n is a, c, g, or t
  misc_feature (1443)..(1443): n is a, c, g, or t
  Probeset Number=SeqID_14790
gaccgcagccgcggcgagcaagcgcgaggagcgcagcggaagggaaaccgaggacaggacgcaaggcgcggagaaacgcgagccggccacagagccacaagaccagagatattccaaaaaagagggggaagacgcgcccggcaacactcaccccgagcatgcacaacagaagaaagcaacggcgaccacgccgggcagcagtgagacagaaaaggagggtagctgaacgcgacgaacgcacggcccgacaccgaaagccatatactaccccgtacgggggaacggcggggccgcagggagcgcgacgagaaagcgaaagagaacacgatacacgcgaaagaaagcgacgaaaccgacacgcagaaaagacgaaggcacagacacgggagaggagccaaagaacacacaaagaggagaaactctacacacaggaaagccgcaaaccccacctcccagcaaagacgaaccaggcgccgcaaggaggtaatgacgactagacgaagagtatcttaccaatcgaacacagcgagcgccaagcgcacccgcggaagaacgcaaggattttttcttttttatgaccccgcaccgcgcacgagaaacaagagacgaattgtgggaggagagcgcaagggagcaaccgagaccgagaaccgaggccggcaacacacacaagaatagccaacgccacaagcgagacgcaaaaactaacaccgaaggaacaaagcaccgaagaagcgcaacacagcagacagaggaaaaagaccagcgaaaaaccccagcgaccccgagcgcgacacgcaagcacacaaaagtgtgaccaaagccagacggaacacgacgaccggacaccacaccagacagcgacgcagcagagctaacgtcaaccgaaccgccgaaagcgcaaacattgcgacacaccaggcacagcggagatagaagaacacaccacagagcgaacagacgagagagagaaacacacacaaagcgaaagaggacagagggaataagaaagacacgaccagacgaaataancaagaagaccaacgcgaaatcatcggaacgcagacgtgaccagcgcatgatggaaacagtgatgacacgcgcgcacgagacaaagaacgtantaacaagacaacatatcagatagcatacagatatacgtcgagtacacacacnacggaggccgagagccgcgtgcacgtgctacgaggagaggcgacaccaccgatgacaggcaccgccaccacactaaggcaacgagccgtacacacgagaaacacagtgaagaccacgagacagntacgacagagacacagcagtcagaccgccatgacgcatggaacagtcactacgaagacgcgacggaacgagcgcacacaatgctcacacggcggaancagacacgagcgacgagacggaatgcgcggtatagngagaggaagn

SEQ ID NO: 5012 - DNA, 487 bp, Glycine max
  misc_feature (3)..(3): n is a, c, g, or t
  misc_feature (15)..(16): n is a, c, g, or t
  misc_feature (70)..(70): n is a, c, g, or t
  misc_feature (76)..(76): n is a, c, g, or t
  misc_feature (86)..(86): n is a, c, g, or t
  misc_feature (88)..(88): n is a, c, g, or t
  misc_feature (96)..(96): n is a, c, g, or t
  misc_feature (99)..(99): n is a, c, g, or t
  misc_feature (115)..(115): n is a, c, g, or t
  misc_feature (117)..(117): n is a, c, g, or t
  misc_feature (127)..(127): n is a, c, g, or t
  misc_feature (159)..(159): n is a, c, g, or t
  misc_feature (162)..(163): n is a, c, g, or t
  misc_feature (222)..(222): n is a, c, g, or t
  misc_feature (224)..(224): n is a, c, g, or t
  misc_feature (241)..(241): n is a, c, g, or t
  misc_feature (243)..(243): n is a, c, g, or t
  misc_feature (248)..(248): n is a, c, g, or t
  misc_feature (252)..(252): n is a, c, g, or t
  misc_feature (264)..(264): n is a, c, g, or t
  misc_feature (296)..(296): n is a, c, g, or t
  misc_feature (329)..(329): n is a, c, g, or t
  misc_feature (334)..(335): n is a, c, g, or t
  misc_feature (345)..(345): n is a, c, g, or t
  misc_feature (349)..(350): n is a, c, g, or t
  misc_feature (401)..(401): n is a, c, g, or t
  misc_feature (418)..(418): n is a, c, g, or t
  misc_feature (420)..(420): n is a, c, g, or t
  misc_feature (431)..(431): n is a, c, g, or t
  misc_feature (445)..(446): n is a, c, g, or t
  misc_feature (468)..(468): n is a, c, g, or t
  misc_feature (475)..(475): n is a, c, g, or t
  misc_feature (479)..(479): n is a, c, g, or t
  Peptide Sequence Number=SeqID_6932
  Probeset Number=SeqID_14791
aantaccatctttannttgaggatggattgtgaggagatagagaaggggaaatggaagcggaaaccttcntttgangtgccattgncnccaccgtntcncatggcgtctgtttgnanactgcacttncgctctctttctcttcgcccatgcctctacantannagcaattgcagtagcgctgccactagaaatcgcattagcatcagaagtctgaatctccnantggtgctcttgcgcccnangactnaaangcgattccatcnattccattaccaaatttcaccatcaacttgcntcattccgggtaccattcctccattcctgttgnatcannatggtggaancaannttccgatttgtggatgtgttgcggctgtggatttggttgtggctggccganaatgagggtgagcatgngnccagaaaaaanggagccgtccctgnnctccgcggcctgatctagacangacgtgnccanctcagagg

SEQ ID NO: 5013 - DNA, 544 bp, Glycine max
  Probeset Number=SeqID_14792
ataaccacacagaacaaattccaaattcaattaaatatataaatacaaaataattgatctcctagtcggggtttctcttataaaatatttatttatttaatttatttggaaaattaaaataacaaataattaataataatatggggatgtctaaaagtatcaaagttattttctctcttgctcttatagtgttcttggctcttgcagcaaccaagatagatgcaagatacatagattatcattcccttagaggtggagatcacggtttcggttgtagtaaattacaccctatcttctgcaagaaggaagaagccaatccttacaccagaggttgcgagcctggccaacattgccgtgacgatctaggcgaaaaaatcgtaaaccctaaaccctaaactactcttggttaatttttacaaatcacatccccatattaatatcagatgattaatttcattttgttatttatttatactctgttattggttaggtaactgtttgttaccctattatttatgatcaataaaataattatatttatgtt

SEQ ID NO: 5014 - DNA, 508 bp, Glycine max
  Peptide Sequence Number=SeqID_6933
  Probeset Number=SeqID_14793
gtagagcccagcagctggacggatgagtataaaagaattttgaagttgtttgatgagagattgaagaagtaacccaaatagctccaatacccgcgtcccaacataatttgttgaatgcgggtatttctttatttaatatatcatctgctgttgatttaagtgttgaccaagtagcattcatttcttttactctgttctttgccgcagtggttactattggtaaatcctgcagcatttgattaattaaaaacagatagttggcagtgaatttattcggaaaattttctgcatcatcataggctttcgatttacgctgaaccatatcttcatcccatgctttcattttctttagcaattgctcgccggcggctttaaccgatttgtatttttcatctgaaggaatattttttaatactgcttctagttgttcttgcttactataaagcatagttaccatatcgtgcatcgtagtaagcgtggtttcaacagcttgtaaatgttgatgata

SEQ ID NO: 5015 - DNA, 1693 bp, Glycine max
  misc_feature (1)..(10): n is a, c, g, or t
  misc_feature (18)..(30): n is a, c, g, or t
  misc_feature (50)..(51): n is a, c, g, or t
  misc_feature (65)..(65): n is a, c, g, or t
  misc_feature (93)..(93): n is a, c, g, or t
  misc_feature (376)..(376): n is a, c, g, or t
  misc_feature (506)..(506): n is a, c, g, or t
  misc_feature (595)..(595): n is a, c, g, or t
  misc_feature (618)..(618): n is a, c, g, or t
  misc_feature (635)..(635): n is a, c, g, or t
  misc_feature (822)..(822): n is a, c, g, or t
  misc_feature (1251)..(1251): n is a, c, g, or t
  misc_feature (1255)..(1255): n is a, c, g, or t
  misc_feature (1358)..(1358): n is a, c, g, or t
  misc_feature (1366)..(1366): n is a, c, g, or t
  misc_feature (1373)..(1373): n is a, c, g, or t
  misc_feature (1540)..(1540): n is a, c, g, or t
  misc_feature (1630)..(1630): n is a, c, g, or t
  misc_feature (1646)..(1646): n is a, c, g, or t
  Peptide Sequence Number=SeqID_6934
  Probeset Number=SeqID_14794
nnnnnnnnnntttttttnnnnnnnnnnnnnccttcgctcgtttcctcgtnnccccctctcttacnccgtcataacgtgtcgaggctctaccgnggagttggtcgcgcgcgcgtcgtatgaactacgtggcgatcgcgcccggggcctcgtacggcaatctgcgcaacggaggaccactctaccctaagaaatcgtctaccaagtgcgaagaaatatctcgactcatctcctgaatactgagtagatgtacacgattatttgtagtatagagtgggtggtggtagaatattaatggtgccagcgatatatgagggaagtgatcttcaatactcatgctacatagtcacagactctatctcatatctcagatatatanaacactacattataccctgtacaacacctaaatctcacacgtaacaacaccggcacggcacataaccgtatcggccacaattatcacatgatatatttggaaagtgcgtacggataagacgatgatacanttcattaagagattatatagtaaatggttagtttgtgtgtataggtaggtatacggtctgcagaggtagttgatcttcggagtttcgangatgcgcgcgtctcgctagacgntaggtgagaactacgcntctggcggtagctgggtgctcggcgatgcgctggacgccgatggtcctatctctgtattaatatatgatgagtgttgtgtccggcctccgtagtctcctatcatcagcgcacgactctctctattaaggaacttgatattatatcacacacacatctcgtacgactctcttgtaccactcatgcctngtatcaccttatacatgcgagtactatgcacacgataggcgatacagtatctattagtcattatattatgttgatgtagcatggctgatacatgtgtgacatatatatatgtcttactgtatatatattactaactacgatagatctgtgatcacaacgacgcgaacggactcggtgcgcgagtgtgcgacactgccctttctacgcactccactatcatatacgtgggtgatgaggccgtccactagtgcgcacactgccgtctactacggtcatcattcgacatcacgacactcaccatatacagcagcagacacgcgctctctcacacacatgtcgctgcacacgtcgccacccactatatctacaatatgtaagagtcagtactgtctcgactcatcgtgctcgcgtctcgatgcactcgtacanagcncatctatctgatgaacgcacgtctacctaatacacatgaatcacatcgacaacatggcacctgtctcatggacgtgtgatagagacggagctaattaggagcngactaaantaaatcncgacgataagttctgctgtgaatagataagacacactaagcgatgcgctgcgggtcgcctcctgcgcatgctgatggtgctgtctgcgcgtgcgcgcaacgatgctcatcccgcgacctctactcttgtgttctattaccaccaacatactccacgaatacgtctcngctaccgtctacgtcctgtgcaacacgtcactctatccacgatgaccattctaaactatgttatgcatccatacacacgtcgacgttcanttgttgtacatcgttngacgtctctgatatcatagtacgtagtcttacgtcgacgtagtgagg

SEQ ID NO: 5016 - DNA, 1622 bp, Glycine max
  misc_feature (16)..(16): n is a, c, g, or t
  misc_feature (32)..(32): n is a, c, g, or t
  misc_feature (36)..(36): n is a, c, g, or t
  misc_feature (46)..(46): n is a, c, g, or t
  misc_feature (48)..(48): n is a, c, g, or t
  misc_feature (88)..(91): n is a, c, g, or t
  misc_feature (94)..(94): n is a, c, g, or t
  misc_feature (97)..(97): n is a, c, g, or t
  misc_feature (99)..(99): n is a, c, g, or t
  misc_feature (104)..(104): n is a, c, g, or t
  misc_feature (113)..(113): n is a, c, g, or t
  misc_feature (314)..(314): n is a, c, g, or t
  misc_feature (330)..(330): n is a, c, g, or t
  misc_feature (379)..(379): n is a, c, g, or t
  misc_feature (537)..(537): n is a, c, g, or t
  misc_feature (622)..(622): n is a, c, g, or t
  misc_feature (691)..(691): n is a, c, g, or t
  misc_feature (702)..(702): n is a, c, g, or t
  misc_feature (897)..(897): n is a, c, g, or t
  misc_feature (921)..(921): n is a, c, g, or t
  misc_feature (929)..(929): n is a, c, g, or t
  misc_feature (1093)..(1093): n is a, c, g, or t
  misc_feature (1237)..(1237): n is a, c, g, or t
  misc_feature (1278)..(1278): n is a, c, g, or t
  misc_feature (1285)..(1285): n is a, c, g, or t
  misc_feature (1316)..(1316): n is a, c, g, or t
  misc_feature (1318)..(1318): n is a, c, g, or t
  misc_feature (1375)..(1375): n is a, c, g, or t
  misc_feature (1416)..(1416): n is a, c, g, or t
  misc_feature (1429)..(1429): n is a, c, g, or t
  misc_feature (1446)..(1446): n is a, c, g, or t
  misc_feature (1470)..(1470): n is a, c, g, or t
  misc_feature (1485)..(1485): n is a, c, g, or t
  misc_feature (1493)..(1493): n is a, c, g, or t
  misc_feature (1495)..(1495): n is a, c, g, or t
  misc_feature (1514)..(1514): n is a, c, g, or t
  misc_feature (1622)..(1622): n is a, c, g, or t
  Probeset Number=SeqID_14795
gtggggtgtgtgtttngtggtatctctctacnctantctcttcatncncatctcccctcatctctcttcactacccgtctcacagcannnnaanctnantaaanaatacaagnacagaactggaatatatcgagatagcggtagagagtatataggcctagcgtaaaccacggcgaacgaggaaagccataacaccccatccaactcgcttcgaagctcctggactctgggtatatattgttaaagtatacagtacatcaacccgacaaatgtcaatacgaacagtatctatcgctgacgtctccctctcacgnatcgtatctgtggttntcgttgactatagatatgtcaatattgtagtgtataaatcattctctanactacaaatgctggaaaccactgcagataggagagtgcactacacatagccactcatctacaccccaacgcggaccaccgcagagagacagactacgaagacgcagacgaccacgttatgtctcgacattattctcacaacagagccacatcctaccncctcctctatactattgcaggcgacatctaatataatcatcaactactcgaacttcaacacatcaatcactataacgtaacgttnttcacaggtatactaactatctacttataagtggcttacgagtcctcggttatactactgctcataggntgattggtggngtattgagtagtggtgtgagtgtgcgtagtgagaatgggtgattatattaacgagtagagaatcaatatcgatctgtgtgtaatgtctcgccgacgacgaagcagaatctatacataagtctgtcatggtaggatcatgtatagaaagtagtgatgtcagcgtatatagatgatatcgtcactatgatatattanatactcacacacgtccacgactantgtacaanagacgcgtctcgcgttcgatcgccatttagttagtctgtgtcgcgcacgttactataatgtgatcgcgcggcgacatcctgatatatcacacgtaatgcgctgcgatgatctaccatacactatttacgctagttactcgcgatccccactacctacccatacnctctagacagcgtgtgcacgaggtatcgtcgatcgtagtatatagatgtatagatgaacgatgacacacatctactgtcatggcgtctctgttatcaatgcctccgtagcggtgaatgtgctcacctgtccgccactgcgtctntgcgtcacggtgtgcgagtgcgcgcgtgatgatcgctagangtagganaggagtactcctcactggactacacatcgancncgatctcctcgccgtgctcatgcgcatcattatctctatcatatgaatactaccgcntgtctcgtctcgtggagcggtcgcatatatttctataattnacatatctacganctcagctacccgcaggncggcacagcgtcgatgactacatnctcttctgcctgaantctactancncgcgcatcagtagacatcntcagcactatgtctcgcacacacatcgatgtctcgacagatacaatcatgtctgatgatatagatctgcgctcgacgaatctgacgcgccaactatactatatatagn

SEQ ID NO: 5017 - DNA, 721 bp, Glycine max
  misc_feature (1)..(3): n is a, c, g, or t
  misc_feature (604)..(721): n is a, c, g, or t
  Peptide Sequence Number=SeqID_6935
  Probeset Number=SeqID_14796
nnnatcgagaactagttcaatttcctagtataccttaataaataatttaagatactatgatgagagcacggttcccattactgttgctgggactcgctttcctggcttcagttcccgcctcctttgccatccctccccgcgcaaaaaagaacccccaacacacaagtgtctctagaattgccataccccggagaacctcctacaggaaccaagcatggcaccgttcgtttgcacctcccttaagggggccacaaccagattggttaaaaaagggacatttcccccgaccccgacccccgtaacacaaccccccggagcaggtcaacccccacccccccccgtctccaaatggtgctatacctcatatttcagccacccccccgtcccaatcccctttcccccaggccccttaaacctcccatccacacccacatatctccgctccccctcgcccccacaactccttcctcggcccctcccgcgcgggcggacaaaatcccccagctaccccccccaccttgccagagcacaccccgctctttcgcccccgtctcaacacaaaacgacccctccattccactctcccccaccgcccccacccctnnnnnnnnnnnnnnnnnnnnnnnnnnnnnnnnnnnnnnnnnnnnnnnnnnnnnnnnnnnnnnnnnnnnnnnnnnnnnnnnnnnnnnnnnnnnnnnnnnnnnnnnnnnnnnnnnnnnnn

SEQ ID NO: 5018 - DNA, 1005 bp, Glycine max
  Probeset Number=SeqID_14797
aggcggacaagaagaggaaagtgagaaagcttaaagcaatcgtcgtgagagactctcgagtcttccctgagtcactcccctctcttctctcggcggcgttctcgttcgattagggtttttgtatcaccttgcagattcttcaacacacaatgcataagttgagtagaagcaaccgggataaacttcagcagttcgtggctatcactggagctagtgataagaatgctcttcaggctctcaaagccagcgattggcagctggaagcagcttttgatatgttttacagccagccccagccaagaagcaatggtgatatgagacgcttggaggagctctacaatagatataaagacccatattctgatatgattctggccgaaggtatctcggttctgtgtagtgatcttcaggtggaaccccaagacattgtcacgctggttctgtcgtggcatatgaatgctgccacagcgtgtgaattttccaaggaagaattttttggtgggttacacgcattaggtgtagattccactggaaagttgcaagaaaagctgtcatttatgcgttctgagcttaaagatgaacaaaagttccatgaaatatacacctttgcttttgggtgggcgaaagagaagggacagaagtctcttgctttagatacagctattggtatatggcagctgctttttgcagaaagagagtgtccgttggtaaaccactggtgtgatttcttacaggatcgtcacaacaaggccatatctaaagacacatgggcacagctcctggagtttgcaaggacggtggacccggcgctgtcgaactacgatgcagaaggagcatggccttacctcatcgatgagttcgttgagtacctgtatgacaagagcgttgttgagaagtaacatgccaattgggagaagtactcagctctatttttacagtggtccttgctcattatttatgaatagacttgtgtgttcttgtccgaatcttcatcttcttattttg

SEQ ID NO: 5019 - DNA, 692 bp, Glycine max
  misc_feature (1)..(73): n is a, c, g, or t
  misc_feature (301)..(301): n is a, c, g, or t
  misc_feature (443)..(443): n is a, c, g, or t
  misc_feature (674)..(692): n is a, c, g, or t
  Peptide Sequence Number=SeqID_6936
  Probeset Number=SeqID_14798
nnnnnnnnnnnnnnnnnnnnnnnnnnnnnnnnnnnnnnnnnnnnnnnnnnnnnnnnnnnnnnnnnnnnnnnnnaacccaatgagatgtcacttgccaaaggagcgggggttttgttgattctgggtaagattttttgttcagataaggaagccgcatggcatttcccctaagacacaaagtgtttagttccaggcacctggatttccagaaaagtttaggacaacatgcagaatcctgcattttatttcgatgagctgcgacataggggattttagcaagccgctggaagttgttttcatnagttcccccactggcaaacaaatatagtcagggggcaaggcccagccaacaaagggttaaagaaaaataataaattaaaaagccctatctcgaacttcctttagggatgttgaagttgctgtgggtctttcagagggaattnccccccccccccccaatccatcctcctgatatgatgatgattatcatgctattcttaatagtttagatttctgttgctgtttttgtctttgatgttactttttattggatcaggttttaccccaaggtagagagagcttaatttcctaagtatattattgtctttagctcgctaaaaatccttatttgttgacctggtttattgtaataaaggagtaccaagggatttttnnnnnnnnnnnnnnnnnnn

SEQ ID NO: 5020 - DNA, 1476 bp, Glycine max
  misc_feature (12)..(12): n is a, c, g, or t
  misc_feature (37)..(37): n is a, c, g, or t
  misc_feature (39)..(39): n is a, c, g, or t
  misc_feature (44)..(44): n is a, c, g, or t
  misc_feature (51)..(51): n is a, c, g, or t
  misc_feature (54)..(54): n is a, c, g, or t
  misc_feature (71)..(72): n is a, c, g, or t
  misc_feature (74)..(74): n is a, c, g, or t
  misc_feature (78)..(82): n is a, c, g, or t
  misc_feature (90)..(91): n is a, c, g, or t
  misc_feature (223)..(223): n is a, c, g, or t
  misc_feature (508)..(508): n is a, c, g, or t
  misc_feature (632)..(632): n is a, c, g, or t
  misc_feature (658)..(658): n is a, c, g, or t
  misc_feature (736)..(736): n is a, c, g, or t
  misc_feature (827)..(827): n is a, c, g, or t
  misc_feature (842)..(842): n is a, c, g, or t
  misc_feature (856)..(856): n is a, c, g, or t
  misc_feature (858)..(859): n is a, c, g, or t
  misc_feature (1068)..(1068): n is a, c, g, or t
  misc_feature (1226)..(1226): n is a, c, g, or t
  Probeset Number=SeqID_14799
gtttatttgttntgttgtgatgtgcccctcacaaccncnccccnctgcgcnccncgcactccgccgcgtcnncncgcnnnnncccgcttnntttgtgttcgcgtcctctcgttatggtttgtcgacttggtacttctacctcgcttcgtccgactctatctctctttatatatataattcacatacactcaccatatatcttactgtaacccgaatctctttntttcttataatgtattggcgatccctcctctaactactgggtccacgcggaagagtacccacaacgctcatctcagaacagcgctacgtgcacgctacgactctcttggtcgtagcatctgtagagtgagtagacatcgagacatgcgtgtgggcgtagagtgacgatcggactctctactaactcaactatcgtgtgtatgatgatttgcagcactgatgtgtgatccgacggacgaggagatacagcagagcgggcgaatgtagcactaatatatacgaactnacagcggcacaccagcgcatgagcttccgagagagcgcgacgtagacgaagaggctgagcgcacgggagcgacgccgcacgctacacccacgcagcacgatagagtgcatgatgctcaccgccngacaccagcacgcagagtagtaagcntgtgagtcagaggaggcacgagtgattagaacactggagccgaggaaatatatagtggacacgcaaagcacaccgaantcaacacacatcaacacacatatagtcctatcaggaatgtgggtggagagtgcgatcgtacagattgtatgtcatggctgaacgacgacanagtagcgagatgagnacaaaagaagaaanannaaccaacggacgtggaagaggcggacaaccattctactcaactgtgtacctgtgcggtggttaccgcacctcacacacccactcccacacagtgaggtggcagacgacgcagagtgcgcgatgtgacgctgatcagatacggtagaggttgaggtccgtgagtgtatatactggacgtatgcagtatgacgtatgctttgccgtctctncatctctgcgcctcacttggctgcatctctctattgctgtgtactagtgttatctatcatgatcgagagcgacgcacactcgagacgcatgtacgaagaaaatctggaggactacgacgtgcgggcgggagtgaggggtgtcgcgggcgcgcgggcgngactcgtcagcgctccgccgcgcggtaatacgctgcgtatattttcatctttaatcgtcgactcagtgaagtacactaacagataataaatgtgtgttgactacaatacttagtacgcctccgtgtcgcctagctcggaccgctgaatatgagacatatatccatgctgatcatatgtattgtcgtgattgagattcgtggtgatgggtgacggggtgatctatataatatcattgtatgtgtagtctat

SEQ ID NO: 5021 - DNA, 620 bp, Glycine max
  misc_feature (601)..(620): n is a, c, g, or t
  Peptide Sequence Number=SeqID_6937
  Probeset Number=SeqID_14800
gtgccttgaaatttgaggacaaaggtgaggccatggagatcatcacctctcccagaaggaaggttattgagaaggatgtgtgtgacaaagaagaggagaccacttgggaggaagagaacaacagtggtttcaacttgtggaagtggagtttgacaggtgttggagctatctgttctttggtggtggtgctgctactatttgtgttctcttctttggaagccagcagaggaacaaactaaagaaggatcagaaaattcggttccagatctatactgatgacaaggttagctagtctcaatttttttcatttggtttgttgcttataaaaatcttaaaatcaaaagttttataaaaactgtcctcgactcaattttagctgcaacctcaaggtttttgaagtctaataggtctttgtgtataattctcccatcaaaattgaagtttcaccttggtgatctgcatagacatttagtgagagcctttggcagagttatgacataaaaactgcatgtctatgagagaatagatcaaagcagcgaatgaattgcacataaggtttggttcttgaagtattcgcaaccacacaagagctgattggggnnnnnnnnnnnnnnnnnnnn

SEQ ID NO: 5022 - DNA, 1399 bp, Glycine max
  misc_feature (1399)..(1399): n is a, c, g, or t
  Peptide Sequence Number=SeqID_6938
  Probeset Number=SeqID_14801
gacacacaagtaaaaccttagagagagagagagagagagggtaaaagggtattagatccttgaaccagatcaaatcatcaaaatctctgtctatggggttgtgaaaacaacaatcacattgttgttgctgtaaaaggggattccttagtctagatttgtttgcattgcagaagaaccagataccccattattgttcttatctatctatctgtctatattctatttatcttcttattgtagttctcattgtgtctgatttcagtgatttgtgttgtttttggttaacacaagcaatggaggttgttgagaaggagaagaagtacataacctcagaggagctgaagggtcacaacaaggagggagatttatggatctcaattcaaggtaaggtgtacaatgtctcagattgggtcaaggagcaccctggtggtgatgttccaatctcaaaccttgctggccaggatgtcactgatgcattcatagcataccatcctggcacagcatggtcacaccttgaaaaattcttcactggctaccacctcagtgacttcaaggtctctgaggtgtccaaagactacagaaagcttgcatctgagttctcaaaattgggtctttttgacaccaaagggcatgtcacttcatgcacccttgcatctgttgctgttatgttcctcattgtactctatggtgttctgaggtgcactagtgtgtgggctcatttgggttcaggcatgctcttagggttgcttttgatgcaaagtgcttatgtgggccatgattctggcactatgtggttatgacaaccaagcgttccaacaatgttgcacagatcctctctgggaactgcttgaccgggataagcattgcttggtggaagtggactcacgatgctcaccacattgcgtgcaacatccttgaccatgaccctgatctgcaacacatgccggtctttgcagtttcgtcgcggttcttcaattccataacctctcatttctatgggaggaagttggagtttgatttcattgctaggttcttgatctgctaccaacactttactttttaccctgtaatgtgagttgccagggtcaacttgtatctgcagacaattctgctattgtttctcaggcgaaaagtgcaagatagaaccttgaacataatggggatccttgagttttggacttggttctctctttgagtgtcttgcctgtcaaattggtctgagagggttatgtctgagcttgctagcttagctgatggctccatccatcacattcattcttgatggaattgctatgatgcagatgtatttgtcgggcctcctgaatgaaatgtactgtttgagacgtacatcagtggtatatcagatgtgactagtgcatacttgatggattggtatttn

SEQ ID NO: 5023 - DNA, 1466 bp, Glycine max
  misc_feature (1)..(1): n is a, c, g, or t
  misc_feature (42)..(42): n is a, c, g, or t
  misc_feature (52)..(52): n is a, c, g, or t
  misc_feature (120)..(120): n is a, c, g, or t
  misc_feature (206)..(206): n is a, c, g, or t
  misc_feature (214)..(214): n is a, c, g, or t
  misc_feature (393)..(393): n is a, c, g, or t
  misc_feature (440)..(440): n is a, c, g, or t
  misc_feature (480)..(480): n is a, c, g, or t
  misc_feature (571)..(571): n is a, c, g, or t
  misc_feature (580)..(581): n is a, c, g, or t
  misc_feature (629)..(629): n is a, c, g, or t
  misc_feature (641)..(641): n is a, c, g, or t
  misc_feature (717)..(717): n is a, c, g, or t
  misc_feature (747)..(747): n is a, c, g, or t
  misc_feature (761)..(761): n is a, c, g, or t
  misc_feature (923)..(923): n is a, c, g, or t
  misc_feature (935)..(935): n is a, c, g, or t
  misc_feature (1025)..(1025): n is a, c, g, or t
  misc_feature (1120)..(1120): n is a, c, g, or t
  misc_feature (1170)..(1170): n is a, c, g, or t
  misc_feature (1176)..(1176): n is a, c, g, or t
  misc_feature (1286)..(1286): n is a, c, g, or t
  misc_feature (1288)..(1289): n is a, c, g, or t
  misc_feature (1305)..(1305): n is a, c, g, or t
  misc_feature (1322)..(1322): n is a, c, g, or t
  misc_feature (1334)..(1334): n is a, c, g, or t
  misc_feature (1356)..(1357): n is a, c, g, or t
  misc_feature (1359)..(1359): n is a, c, g, or t
  misc_feature (1364)..(1364): n is a, c, g, or t
  misc_feature (1389)..(1389): n is a, c, g, or t
  misc_feature (1402)..(1405): n is a, c, g, or t
  misc_feature (1411)..(1412): n is a, c, g, or t
  misc_feature (1415)..(1416): n is a, c, g, or t
  misc_feature (1429)..(1429): n is a, c, g, or t
  Peptide Sequence Number=SeqID_6939
  Probeset Number=SeqID_14802
nagttgcgtcttgatgcgcagagtagtccgcaaggtccgatnggagagattnggaggagatctatacgtgggagtcgtgctgacgacgacgcgtctgtattatgaacagcggcgacgatntggttttgtattatctatcagtaatcaacacgtgtcgagtagaagacgttatagcgcacgtcgttatgtgtggtgtgagtgtcgcngtgttgtntgcgtttgtgatgtacttattggtgtgtgtgtgtgttggttgttgtgtgtgtgagagtttgtgtgtcgtttctctgtatatattaatacagagacgcgagtagaataatcagatagtcatcgtcagagtgtcatgcggcgtgatgtgtggagggactacggcagacacacaataatgtnttatatgatgactagagcttcactgaatgtgatcgtcgagccagtantcgcgatcgcgcacgtcgttttagtgcgaggtggtcgcgngctgcgccgagcgatgcgtcgggcgctggcggtcgacgtggcacgtgagtatgtatcagtgatatgagagtagggtgtctgtgttgtgggngttggtggnngtgtgatattgcatagtcatgtgttcgattagtgtgtagtggttagtnttgttggtgtgntatagttgtatgtagtgacggcgaggcagtagctagtcagtggactgcaatgtcgcaggttatagagtgtgatgtntatatatgcgggttagagtgtgtgtgttgngagcactgttgtangcgtgtgtggtgtgtggtgttgtagtgtgtgatatgtagatagtggagagcgttatactgctcgcgtcgtgtaagtctcgacggtcgcaggagacgttgtgtgtgtactgttctgctgtattatatatagatatgctgctgtctgttgtgtgtaatacgcancataccgatgtngcacctgtggacatgtgagaagtgtgcgcttcttgtcgtcgtgttgtatgtcgtctctgtgtctgcgtgtgttgttgtggttgtctattngttattatgaggtggaggtgttgtgtgatgagtgtgagatgtcggatgcgagagcgatcaagatcaagacggtgtgctggataagaacgactgtntcgcatgatatgtatgatattcagtacaccgtagggatatgagtgcatgnattgtncatcgcaatggcagctacagggtgtgtatgagatgcctcgaagccggagacgaatatgatagtggggagggtagcggtagcgcggtagagttacgcgccacgagccccgncnntgtcagtcccgcggtngctctctcgctcgcgcngcccaatatacnaccaacaacacccaacgcaccnncnccgcnctcgagcacacgtcgcgcgtggtgngggcggggggggnnnngggggnnggnngggagccgggcangggggcgagccagcgacacacagaagacggagcagca

SEQ ID NO: 5024 - DNA, 2094 bp, Glycine max
  misc_feature (1)..(1): n is a, c, g, or t
  misc_feature (93)..(93): n is a, c, g, or t
  misc_feature (119)..(119): n is a, c, g, or t
  misc_feature (124)..(124): n is a, c, g, or t
  misc_feature (152)..(152): n is a, c, g, or t
  misc_feature (157)..(157): n is a, c, g, or t
  misc_feature (162)..(162): n is a, c, g, or t
  misc_feature (215)..(215): n is a, c, g, or t
  misc_feature (223)..(223): n is a, c, g, or t
  misc_feature (229)..(229): n is a, c, g, or t
  misc_feature (232)..(232): n is a, c, g, or t
  misc_feature (275)..(275): n is a, c, g, or t
  misc_feature (292)..(292): n is a, c, g, or t
  misc_feature (374)..(374): n is a, c, g, or t
  misc_feature (434)..(434): n is a, c, g, or t
  misc_feature (472)..(472): n is a, c, g, or t
  misc_feature (487)..(487): n is a, c, g, or t
  misc_feature (508)..(508): n is a, c, g, or t
  misc_feature (514)..(514): n is a, c, g, or t
  misc_feature (585)..(585): n is a, c, g, or t
  misc_feature (654)..(654): n is a, c, g, or t
  misc_feature (681)..(681): n is a, c, g, or t
  misc_feature (759)..(759): n is a, c, g, or t
  misc_feature (799)..(799): n is a, c, g, or t
  misc_feature (818)..(818): n is a, c, g, or t
  misc_feature (856)..(856): n is a, c, g, or t
  misc_feature (1013)..(1013): n is a, c, g, or t
  misc_feature (1144)..(1144): n is a, c, g, or t
  misc_feature (1156)..(1156): n is a, c, g, or t
  misc_feature (1161)..(1161): n is a, c, g, or t
  misc_feature (1193)..(1193): n is a, c, g, or t
  misc_feature (1197)..(1197): n is a, c, g, or t
  misc_feature (1262)..(1262): n is a, c, g, or t
  misc_feature (1280)..(1280): n is a, c, g, or t
  misc_feature (1326)..(1326): n is a, c, g, or t
  misc_feature (1341)..(1341): n is a, c, g, or t
  misc_feature (1378)..(1378): n is a, c, g, or t
  misc_feature (1402)..(1402): n is a, c, g, or t
  misc_feature (1420)..(1420): n is a, c, g, or t
  misc_feature (1465)..(1465): n is a, c, g, or t
  misc_feature (1467)..(1467): n is a, c, g, or t
  misc_feature (1503)..(1503): n is a, c, g, or t
  misc_feature (1516)..(1516): n is a, c, g, or t
  misc_feature (1521)..(1521): n is a, c, g, or t
  misc_feature (1553)..(1553): n is a, c, g, or t
  misc_feature (1619)..(1619): n is a, c, g, or t
  misc_feature (1644)..(1644): n is a, c, g, or t
  misc_feature (1786)..(1786): n is a, c, g, or t
  misc_feature (1805)..(1805): n is a, c, g, or t
  misc_feature (1809)..(1809): n is a, c, g, or t
  misc_feature (1915)..(1915): n is a, c, g, or t
  misc_feature (2003)..(2003): n is a, c, g, or t
  misc_feature (2074)..(2076): n is a, c, g, or t
  misc_feature (2079)..(2080): n is a, c, g, or t
  Probeset Number=SeqID_14803
ncgagatatcgtgtcgattgcacgatctgtcacgttacagcatgttgctcgtcgcgcatgcgtgacgtcgtgagatcatagtcgtcacactantcatctactcatcgtgcgtcagtacnaactnatatatgttcatcatctgctgtgttagnagacntgtanagacatggtcacgagagtgagcatgagatcgctctagcagtacgactcgacgnctcacatnctttgntantcagcagacacgctgccggtgctcacagtcatatatcacatcntgccatcatcagagtgnaatgtacgaccatagtgatatcgcgatgacaaggtatcatacatgtatactatcatcactgcgtgtgcgactcgggtagtanatgactgcacagtaatcaatcgtgtagagatgagctgtcgcgcgagtcatgacgttagangcacgttgatacatagtagagatatgtcatttctctantgtctatactgagtngcgtcagaccgtgtacgaatntacatnaactagcacattatgatagatgactgtcgtagaatgcagtgcgtactatatgcagtacatctatgatgtcnagttaatcggacgcagtgcagatgatgcagagtataagactacacaagtcgagaggttcagtcactcantcatatcgtcagtcgagctactcttcngcgtaataatcatcagcgtgcgtgcgtctgctcgagtcatagctagccgatcagatcagcgtccacagacattgtcantactatagtgtcagtcgactcgacgaagactcatagactnactggctctgatcatacgntgtcacgtacatcactagacgtatatacgtgctcacangcggtcgtcagtatactatcaatgtagtcgctatcagagcgtgtacaacagagccagtatcagtataaatcagcggagcatatctcacttctatctgtgatcgtccagcgctgagcagtactgaccgcagagatactcatctgacgatgcagtgagncgcgagagagtatgatgatgtacatggtggtctcggatcgtgcgagcaccatgtgatcactcgtatgatcatgcgtcaagcaacactcgtctcatccagactcacgtgcatcgtaggatgtctactattcntcgtctctcatncacantacagacactcgacgcatagcacacgacagancagnatgctccatcattacacatcgtcgtccactcgacccgattcgcgctctgtagtcagcacgacagnagctgcaggcatgatcgnctggcgtgcgctagcgcatagatgacagtatgaagatcgtatgatngcgaggcacgtatgnagtgagcatctgatcagtcgtctgcgtcggtcagtcntcgttaacatgatgtctgatcgtngagtgactgcttcgtcgnttgtcaaatattgcttctacgtcacatactcaattatgtctcggntntctattatctcagcagctgctatatcttcgacatgngtgcaggagttgnatgtngtgtatcatgataggtgtcatatctctctagntcgacgtatgcctacttcgtgtacggtgtgtgacgatcactctatcacgtatcgtcttatcgcgtntgcatcttcgtagataatgtcgatngagtacagcgtctactgcagcatgctagccgcactctcggatagtacgagctgcggtgtgcgcctcgtcagtcattctgaccacgatgtaggctattgctcgccaagcagtgacgtctcagtgtcacacatacagccagcantcaactatctgtaataganacantgacacagcacctattccaaactactgcacgctataatcatattacaccaatatatcaataaaatcacatcagcgtatctctagcgcgacagcataaacaacgtancaggctgagcacgatactgaggtgtaatgctagatagactagcgcgagacgcgcgcgctatgatataccagacgtggtgtctccgtgnttggtgtggcgtgtgtgatgcgtcatgcgcgcgctactactacgggctctgtctccgccgtgttgtgtttnnnagnnttcagaaaaaatag

SEQ ID NO: 5025 - DNA, 646 bp, Glycine max
  misc_feature (1)..(1): n is a, c, g, or t
  Peptide Sequence Number=SeqID_6940
  Probeset Number=SeqID_14804
nggcttttttttgggttctggcccttttttgggcttttggttcacaattttttttctggggtttttccccgatttgtggggtaacgtttttccgcgctttgggtggagtggtaccgctttgccgccagacgaacggccggaggccaggagttaattaacggaggaacgggagaacgccccatttggaaaacgccttttttccgggggtttggcggtttatttattcaagtggcccggcaggtttttcggcttggaaacggggagtgggggccacgccatttatgtgggtttggttccttctttgggccccccgggttttcccttttttgtttcgggttgttttttttgtgggattttgggggggttacaatttttccccgggaacaggttttgccctggttttggccaagttggaattttaccttccttaaggggacaaaaagtgggggttccccgggggggggggcggttttgaaattgtgggtttcccggggttcagggattttttttttttttttttttgggtttttttttttttttttttttttttttttttttttttttttttttttttttttttttaacaataataataagtagctatatatataaagcgtatacaaaattaatacagatcaatatagag

SEQ ID NO: 5026 - DNA, 1477 bp, Glycine max
  misc_feature (1375)..(1375): n is a, c, g, or t
  misc_feature (1396)..(1396): n is a, c, g, or t
  misc_feature (1404)..(1477): n is a, c, g, or t
  Probeset Number=SeqID_14805
gtgagtagagtaagtaagatgagaagaaagagagtgagtttgaagataagaagtagtaagagacttagcaagaagcttcttccaccttatgcttcctatgctctggtagccattgtgctgtttttgttaggcgttttcttttactctgtctcctctgcttcatctccgccaaatcacccttctaatggggggggcatcaccaaccactcttctctttccacttccacggagcttcctcattccatctcattcaccaaccactcctccctttccgcttctccgcctccaccagtttatgtctatgagaaaccatgtgactacagcgatggcagatgggtccgtaccaaaagaggtcctctatatgatggttccaaatgtctccagatgaaagcaaagcagaattgtattgccaatggaaggcctgatttggggtaccttttctggaggtggaaaccaagtgaatgccatcttccaaggtttgaccctaacacttttctccaactcataagcaacaagcacatagcttttattggagactctctggccaggaaccacctagagtccctcctttgctttttagccactactgaaaaactacaaggattcacccaattccaagaaggttatactcggtggctctttcgttctcacaaggcaaccgtgtccttctattggtccccttttcttgtagatggtgttccaagaaaaaatccgggactcccttataacaaaattcatttggatcgtgctaatatgaagtgggaaaaggatttggatgaaatggacatcattgtgttgtcttttgggcattggtttatggctccttcagtttactacgagggtgaaaaagtcataggatgcttgaaccatcctgtttctaattgcaccaccgagattggtttttatggtccaataagaagagctttgagaactgctcttaatagcataattgagaggaaggttattaaaggaaatggagtggatgtaattttgagaacatacgcgccttctcattttgaaggtgattgggataagggaggtagttgtgcaaagactaagccttatggtgtttgggagagacaacttgaagggaaagatgctgagatcagaaggattgagttggaagaagtggaaaatgctaaggctaaagccaaaaactttagagggtttaggatggaggtaatggatgtaacaaaattagctttgttaagaccagatggcatcctggtgcttatatgaatcctttttcattcgctaatggggttccaaaccgtgtgcagagtgattgtgtcattggtgtttcccacgacctatagacacttgggagtgagattttcttcagacgtggggaaacatggcccgagccgcccaggangtgaagagtgaaccattcttntatccccnnnnnnnnnnnnnnnnnnnnnnnnnnnnnnnnnnnnnnnnnnnnnnnnnnnnnnnnnnnnnnnnnnnnnnnnnn

SEQ ID NO: 5027 - DNA, 403 bp, Glycine max
  Peptide Sequence Number=SeqID_6941
  Probeset Number=SeqID_14806
ctaagataaagaacatgtgatgctgttgaaattgaagtgaaccaaattgattgatctcccaaatcctaatttgcagtgatgtgtgtttattcggcactgtgcgtgaggggtttgcttggatggtacgtccgcctaacccacatcttcttgtatgccatgcctccaatgagacagtgcaactgtatcaactctcaagatggttcagagctcaaagcttgcttcaaggatcaagtgacatgttcccccggagttgaactatttttggttcactgcttacatacattggcccttgttgtagttggtttgatggccccatttgtgaacacaatcacaatggttggtgatgaagtcatggttaacgtaatagtaaggttgagatcaaatattctttagtgaggtgttg

SEQ ID NO: 5028 - DNA, 192 bp, Glycine max
  Peptide Sequence Number=SeqID_6942
  Probeset Number=SeqID_14807
cagtaattggatttaaattttcatgctccaagttgagtacctgtaatccaaacacagcaacccaaaatatgcatgcttatggcgctttgattattgttgcattgagtactctcttgatcttcatttataattgttctgatcaagttctagttactcgagaaaggagaaaggctaaatccagggaatcagggg

SEQ ID NO: 5029 - DNA, 1850 bp, Glycine max
  misc_feature (126)..(126): n is a, c, g, or t
  misc_feature (187)..(187): n is a, c, g, or t
  misc_feature (208)..(208): n is a, c, g, or t
  misc_feature (385)..(385): n is a, c, g, or t
  misc_feature (633)..(633): n is a, c, g, or t
  misc_feature (680)..(680): n is a, c, g, or t
  misc_feature (784)..(784): n is a, c, g, or t
  misc_feature (1005)..(1005): n is a, c, g, or t
  misc_feature (1012)..(1012): n is a, c, g, or t
  misc_feature (1075)..(1075): n is a, c, g, or t
  misc_feature (1141)..(1141): n is a, c, g, or t
  misc_feature (1210)..(1210): n is a, c, g, or t
  misc_feature (1213)..(1213): n is a, c, g, or t
  misc_feature (1239)..(1239): n is a, c, g, or t
  misc_feature (1258)..(1258): n is a, c, g, or t
  misc_feature (1298)..(1298): n is a, c, g, or t
  misc_feature (1424)..(1424): n is a, c, g, or t
  misc_feature (1458)..(1458): n is a, c, g, or t
  misc_feature (1460)..(1460): n is a, c, g, or t
  misc_feature (1531)..(1531): n is a, c, g, or t
  misc_feature (1547)..(1547): n is a, c, g, or t
  misc_feature (1555)..(1555): n is a, c, g, or t
  misc_feature (1591)..(1591): n is a, c, g, or t
  misc_feature (1596)..(1596): n is a, c, g, or t
  misc_feature (1645)..(1645): n is a, c, g, or t
  misc_feature (1647)..(1647): n is a, c, g, or t
  misc_feature (1666)..(1666): n is a, c, g, or t
  misc_feature (1694)..(1694): n is a, c, g, or t
  misc_feature (1739)..(1739): n is a, c, g, or t
  misc_feature (1787)..(1787): n is a, c, g, or t
  misc_feature (1798)..(1798): n is a, c, g, or t
  misc_feature (1809)..(1809): n is a, c, g, or t
  misc_feature (1850)..(1850): n is a, c, g, or t
  Peptide Sequence Number=SeqID_6943
  Probeset Number=SeqID_14808
gagaggccaccacacccagacaggcccggggatgaggagagccacagaccaacaggacagaaaattgaggggcccggccccaccccgtcgggaacgaggggaagagagggggaggcaggggagacnacgcggggccgaagcggaaaatccccaaaaaacaaagagaggcgcccaacgcgacgggggngaaggagttgttcgccaccgnacagaaagccgggaggagaaaagcggagagccggccgcgcggaagcgatgagagaagataaacaaaggagagcgacgcgagagatcagcactacctcccagaggggggagacggcggagaggaacagcgcccccacagagagatcgagaaggctcagacataaaaccatccaacaanacgtgtcgacgccagggacggcccgggcgaatgccaccagagagcaagctcgtaattacatctactcgcagttcgccaaggcacggcctactagagagggagccgcgcgcctaacgcgagcggagaagcacgaaccgagggaagcgcgagcgccgcgtgggagcagcggcgtacaaggcgaacgacacaaaccacacagcaacacagccgccagtaagaggcggccgcgggagacgcacaaaggatgntaacacgccacacgacacaacgacgagacgcgcaagcgccctcgccngagaagaaactaggaaggaccggaagcggcgcgcacagagacaggcgacggaacgcgatggggccaactatcataggctagcgcccgcgcccccgcgcgcagcnacacaaaagagacgctgaagaaggacgccgaagtatccgccgaagtacgccgaacagcagcgcggagtaaatagaatacgttaagagtggcgcgcgcgcgccggcgattaacataacaccgtacggcgagagcgcgcgcacaccgacgagtataaagcgactagacgcaggcacgcagaggcgcgacacaactcccgcactcactccgcaactcagctaanatataanatataagataaagatacgactaaccgcccacgtgcgctgtcacgatatatatcatcgacgtcncacgcatactaagagaccacaacgcgacgcggacaacgcagtgcagcggcgcgaaatatataaaantcctgaacatgtaacactatagacgtcgacaccacatcatacaagattctcacaaatatgttgccgccncgncgaggggcgcgcgcacgcgactgcgngcagtctcacgactatacntagatacaagccgcgagtgtcgtagcgcgcgtagatcatnatcactcacgcacgcacgcgcgctaaatataatatataggtgacacgcaaacagaacgacacgaaatgtcgcgaagtaaaacagccgcgcacgcagagcgcgccgtgaggcagcagagacacgccnggagtatatcatacatagatgacgaagcggacgncncgtaacagaagaaatgccgacaccgcgagacgatcagccccgtacgctgcgcgataacgtgaatcaccccnacgacgagtagagggngacagaanatgtacacaagcggaacggcacaagcgtcgtatatnatcgnacacaggataaaatacgcaaaacggacgcgcacacacgacccgcaagtnantatccacagatcccgcgancgaggtgataaaagtgagcgacgccacnacactacgcggcgtcgagcagagtgacagcgacgccgaaaaagtngtctggtgtggactgcccatgagcacccacacacagagaaatactaancgtaggtggancatcacatacncgcgacacgaatatgagatcaccacgcgtcagaccgcgcgn

SEQ ID NO: 5030 - DNA, 895 bp, Glycine max
  misc_feature (1)..(288): n is a, c, g, or t
  misc_feature (889)..(895): n is a, c, g, or t
  Probeset Number=SeqID_14809
nnnnnnnnnnnnnnnnnnnnnnnnnnnnnnnnnnnnnnnnnnnnnnnnnnnnnnnnnnnnnnnnnnnnnnnnnnnnnnnnnnnnnnnnnnnnnnnnnnnnnnnnnnnnnnnnnnnnnnnnnnnnnnnnnnnnnnnnnnnnnnnnnnnnnnnnnnnnnnnnnnnnnnnnnnnnnnnnnnnnnnnnnnnnnnnnnnnnnnnnnnnnnnnnnnnnnnnnnnnnnnnnnnnnnnnnnnnnnnnnnnnnnnnnnnnnnnnnnnnnnnnnnnnnnnnnnnnnnnnnnnnnnnnngcgcagtggcggctgcggaagtagctcccggccttagcctctgttccagcaccgcccgagagctttacttggagcttcgtctatcatttcccaggtgtctagaagtgacattgacgaaaggcttgagtatgtaaggtttgatttactatgattttcatctatatgcagtaagcggtagtactcactgattctttcagtccgagaaaatgattttttgtggaataaaagatacatgctctgatctatatgttcattcattcatgtggatagttagaactgcacactatcaacacctacctctttcacttgctttccccaattgtgttttttaaacttcttgcaagaagtcattgtatacattggtccttatcttgtttaaactttttgttttccagccttttggtcctttgctttagttacggttttttactcaagcatattactaattgagcctttgttttatttttagagcttggtctatcagttccaaggtgaccagaagagagattgaagaaagccttgtgtttgtaagaaggttggatttatgattgttaacatctatacacagtaagcggctgtactcgatgtgattcattcagtnnnnnnn

SEQ ID NO: 5031 - DNA, 2087 bp, Glycine max
  misc_feature (36)..(48): n is a, c, g, or t
  misc_feature (50)..(50): n is a, c, g, or t
  misc_feature (52)..(52): n is a, c, g, or t
  misc_feature (55)..(56): n is a, c, g, or t
  misc_feature (64)..(68): n is a, c, g, or t
  misc_feature (70)..(70): n is a, c, g, or t
  misc_feature (73)..(73): n is a, c, g, or t
  misc_feature (80)..(80): n is a, c, g, or t
  misc_feature (93)..(94): n is a, c, g, or t
  misc_feature (119)..(119): n is a, c, g, or t
  misc_feature (143)..(143): n is a, c, g, or t
  misc_feature (147)..(147): n is a, c, g, or t
  misc_feature (176)..(179): n is a, c, g, or t
  misc_feature (181)..(181): n is a, c, g, or t
  misc_feature (183)..(185): n is a, c, g, or t
  misc_feature (188)..(188): n is a, c, g, or t
  misc_feature (195)..(195): n is a, c, g, or t
  misc_feature (197)..(197): n is a, c, g, or t
  misc_feature (239)..(239): n is a, c, g, or t
  misc_feature (274)..(275): n is a, c, g, or t
  misc_feature (300)..(300): n is a, c, g, or t
  misc_feature (313)..(314): n is a, c, g, or t
  misc_feature (354)..(354): n is a, c, g, or t
  misc_feature (432)..(432): n is a, c, g, or t
  misc_feature (529)..(529): n is a, c, g, or t
  misc_feature (602)..(602): n is a, c, g, or t
  misc_feature (618)..(618): n is a, c, g, or t
  misc_feature (621)..(621): n is a, c, g, or t
  misc_feature (660)..(660): n is a, c, g, or t
  misc_feature (671)..(671): n is a, c, g, or t
  misc_feature (689)..(689): n is a, c, g, or t
  misc_feature (707)..(707): n is a, c, g, or t
  misc_feature (710)..(710): n is a, c, g, or t
  misc_feature (1004)..(1004): n is a, c, g, or t
  misc_feature (1213)..(1213): n is a, c, g, or t
  misc_feature (1215)..(1215): n is a, c, g, or t
  misc_feature (1300)..(1300): n is a, c, g, or t
  misc_feature (1403)..(1403): n is a, c, g, or t
  misc_feature (1461)..(1461): n is a, c, g, or t
  misc_feature (1468)..(1468): n is a, c, g, or t
  misc_feature (1554)..(1554): n is a, c, g, or t
  misc_feature (1566)..(1566): n is a, c, g, or t
  misc_feature (1630)..(1630): n is a, c, g, or t
  misc_feature (1748)..(1748): n is a, c, g, or t
  misc_feature (1763)..(1763): n is a, c, g, or t
  misc_feature (1842)..(1844): n is a, c, g, or t
  misc_feature (1876)..(1876): n is a, c, g, or t
  misc_feature (1922)..(1922): n is a, c, g, or t
  misc_feature (1962)..(1962): n is a, c, g, or t
  Peptide Sequence Number=SeqID_6944
  Probeset Number=SeqID_14810
actctctctctctcactctattacaaccccatatcnnnnnnnnnnnnntngnggnnggacaacnnnnngntanagcactnacaaaaacaaccnnacatactacacaaaaacaacagcgnaaacaactctcacgcgcaccagtngtanacccacacacacaacaactcgcctctcannnngngnnnggntgtcttntnctgtctcttcctttcttactaaatctttctaagggtacgtangtcattagggaagatatggtgtgtgcgtgctactnnacataccactcacatatctcaccantagaaaagagtgnntgagagaagaggaagagacacgaggactaagacacagganggagcacgagtgtaagtggagagaggacaagtaatcactctacaattactaaaaaacacacacccacacaccaacaancacatgcgctcgccactcacgtctgcgaagccgcgcttgctcgtcttgctcccgcctcgctcaccagcgacgcgcaccgcccctcggcttaggctcnctgcacagcgtcacatctacccgtatgacgtgctctactacgtgggcgtcgtgttcagtgtcttagctgcaanaatgatgacagtgtgntanatgtcattatgtagtgagagacacgaccgcgagtggagngcgagcacacngaggagtgacctgcgacngaatactcgccagaacanacnacgcagcgaagagcggagtggataaacaccgacgacgcacaagacttacgcacacacaagcgactccgcagaccagatgtagtgaaccagctaatgcagcgcacgatacgatagaggtcctgcatgtaacagaccccacgctccagagcggtgcctctacgcaactccagcgtgggtgtccgtctgtttgtatctctcacatctattgtcgatcgtcattactgtaattatacaatactttactgatatatgcatgctctatactaccttcatactcgcacattcgcggcgctnactcgcctcccatagcacctcacacagaccggtgcagacacgcacacgccgcacgacgtactactcacgcgacaacaatgccatctcgacgactccttcgcctctctctctcctctcgatcgtacatcgctctatatcaccgcgcgcggcttgcagagcagccgtgggactggcatacgcgtggcgcgcacacactactgtgcactctngngtgaactctcatagactatcacgatgacaaatacatagcatcccagtctcacatacacagctacacgcgcacgaaatgatgatanccatcactagttgacaccccgtatcagtagcatctattcgaccacacaacataaacacgatactcgcgctattactctgcgttatcatacacgcgcaccactnaccctgtgtccactcatatcaccgcctcagcaagtgctccctctcgcccactctacgntgcgccngcaccgcaccatacgctcgccaaccgacacgcacactccacaccatcagcgcggatgacaccgcgatgcacaactaaaaccacacntatatcatcganatacatcacaacatgtgcgtccgctaatatgcacccacatcgcaacacactactcacaccatcntcacaacaatcaacatcaatatactataaagcacatgtctcatacattcacactaacatatactatctacattatatcaacgacacaacacagtgtacagacataactatacactagnttgacgttctcttgnactccctatcatcctcgcttactccctcgacctctctcattactcgtacgatctgtcgtgcctgtcgagcgaatccgtnnngtatagcgctacgtcaccatatattacactantcgacgtctcactcgctcccaaccagcgctcatgcaacgctcgccntgtccaccgctcgcagtaatctcactcatcgacatctccnacatcactcctcaaatctcatcacgcgcaacacatcgatgctagtcatcaagacgtacaactgatacgattacgtaataacttaatgcaccgtgctccatgactcatgctccagacaaacatcgg

SEQ ID NO: 5032 - DNA, 472 bp, Glycine max
  Probeset Number=SeqID_14811
aatggaaaattttttagaaaacctttcaaacttggtcttttatttcccccggttcccccttgttttttaaacccttttttccagaatccaatcaccctaagcttctggctttttaaccacttttgagttcattgtaacaaatcagatgtttgcattgatcttgcacgaagtctgctttttgacattccaaggtcctgcgtcttgtctcatgcctttacatagtgaggccacgtacacctctaggcaaacagttacacacgctcgtcaatccagaatcaccccagtgactatgcatctccctgaagttattgaaggctgtagtcagggctagtgaattggggtactggagtcatagcatgctccttcccaggctgtgtttgttgttgttgaggagggaattctgttcaccggaagccattcttacaaacaagcttttgggaacagatatggagatctgtctagaacaaatgtt

SEQ ID NO: 5033 - DNA, 1415 bp, Glycine max
  misc_feature (225)..(225): n is a, c, g, or t
  misc_feature (914)..(914): n is a, c, g, or t
  misc_feature (998)..(998): n is a, c, g, or t
  misc_feature (1071)..(1071): n is a, c, g, or t
  misc_feature (1145)..(1145): n is a, c, g, or t
  misc_feature (1220)..(1220): n is a, c, g, or t
  misc_feature (1264)..(1264): n is a, c, g, or t
  misc_feature (1337)..(1337): n is a, c, g, or t
  misc_feature (1366)..(1366): n is a, c, g, or t
  misc_feature (1375)..(1375): n is a, c, g, or t
  misc_feature (1392)..(1392): n is a, c, g, or t
  Peptide Sequence Number=SeqID_6945
  Probeset Number=SeqID_14812
ggtaactcccccctcctctacttccttcgctggcctttgctgcgcgcgcgcgcttaggaataaaagggtggtgggcctccgatgggggggggagggggggtttttcttatttatagcggtctccccccgagcgcgaggggtagtttatctgcgtctctcgtccgcctgcgcccgtccaatcaggttggagcctttcctattcattcggcctagccaggagcgccngcttctctccgaaccacggtcgtgcacgcctatcgtgggtatctcagtgtttggtacgcccttagtgtcagtacatccgccgcccgcctgttggcgatatgaccgctcatccgtctgtcttgtctagactatccaaacatcacgtgagtagcaagcacgtcctcgcccatcactcttctacagacgcagaaggtgtgaggtcgatggacgcatcaagtacgggcatcacgtttctttctgtgcttctgatccatgcctgtctctacctctagcagtacactaacatatcgagagctcaatagcattcgcacgggctacgtacgcctgtaaagttatgttcgagtttccctcgtggcgcatatatcacagaattacagatcaaaaccgaggacatcgcgtgtcactttgctcctctaattctctggtctgcgtatagcgagggttagtggattgtgttagatgagaatgccctaacgcataatcgcagtcacgacacgagacacatgcatattctaccactgttgttccgatttacttcccgctctacggctgtgcatctgtatttactatgatttctcttccctctacttaccactatcagatctagacatctgtgtgggtgtgcgagttgtcaatactctgcttgcctaccacacctcgttatgagcgacagccgcttcctgattctnctacttgtgcgaccgttatctccatactctatcagatctcctctttatacgtcttaccgttgagcgctctcctcgccgcgtctnctgttccacatgtcgtcgtgctatggcgtggtatgagagagtgtgagcgcggcgccgccactgtgcatacagntgatagagcgtactaccgcatgagggcgcgtaccacctatgcggtatcatacagtgcgatgcgctctctcgtgngatctgctatccacgctctgataagtgaccgtacatagagatggtgcttgcctgactatcagctctccgtatcanggatcggtcaactttatgctgcgtcaccactcgctcacacatantctctcactcctcacaattgccacgcgcatcgcgactatgtcgcgtgagttatctatatatcataattgtctntgcgcctctcgcctagtgtgatctcccanactctccgncgactgagtcagtgatncgacgcgctccgacatctcaacg

SEQ ID NO: 5034 - DNA, 1400 bp, Glycine max
  misc_feature (1)..(1): n is a, c, g, or t
  misc_feature (67)..(67): n is a, c, g, or t
  misc_feature (89)..(89): n is a, c, g, or t
  misc_feature (175)..(175): n is a, c, g, or t
  misc_feature (343)..(343): n is a, c, g, or t
  misc_feature (454)..(454): n is a, c, g, or t
  misc_feature (463)..(463): n is a, c, g, or t
  misc_feature (476)..(476): n is a, c, g, or t
  misc_feature (773)..(773): n is a, c, g, or t
  misc_feature (803)..(803): n is a, c, g, or t
  misc_feature (1058)..(1058): n is a, c, g, or t
  misc_feature (1140)..(1140): n is a, c, g, or t
  misc_feature (1142)..(1142): n is a, c, g, or t
  misc_feature (1277)..(1277): n is a, c, g, or t
  Probeset Number=SeqID_14813
ncagtgtcgtagatcatatatatatatgctactgcgctatctcgttagtgtgagtagtctgcgcgtnagtacccaggacgatgccgctngacacgtgacgtatgttctgatcactatacgcttctctgcgtgcactgtatgcatctctatcagtctcatatagctgttgtatatncatatctctatgtctctatatgttaagacacatacagtagcatgagtatggcgatattaatggtcgattgatctgcgttgtgtaatctatattacattcaatattgagagtatgtgtagttatggttccgttcgatgcttagtatcagatacgtacgtctactgagcncgtgggcgtcgtggatgtgcggtgcatgtgtggcgcaaacgtatagatagtgtatgtgtggagttaagcagtagattattactccagactggatacgcaatattcacaatntagctgaanatagcgttgtatnatcacgatatagatatcattataaaagagcggacgtctggcgcgtggagatgcgatcgcctgcgttgacgtagggtgtcgtagtcacaggcgacgcgtggttcgcaactatgtatatgagagatttgatacgatcgttgtctctccgaccagctactcaagacgctacgcgcctcctaatgctgaagagagaggagcagacaccattaacgaagtcgttgggtaagtgtttccgttcgtctaatattctgggtgttatggtatttgttatgatgtttctgagtaatatgtgattctntattatataatataatacttcgttaaatcnctacgctaccggcggacacgcgactcgcgtaccaagcaccgcggatcgagaatatgctaaaacttataaacactaagacgatgtagatagttctttactctagagtgagttattggtgtgtgataatatataaatctgtgtctgtacgatctttctatctctttattgatatacgtcatttttactctgctattagtgcgcattcgtgacagtcttgcactgatctgctctcctctctctggtgtgtgtgtgttnctggtaggcgagagaagtgcgcgtgtgtgctaccattctccgctggtggatccgtccccgccgggcgcccgtatagatacanangcaatgacgacacgcgtgctcctcctactcgtacggccagatccttagcaagtgaagaggaaccccacttatcctaccattcccgctgcgcccgtcagcgggtggcgacctctaccatgtatacttttagcgtgngagagggagagggcatatataaaaatcacgtaactaagaatatcgaactaccatatagcgacgccatattcgcgtggtgtgtgtgtggtgtaagaaagatgaataaccctccactcaacgccc

SEQ ID NO: 5035 - DNA, 473 bp, Glycine max
  misc_feature (212)..(212): n is a, c, g, or t
  misc_feature (224)..(224): n is a, c, g, or t
  misc_feature (264)..(264): n is a, c, g, or t
  misc_feature (299)..(299): n is a, c, g, or t
  misc_feature (333)..(333): n is a, c, g, or t
  misc_feature (361)..(361): n is a, c, g, or t
  misc_feature (383)..(383): n is a, c, g, or t
  misc_feature (385)..(385): n is a, c, g, or t
  misc_feature (398)..(398): n is a, c, g, or t
  misc_feature (402)..(402): n is a, c, g, or t
  Peptide Sequence Number=SeqID_6946
  Probeset Number=SeqID_14814
acacagcctcaacaaccctaacgcgtgcagagcagagagagacgcagccatggggcgaagacccgcgaggtgttataggcaaattaagaacaaaccataccccaagtcacggttttgccgtggtgttcctgatcccaagatcaggatttacgatgttggtatgaagaagaagggtgttgatgaatttcctttctgtgtccatcctggttagnttgggaggaaangaaaaacgtttttctagtgagggcccctggaaagcctgcntccgtattggctttgcaaacaagtacatgggcccnattttgcttggaaaaggatgctttccccttgaanaagtcagggtgcacccccattccatggnttcttaagatcaaacaagaatngncttttcgtgtggncggnagctgatagggctccaaactgggaaatggaagaagggggctttttgaaaaagccaccagggggtactttgg

SEQ ID NO: 5036 - DNA, 593 bp, Glycine max
  Peptide Sequence Number=SeqID_6947
  Probeset Number=SeqID_14815
gcttgaatttgtctacatccattctgcttcagcagcagatgtctccgtgacaaactacgtgttggcctgagagtgacatgggaatggtttactgctttgttgtgtgagattgtgtagccatacaaatgtgcagtgaggagagggtctttacgtttttccttctatattttgatgtcgaatcttcttcttcccttgtgtatttggcattcgggtgggggagatccggaatcgtggagttgggtacggaaatcgggacaggagcacacggaatcgggaatcaacacgcggcgatgtgtgctcgtcatcttcggttccgacatgggtcaacggatcatcgaacaccacactggaaactcggcctgcctaacgagggatcgtgaatcagaatcctggaatcggagaccggagacacagcatgacgaaaccggcaatcggtcaagcacttcaggctaacggcatcggcggctacgatactcggcgaggcgggactagagcaacggtgaaaatgcggatcggcgatacaggagcaccgatgggacgtgtcatcggagaactactagatctcatgcacctgccacacgtgcggcaccctg

SEQ ID NO: 5037 - DNA, 1351 bp, Glycine max
  misc_feature (516)..(516): n is a, c, g, or t
  Probeset Number=SeqID_14816
ctgtggcgacgtgtgcgtcgtgctgtgaatacgactatacagtactctcgatctcatattcgtactcatgatattagttctataatagctatatatctctctagtgactaattgttcatagtatgatgtcgatacagaagtttatctcagtcaggacaagtagtgacaacagccactaccatatccgacttgactacattagaatctgctatctgtgaatcaaataggtgagaaagctgagcatcgtgtaggccgacgcgagagaacagtattaatgtcgacacggtgtctattacacattctgctgcttctctctctatgcttcacttactcggatccgtctgtgacatcgtaattgacatctcatatctcagtactacagcgtcacacctaagcgtttcatgttgcaccacgtactgcctcagcgcatctttgcctcgtcctctcctgtaatctaattataccagatttgatcgcccgcgagtagcgggagatgtaacagccatcaatatctanaacgtcagattgcatagaaatagtagtaaccgtctatctctactgtggtatcgttctaacacggcgatagcgtgcgacacacggcctaagatgtataaatagtaagagaccagattacacatatctctcgtctacagccatattactatcgaatgatatatgactcgtaagaaatcgatctcaaaagtgacagatcataccaacataagaaccatgcactacgaattaggcgacgtatagtgactcactctcgcgctccacaaactgacgattccattatgtgagctccctttcatactgtccgtttgtcgccccggcggctacataacacgctaataattccactcattctccagtcaaatggtaacattctccgtattattgcttgttgtatattgtatatttagtttaagtagttgcttgctgcatgagaacagccccacagcgtacccacgccaccgaacatataataatacaaaacttaaacatataagatcctctcgtggacgaatcacgtattctatcaaacctgtgcctgggtccgtcgaacctactattatagaagtgtgagaggtagtaattcgagatatagtaatatgtacgcgaagtatctgtaattctgataaacggcgaccgagagtcaatcgattaattgagaagggacaatacacacgtcgggccgtccgcgacgctgcaacagaacacttacaccttctcacattaatactcgctttataatatgtcatcactccttaacatcatccgttaagatatctgtctgaccaatcgcttatatgctgatagacgaaaataaaattgtagctctatagtatgg

SEQ ID NO: 5038 - DNA, 947 bp, Glycine max
  misc_feature (15)..(16): n is a, c, g, or t
  misc_feature (62)..(63): n is a, c, g, or t
  misc_feature (71)..(71): n is a, c, g, or t
  misc_feature (86)..(91): n is a, c, g, or t
  misc_feature (96)..(97): n is a, c, g, or t
  misc_feature (118)..(118): n is a, c, g, or t
  misc_feature (121)..(121): n is a, c, g, or t
  misc_feature (127)..(131): n is a, c, g, or t
  misc_feature (138)..(138): n is a, c, g, or t
  misc_feature (288)..(288): n is a, c, g, or t
  misc_feature (947)..(947): n is a, c, g, or t
  Peptide Sequence Number=SeqID_6948
  Probeset Number=SeqID_14817
ggaaaaaaaaaaacnngagcggggcggaggggggggggcgggcgattggggacgggggaagnnagagaagngtgccgacccgaggnnnnnnaaaannaatttgccaaaacaagggganggnggaggnnnnnaaggggnggcagaaaaagaagggggttgtcccccccaccgcaccaaccaacaaacgccaagccccaaacccacaggcggcgcgaagaacaaccagcggcaggccaacgcaaaaaagggggccgggaccacggaagccacagcccgcaaggcaagganacgcgccacaaccccgcaaggagagggagccgaagaagcaaaagccgaacccgcgcgacccaccaccggcgaagtttttttgggaaaggggagctatcccatttacatcggatcggggttactaaaccaacccgactatctccagaggcacgtgcatggaaagagggtcctagttgtaactaaaaaaacggctgcgccactttatctagacaaggctgttgatgctttgacaaggggaaaccccaatgggtgctgtggagagtgctattttacctgagggggagcagtaaaaggacatggatactctcatgaaagccttggaaaaggccattgggttgggactagaccgggggagtaagtttgcggctcctggagggggtgggatggggaaatgggggggggggctgctgcttggggccaagggggggtaatttgatcagaaccgaacacggggagggccagggagagacttcgggggagagaaaaggggaataaagagcggctggggaagaacggaaggggggcctttaacaaccgcgggctggggtaaagaagggaaaactaaaaacgtggggaaaagaaaagggaatcggggatgggaagggaaaaagatggggcaataagggggcaaattttggagggaaagaaacaaaggacan

SEQ ID NO: 5039 - DNA, 486 bp, Glycine max
  Peptide Sequence Number=SeqID_6949
  Probeset Number=SeqID_14818
tgctcgaggtgctggagacactactcgaagggaaaggaccgcctacatcatgatgtgcggttgaaccgatctctaggactgaatgccgagttcatcatagataagatgcaactgtggatgccatcgtggcaggaaaacctacattatgggaaatccgtcaatgggatgatactgacaccgagttggcaatgtatgctgcattggcggatgaacagctgggagaaactactgacttaactaacactcatatcacgagttctgaccctgaacctagtgaggatggaagagatcacccacgtacttggtccacgaaatggagtaccagtggacctgggatgactaggagcacaccagtgcaagtgctatacttacgagattcttgaagctgatctgctacaagtggccaaggtaatggggcttgaagatgtaacagatgtgactgatgacattggaactgctgaagcaattctagcatccagttctgat

SEQ ID NO: 5040 - DNA, 1533 bp, Glycine max
  misc_feature (29)..(29): n is a, c, g, or t
  misc_feature (35)..(35): n is a, c, g, or t
  misc_feature (40)..(40): n is a, c, g, or t
  misc_feature (83)..(83): n is a, c, g, or t
  misc_feature (198)..(198): n is a, c, g, or t
  misc_feature (216)..(216): n is a, c, g, or t
  misc_feature (231)..(232): n is a, c, g, or t
  misc_feature (237)..(237): n is a, c, g, or t
  misc_feature (239)..(239): n is a, c, g, or t
  misc_feature (260)..(260): n is a, c, g, or t
  misc_feature (266)..(266): n is a, c, g, or t
  misc_feature (274)..(274): n is a, c, g, or t
  misc_feature (309)..(309): n is a, c, g, or t
  misc_feature (326)..(326): n is a, c, g, or t
  misc_feature (359)..(359): n is a, c, g, or t
  misc_feature (429)..(429): n is a, c, g, or t
  misc_feature (433)..(433): n is a, c, g, or t
  misc_feature (436)..(436): n is a, c, g, or t
  misc_feature (465)..(465): n is a, c, g, or t
  misc_feature (549)..(549): n is a, c, g, or t
  misc_feature (551)..(551): n is a, c, g, or t
  misc_feature (591)..(591): n is a, c, g, or t
  misc_feature (600)..(600): n is a, c, g, or t
  misc_feature (623)..(623): n is a, c, g, or t
  misc_feature (658)..(659): n is a, c, g, or t
  misc_feature (821)..(821): n is a, c, g, or t
  misc_feature (895)..(895): n is a, c, g, or t
  misc_feature (919)..(919): n is a, c, g, or t
  misc_feature (973)..(973): n is a, c, g, or t
  misc_feature (975)..(975): n is a, c, g, or t
  misc_feature (1242)..(1242): n is a, c, g, or t
  misc_feature (1314)..(1314): n is a, c, g, or t
  misc_feature (1355)..(1355): n is a, c, g, or t
  misc_feature (1359)..(1359): n is a, c, g, or t
  misc_feature (1449)..(1449): n is a, c, g, or t
  misc_feature (1455)..(1455): n is a, c, g, or t
  misc_feature (1507)..(1507): n is a, c, g, or t
  misc_feature (1518)..(1518): n is a, c, g, or t
  Peptide Sequence Number=SeqID_6950
  Probeset Number=SeqID_14819
ccacagcagcagtatcatctagtgatatnctcttntagtngtactagtgcagatatagactacagtatgattgtgtattgatnttttcgtcacatctacaacactcgcagcacactcgctagtgtcatattatatgagtagtgaacagcgttggatgagagagtacagagagatatgagtgatagatatgtatgttanagagacagtgtagtgatntgactggtaatatannttacntngacagagagacagcagacagncgcgcnaggatgcnggagtactgatgtcgtgcgtcatgtacgcagaganttgatgtatacttgtcntctcgcactaccgctagcatagtgattcgacantctccaatacaggtatactggcatctaggtcatagcagctgtcacatctctggctcagtggtagatgatnatcngtngtcagcatgcacgccatgtgtgctgtgtntcgctgcgtcagcatgtgtctaattatagagaacgtgagatcatgagcagcacagcacgcgcgacagatgcagtagctcgtcantntacatccatcatgatcgtctgtctagtcggtctatgtgtnataacgcancgagcagcgaagatgttgaagcngtggctagttgttgtgtgttggatccagcactgcnnaatcatatttggcatgtcgttgtagtcgtgttggtgtgtgctagcgatcgcatcgtacataataaatgtgactgtctatacacgagaacagagagtatcatggtatgtgtgtagtcggctgaggttgtgcgttggacgggtgagcagcagcgagtggggttnacgaaacgcgtagagagatggttggtgtgcgcagaaggatagagatgagttctgtatgtgcgaatagttattangatgatacagcaagaataaagganagtagcagtagtgagagtgtaaataccatcatagatatacattatataatatcnantgtaatgctagtatctgatgtgtgtcttacatatggtatgatattgtataattgtaattaggtcttatagaagagagtcgagcacagagtgaaaacacatagtgatgtcgttaatcgaagaggagcgagagcgcgtgttagcagaagagacgcgcagagcctcgctaggatagctcacggactagcagtagagagaagagagatacacagatacgagacaacaatattagacataaagaactcatagacagaacataataaacagancgaatagcgtgtgacacgagatgagggagaccccaatataatgatgatcacacggagatatgacgtgcatgntgtacacccacattggtatattcacatctagcagttaattntgtngtatcacagactatacagtactgttagtatgtagtgttagtttggtgacgatacatgatatatgagagagagttcgttacggctgtgaangagagnggagcgcgcatgtaaaagacgagtgctatatatagggagagtatgttctctnttgttgtgagntctggttgtttttgt

SEQ ID NO: 5041 - DNA, 472 bp, Glycine max
  Peptide Sequence Number=SeqID_6951
  Probeset Number=SeqID_14820
ggataaaccatggatacataaaatggtgatcaccacccccaaccccaaccccaaaaagaaaaggtacaaagaaatgaaaaaagaaaaaaagagactaaaaaattaaccataaccatctccatgaatgacaaagaaatggatcaactatatatgtaaaaggcaatacactatatatatgtataaatatatataagattaagaagctctgctgaggagtgtacagagtagttactattttctattcatggttggagtttgaggcctcaggagctggcgaaatcgagcccttcttagccgtggactcaacaaaatccaccacaacctgcttcacttttttgtacaccatctgcttcacagaaactctctctttagggaagacgctcccattcttgggtttgtgccatggctctgtttcctctgcatcctttcccttcttttcagcatccatgctttcgtatcagcttctaacctt

SEQ ID NO: 5042 - DNA, 516 bp, Glycine max
  Probeset Number=SeqID_14821
acaatccaagaatgagtcatacatatcgtcgattcatcaaagagtgaaggacattttgatcctctgatgctggtgtcccagcaaatcagaggtagtccaacttattccaaaatactccgtcgacagagtaaaaaaagattgcaccgccgtcgacgacggcgccttgccgacggaacgatgcccgacggctcctcccttccttctcgattccgacccctagtccctcacctccgactcggtccagtgcgccataaaaatacagatcggagtgagtgcggaagacacgtaattttcaggatactgttgcgatttcagatctgagtttgttatttcatgatctttgttgtttttttcggatctgggcttgttctaccgctctcgtgcggcggttgaagatgacgatttgggattaggtgtsctgggtgcttatcggaattctgaatcggagaggtgttctgtgggtcacaccaccgtgcaaggcttcatccgtcaaaaaatgattttttttatgaaacc

SEQ ID NO: 5043 - DNA, 1550 bp, Glycine max
  misc_feature (19)..(19): n is a, c, g, or t
  misc_feature (130)..(130): n is a, c, g, or t
  misc_feature (267)..(267): n is a, c, g, or t
  misc_feature (369)..(369): n is a, c, g, or t
  misc_feature (417)..(417): n is a, c, g, or t
  misc_feature (572)..(572): n is a, c, g, or t
  misc_feature (682)..(682): n is a, c, g, or t
  misc_feature (707)..(707): n is a, c, g, or t
  misc_feature (805)..(805): n is a, c, g, or t
  misc_feature (846)..(846): n is a, c, g, or t
  misc_feature (957)..(957): n is a, c, g, or t
  misc_feature (1120)..(1120): n is a, c, g, or t
  misc_feature (1183)..(1183): n is a, c, g, or t
  misc_feature (1413)..(1413): n is a, c, g, or t
  misc_feature (1418)..(1418): n is a, c, g, or t
  misc_feature (1462)..(1462): n is a, c, g, or t
  misc_feature (1491)..(1491): n is a, c, g, or t
  misc_feature (1494)..(1494): n is a, c, g, or t
  misc_feature (1496)..(1496): n is a, c, g, or t
  misc_feature (1507)..(1507): n is a, c, g, or t
  Peptide Sequence Number=SeqID_6952
  Probeset Number=SeqID_14822
gtgagcaagagcgcgaggntggtgctgggcgcgtgagtcacgtgacggcggggaccacgcgcgcgtcgagccgccggccgaaataagagatattgtcaaaggagaaaacgaaatggcaggacggacgggncggttcagtaatagcggaggtagcgggggctccctcccccctacgcagaagcgcggtaacaggtgaggagcgctcccctcctcccccgtgtatacaggtgtgtgagatggtatcagagagtcgctcaacgatactgntagtacatgcgcactggatgccgcacggggtatatagtttgtaggaagcagtacgtgcgtatcatatacttgtgtctgaattttatgggactcactcctacnccacattctatactccagaaaagggtcaccaccactactaaacactcntaacacttactcaacgaaagctggtgggggttcggctatggaagtctatgcgcccgcgcgcgagtctcctggtacacagaccacttaacgacacgactcaaataagattacacaaacacatagagaaaattctacactgtcggcatgatgtccgngagtaggagccgatagtataggcagcactatactcctcgtaacgtacaaaactcgtaacggacagtaatgttcacacgacgcaacaagacgcagagcacgcgagtgcgcncacgtcacgtctaagtcgccgaacnttatatggctaggagtgctcgtggatatagatcgtaacacacaacgacacgaggtgacgcgcagatcatgaggatctcgtactgacagaacaggagtngtgagtgaggacacactagctaccgagtgagaggtgcggtnatgacgcgcacgattactacatcggctacatgacgtccacgctacgcgcatctgaatcatagactacacgctacacccacacgcgtcatatcgataatcaatgagcgcacncgcttatgtccaccaccacatagtaggtatgtaatagcacacacacaatagagtgaacacgtgcggctcacgcacatcacatccatactatcgaatgagtattcgcacgcaacgcatctcgcacatgttagtttatagccgagcaccaacgccgcgtagtatnacgtccgtatatacaccagtacactcaccgtcttgcgttgaccacactcgcacgcgccgcgtngttcgtccgcgcccgatagacgtctgcagtagataaatgctgatgtgttatatcctcctccctcttatatatatatcgcctcattaccgtccgccaacatatgactagcgacagtcgccgctggcgtcgcgtctctcgcgttatatacacacaagagacgcagcataccatattcgtatgagaagaacgttcgtgcatttagtctagaccctacacatgctatgactatntgtanactacgatcgacgccagataaactgtctcgcgccgcgcgccgcngcgcgatagactgggaagtgaaagaacgncgncngattgtgatancactcatatactctatatccacgacacgatgggatagaaatga

SEQ ID NO: 5044 - DNA, 1449 bp, Glycine max
  misc_feature (1)..(1): n is a, c, g, or t
  misc_feature (5)..(5): n is a, c, g, or t
  misc_feature (19)..(19): n is a, c, g, or t
  misc_feature (30)..(30): n is a, c, g, or t
  misc_feature (67)..(67): n is a, c, g, or t
  misc_feature (90)..(90): n is a, c, g, or t
  misc_feature (134)..(134): n is a, c, g, or t
  misc_feature (139)..(141): n is a, c, g, or t
  misc_feature (179)..(179): n is a, c, g, or t
  misc_feature (184)..(184): n is a, c, g, or t
  misc_feature (259)..(259): n is a, c, g, or t
  misc_feature (267)..(267): n is a, c, g, or t
  misc_feature (278)..(278): n is a, c, g, or t
  misc_feature (283)..(283): n is a, c, g, or t
  misc_feature (289)..(289): n is a, c, g, or t
  misc_feature (299)..(299): n is a, c, g, or t
  misc_feature (301)..(301): n is a, c, g, or t
  misc_feature (324)..(324): n is a, c, g, or t
  misc_feature (337)..(337): n is a, c, g, or t
  misc_feature (350)..(350): n is a, c, g, or t
  misc_feature (408)..(408): n is a, c, g, or t
  misc_feature (429)..(429): n is a, c, g, or t
  misc_feature (444)..(444): n is a, c, g, or t
  misc_feature (458)..(458): n is a, c, g, or t
  misc_feature (460)..(460): n is a, c, g, or t
  misc_feature (550)..(550): n is a, c, g, or t
  misc_feature (721)..(721): n is a, c, g, or t
  misc_feature (860)..(860): n is a, c, g, or t
  misc_feature (1011)..(1011): n is a, c, g, or t
  misc_feature (1018)..(1018): n is a, c, g, or t
  misc_feature (1045)..(1045): n is a, c, g, or t
  misc_feature (1101)..(1101): n is a, c, g, or t
  misc_feature (1196)..(1196): n is a, c, g, or t
  misc_feature (1366)..(1366): n is a, c, g, or t
  misc_feature (1380)..(1380): n is a, c, g, or t
  misc_feature (1413)..(1413): n is a, c, g, or t
  Probeset Number=SeqID_14823
ncgtnccacgatagtatcntgacatgtcangcctgtcatgcccgtgagtgtgtctttggctgatgtnagcaacgatgtgtctaccaggtnttcctctagctgtcatcgtgtgtcatatatattaacagagatgntgcannnacaggcacatatcccacatatgtgatatctatatagtncgacncccctatccgccatcgtgcagtcgatgtgcagtgagcatgtgggctgtgcgagtgtcacgccacgatgcacacantgtacctntcatatcagancactntcactnctatcgacgnangcatttgctagcgaatgatccantgtagcagcgatntcagcaccctcangcatcactgtatagtagtgtgcgagctcgggtgcgtgcacttgatcacgtagcaccgnattcgtgctcaatgttgtagntgctatgctgtttanatacaggtagtatnantcgtagtgtactagcgaggcagccaagtgtgaagtagactatagtctgacttgttatcacgtgtcattgcaagtctgcgtaagtatgacnatgatctaatttggtagagagagagagtgcagagcagcagtgcgactatagagtgtgatgtgtgttccattcgtgcccgtctgtgtggtgtggtgagcgaagagagtggcgacataacagatgagggtgtgtgaaatagtatattatagataataggtgtaggatgttgtnatcccactcacacacatgacgagacacgactatgagaggctttagtacatcagacacatctcaactcattgtatatctataattgagcgagagccgcgatgacgaagtagtagagctatcgacctgtatatattcttgntgtatatccggtactgactcgctggcgtttaatactatatgttatgctgctcagcggatcatctcagatcattcaggaaagtcatagtgaatgagatgatgattctgatgtgacaccgagttcaatacatacagtgcaagatcgcgtagantctgcgnataccgacaagctatagtacacacaancgtactttcatatactatctatacattatacacatgagagatgataacgtagacantcacatatacaccatgattaatatcaggagagaccgagaggagagatgtggacaggtcggactgtacgttcaactgcgtgaagctccagtaagcnagtataagcacgtatgctatcggtctatatatgttatgtgacctcaacgaaagttagctgataatagaggtgtgatatgataccgaagaacgattagcgatatctcagtaagaaatttctctctaatttattagcagctgcgcgcgatcatagcgggcactggactctcnctatatcttttctnttctccctatataaatatatgagagaggagagncagcagcgccacacccgcgctgtgtgtgtcactccc

SEQ ID NO: 5045 - DNA, 881 bp, Glycine max
  misc_feature (876)..(876): n is a, c, g, or t
  Peptide Sequence Number=SeqID_6953
  Probeset Number=SeqID_14824
aactcctttcccccctcccgttcccacttcattgtgtttaacaagaaatacccacttcttccacctgatatgaaacaggcggcctatgtatctgtcatgctccgggcaagccaatcttacagcatcgggttatgaatcccttttgatagcatataatgaacctgacctaagtcaggacaaaacgcgtattctggactctctggcatcttcacgcgatccagatctcattcttgaagctctcaacttcatgctgtcctctgatgctcgtaatctagatgctgtttttggacttgctgataccccggaaggacgagatgtagctggtgcatggcttagagaaaattgataacacctcataacaacatatggttcaggatttttgataactcggtctgtcagttcagttgtctcaccgtttgcttcccttgacaaggcctaggaggtagaggaattctttgctacccacgctatgccgtccatgtgctatgaacgttcatggagagcctgtcagcggctcaatatcattgcaaattgggttcagagtgttcagaacgaacataggcttggtgatgctctcaaggaattggcatacatagcttactacgtctcttgtctagagcgcttttccataatcaaaaacagaaacgtggtggctatttcaactttcttctgactgtcagagataccgtctattgctaagcatggaccttgccagttgcctgacatgagaataaatgatttgtgtgcccttgttagatctgcatcttcacgattgtggtttgatatgacaatatacctgcactcttggatatgtgcgggcaaatttcgtaaacgatagagacagaccttcaatgcatgtccatggcgatcgatacnacatt

SEQ ID NO: 5046 - DNA, 211 bp, Glycine max
  Peptide Sequence Number=SeqID_6954
  Probeset Number=SeqID_14825
tgcctgccgtagactttagaggatccccctgcttgccacattaggggaggtggatttaataatgctctacatatagggagcggatgctctttcacgaccttctgattggacatacagagggacctgtattctttttcgggatgctgctggtgctgaactaatacagggcattgccgaagaagaaagcacggctttgagaatcattttaaaa

SEQ ID NO: 5047 - DNA, 569 bp, Glycine max
  Peptide Sequence Number=SeqID_6955
  Probeset Number=SeqID_14826
tcagctacgtaggccccccccccagaaacgcccttattgtgctcacaaagataactagtatttttcctgtcatgcgaaaaagcggtatcaacatcgagaaaagggttgcgaagctaaagggggatgagagggaagatctgaaagtactggccactggtgtagctgctgctctggcagctcgcaagagttcatgggtatctgaagaagagtttggcatgggtcaccttgatctgaagccagtacctgcaaaacctattgctggaaatcagtatgcagatccctcgacagcaaaagatcatagcgtccgtgcaaaatctgtagagggtaggcatgaaaggtcagaaaatgcaatgaagcctgatgctcataagaagaatgcctcgactacaaacggatctgatattcaaatgccatcttcctctgcacaaggaaaaggttcagggcttgtacgtggtgtagatgaacctccaaaacttttgtccgatgatggagttaaagtcttgaagcctactgcagaacctgagacaagagcgccacaaaagcgtgctgtacaaaatgctgcaaaggta

SEQ ID NO: 5048 - DNA, 1606 bp, Glycine max
  misc_feature (10)..(10): n is a, c, g, or t
  misc_feature (18)..(18): n is a, c, g, or t
  misc_feature (46)..(46): n is a, c, g, or t
  misc_feature (57)..(57): n is a, c, g, or t
  misc_feature (61)..(61): n is a, c, g, or t
  misc_feature (64)..(64): n is a, c, g, or t
  misc_feature (123)..(123): n is a, c, g, or t
  misc_feature (126)..(126): n is a, c, g, or t
  misc_feature (215)..(215): n is a, c, g, or t
  misc_feature (221)..(221): n is a, c, g, or t
  misc_feature (223)..(224): n is a, c, g, or t
  misc_feature (334)..(334): n is a, c, g, or t
  misc_feature (364)..(364): n is a, c, g, or t
  misc_feature (455)..(455): n is a, c, g, or t
  misc_feature (681)..(681): n is a, c, g, or t
  misc_feature (724)..(724): n is a, c, g, or t
  misc_feature (784)..(784): n is a, c, g, or t
  misc_feature (792)..(792): n is a, c, g, or t
  misc_feature (861)..(861): n is a, c, g, or t
  misc_feature (881)..(881): n is a, c, g, or t
  misc_feature (1016)..(1016): n is a, c, g, or t
  misc_feature (1034)..(1034): n is a, c, g, or t
  misc_feature (1073)..(1073): n is a, c, g, or t
  misc_feature (1075)..(1075): n is a, c, g, or t
  misc_feature (1123)..(1123): n is a, c, g, or t
  misc_feature (1260)..(1260): n is a, c, g, or t
  misc_feature (1263)..(1263): n is a, c, g, or t
  misc_feature (1280)..(1280): n is a, c, g, or t
  misc_feature (1299)..(1299): n is a, c, g, or t
  misc_feature (1343)..(1343): n is a, c, g, or t
  misc_feature (1348)..(1348): n is a, c, g, or t
  misc_feature (1399)..(1399): n is a, c, g, or t
  misc_feature (1409)..(1409): n is a, c, g, or t
  misc_feature (1468)..(1468): n is a, c, g, or t
  misc_feature (1491)..(1491): n is a, c, g, or t
  misc_feature (1508)..(1508): n is a, c, g, or t
  misc_feature (1535)..(1535): n is a, c, g, or t
  misc_feature (1549)..(1549): n is a, c, g, or t
  misc_feature (1579)..(1579): n is a, c, g, or t
  misc_feature (1581)..(1581): n is a, c, g, or t
  misc_feature (1606)..(1606): n is a, c, g, or t
  Peptide Sequence Number=SeqID_6956
  Probeset Number=SeqID_14827
atttttgttncgtttatntgtgggtgtttgctgcgatgagagtatnatatagtatcntaanatntcaacaagcgatctcacctttactcgcgttgtatttatatttataatttttgttggtgngtncttactcccgctagctgggagtgcaccaaccatctatgtagacgcagacgacagcgcacctacacatcatcatgtaacctacgttagangatacntnnctcgagcgagttagagtagagtatgtgttattgtacttctatatgctttgaacgctgtactgtatattgaacgactagagaagtatctatatgctgacgacatataatanattcactacgtacatctctctcagctctcncttctgtcactacactacttcccatccttccactccacaccacggtggagctccgctctatctataatctatatgtcattcagttacgcancacacaggcgtgactacaatcactaggatacatattctacaggatgagctgagaaacgacgataaaaggaggtagataggagtataatgaagaagattatatgatggcatgcatccacactatatcgctgtcaatagagattatgactgtctgatgtgttccagccgcactcaccatcacacatgagcgtctgtagcgtatggagtgacgtgttgtagcttcgatnctcacacacggcacacgctcatccacacatccagctatatatncaacatctcagcgcagtagtatgatattatagagacaatgtacgacacatcacgcacacncacccacnatatgtagtagacactctacgctctattagtgatgtaacagacacagcatatcgagcgatagctcatcnggatatgacacaatctcagnacacactgacgcgccgtctgtcgatgacgatgctgtgtgtctgagagagagctgtgtatgatattaattaagaatatgcgagactaaagtgacagcgctgatagtatacacatgaccgatagcttgctcatcacntcagtactcgtcactcanccgctaagtgcgatcgatgtgttggatgagtgctaacananagacatcatccactctctatcgccttatagaccatcatgcaacaactnctatacaatctacatgactatcaaataaatacatcactcatcacgtcacactactgaatacactatacgatgcgtcgttaatacgactgctacgccgacatgcactctgacacgactctctacatcatcgcgagctngcngcgtctacgtagcgtgncgatatgagagtactgacngcgactcacacagtctacgagcaggatactacgtagatgtatanatcgnaaatagtgaccgtctgaagactgcatatcgtataatgcgctagcatactantatagtcatncagcatcgtctctgtagtactcactcaatcccatatcgcatcgcatcgtgcgtgctctncgaaccacgtactgatggatgtnagctgagatagagacgncgacggcctcgcagtgtatactcgcgncatgaatgtgctanttactgtcgctgcgtagtagcgcatctctnanctcgtcgctagctgagcgtctctgn

SEQ ID NO: 5049 - DNA, 1692 bp, Glycine max
  misc_feature (16)..(16): n is a, c, g, or t
  misc_feature (326)..(326): n is a, c, g, or t
  misc_feature (501)..(501): n is a, c, g, or t
  misc_feature (538)..(538): n is a, c, g, or t
  misc_feature (634)..(634): n is a, c, g, or t
  misc_feature (669)..(669): n is a, c, g, or t
  misc_feature (672)..(672): n is a, c, g, or t
  misc_feature (706)..(706): n is a, c, g, or t
  misc_feature (779)..(779): n is a, c, g, or t
  misc_feature (803)..(803): n is a, c, g, or t
  misc_feature (824)..(824): n is a, c, g, or t
  misc_feature (846)..(846): n is a, c, g, or t
  misc_feature (889)..(889): n is a, c, g, or t
  misc_feature (954)..(954): n is a, c, g, or t
  misc_feature (1031)..(1031): n is a, c, g, or t
  misc_feature (1234)..(1234): n is a, c, g, or t
  misc_feature (1347)..(1347): n is a, c, g, or t
  misc_feature (1351)..(1351): n is a, c, g, or t
  misc_feature (1353)..(1353): n is a, c, g, or t
  misc_feature (1363)..(1363): n is a, c, g, or t
  misc_feature (1411)..(1411): n is a, c, g, or t
  misc_feature (1514)..(1514): n is a, c, g, or t
  misc_feature (1522)..(1522): n is a, c, g, or t
  misc_feature (1537)..(1537): n is a, c, g, or t
  misc_feature (1633)..(1633): n is a, c, g, or t
  misc_feature (1663)..(1663): n is a, c, g, or t
  misc_feature (1681)..(1682): n is a, c, g, or t
  Probeset Number=SeqID_14828
ttgtcggcgctgctgngaagataataggttagattttgacggactgagatgtatgcatagacgacgttgtgcatacatatatatatgcagagacgtgataagacacgatacgacagcagcagagcgatgaaatgagaagagagagagcaagtatagtgtcgatctagtagaggattaaatcgaccgcgcacgacagacaatataaacagctatattagatacgagatgatgagagtatatataataatatgctctcacactatactgtcatgagatgcggcgatagctagtgtcttcgaggacggcagagatcgataccgtcgcancagtatcgagtatagtatcaacgcgagatcgcaagagctcagaggagctagtcgtgactgacgatagtatatgcatgtagacatcgatcaagacgtgtggtgtgatacatacatgatggtaacacaacagacgcagtctaacaatgcatacatatcgtaaacattcgattagtancagcaagagaagagcagagtagaatgttatgatgtangattaagacactagcgcgcgcagtcacagagataatgtgtggtatcaactgcaaatatgtgacgtgagcgtgctatagatagacataaacgacganatagatcatacacacctccacacaaccgtggctgnggngggttgtgtatctctccagcgtcagcgcacgcgnccatatatctctacaacggcgagaggacgattaacgtaattgcctgacagtattacgacataatatcatatantacgatgatcatgtagattgcacntatgcgatcgctagtaatagnatagatagtagatgaattctantataatatacatatttagtttatagtaattatgatattatacntactatctacattattctatgtatgtatgtacacacatattacatagcgactacaacacccagantagacacacagtactaaactataaatactcagagacagcacacagcgcacatgataatatatatagtgtacagcagnaaacgacagagagtggaagtatgagatgttatatatacgatatatgtaagtagtctgcgacactaatacatatagtgacaacgcgtgaatatatctactcatcaccacacatatatagtagactatccagagtagaatctcagattatcaaaccgccgtcatagatatatgatgacatacgccaagcgcgcgcatctgcttcntgatcattgatgtagaatcatgattaaatataacattataaaacgataagaagagataaacagaaaagtagagtaaagcaggcgaagacaatgagagtgtaagcgaatgttcntcancnccattgatgntgtattgcgagtcgctggccacgctcaacgcgcccgcactagctgaangacacaataagcgagatgagtgtcagcctatagggagtagaagagcccgatcacgttagataatagaacaaatgactatattagagataataatattgtctcnatagattntagtatacaacaagngcgacacagctctaaaagttaggtgatagtaattgatagtgtgggtgcacgcatatcgtaatgagtaagagtgttagtacgatctccacctctctnctcttctgtatatagtttagctaatatatnataaataatatattatanncaattctacc

SEQ ID NO: 5050 - DNA, 1650 bp, Glycine max
  misc_feature (1)..(1): n is a, c, g, or t
  misc_feature (55)..(55): n is a, c, g, or t
  misc_feature (105)..(105): n is a, c, g, or t
  misc_feature (112)..(112): n is a, c, g, or t
  misc_feature (138)..(138): n is a, c, g, or t
  misc_feature (181)..(181): n is a, c, g, or t
  misc_feature (183)..(183): n is a, c, g, or t
  misc_feature (200)..(200): n is a, c, g, or t
  misc_feature (210)..(210): n is a, c, g, or t
  misc_feature (259)..(259): n is a, c, g, or t
  misc_feature (273)..(273): n is a, c, g, or t
  misc_feature (305)..(305): n is a, c, g, or t
  misc_feature (376)..(376): n is a, c, g, or t
  misc_feature (378)..(378): n is a, c, g, or t
  misc_feature (470)..(470): n is a, c, g, or t
  misc_feature (473)..(473): n is a, c, g, or t
  misc_feature (477)..(477): n is a, c, g, or t
  misc_feature (479)..(479): n is a, c, g, or t
  misc_feature (531)..(531): n is a, c, g, or t
  misc_feature (987)..(987): n is a, c, g, or t
  misc_feature (1012)..(1012): n is a, c, g, or t
  misc_feature (1039)..(1039): n is a, c, g, or t
  misc_feature (1073)..(1073): n is a, c, g, or t
  misc_feature (1085)..(1085): n is a, c, g, or t
  misc_feature (1106)..(1106): n is a, c, g, or t
  misc_feature (1111)..(1111): n is a, c, g, or t
  misc_feature (1129)..(1129): n is a, c, g, or t
  misc_feature (1148)..(1148): n is a, c, g, or t
  misc_feature (1186)..(1186): n is a, c, g, or t
  misc_feature (1267)..(1267): n is a, c, g, or t
  misc_feature (1361)..(1361): n is a, c, g, or t
  misc_feature (1369)..(1369): n is a, c, g, or t
  misc_feature (1420)..(1426): n is a, c, g, or t
  misc_feature (1430)..(1430): n is a, c, g, or t
  misc_feature (1437)..(1437): n is a, c, g, or t
  misc_feature (1441)..(1441): n is a, c, g, or t
  misc_feature (1465)..(1466): n is a, c, g, or t
  misc_feature (1469)..(1470): n is a, c, g, or t
  misc_feature (1473)..(1473): n is a, c, g, or t
  misc_feature (1476)..(1477): n is a, c, g, or t
  misc_feature (1480)..(1481): n is a, c, g, or t
  misc_feature (1503)..(1503): n is a, c, g, or t
  misc_feature (1520)..(1520): n is a, c, g, or t
  misc_feature (1529)..(1529): n is a, c, g, or t
  misc_feature (1531)..(1531): n is a, c, g, or t
  misc_feature (1533)..(1534): n is a, c, g, or t
  misc_feature (1546)..(1547): n is a, c, g, or t
  misc_feature (1550)..(1551): n is a, c, g, or t
  misc_feature (1561)..(1562): n is a, c, g, or t
  misc_feature (1566)..(1566): n is a, c, g, or t
  misc_feature (1582)..(1582): n is a, c, g, or t
  misc_feature (1599)..(1600): n is a, c, g, or t
  misc_feature (1611)..(1613): n is a, c, g, or t
  misc_feature (1615)..(1615): n is a, c, g, or t
  misc_feature (1622)..(1624): n is a, c, g, or t
  misc_feature (1626)..(1630): n is a, c, g, or t
  Peptide Sequence Number=SeqID_6957
  Probeset Number=SeqID_14829
nagatgcggcgtgcatataatatatgtgttgcacagttacgtgacatgatctcantttactatcatgtgtgtgttgtggatgtcacgcaatatgtagagatatanggaccanagtgcagagcgtatcaggacaaaganggatcgtgtatgactgaatgtaggagtacaggtgcagaagagnantgaacacaatataaatnagaaaatagnacatagattatgacatacatgtactcaccaagtcaggtgtcgtctagcncgcgccgcgactgnacgcggcggctgaggcgccgcacgagtgccgnccggagtcgatcaccacgctacgcgtcagtgtacatcaggagttgttggttgctcttcgcaagacatcttntntcatcctctgtatctccaggaactcactcttctatcacagtacgttcggagttgagttgcgggtggggagggtgtcaccattagtactgatntcnatantnagtaaacgagaactatgtggacgtattaagtaactatagcctatagatccancgtgtaacatgtcggtattctctgtactcacgactcacactgtcatgtcgcattctcatcagagcaatccaatgacgtgcgtgcatctatactataatgattgatatatagacgtcggcgtcacgtgagcagagacagtcgacaagcgagaatggtcggtctgtagtatcctcgacagtagcgtagcgcggggcatagcttcgtaacattcatacacatgtattacatacttattcacattctgcgtgacgttgtgtattccatcaatacatccgtcatgctgtatacatttcagtgttagtatatctgttattggagtgtcagagagatgtcggtgtgtgtgtcgtgtgaggaagagattagatagtgtataaagaaatattagtttgtcgtccgcacactcctggccagcgcatgtacgagcatcaccacaacattacacatatgggcggtgcnaacaaaatactcacacagagagtanggagtaggagagagacgagagtgtgcntaagagaggggatcgctcatcagtatgtttgggntatgattttatntaacatctctccctcactccncgccncctcacttctctcatatntaacacataaaactttatncacgcgaccattcgtcgtcgtgagctcgtctgcgtacncgagcatattagtatagtagatgcatatataatccgagtgagatctgagtgtcacactaccgcctccatctcacacagtanctcgatgttctcgcgtctctcgtccacagtccttagagatctccgtggtcgacgcgctcgcgcgggcgtcagttctccttgcgtcacatataanattctgcngtggcgtgcgttgcagaaagtagacagagtaagcaagcgaggaatacgagnnnnnnngcgnccccccncccnccccctcccaccaccagtcggagnnccnnctncannacnntctcacaacacacatgactaangcatatgagataaaaangaaaaaatntnannaggccggagggnnggnnaggagagagnnaganaggtgggggtgtgggngacgcgagacgacgcgnncgtgggggggnnngnggcgcgnnngnnnnngggaggcacaccaccacaaa

SEQ ID NO: 5051 - DNA, 1651 bp, Glycine max
  misc_feature (33)..(33): n is a, c, g, or t
  misc_feature (75)..(75): n is a, c, g, or t
  misc_feature (77)..(78): n is a, c, g, or t
  misc_feature (88)..(88): n is a, c, g, or t
  misc_feature (93)..(93): n is a, c, g, or t
  misc_feature (103)..(103): n is a, c, g, or t
  misc_feature (112)..(112): n is a, c, g, or t
  misc_feature (120)..(120): n is a, c, g, or t
  misc_feature (164)..(164): n is a, c, g, or t
  misc_feature (256)..(256): n is a, c, g, or t
  misc_feature (265)..(265): n is a, c, g, or t
  misc_feature (276)..(276): n is a, c, g, or t
  misc_feature (336)..(336): n is a, c, g, or t
  misc_feature (362)..(362): n is a, c, g, or t
  misc_feature (408)..(408): n is a, c, g, or t
  misc_feature (419)..(419): n is a, c, g, or t
  misc_feature (593)..(593): n is a, c, g, or t
  misc_feature (605)..(605): n is a, c, g, or t
  misc_feature (618)..(618): n is a, c, g, or t
  misc_feature (683)..(683): n is a, c, g, or t
  misc_feature (979)..(979): n is a, c, g, or t
  misc_feature (1021)..(1021): n is a, c, g, or t
  misc_feature (1143)..(1144): n is a, c, g, or t
  misc_feature (1147)..(1147): n is a, c, g, or t
  misc_feature (1150)..(1150): n is a, c, g, or t
  misc_feature (1152)..(1152): n is a, c, g, or t
  misc_feature (1171)..(1171): n is a, c, g, or t
  misc_feature (1178)..(1178): n is a, c, g, or t
  misc_feature (1183)..(1183): n is a, c, g, or t
  misc_feature (1326)..(1326): n is a, c, g, or t
  misc_feature (1394)..(1394): n is a, c, g, or t
  misc_feature (1396)..(1396): n is a, c, g, or t
  misc_feature (1428)..(1428): n is a, c, g, or t
  misc_feature (1435)..(1435): n is a, c, g, or t
  misc_feature (1437)..(1437): n is a, c, g, or t
  misc_feature (1439)..(1439): n is a, c, g, or t
  misc_feature (1441)..(1441): n is a, c, g, or t
  misc_feature (1447)..(1447): n is a, c, g, or t
  misc_feature (1460)..(1460): n is a, c, g, or t
  misc_feature (1467)..(1467): n is a, c, g, or t
  misc_feature (1481)..(1481): n is a, c, g, or t
  misc_feature (1491)..(1491): n is a, c, g, or t
  misc_feature (1504)..(1504): n is a, c, g, or t
  misc_feature (1508)..(1508): n is a, c, g, or t
  misc_feature (1541)..(1541): n is a, c, g, or t
  misc_feature (1611)..(1611): n is a, c, g, or t
  misc_feature (1613)..(1614): n is a, c, g, or t
  misc_feature (1616)..(1617): n is a, c, g, or t
  misc_feature (1622)..(1624): n is a, c, g, or t
  misc_feature (1627)..(1627): n is a, c, g, or t
  Probeset Number=SeqID_14830
cgaggacagccggcggagagagactatcatacncacgctcactgcgcgaactgacatctcgagctacgcgtcgtncnnacagcgcacntactnggtgcgccgncgtcgttgntcggcggncgtgcgccatcatgagcacatgtactgttgctagtgtatgtgangtgtcgacaaggctcgagcgcggataagtgaatcgtgcttctgagttatgcatatgttcatatgatcgggatacttgtgtgcttgtatgtcnctgcgctgngcgagaaggtnagatgcgagtgcgcgtgtaagatatgcgtatgtcattcgctgcgcagcgatcgtgcgcgnatcgccacgtctcgaggtcattgttntgagacatcagtaacgttgatgtgtgtgttactggtgagtgcatcnagcacactgcnacagagaatgagttacgtgccggatggatgtcgcgcgcgcactagataggcgatgaagtaacagatatatagtactcgtagcagtagttggctggtttagtatctctcactctcagcgtgcgatacataacatacatatgtctatatcatcactcactgccatagtgaggagtnatatacactctngtgagtatgatgnatagaatgcgggacagcatatagacgatgatgtgatcagtatatagtcgtagtctctgttcgttngtccggcttgattgtctcttctctctttcccttgtctgattttgacattatcatatatctggatgtggttataaatagacaacactataatgatcttcgttcactctctgtcctcatctcggcgtgacatatacggtctcctgtgtggactgtgcgctctacatgacgagatgaggaatatgtgtgacgtgatatacatactacaatactatatatggatattagaaacgatatacgagcgagactacaacatatacatctcgcacgtctctctgcgagacgtcgtggcggggtcnaggagcgtcagataggagagcacgcgaccgacaccacctcantactaagctcggcacggagagtccttctctgcaccccgcgcattacatttcaatctctcactctcttatataataatattagtaggcgaccagcggatggagacgctcatgtgtgaccctcnnctnagntnggctcgccgaaggaggcgnggtgtgnagtgngtgttaagagagtattgatatatatatctatactatatttatcctataagagatgatcgaatcaatacaaagacatagtgagcagagagtgatcgcaactaacgatgagggagagagtcactcccaccctgccagctactcangctgcgtggggtgtgtgtggccttcgtacatcgtacatactcacacttacgatacgacagtctgacgnanacgactcaccctcatatcagcagagaaaaccngagcagnanantnaggcgngcctcgtcctcgncacacancacaacctaaacancgcccccccncgttgtcctgctnttantagctgggcgggtgtagttatatcgtagggtanccccactgtcgtgtgcttaagttatttggtgagcgatcagcacaccacaagacagccgcaacaacaacanannanngagannnaanaaacaagcgcggcacaaaaaacac

SEQ ID NO: 5052 - DNA, 944 bp, Glycine max
  Peptide Sequence Number=SeqID_6958
  Probeset Number=SeqID_14831
agtcctccacgcgaggagggccgggttaagcgggccgaatgttatatagtagaagggttttgggtgcggtctcccccccataagggaggagggggggttgaggccactttcgaagtgagcaatgtatggggggatatgggcatagtggttcccccatggtggggaagttttagcagaaattttctttggggcccaagaaaagagaagtttggtcgccgccggcacaaacgtatgcccgaggggtcaagggggtttatgtgataatttgtggtaagtggctcccttcgcgtggtgtgcaaggccgcaagttggtgggataccaaagaggaaatgcgctcctctgcggaagccccagaggggcggggggggctccaacccaagaaaaaggggggcggccaaaattccccccgggcaagggaaggctcgccctgaaaaaccccaaaggcccaagggccccaagccaaaggccagggctttaaggaaaccccaagaggggcgggctaaacccggagggcgtttttccaagcccccaaggccaaggcggcctccaaaaaagggggcttgtgctgcggcccggaaaaaagcctgttgctcgaaacccgccccccccaagagggccgacgccggggaagaagcccggtccgcccaaagaaggcctcggccaagaaggccaagaagttagaggccgctggacggtcctagatgccctggcggtagtattgagtagcctagttctctgtcgggggttgtcgctcaagagcttcttgactgtcttgggcggcggtgggctgtaaatctgatctatctgtgccgggggtgtacccttgtcgaggaagagtggtatccatgggaatcagttgtagtagtagtagtaaccagtgtaattgagtctttttattatcgcagcaatatccatgagttatttgccaaaaaaaaaaaaaaaa

SEQ ID NO: 5053 - DNA, 538 bp, Glycine max
  Peptide Sequence Number=SeqID_6959
  Probeset Number=SeqID_14832
ataggatatggtcctgaaataaaatctgtgattagaaactgcgatgaaaaaaaggaataaagtcagcgtgaacttaacggttctggacttgttctgaatcttcagagctaacttttgagatcagatcccctaaatggctactctctcagtgcctagttggggttccagttccaccattctaactaaccctcaaagcgtttaactgtgcatactccaagccagtcagattgctttgttgcgttgccctttttaggacttcaagtccatactgtgagagtgtgatggcttaagaggccttaacccctctatgtaaaaccgcgagtatattgtatcaatattttctgaaaatattgtatattaatatatctctttagcatgtagtaattgggtcaagttgtccccttctctgaaggctaaacttgagtctaataaaccatgctatgaaggtcaatatatttaaaacaaagctgagcattctaaatctcaacttttattttagatagattgcacctagttggtggttaaatagtaaaagaaa

SEQ ID NO: 5054 - DNA, 1756 bp, Glycine max
  misc_feature (6)..(9): n is a, c, g, or t
  misc_feature (20)..(20): n is a, c, g, or t
  misc_feature (24)..(25): n is a, c, g, or t
  misc_feature (33)..(33): n is a, c, g, or t
  misc_feature (66)..(66): n is a, c, g, or t
  misc_feature (99)..(99): n is a, c, g, or t
  misc_feature (384)..(384): n is a, c, g, or t
  misc_feature (394)..(394): n is a, c, g, or t
  misc_feature (1049)..(1049): n is a, c, g, or t
  misc_feature (1202)..(1202): n is a, c, g, or t
  misc_feature (1354)..(1354): n is a, c, g, or t
  misc_feature (1401)..(1401): n is a, c, g, or t
  misc_feature (1435)..(1435): n is a, c, g, or t
  misc_feature (1586)..(1586): n is a, c, g, or t
  misc_feature (1705)..(1705): n is a, c, g, or t
  Probeset Number=SeqID_14833
tttggnnnntttttgtttcnatgnnccaacttnatttttaacctatattatgaataaacatatatntaatttatctcgatattatttagtttatttttncgtttctaaatatttattgcctctgcgattattacactgctgtacgaaagaatgaaggcccacatacatctcaccttcctttgcgtcttggctctatacaacagatccatcgagattagaatcttgacaatatctgtcttcatatttcaactacgatcatgagtgactattcagactaagagacggagagacatacagcacgctccgcgaagccacactcgcgtcacaacgcacacgcgccgtagaacatagttatggatcagcgtcagtccacttaatctgaantccgaacatnataccaatgcgaaaccgaacaataatacggggccgtggtcattccataaaccactcatatactgagctacgcacggtctataactatccgttatctatattagataatggaatgatacaagagcgtgcatatgtcactacacatacgtagagcgacagaacccgatataaactaggcggccgaagatagaaatctcctcacgtataccaccagcacttcatggatgaatgtctcgatgtacattctcttagatatatgacgagatgacaacgtctcatctaggcgcgtagcagtatctcggctgtcggttgtcccaccgcagacgtcggcttccggtatttcattcgttatggattctgccgttgttaccgcactcactacaagcgcgtctcacgtacgataccacgctctatattttgtctcaacccattataaactctttataatatcaacaacacaccgaccacatgagcacctgcacgcacacaatgcaatatcgtgtttcggaacatcacagcgacacgtttgttatatcggccatcgggagatcatctgagtggaagccgcctgtacacccacgcaccagttacgttagatcgacgtcgtcatgtcactccaaccattaagcaacaagcgctatctcattcggtggccnaccacaacttgtatagcttgtgtagacacaacatgtgtggtagagcagtaaatatactcgccgatacacgtccggcgctatggatgacgatatatccccgtctacgcaccgtgctagagactacacgaccagtcacgtttcagcagtcacgcncgcgcatcccttgccgcgatcgacatccggtgcgcacacagagcatgtagtcgtataaacttgaatatgcgagcagtgtggatactgctacttaatcacccctcacgacgcagcgttatacccaccactacactctctcctatacctatacngcgacaatagcatacgcgccgccctccgacacgcgcgtacgcgctantacaatatgctaaatgctgtgccgcctcgtagcnttacctctctactaatgagcttcactcatccgcagagtgaacatactatggtgatatacacaactgtacgaacaccttacacattacgtagtgcgttagatgctacaatcagattcattcagggctgtgcttatcgtgtgtcctctcgagngtgacgacgccggcggagaatatacacgaatagactcatcgtatacataatgaggataaagtgcagcgttcatacaacatacgctctgcgtgagacatacatcacgcgcgagtcgtatntcaacatcgtcttggtcagcacgcgacatgtcagcaactgcgctactgaca

SEQ ID NO: 5055 - DNA, 1701 bp, Glycine max
  misc_feature (1)..(1): n is a, c, g, or t
  misc_feature (4)..(4): n is a, c, g, or t
  misc_feature (139)..(139): n is a, c, g, or t
  misc_feature (201)..(201): n is a, c, g, or t
  misc_feature (205)..(205): n is a, c, g, or t
  misc_feature (210)..(210): n is a, c, g, or t
  misc_feature (231)..(231): n is a, c, g, or t
  misc_feature (273)..(273): n is a, c, g, or t
  misc_feature (367)..(367): n is a, c, g, or t
  misc_feature (408)..(408): n is a, c, g, or t
  misc_feature (418)..(418): n is a, c, g, or t
  misc_feature (488)..(488): n is a, c, g, or t
  misc_feature (495)..(495): n is a, c, g, or t
  misc_feature (571)..(571): n is a, c, g, or t
  misc_feature (622)..(622): n is a, c, g, or t
  misc_feature (642)..(642): n is a, c, g, or t
  misc_feature (726)..(726): n is a, c, g, or t
  misc_feature (781)..(781): n is a, c, g, or t
  misc_feature (959)..(959): n is a, c, g, or t
  misc_feature (980)..(981): n is a, c, g, or t
  misc_feature (1133)..(1133): n is a, c, g, or t
  misc_feature (1170)..(1170): n is a, c, g, or t
  misc_feature (1174)..(1174): n is a, c, g, or t
  misc_feature (1176)..(1176): n is a, c, g, or t
  misc_feature (1194)..(1194): n is a, c, g, or t
  misc_feature (1278)..(1278): n is a, c, g, or t
  misc_feature (1486)..(1488): n is a, c, g, or t
  misc_feature (1501)..(1501): n is a, c, g, or t
  misc_feature (1601)..(1601): n is a, c, g, or t
  misc_feature (1608)..(1608): n is a, c, g, or t
  misc_feature (1614)..(1616): n is a, c, g, or t
  misc_feature (1618)..(1618): n is a, c, g, or t
  misc_feature (1622)..(1623): n is a, c, g, or t
  misc_feature (1640)..(1640): n is a, c, g, or t
  misc_feature (1670)..(1670): n is a, c, g, or t
  misc_feature (1695)..(1695): n is a, c, g, or t
  Peptide Sequence Number=SeqID_6960
  Probeset Number=SeqID_14834
ngangagtgatgatgagttggatgagcgttagtcgagatgtgatagatgtgaagtgcagtgtcagatgatgatgaatgtgatatagcagttaggatagtatgggatgtgtgcgcatgttatcatgtagagcgtagtgtnatttgttagagtcacgtggatagtagtgtgtctgtgagtgatacataagtcgagctatggtngatngtgtntgagtttaggtcagagtgtantctgagtggcatgatggatgagcttgcgtgatatagtcgctnacgatgagcgaggagagcagatcggtcgcaagagtgtcggcgagtatgagagcgtggtacagaggtgtgcagcggcgcggacagctgatgcatnacggtgctttataccgggacgatgctcgctatcgtcacgcngacgacgtcnacgtgtccatgtcgagcaccgacagtcatggtcactgtacgcagtcgtcgaagggtgatgaggtagtgcnactatcnctcatcatcatattagtagctagcgtggacgcgatactcatgcgtgatgtgatgtgtctcatcgtcgtggcggcangcgatgattgtcgactattcgcgctgcgtgcacatgttgaaggtacgtcgnatctcgtcatgcgatcttgnatagaagtcgtagagtagtcggtacagtgtagcgacgcgagacggatatacatcacagtaatgagtgcggatcgtagggagtgnggagggcggtatgtcgccagctgagtgttgaattactgtgtgtgattatgtggtncggtcatgtggagagagtagggatggagatattgcatgattagtgtcagctctgttgtcgtggtgtcgttatcgtatgtgtccgttcactacatctgagcgtcggagtagatcgactgcgctagagggaacgtatgagagtgtgtctcgttatacagtctagttgtacgtcatctgtngatgaggtcgattgacgttanncctttgtgatattgatcgagatgagatggatagaatgtgagcttttttctctcataacgatgtattattagtcagcgtctcattctacatcattatattccgtcctcacgttctctccatctgtgtgtgatggtcgtgcctttgtgttggtnttagtacatgattcgttgtatcgtctggcgtggtgangacnangggagtgtgaggagcgcncgtcgtgagttgcgtcaagcattcgccgtagttgctagtctcttcggtgtcacatcgatgtcggagcagcctcatgatgatgancggtgtgtatgagggatagatgaaatcgtgcggggtgctagtgtcgtggcgggaggggagacgtacagtcggccaggcactgcatgagtagcgcgtgtgcagagatggctagtggaacgccagcgattatgcgtaggaaccgaagacgtcgtgcgtgttgtagcactgctgggcgtgtgtgtgggtgtagacgacatcttccggaaannncccccatctcctncggtgtgtggcgcatgaggggagtgagagggcgagtggggggtgatgaggttttgctgaagggccagtgcgtgagtaggtaaatggtacggattttggtnaggtganggacgnnngncggnnggacacaagacaccacncaggacggacacgacaacacacaccaaaanacccacacacaaccacaacacaaanaaaaac

SEQ ID NO: 5056 - DNA, 1316 bp, Glycine max
  misc_feature (29)..(29): n is a, c, g, or t
  misc_feature (47)..(47): n is a, c, g, or t
  misc_feature (1316)..(1316): n is a, c, g, or t
  Probeset Number=SeqID_14835
gaagcttagtaatgaagcatgagatcacnccagcctcttcgcaacgncggcgataacagttgttcgccgtcgcataacccccgtttccactccacggtggcggaacacaaactacggcgtttcaacttgcttattctcgtgttccgcctcagctccttctccttctccctcgcctcctccgttttcatgctcaccaacactcgtggctcctattctcctcactggaaccactacgataccttcaggtactcttactagttactatttcagacctaatttatgaattcgtgttgaaattagaaagtaagtcagcgaaatcggttcagattctttctggcggctaatgcgatagtggcggtgtactctgtgttcgaaatgggcgcgtcggtgtgggaaatttcacgaggcgtaacactgtttcccgaagtgttgcaaatatggttcgacttcgggcatgaccaggtcagaaactaagaattgatgagtaataattgtttgatgagtggctgatgtgtgtgagggtggtggtgcaggtattcgcgtacctgctgttgtcggcgagcgcggcggggacgtcgatggcgaggacgctgaaggagatggagacgtgtagggcgagcaatgcgttctgcgtgcaaacggacatagccatagctttgggatacgcggcgtttctgttcctaggcttcacctcgctcctaacgggcttccgcgtcgtctctttcataatcaacggttcccgttttcatctctgaggtttcgcgtgggaacgacacacacacaaacgaatgttttgggtggggtcgggcttttccttttttcactgtactccaaacacctctcgctcaaatcaaaattatttgtctaaacctaattagaacggagtatctacaaagctgctaactcccctattatgtggtcaacagataagatcttgtttgcatttttattcaattttaagaaatcctaataagattttgattatgacttattttaaataggttaatttttttaaccagccaaaaaaaaaaaagagtaaaaggtaaatattaaaggcctgattatgcatttttatccacatgatgctggcggagtcagagcacataatcaactcactttatcctgaattctgggggcgacagggtttggatctatatatctcgatgcatgtttggaggggcaaaaattatgccgtcccggtctcaatacttgaaaagttatatgagctttcatttaaatgggatttattctaaaaggaggaaaatagttccctttcttttagaagtcattatttctattcatgtttttaacaatgn

SEQ ID NO: 5057 - DNA, 1619 bp, Glycine max
  misc_feature (1)..(1): n is a, c, g, or t
  misc_feature (9)..(9): n is a, c, g, or t
  misc_feature (81)..(81): n is a, c, g, or t
  misc_feature (108)..(108): n is a, c, g, or t
  misc_feature (136)..(136): n is a, c, g, or t
  misc_feature (241)..(241): n is a, c, g, or t
  misc_feature (276)..(276): n is a, c, g, or t
  misc_feature (365)..(365): n is a, c, g, or t
  misc_feature (397)..(397): n is a, c, g, or t
  misc_feature (417)..(417): n is a, c, g, or t
  misc_feature (442)..(442): n is a, c, g, or t
  misc_feature (509)..(509): n is a, c, g, or t
  misc_feature (514)..(514): n is a, c, g, or t
  misc_feature (618)..(618): n is a, c, g, or t
  misc_feature (809)..(809): n is a, c, g, or t
  misc_feature (813)..(813): n is a, c, g, or t
  misc_feature (917)..(917): n is a, c, g, or t
  misc_feature (1018)..(1018): n is a, c, g, or t
  misc_feature (1027)..(1027): n is a, c, g, or t
  misc_feature (1070)..(1070): n is a, c, g, or t
  misc_feature (1072)..(1072): n is a, c, g, or t
  misc_feature (1133)..(1133): n is a, c, g, or t
  misc_feature (1169)..(1169): n is a, c, g, or t
  misc_feature (1453)..(1453): n is a, c, g, or t
  misc_feature (1459)..(1459): n is a, c, g, or t
  misc_feature (1476)..(1476): n is a, c, g, or t
  misc_feature (1481)..(1481): n is a, c, g, or t
  misc_feature (1493)..(1493): n is a, c, g, or t
  misc_feature (1501)..(1501): n is a, c, g, or t
  misc_feature (1510)..(1510): n is a, c, g, or t
  misc_feature (1563)..(1564): n is a, c, g, or t
  misc_feature (1583)..(1583): n is a, c, g, or t
  misc_feature (1587)..(1587): n is a, c, g, or t
  Peptide Sequence Number=SeqID_6961
  Probeset Number=SeqID_14836
ncgttgagntaacacgcgcgagatcttgtgtgtgagatcgatcaagtcaccagtacataggcatcgtgatatgatatacgnatacagacgatagtagacgcacgatanagcggtgctatatctgtgtatactatantgctgagcatgtggcgtacttgacgagcggcgatgtttatttgtatcatctattctctgctctctatatttctatctacatgtaatagtagatatgagtaaatgngagatatgttgcgaatatcgtgtctgtctgttaanagagtatgaatgtgttagagtgatgcgtagatagtacagcagcaatacgctgatcgctctgttatcatatatgtataagtaatatacantagatagtagactggtggttgcgcgtagtgancagacgtgacaagtattgantgatagcatcatataggacagtatnggttgtgcagtctactgtcagatgtcatgataatgatagtgtcgcagtatgtgatcgtctagattgntgcgnatgttggtgttattatcgtattcaaataatatttaatgtactttacgactattcgatcacatactatatatacataacattatatctaatagcacgtaatatanactctcatatagcttagtatattattcgatgtcatcttgttattttaggctgtactatgatggtgaatcattgtgctggcgttgtgtagagtgatagcaaggactgaacaaatagcgcgtagagtgataattaatacagaacaggtacacatatcagagcgtcactaatagttatctctcattccgagcantaangaaggcagagaaggacagggataatgatctatgctactatattgtcgtgtacaatcaaatcagcagtcatcacatatatatatccagagaagcgaggatgatcngttgtgagggatgtcattatacatgtaagttcagagaggtagctgagatgaggtaagtattggagctccgcgcgtagagcagtgcggtgttgcatctgacngcgcggcgncgggtgaaggcagagatatagcgtatattgatcatacttcgantntcctctaccctacagctcacgtcggtaaattagttatgctatcatacgatagtatagtatngagatgtaggatagaatagaacaagatcatacgaantatatatgtatataattatcgtattatatatatatagtatttacctaatcaatataactcatatgtatgagagagatatcgaatgtattgttcatatagtgtaatgtcctagtgtcgctcatgtattatcgtcagtagcgtgggtgctaggcgccggggagtggagtgaagctgtatgttagcacatatgagtgagctaatcactctgtatatcactattatctagatgtgttgttggagtctattcaactcttcagtcaaaataatcatcccctttagtttcnttcttngagtatcaacgtacgcncgagntaacgcgctatngtattgtnagatatgtncttattacctttctcctttgtagacgaagaggaaagtattgagcagaacaaannaacagataagagggggagnaagnagtggagaggacaaagaagtacacaccccaaa

SEQ ID NO: 5058 - DNA, 667 bp, Glycine max
  misc_feature (1)..(4): n is a, c, g, or t
  misc_feature (667)..(667): n is a, c, g, or t
  Probeset Number=SeqID_14837
nnnntcagctacgtaggcccccccccctgaccttactccacttgctagttctgcgaacttgatgagttctttcttcccaaagatgctaagcacaaagagttcaaaagatcttcattgcttctcaagcaaataccaaagtcatactggcaatttcttcaaggctcctgaagtgaagactacaaaagcagatgtctcacataaaggctgtataaatgctatgctgtcaactatgtcgagccttcctgataaatcgttgatgagcttaaagtcttcatattcagtcttccaaagtgatcccgaaaagatgaataaatccaagacaaagttgatgaatttacgaagcactttagagacttctgaaaatcacagttctttgttgtcttcaattcctgcagaggctcctccctcaacttcaagaggtggaagcaaatctcgaggaggcaagaccaagaccaactcgctttatcaaaagactcgagaggatttaatgaatagattgcgaagctcaagtggcaagagccagaaaagtcctgctatgagcccattgagagaatttgcaaaagttccgttgacaacaagggcaaggagaaagtacggatgaagtgatgacattgatcaagaaaaaaatgcactctcctaaatttgagaacgtgatattggcatcatn

SEQ ID NO: 5059 - DNA, 581 bp, Glycine max
  misc_feature (55)..(56): n is a, c, g, or t
  misc_feature (79)..(79): n is a, c, g, or t
  Peptide Sequence Number=SeqID_6962
  Probeset Number=SeqID_14838
cgaatgctggattcggctcgagggtagggatccaacctgggagaaccctttgagnnagtttgtttggtttatcagagangggcagattgttttggttgttatgggacagcggtagcattttattccatttgggagtggaagaagaacgtgtcctggtgcttctctagcttggcaggttgttcctgtgaatctggctataattattcaatgtttccaatggaagcttgttggtggcaatggctaggtggacatggaagaaaagtctggcatccctctcccgacggctagccccataatttgggtccctgttccaaggattaaccccttccctcctatgtggttgaatgctattcatctggccccgaatgttattcaataaccagtgggggaaaaaaataataattacccatatggtctgataagagaaaaataataaagccggtttcttttttaggctaaaaagcaacttttatttcccattgtataatttattgaaaaatatgtttcttcccaagttagaaacccccccttagttcaaaaaaacccacccaaaaaaaaaaaaaaaaaaaaaaaaaaagaaa

SEQ ID NO: 5060 - DNA, 613 bp, Glycine max
  Peptide Sequence Number=SeqID_6963
  Probeset Number=SeqID_14839
gaatttttttcttggtttgggaaaaggcttaggtcaaatttaggtcccgggtccggggtcagattttgggtttcaagaagataggtttcagggcagggttccacccctttttcaggtcatttattctagctccctgggccccaaatggtggggaagcaactttcgcaatcaaagaagccccccctaagaagcctagaactcccttttttgccatttttgggatttatgggggggggttcatgaaaaacattttcggtttttttgcaatttcggttttgatttttgggggggaagtcccttggcaattttcaggggaattgcgggttgttgcaattttttgggcaaaaacgggccttaccgcaagttttcccccccttttccccaaagggtcatccttcattgcaatttttttaaaccccttgtttttggtttggggttttaaacttggcccggttttcaattaaaattaacccccccagggggttggggcccattgaaaaaaaattttttttttttttttttgggaaaagggaatttccttttggttccaaaaaaaaaaaaaaaaaaaaaaaaaaaaaaaaaaaaaaaaaaaaataaaaaaaaaaaaaaaaaa

SEQ ID NO: 5061 - DNA, 775 bp, Glycine max
  Peptide Sequence Number=SeqID_6964
  Probeset Number=SeqID_14840
ttctctcttcaactatgtgaatgtcctgacccaagacatcgatttcttggaagaaaataacaaagatattcaattagaaattgaattgttagaaaaagaacttgatcaaaagcaaaaggcaatggagaagactcctgaagaagaaattgaaaagcagaagattcaagaagtcatttgtgaaaaggaattatatatttctgatgtgagaaaccaactctataagatgagagatcctcttgaagctgtgcttagaagactatcagagactaacttctgttcaatttccaacttggtgattatggagaactttattttgaatgaacagaccatcgactattacctatcaatttttgaagcaatgattaacaagcttgttccttatatttccaagaagaacaacaacaagaacttcatgacaagtggtttattgtttgatgaattgaatgtcaagcagttgaagaaacaagcaaatgagattccaaatgttaaggatttgacattcactgaagaaagtactttggaacaaactccattcttggaggaagatagattgcaattgattgctctcgaagtcttggataagtacagagaaagatcaataaataatggatatcaatcagtcgaaagaccaaacaaggaggcctctttcctttaagaattctttttctctaatataaaatgagtttatttttcacattttttttcttattcgcatcgactttttatttattttccaattatattttttattatgcacctaaatgaatgagtcgtg

SEQ ID NO: 5062 - DNA, 448 bp, Glycine max
  misc_feature (20)..(21): n is a, c, g, or t
  misc_feature (64)..(64): n is a, c, g, or t
  misc_feature (73)..(73): n is a, c, g, or t
  misc_feature (204)..(204): n is a, c, g, or t
  misc_feature (233)..(233): n is a, c, g, or t
  misc_feature (434)..(434): n is a, c, g, or t
  misc_feature (448)..(448): n is a, c, g, or t
  Peptide Sequence Number=SeqID_6965
  Probeset Number=SeqID_14841
tcgagtagctacgtaggccnnaccccccccaacagccttctcgccaaaagaagtgagctcaacnaatttgatnatcttttggtcaagaagcacaagacccaaagcactcaagcctctgaaaccaactctgatgaccaatcagttacttccagagataactttggaggagctgactttgccatccttgcctgctcagaaactttngaggaggattcacaagcctcttcaacttngggcactccaagaagacaagtctctgaagaaaatcttgagggcctcagtgttcttcaacaagcattgaaagctctcgaattaaagattaagatgcaagatgaacaaagcaagaagaaggagattgtccttgctggtcacagagctgcttatgctatccctgttttccaagaaactgctgagtttgccatgagagaggctgntaacctcagtattn

SEQ ID NO: 5063 - DNA, 524 bp, Glycine max
  misc_feature (263)..(263): n is a, c, g, or t
  Probeset Number=SeqID_14842
gcatgtactagtgagggctaaagatgacaaatgctttgatggaaacctctcgacttagaaaactccatagacgcttgaaacccacactctctgaagacaaatgtccctttgagagaagatccagatgcatttcgctttggaatcctgaccacataagtgaggatgtgagtatatctgattcatgaaccacaaataagtatatagagagaacattcgatgtttatagagagatgctttgaggtgaatttatatatggaaaatanattatgcctctatatagcgatgaatataacatagtatgagttgatgcacccacatcctatacttgacgagatcacaaagtatacctacacacatctccccctgcttactttaggcaggcaaagaatggtctatatattaggatggctctcttaaaggtattgcttcttggttggtaaggatgcattcacttttcgaagtgaatctgatgatctaatgtcaaaaaatttcagttgttttctttgtttcctttccttgccttt

SEQ ID NO: 5064 - DNA, 1373 bp, Glycine max
  misc_feature (19)..(20): n is a, c, g, or t
  misc_feature (55)..(55): n is a, c, g, or t
  misc_feature (57)..(58): n is a, c, g, or t
  misc_feature (60)..(60): n is a, c, g, or t
  misc_feature (63)..(63): n is a, c, g, or t
  misc_feature (67)..(68): n is a, c, g, or t
  misc_feature (126)..(127): n is a, c, g, or t
  misc_feature (131)..(131): n is a, c, g, or t
  misc_feature (133)..(135): n is a, c, g, or t
  misc_feature (139)..(139): n is a, c, g, or t
  misc_feature (222)..(222): n is a, c, g, or t
  misc_feature (263)..(263): n is a, c, g, or t
  misc_feature (334)..(334): n is a, c, g, or t
  misc_feature (402)..(402): n is a, c, g, or t
  misc_feature (545)..(545): n is a, c, g, or t
  misc_feature (713)..(713): n is a, c, g, or t
  misc_feature (732)..(732): n is a, c, g, or t
  misc_feature (739)..(739): n is a, c, g, or t
  misc_feature (1212)..(1212): n is a, c, g, or t
  misc_feature (1325)..(1325): n is a, c, g, or t
  misc_feature (1330)..(1330): n is a, c, g, or t
  misc_feature (1344)..(1344): n is a, c, g, or t
  Peptide Sequence Number=SeqID_6966
  Probeset Number=SeqID_14843
ttatatatattttttatanngtaggggacggcgccagccgccacgataataatancnncntcnttgnnacacatctgtacaccaccttgctcaccagaagttgatttgataacccccccccccctnntttnannntttnaaaacctattacaaataacataccactcttctcggacaacgcgcgccggccctaggtaagcatactaagagataacctgcgcnagggccacattcatagggagaggcacaggtcagatgaatanatgctctcagtcttaattctcagattatacctaaacacttgatacgtaagattagtaagacctagcttatngacgtgaaagcagtgagcagcagcatctcacgtctcaggtaattgactcacatattctaattcactancccaccctcctgctatcgtgtcatgtaccgccacagcattctcatcgtcttcactatctgcgatattttgtagtggccgtgtgatcatgcctctcatcactcatctactgatagtcacaacagatctggcgacctaaccacanctgtgatatatcagtacgcaacactcatgagtataacatgatgggctacactgcactgcggcaagtgttataaagatagtctccctcctccatctaaacgtaccctggtctcacctgacctctctcggctcgaccccggcctggggtgtaatcgattcttgctcgcanaacagtaccgacctgcctncaccagnatatcccgtttgtgctgagttacaacaccgtagctgagtcgtatgccagtgattgcacccggcaatcgcgcgcgtgtgagctacagcgacctcgggtaggaacctcttatcggcgatatcttctcgaatacgctgcaccgtgtaggaggtgacacgatgagcgctcgcgcacagcgatatgagatccacaccgagctcgaagctgtatacacttcatcatgctcgctagcgggcagaccttctctcatctaagtcccatatatgtctgtgctcatagtctgtagatgagactcgtatacatcaacttctctgatgaatgcttctcacctctgcgtcccccgcctcgactataccaccactgaacgcactctgtaacccataccatggatctctcgccatcacagagctcttaatgctctcatcatcacgctcacctacgtacatttctcacttctcacactccctcacgagcngccctcacatcttattcaacatacctctacagtcgtaaacacactacctctcacaattgaggcgagcgtcctgcttatagagttacggtcgacagtatcctcggcgcgctctnctcanctatcttagactcngttcctggatagcaatatattcctatccg

SEQ ID NO: 5065 - DNA, 2314 bp, Glycine max
  misc_feature (12)..(12): n is a, c, g, or t
  misc_feature (15)..(15): n is a, c, g, or t
  misc_feature (17)..(17): n is a, c, g, or t
  misc_feature (20)..(20): n is a, c, g, or t
  misc_feature (23)..(23): n is a, c, g, or t
  misc_feature (29)..(30): n is a, c, g, or t
  misc_feature (35)..(35): n is a, c, g, or t
  misc_feature (40)..(40): n is a, c, g, or t
  misc_feature (46)..(50): n is a, c, g, or t
  misc_feature (61)..(61): n is a, c, g, or t
  misc_feature (64)..(64): n is a, c, g, or t
  misc_feature (143)..(144): n is a, c, g, or t
  misc_feature (271)..(271): n is a, c, g, or t
  misc_feature (314)..(315): n is a, c, g, or t
  misc_feature (359)..(359): n is a, c, g, or t
  misc_feature (457)..(457): n is a, c, g, or t
  misc_feature (481)..(481): n is a, c, g, or t
  misc_feature (489)..(489): n is a, c, g, or t
  misc_feature (494)..(494): n is a, c, g, or t
  misc_feature (503)..(503): n is a, c, g, or t
  misc_feature (509)..(509): n is a, c, g, or t
  misc_feature (514)..(514): n is a, c, g, or t
  misc_feature (562)..(562): n is a, c, g, or t
  misc_feature (706)..(706): n is a, c, g, or t
  misc_feature (802)..(802): n is a, c, g, or t
  misc_feature (828)..(828): n is a, c, g, or t
  misc_feature (912)..(912): n is a, c, g, or t
  misc_feature (989)..(989): n is a, c, g, or t
  misc_feature (1038)..(1038): n is a, c, g, or t
  misc_feature (1122)..(1122): n is a, c, g, or t
  misc_feature (1252)..(1252): n is a, c, g, or t
  misc_feature (1286)..(1286): n is a, c, g, or t
  misc_feature (1589)..(1589): n is a, c, g, or t
  misc_feature (1670)..(1670): n is a, c, g, or t
  misc_feature (1679)..(1679): n is a, c, g, or t
  misc_feature (1717)..(1717): n is a, c, g, or t
  misc_feature (1741)..(1741): n is a, c, g, or t
  misc_feature (1771)..(1771): n is a, c, g, or t
  misc_feature (1828)..(1828): n is a, c, g, or t
  misc_feature (1890)..(1890): n is a, c, g, or t
  misc_feature (1892)..(1892): n is a, c, g, or t
  misc_feature (1909)..(1909): n is a, c, g, or t
  misc_feature (1925)..(1925): n is a, c, g, or t
  misc_feature (1945)..(1945): n is a, c, g, or t
  misc_feature (1962)..(1962): n is a, c, g, or t
  misc_feature (1966)..(1966): n is a, c, g, or t
  misc_feature (1985)..(1985): n is a, c, g, or t
  misc_feature (2008)..(2008): n is a, c, g, or t
  misc_feature (2035)..(2035): n is a, c, g, or t
  misc_feature (2046)..(2046): n is a, c, g, or t
  misc_feature (2079)..(2079): n is a, c, g, or t
  misc_feature (2107)..(2107): n is a, c, g, or t
  misc_feature (2112)..(2112): n is a, c, g, or t
  misc_feature (2132)..(2133): n is a, c, g, or t
  misc_feature (2137)..(2137): n is a, c, g, or t
  misc_feature (2139)..(2139): n is a, c, g, or t
  misc_feature (2150)..(2150): n is a, c, g, or t
  misc_feature (2167)..(2167): n is a, c, g, or t
  misc_feature (2190)..(2190): n is a, c, g, or t
  misc_feature (2198)..(2198): n is a, c, g, or t
  misc_feature (2211)..(2211): n is a, c, g, or t
  misc_feature (2222)..(2222): n is a, c, g, or t
  misc_feature (2245)..(2245): n is a, c, g, or t
  misc_feature (2314)..(2314): n is a, c, g, or t
  Peptide Sequence Number=SeqID_6967
  Probeset Number=SeqID_14844
ttctcttctttnctntnttnttntccttnnttttntcttntttttnnnnntatctatcacnganataggcgctagagacccggaaacacaagccacacacatcatataatgttactcttactcttactagatacacacacacnncactacgagcctgacctcagcgtcctcgcagtcacgcatcagtttctgtctcttgatgtactgctgcttcgcttctcttctcatacctatctgtcactgctcgatgcctgcgtgtccgctctcgctncgtggccgctgcagcgcgtatgtatagaggatgtagtacaagnnatccgacgctcgctcgcgtcctcctcgtcgtctagtctgcagangtgtgacgcgtgtccgcgtgtgcgactctcttctgatagtcgacggagtgacccgatgataacatagtgtcatgaaaatgaaacgcggcgacgcgtgngggcctggtgtctgtactcggtgnacatgtgntatcntctccgtgnaggtgntatgngtctgtgtgcttggtcgttgagagagtatagtatatcttatgggagantatatgatgatatgagtgtgttaatattaccggctaatagcaagccgcggcacacgtgatcgctgctaacgccggtcggcgtcggcgatatactcactggaataaatctacggtgcagtgatgacggatgtagcggtcctggangagagagaagctgcgatgcaaagtgtgtagatacgatagcgaggacggcacatgtatcatcgacactgcgcttatcgtcttcgcactctatcaccngctgcagacatcagcgtctgccaccnctacaatacaacgactgtggactgcccgttacttcctacctgttacgctgtatgaaccgatgagaactgcttgctgcgtcacanctcacgtttatgttgtgctctatgcgttgcaaatgatcttctatcactgtatcatatcacatcgacgtgctcgatgngtatgtggttatcagcggtaacacaactgtctcgtatttgtaactatcncgtcactcacgcatactatatctgacactgtatcgcagtcactacgtcgtgaacatagtctactctattgtatatatatctctnctctcatcttctgcgagcgatgactcgcatatactcgctcacgctctcgatagaacgtcggagtctgtgcagactgtgactacgatatcatgtctgccatatacatcacttcgtaactcggattgtgtgnacatatatcactgtatgtcacttcactctactgngagcgcgtctgtgagcgctacgtagagtgagtggctagcgtgcgtgccgtcgatgtccgcatatatatagtactcgtgaagcgatatatcgttatatcgtgaactaatcatacgcgggcgtcgcgggctctcactgactgacatgcgtcacctatcatctctctacgatgctgcactcatgctattggactgcaactctacttcatgcgttctatgcgcactcgcctactctcgcacaggctcacactcgatcgccgatcattgctcactatcacatcaccacgtctcacaacactctacctnacactttctcactactctatgcgcactgagatcatatgtagagtgtagtatcgtcgacgtcagcagctgtatgcatcgacnctgcaactntcattgctcgctgcctgcgtcactcgtagtgctagtanctattgctagctctatacgtcagncatgcgtgctacacactcttagatcgtcgngacgcaccacgatctgctcgtgctacgaccatttcatcatacatgcgctcatccatngtatactccgatcgcgcagcacgaagacgatattacatctactgtctgaatcgtgactccgncncgattactttgtgtacngacatcgatgagtgcnacacattcgtgctcactgtnatgatactgttgctcangtanctccgtatatgctgtcacngcggttagtgtcacgcatgctgnatccacagtactaccagaccatgtganttatacgagancgattacgagatcaattatcatcatcttgcgtntgatgctgatatgttgcattattcatcnacttnttgtagctgataatgtggcnngcgncngcctgtgtcgntcagcgtcaggacgtgncgacgatacatgcgatgacgtantcacgttnggtgccacgcagntctcgacatgntgtacactcatccatcacttacngaaccgtattaccattgccgcgcgctaatgttggtccttcggtaataatggtcggcaccgcattcttgn

SEQ ID NO: 5066 - DNA, 2406 bp, Glycine max
  misc_feature (1)..(1): n is a, c, g, or t
  misc_feature (2406)..(2406): n is a, c, g, or t
  Probeset Number=SeqID_14845
nctcgagccgattcggctcgagatatatactatgatgagagtgcggtttcctttgttggtgttgctgggaactgttttcctggcatcagtttgtgtctcattaaaggtgagagaggatgagaataaccctttctactttagaagctctaacagcttccaaactctctttgagaaccaaaacggtcgcattcgtctcctccagagattcaacaaacgctccccacaacttgagaaccttcgagactaccggattgtccagtttcagtcaaaacccaacacaatccttctcccccaccatgctgacgccgatttcctcctctttgtccttagcgggagagccatacttaccttggtgaacaacgacgacagagactcctacaaccttcaccctggcgatgcccagagaatcccagctggaaccacttactatttggttaaccctcacgaccaccagaatctcaaaataatcaaacttgccatacccgtcaacaaacctggcagatatgatgatttcttcttatctagcactcaagcccaacagtcctacttgcaaggcttcagccataatattctagagacctccttccatagcgaattcgaggagataaacagggttttgttgggagaggaagaggagcagaggcagcaagagggagtgatcgtggaactctcaaaggaacaaattcggcaactgagcagacgtgccaaatctagttcaaggaaaaccatttcctccgaagatgaaccattcaacttgagaagccgcaaccccatctattccaacaactttggaaagttctttgagatcacccctgagaaaaacccacagcttcgggacttggatatcttcctcagttctgtggatatcaacgaaggagctcttcttctaccacacttcaattcaaaggccatagtgatactagtgattaatgaaggagatgcaaacattgaacttgttggcattaaagaacaacaacagaagcagaaacaggaagaggaacctttggaagtgcaaaggtacagagctgaattgtctgaagacgatgtatttgtaattccagcagcttatccatttgtcgtcaacgctacctcaaacctcaatttcctggcttttggtatcaatgctgagaaaaaccagaggaacttccttgcaggcgagaaagacaatgtggtaaggcagatagaaagacaagtgcaggagcttgcgttccctgggtctgcacaagatgttgagaggctattaatgaaggagagggaatcctactttgttgatgctcagcctcagcagaaggaggaggggagtaagggaagaaagggtccttttccttcaatcttaggtgctctctactgaataactacgtaaatgtatgctgtaagagctcatcgtgagcgtggaatgtatctgcccatgtaactataaaaacttgagctccacctatcttctatctactacgaataaataaatccagcatatgatgcttgtgttttggtcaattcccattcccacgcccacctcatcagaaggaagagcgaaagcaagaggaagatgaggatgaggagcagcagcgagagagcgaagaaagtgaagattctgagttacgaagacataagaataagaacccttttctcttcggctctaacaggttcgaaactctcttcaaaaaccaatatggtcgcattcgcgtcctccagaggttcaaccaacgctccccacaacttcagaatctccgagactaccgcattttggagttcaactccaaacccaacaccctccttctccccaaccatgctgacgctgattacctcatcgttatccttaacgggactgccattctttccttggtgaacaacgacgacagagactcctacagacttcaatctggtgatgccctgagagtcccctcaggaaccacatactatgtggtcaaccctgacaacaacgaaaatctcagattaataacactcgccatacccgttaacaagcctggtagatttgagagtttcttcctatctagcactgaagctcaacaatcctacttgcaaggattcagcacgaacattttagaggcctcctacgataccagatgcgaggagataaacaaggttctgtgtacttgagaggaagggcagcagcgaggtgagcagaggctgccatagagcgtgattgtgcaaatctcgaaggaacagattcgggcactgagcaaacgtgcctaatctagttcgaggagaaccatgggttcttgagatgagccgtttaacttgagacgccgggacctcatctactccaacaagcttggcaagtgttgttggatcaccccagagaaataccggcagcatagagactatgatatctacctcagtattgtggatatgtacgagggagctactactctaccacacttcaan

SEQ ID NO: 5067 - DNA, 1600 bp, Glycine max
  misc_feature (3)..(3): n is a, c, g, or t
  misc_feature (22)..(22): n is a, c, g, or t
  misc_feature (60)..(60): n is a, c, g, or t
  misc_feature (70)..(70): n is a, c, g, or t
  misc_feature (134)..(134): n is a, c, g, or t
  misc_feature (168)..(168): n is a, c, g, or t
  misc_feature (170)..(170): n is a, c, g, or t
  misc_feature (199)..(199): n is a, c, g, or t
  misc_feature (269)..(269): n is a, c, g, or t
  misc_feature (307)..(307): n is a, c, g, or t
  misc_feature (334)..(334): n is a, c, g, or t
  misc_feature (414)..(414): n is a, c, g, or t
  misc_feature (451)..(451): n is a, c, g, or t
  misc_feature (454)..(454): n is a, c, g, or t
  misc_feature (467)..(467): n is a, c, g, or t
  misc_feature (470)..(471): n is a, c, g, or t
  misc_feature (556)..(556): n is a, c, g, or t
  misc_feature (600)..(600): n is a, c, g, or t
  misc_feature (627)..(627): n is a, c, g, or t
  misc_feature (678)..(678): n is a, c, g, or t
  misc_feature (767)..(767): n is a, c, g, or t
  misc_feature (769)..(769): n is a, c, g, or t
  misc_feature (928)..(928): n is a, c, g, or t
  misc_feature (934)..(934): n is a, c, g, or t
  misc_feature (969)..(969): n is a, c, g, or t
  misc_feature (972)..(972): n is a, c, g, or t
  misc_feature (974)..(974): n is a, c, g, or t
  misc_feature (1048)..(1048): n is a, c, g, or t
  misc_feature (1145)..(1145): n is a, c, g, or t
  misc_feature (1176)..(1176): n is a, c, g, or t
  misc_feature (1240)..(1240): n is a, c, g, or t
  misc_feature (1338)..(1338): n is a, c, g, or t
  Peptide Sequence Number=SeqID_6968
  Probeset Number=SeqID_14846
cangaggtggcgcacgaggagnacaagtgaacgcgcgacggtccactagctaacatctcntattatcagncgtcagaaagaccaccgacgcgcgcagagcgtaccgctacgatagtgtatattatttctcgtgnagcggcgcgtggcaggagtagcgcagcacgtacncnagagaatcggtaatagtagtatctatcgntggcgcgcacgccgtgcggcgctagacaataactatcataccacggccgccgctcgcgacatgcagtgcngcgcgcaccacgtatcataactacgtgcgtatctgaanatccgctagacataagacacactggancagtcgtgcgacgcgcgcgtatagatactaatcgagttgcatcacacacggacatacagccagtatcagagcgacggcantcgccggctgaggtcgtgtacgaggaacgagacatanatnacacgcagagacncanntaacgcagccagcgcgcgcgacgcgcactctatatatatcacagcgtgactcaactatgcctagatggcagcgagcgtactcacnggcagaacatacgggcggcgtgtcaggcagagtgcggtgcgagnatagcgacagacgttaaagatcaccgnagatagatatagtagcacagtattaccattatacgcgccgcggcgctacgngcggatcgcatgacggtataccggcgagtcagcactccataaactaacaactacccgcagctatcgccggacacataaatctgacgagnanggcgcagtgcgcgcgcccgcgcgtatcacacaagcgtggacgcgacgtcccgaacgagacaaacggcaccgcgcggaatcaccgcgacgcaggcacgcgacatacatagcgataacgcataacccggcgccgatacaacatacacgcaatacaggtgtncggacncaggagatgaggcgacgagcgcacacaacatcagngtnantcacaccgctccgccgctctggcgccaaccacggggacccggaacaccgcgacccaacgccaccaccatatccngatatacgtcggaaagggcgcagcgtacgtatgcggcagagtaacgcatccacggccgttatattatgagtgggatcgcagatcatgtagtgcgctntacacgtcgcgtgttggcgcgcatacgacgncacaacacaaacgccacatacgacgcggggccgacaagccgaactacagacgcggtgtagttcnccgaagcctgtacgagacacacacactgctacaacgcgccgccgcaccacccgcgcccgcacacgcgaacagcgaacgaccctctctatcactctatncaccaattatgacgtaaaggtaaacgacataatggagcagcgaggcgccgatcgtgtgcgcgtcaggcataaaagccacaatcagcgcctccatgcgcgcactcgtaagagagagagagatgcgcatcgagagtcgcaaatacagataaatatacccaacgcgcctccccgcgccgccgagcgcgcactggcttgcgagggcgacgcacacacacgtatccagtcaagttgctgcgagaacctcgtggttgagcggcgccac

SEQ ID NO: 5068 - DNA, 1416 bp, Glycine max
  misc_feature (10)..(10): n is a, c, g, or t
  misc_feature (14)..(14): n is a, c, g, or t
  misc_feature (20)..(20): n is a, c, g, or t
  misc_feature (46)..(46): n is a, c, g, or t
  misc_feature (1201)..(1201): n is a, c, g, or t
  misc_feature (1314)..(1314): n is a, c, g, or t
  misc_feature (1398)..(1398): n is a, c, g, or t
  misc_feature (1416)..(1416): n is a, c, g, or t
  Probeset Number=SeqID_14847
atatcttctncttnttagtnggggatggagacaaaccatctatagngtgatgagacgaaatgaggtaccggggaccccgccctcgcaggctcgacggctatcgaataaagcttctttcttttttctttcttttacccaacatacggcccagtcaagacgttcctgcctccctatcatctcatggcatgacgcttcatatatttttcggaagggatgttacccgtggtgaggagctggagacaacctctgcatatggatattctcacccacacaggtttcattagatctggggccgagtggagatttcggaaccccttagaagtacgttcttactggtgcggaaatgctcctctctaaatctctattgtgccagcaaagttccatgggaagcggcgtgagccccgacactacattctttaacgtataaggaagtgatccgacttatgaacgcgtcaacaacatttctatgaagccctgatgtcactacttgtggctacaacaggctaggatgtgctgtgtgggattttccttctctgtctcccagatttctcaggaccatacatgccccgatgctggctctaggcgtagctaagctatccaacaggtagatggcgcgaatccacggagctactgtcggagatcaccctttacaggagagacatttggctaccctctctaaagatagcaatgaacgccctcgttaacaagaatcgccgaggcggccacaaatcctgggttccagatgcaccatggttggcaccgttgttgcctttttactgcactgtagattcttcttacatagaggcgccatccccatgggaggcttataaaaaaacgcaagtgggtcgatctactcgctacataacctaggaaatcttttctttaacacagggagaagagcgtgtaaaccttaacggcggcgggatgaactaatgtcaactagaccgtcgccttggcaagagcgggctcgcgtccctacaagacctacatgtgcacctagggaaaacaccgcaaactatagcaggggtgcgcacctatttgtctccgttctgacagtaaagtaataatagagcgggccgactacaaatagagacacgtggcagcagaagtgacatgaatgctcttacgaacgcagccctgcacaagtgcttcatccgaacgagaacacatcagcgccgctctacctacgtcgccacagagntgggctcgcgcaagacgcacaggataccgatacacagattgcctctctcaggagagcccacgtatgctgggagtataggtcttacccataccctgtgagacgctggtcgaatntattgtatcatagagtgtctattgatcgaatagtgtgtctactccgcacacacggcatctgactttatggagcactccatcaantccctcctcctagatgcn

SEQ ID NO: 5069 - DNA, 1606 bp, Glycine max
  misc_feature (13)..(13): n is a, c, g, or t
  misc_feature (17)..(19): n is a, c, g, or t
  misc_feature (23)..(23): n is a, c, g, or t
  misc_feature (30)..(31): n is a, c, g, or t
  misc_feature (57)..(57): n is a, c, g, or t
  misc_feature (113)..(113): n is a, c, g, or t
  misc_feature (115)..(118): n is a, c, g, or t
  misc_feature (123)..(124): n is a, c, g, or t
  misc_feature (164)..(164): n is a, c, g, or t
  misc_feature (825)..(825): n is a, c, g, or t
  misc_feature (885)..(885): n is a, c, g, or t
  misc_feature (933)..(933): n is a, c, g, or t
  misc_feature (1095)..(1095): n is a, c, g, or t
  misc_feature (1376)..(1376): n is a, c, g, or t
  misc_feature (1381)..(1381): n is a, c, g, or t
  misc_feature (1490)..(1490): n is a, c, g, or t
  misc_feature (1508)..(1508): n is a, c, g, or t
  misc_feature (1532)..(1532): n is a, c, g, or t
  Peptide Sequence Number=SeqID_6969
  Probeset Number=SeqID_14848
gggggggggggcngtcnnntttncttttcnnctcccataaaaggaagtaaatagacnacgataatgtatggcggcgggaggaataaggatgaggagcgactgatgtatcgctntnnnntttcnnttgttgctaaccaactctacgtggccctcttaaactaccntttgagtaagtgtcagctagagagagaggaacacatgaggagagtgatgagaggatagagggaacgaaggtgtagagagtgcttgtactagagtcggtaggtgtgttgggtgtacgagcacccgtgctcagtcgagacttgatactgatgggagcgatatgattttgtcggtcacggggaaggtagatacatgatcgtaataacgataaaattgtgaacatatataaaaaataaagaggaggaaattgagtagacaaagcgcgaacaacgtgttaatcttactcatccggcgcggggtgtggaggggtgtatttctctccggctttgttccctctgtggctgtggaccgctggcaggaccgcacctgcggttgtgggggtgggtgctgtatatggcgctggtgtgtcgtgctagtgaaaggagagaattatagctgcgacctcgcctgtttctcgcccaacgcttgttgggtgattaggagtcccatctgttatatgtcatactattatcgcatatagtcttagcttccacgcactcttatagaatcgagaaaacactgtgacgcggacgatcccgcacactcgcatagatttagaggaagtcaaagcacagaatgtaggatagacacaattgattaacgagatgttgcgcatggtgtggngtgaaatagaatgcttgtgtggtggtggattaggtattgtggatgtatacatatcactancgagtcgatggtatcatagcagaggtgagtggagattacttgtcaatntctctctatgacagtgtggatgggtacacacacgtgttgtgtgtagtggtgaggtgaggtatgtgagtgtgtagccaatgtcactcataagagcgtattgatagaggaattggtgtaatactagacaatgtcgagtacgggtcagtgcgtctggtgtgtgangtagatcggagccaccatcgtgcgcttcgtgttgtgttgcgtggtgggtggtagaagcggcgcccacgcaggacgcaaacattaatgttgatgttagtcagtgcggcgctgtggggagtcttagacgacctgtgacatgtagagcgatgtagatgttatgcggctgtatagacaggctatgattgtaggggcgctcacgtcgtatgaggatagtttgtggtgcgagtgatcatcagtcgtattacatattgcggtgaatgtgtaggttatatagatgatanacatntatgattgataagcgttgttagtatttgttaatatgagcgagtggttcgtgagtgcgatgagtgatgtgtggcttgatctcttatggaacgttcgtaagagggtagganaaattatactgagcagtnggtctctggagggtctgtcggttnactatgtgagctatactgacacgtagatgcgtgactcagatgagtgtgctcgtgcatgtataacctgtgagctg

SEQ ID NO: 5070 - DNA, 1448 bp, Glycine max
  misc_feature (1)..(1): n is a, c, g, or t
  misc_feature (48)..(48): n is a, c, g, or t
  misc_feature (194)..(194): n is a, c, g, or t
  misc_feature (238)..(238): n is a, c, g, or t
  misc_feature (481)..(481): n is a, c, g, or t
  misc_feature (1120)..(1120): n is a, c, g, or t
  misc_feature (1189)..(1189): n is a, c, g, or t
  misc_feature (1220)..(1220): n is a, c, g, or t
  misc_feature (1379)..(1379): n is a, c, g, or t
  misc_feature (1415)..(1415): n is a, c, g, or t
  misc_feature (1418)..(1418): n is a, c, g, or t
  misc_feature (1423)..(1424): n is a, c, g, or t
  misc_feature (1428)..(1428): n is a, c, g, or t
  misc_feature (1430)..(1431): n is a, c, g, or t
  misc_feature (1440)..(1440): n is a, c, g, or t
  Probeset Number=SeqID_14849
ntggtgtgttatatgttgatcatatctacgtagtgagcatagagaggnagaggactagaatcgtattctgagaggagagagcgtacatgagcgagatggtattggttgagatagcgtacaaagcttcatactactatctatcatggtcatactagtatatacgtgcgtatattatatagcatgcctgctctatntatgtattaaccacatatgcacgtagacgtagacgattgttctnctccttattgtctttgttgatgatgtgatgaagatctggtaatagaacaagtgtgcagagagagattgtattgatctaagagcaaaaatgagaggagatacatagtagaagtagaagcatatggtacgcaagaggatgtgaggaaggagggttggtagaatatgcgagaagtgccacattaccctacaatagagacgcacaagcggaaaacacaaaatatactaagatagtgtcgacatcacncctacagaggagaagtgcggtggtgtttattatatatgcaaaacaacacaagatgacaacagacacatgcgcctcatatctcgactggtcaattcgtagtgtgtgttgtattacagtattatagaaatttgttgactcactataccgaacttgtttgtgagagagtgacatccaatacttatagcgggtttgatgaaaatcatacttccgcgtgcttatgtataagtcctcgttcgttatacatatgcactaatgtgatcggagttatatgaaaagtagacggcctaacagtaaagaaacagagatgagctatggggacaacaacaccacattatacctcaatctcctatgagttaataaggatagacaatacaaaactgaaaattaaatgagctttgacactatgaagtatagacttagtctagagagaaacaacacgacatgttactagatgacaatatccgagagaataccacaccacgcaccacaggaacaaggtgcaagaaagtagaatgatgaagtatatagtgagagacgtcgacagagagagcacccgtcaggaggtgtagcgccgtcgggcccgaggtgagaaagcggcgaagtcatattcctcacgcgttaatatagttcgactgatanttgtttgagtctattactcaccagggatgtgcttatataggcggagtgaggagaaggaggatgtgtgtnccccctgctcggataactcttgaacttatangaaggagaggggggcccctcggtttacgcacaatatgtcgggcgcactagaagaggggaggagtgtgtggtagttctctacttatattgtaagagcgagtgtcgtgcgataaataaacacaaacagtagaacacagaagaataaaagtagtatattgcngcgaggaggccgttctgtcgtgtgttgaggtacgtnacntcgtnnggtntnnaaatgaaantaacattt

SEQ ID NO: 5071 - DNA, 1428 bp, Glycine max
  misc_feature (1)..(1): n is a, c, g, or t
  misc_feature (96)..(96): n is a, c, g, or t
  misc_feature (161)..(161): n is a, c, g, or t
  misc_feature (368)..(368): n is a, c, g, or t
  misc_feature (1361)..(1361): n is a, c, g, or t
  Peptide Sequence Number=SeqID_6970
  Probeset Number=SeqID_14850
ngtgtcgcggtatgtcgcggtagaaaggtcgacgacagtcgtataaagcagcgtccactcagcacgtgagcggtggagcgcgtctcaagtatacgngtaatgtaatcacaactatcggattatagtagcgttggcgtgattgaagatgagtatgatatacnactaagtaaatattcgttatgagaaagtcggcgagcgccgacaccaacagtcacatagagcgcggacgcgcggacgggcacacaataaagacgaatgatgtggttgtgaacgcagcgcgaaatagatagagcgcgcgggggcgtaaatggcagagagttgatgtggacaaatgatatagtgttgtatctttgttattagcagacgancggcagtgtagggagttatcatacaggaacgagaggcgtctaaacagacaataacgataaatatatggggagagaagtgaaaacgaatacctattcggtaataaggagtgttgatcactcaagcaaaccggcgcaggttgtgtgggagtgataacgtgctcgaatatgcccccgcgaataacgatcgtcagagatacatgtgtatatattgctattgtagggatagcgcatataggggggcggcggcgtcataatcattacgaatcaaataattattgtgacgtagtaaaatgcgggacggcggaaacagcaggaaaagcgtgaggacatcgcgcgaaaaggagggaagacgcgggaggcatataaaaccgcggcaggaccatcccgttgagacgtcggggagactacaatatgagacactcgcgggcgggactgatttgaataatatataatacaagaagaggggaagggaatatatatcgcgaccatgggacgcgtgtattgtctgcggataagagtacacggcgataatcaggatgaatgaggagagcaaagaaaatattgtacggtctgctctcttcttacgtctttgacacctcgggagcgggaaaataaaaaagagggcgcggcgagggaggccaaaatacttcaataatttaagaatgcgggaatcgatggtccttgcgtgcggaggcgggctacgcttagtaaatagactaaacataaaacgctcgtccgtcctaggaacctgctagtgggaataattttcccattgttacctcactttttaatttataagcgcgcggtccggggcgggtatttacacaccaccctacatacggagaggaagtaccaaacaaaatatttgtgaaagaggacgataccccccgccccccagagtgcgcttgcaccctctgattatgacgcattacaaaacgcgaggaagaagagagggcccgggaaacgcggtgggtccaacacgagagggagaanatattgttttgtgtcgacacaacaccataatggaagaaaagtaagctctgtatgaggggggacacat

SEQ ID NO: 5072 - DNA, 1382 bp, Glycine max
  Probeset Number=SeqID_14851
acttaattgattcttcaccccaaaaactagataatatatccatctaaataaattccaaccaaccgttacatcttgaatataaagmgttattgttcaaataagagtctgatccaatcattgtcatattttgaaatatcactttatcgmggtattatatatatgttgaattcatgtaaagttgatgtatccaacgtgattcactagctttctttaagtatttccttctgcagaccttataatgaayaggatagcgtaaacccttttccatattcttgtttttatattggmgttgcayagatttcttccatcayattttggggtggaagaggatagagtaaacccttttcctccgttccaagctgttcttgataagaaaagaaaaattamaagggaaattgaagcabctaayatcccatgtacctttgtctctgcaaattgttttggtgcatactttgtcaattatttgcttcgtccttgcgagacaaagaacgatattttaattttttttgagttataaattttttaagtattgtattcttgagtcttgagattatttaaaacaaagaatgaaaagttaaaatagatgttaaaaaaaatccaaaattttcttcattgaaagaaactacttttttttaaaaaaattagtcatcttttcattttaagaaaaataaaattcaaaacaaattgagtcaaatactaccttaaagtactaaattttatttttcttaattaattatctgataaaaggttatttcattttttaattaataatactaaacttttcaatcaataatagctttataaaatgtttataaatcaacaataaaataaaatttgattaattaaattgatttttaattttttctgtgataaaaaattcaatatgcttttgtttttaaatttaatgtatattttgtattgtctatatgataatttttattaattaaaatattttcttaaatattttttacacgtgaggtcatgttttaataatctcatgtaaaatttgtgtttattagccgtgctaaattatgaagaagatgtggccatgtacactattaaagtagtaaatttatccaataacatacaatcgagttgttatttaccgaccctcgaagaatatcgtatcacaaaatgagttgatagcactgtggaagccaaaaagtggccagaatttttggaaggatttttttttttggtgaggaagagattgtcaatctattgattaatarstgtgtaaatactaaagatatataaactttgcattttcgatgagttgactgtgatacactaataaaaaacaattttatcttatcatctaattacacattatcgttaatatgatttmyaagataattttataagaatcacaactttttata

SEQ ID NO: 5073 - DNA, 493 bp, Glycine max
  misc_feature (140)..(141): n is a, c, g, or t
  Peptide Sequence Number=SeqID_6971
  Probeset Number=SeqID_14852
catgatatcgatggatcgctcaacaaaatggagacactcaaaagagctatgtgctgtgctggatgtgaggaggaagttttgccactgaagcgctccaaggctgagggagcatccatgacggctagccatcttgaggtggnnttcccccgagtccaaagaactggagatgagatcatctgacagatttaaacgttccagatgacagtcctatgttgcgatcacatggaatcattgcctgaaagtgcctgagaacgtaaggcacagggaaaactgatcggaaaggggatgtagcttgaaaccgaacttcgttgaaacccgagtttggtggcaaccggggtaggtggaaacgcgggcccccttggtcctttgaaaccacaaaacccagttgggcacggggaaggggtttttttaaaaaaggggggggggatacaaaatggtggggtttaaaaaagggcccccaaagagaggccccccccttttttttcaaaaaggc

SEQ ID NO: 5074 - DNA, 1745 bp, Glycine max
  misc_feature (1)..(2): n is a, c, g, or t
  Probeset Number=SeqID_14853
nnggagtgggagggagagatccccgggaggagagcgaggattgttgtccgtggaagggacatgataatatggtagatctacctataatggaaaaaaaaatagaggcatcgattgccccaagagctattcttagagcccctttgaaaacatagagagtggacgtttcctcttagaggccctgccttccacagacaaggagaaggggggtaagggcgacgggggggtaggcgtgcgggtgtgcgggctacgggagggccgcgatcgcgcaggggggggccacccacgctttcgaggagatcccaccgtccccatggccttctcgcgccttctcccctcccgccgcctcctctccgccctcctccacaccccgaccccgatccccgccgcgcgcgccaccggccccgccgccgcgaccacctccccgttcgcccacaccctccagcccgcgcgcttcttctccgcgacgaggcgggccgggccgggcgccccgcggcagcgcgcggcggacatcggcgcgcgggcgcggcagctgcagagccggcgcctctggacctacgcgctcaccttcggctgcgcggccgggttcgtggtcaccgtgctcgccacgttccaggaccagctcgtcttctacctcacccccaccgacgcgctcgcgcgcttcgccaccgacccctccaagacccgctgccgcctcggcgggctcgtcctcgagggctccgtcgcccacccctcctcctccaactccgagatcgagttcgtcgtcaccgacctcgtcaccgacgtgctcgtccgctacgagggcgccctgcccgacctcttccgcgagggccactccgtcgtcgtcgaggggttcctcaagccgctgaccgacgacctccgccgcgactgggcggggagaaaggtctccgataaggcgctggagggccagtgcttcttgcgcggcacggaggtgctcgccaagcacgacgagaagtacatgcccaaggaggtcggcgaggccatcgagcgcaacaagaagcagatcgaggcggatgcggccgccgccgccgccgaggagaacgcggcggttgcggtggatggagccaaagcaaactcgtaagatttgctttttttgctttacgatttagatctcgggtgcgtgggattgaggcatagatagatttgattgtccgaatgcgatgagttggggaatctctgcagcatgattcaattgaagctgttgtaattggagtggtaattttgagccctgaaaaaggggattttgaccggggaaataatgaaaactgattgtgtgataatccattcaacacgattatacatattcattgggtagcaattgctatgctctaaaaaaaaaaaaaaaattttttttacccccccccccccgggggggggggggcacaacccttttctccttaataagagggatacaaccccccccccgcgggggcctttttcattacttcccatgcgacctccttactcatccccccacatacccttgtaccccccccatcttcctctctgtccataaacccgcccccccagttcccttcacctcccccaccctttccagctttaccgctatcacgaacttatcgctctttggcctccccgccggtgcgacctcccctactctcccttctcctctctcgtcccctcgacccctcccccacctcccctcacttcttccgactgccacccgtgcctcaactctctgtctgagcgttcttcgccattctcca

SEQ ID NO: 5075 - DNA, 536 bp, Glycine max
  misc_feature (476)..(476): n is a, c, g, or t
  Peptide Sequence Number=SeqID_6972
  Probeset Number=SeqID_14854
gggatttttagagttggtaagcacccttacgtgtccctttcgtattggatttctcatttatgtctctctctctccttcgtgcgcgttttgatccgaaatcagtttttctcttcctcctcctgtcccgatcactccatcttctctccagattctgatctcgatctccttcttgataagtattcattctcttttggatttccagtttttgtaatccatagatctgtcgatctagttagggtttgattgatgttcgtttgattcgagagcgttcgattttgtcgtatgatgcctccgaggttgttccacgagggtcgactcagtcttgtcctagctcacccgagtttgattctagtgtggatgatttagcttctccgaagaagtatattgtgtggagcacacagatgaacacacacgtcttgcctgactttcttgtctgcatcaaaactccatttaacatcaaccgaagtccaaggagnttgagatcgccatggatgccatttctgtagtttaactttgttttgtttgtgaatttatca

SEQ ID NO: 5076 - DNA, 1531 bp, Glycine max
  misc_feature (119)..(119): n is a, c, g, or t
  misc_feature (302)..(302): n is a, c, g, or t
  misc_feature (477)..(477): n is a, c, g, or t
  misc_feature (537)..(537): n is a, c, g, or t
  misc_feature (554)..(554): n is a, c, g, or t
  misc_feature (608)..(608): n is a, c, g, or t
  misc_feature (687)..(687): n is a, c, g, or t
  misc_feature (939)..(939): n is a, c, g, or t
  misc_feature (1002)..(1002): n is a, c, g, or t
  misc_feature (1020)..(1020): n is a, c, g, or t
  misc_feature (1214)..(1214): n is a, c, g, or t
  misc_feature (1222)..(1222): n is a, c, g, or t
  misc_feature (1247)..(1249): n is a, c, g, or t
  misc_feature (1252)..(1252): n is a, c, g, or t
  misc_feature (1270)..(1270): n is a, c, g, or t
  misc_feature (1277)..(1277): n is a, c, g, or t
  misc_feature (1279)..(1280): n is a, c, g, or t
  misc_feature (1315)..(1315): n is a, c, g, or t
  misc_feature (1323)..(1324): n is a, c, g, or t
  misc_feature (1357)..(1357): n is a, c, g, or t
  misc_feature (1421)..(1421): n is a, c, g, or t
  misc_feature (1499)..(1499): n is a, c, g, or t
  misc_feature (1501)..(1517): n is a, c, g, or t
  Peptide Sequence Number=SeqID_6973
  Probeset Number=SeqID_14855
cgtgtcggggtatatagatcttcgttgtctttgtggttctcgtctcctctccattcttcttctccgtctttgtaaccatgcgccttttgctatcattacccctacctatatcgattaancatgatcataggcaacgaagacgtaagatttattacgatagacgtggcatcgggcgacgtcgagatgtgatgatcgtacgagccttcagccggtgtcgttgctgctatccgtacgccacgcggacagcaagagagatagcgtatcgcgaaggagacggggcgcggatagcgtctgcggcgatnggagtgcatggtcgctcttagctgtgtgcatcgccgtgtgcattatcacagagactcgcgaatgcgctgacgcatacgtctgccgttccctctcgcgtgtggagcgagccgagatggcaccacatgacgacaccacacacacatatacactatcgtctgacacgtcggcttctgntcctgtcatcactccttctctctctttaccgttcgaatactgtctacctgtgtcaagatncgtacatgcatcgagcnacgccctctagtaattacatgagcgccgcgacgggacgcgcgcagccaggaggncgtagatctaatcaatctggtcgtccgtgtcgtcgtcatgatgttcctctcatggcgcactacccaccatttatcatcntgtcatctgcatggagacagaacatgccggacggtgagtaagagtacgatattgaacgtatattattgtttgtagcatacggtttcaagttgacaactatatgtagtcagggtggacattatttataatatcgcgtggctaatgatatatagtgggtgtggtagagcggcaggagatgtgatgtcaaagtaggagagagtacaataaaacacgatgatcggagagagatagttcgacgcacgtgctgggtgncgctgtgcgactctcagtcgcagcatcacagtcctagtatcaagcgcggagcgcccgcactancgacaaatgtgctgaacnggacccaatatctatgtatctaagaaagcagaagggctccgatccagagaaggtaaacgcacgataatattcgcgtagcgttgcacctacgcacgatacccgccggtgtgcttttcgctcgcgcgcccctccccactcgcttgggccgcaacgcggtcctccactaggtttgagtcgtacactgtacaagtccnctaactgncccacaacaaacgcaccaccatcannnagnccctggccgcgtaatatnaccatcncnngtgctaggcgcgccgccggctcatcgcctcttcgngcgggagnngggaagagcgggggtgcggagtagaagaggaangtgtcgtctgggtgggtgtattgtaattgttgtggaaaggggtcgctggggcgtccttttgttngtgtgacgcgggagcttttagatgaacatacacgaggcggaatttaggtagtagaagggaagcggcctggaacggtanannnnnnnnnnnnnnnnngcccccccccaccc

SEQ ID NO: 5077 - DNA, 1815 bp, Glycine max
  misc_feature (7)..(7): n is a, c, g, or t
  misc_feature (14)..(14): n is a, c, g, or t
  misc_feature (31)..(31): n is a, c, g, or t
  misc_feature (67)..(67): n is a, c, g, or t
  misc_feature (100)..(101): n is a, c, g, or t
  misc_feature (113)..(113): n is a, c, g, or t
  misc_feature (167)..(168): n is a, c, g, or t
  misc_feature (201)..(201): n is a, c, g, or t
  misc_feature (229)..(229): n is a, c, g, or t
  misc_feature (274)..(274): n is a, c, g, or t
  misc_feature (278)..(278): n is a, c, g, or t
  misc_feature (358)..(358): n is a, c, g, or t
  misc_feature (385)..(385): n is a, c, g, or t
  misc_feature (390)..(390): n is a, c, g, or t
  misc_feature (400)..(400): n is a, c, g, or t
  misc_feature (405)..(405): n is a, c, g, or t
  misc_feature (416)..(416): n is a, c, g, or t
  misc_feature (453)..(453): n is a, c, g, or t
  misc_feature (455)..(455): n is a, c, g, or t
  misc_feature (470)..(470): n is a, c, g, or t
  misc_feature (540)..(540): n is a, c, g, or t
  misc_feature (611)..(611): n is a, c, g, or t
  misc_feature (661)..(661): n is a, c, g, or t
  misc_feature (1119)..(1119): n is a, c, g, or t
  misc_feature (1237)..(1237): n is a, c, g, or t
  misc_feature (1519)..(1519): n is a, c, g, or t
  Peptide Sequence Number=SeqID_6974
  Probeset Number=SeqID_14856
ctctgcngatcganctgatatagtttagtgnattatgcaatgatgtgtcgtcaagtagtcgtaaagntagtagtagatgttcagtcgtaagttatacatnntatgacatagtncactcgcgtcgcgcgtagtctgttgactgcagcacgttataagtctcgtgacanngctcgatcttcatatcgtactctccagtcgagntactcatgacgcgtcgtgtcgattagtnacgacgagtacggatagtcgacatcacgagcgtatatatatagtnagtnctgtacgctgtgtgatacgacgaggtgagatggagctatgagcgtcacgtatgtgtgtcgcctgatgcgtgacgtagagngaatgaagtgcgtactgctctctctanttcgncacatcatgnctctntatctagtcantatgcagtagatggtcagtcgtcgtgtgggtggatantngtgattcgctgtgantagacgacagcatgatcatgtgtaggtatgggcgagctcatatgcgcgtcgtgtgtaacgtcgtctactntatagaggacgctatgcttacgcgagtgagtagtgagtgtgaaggtaagtatcgacagactatgcgtacantgtgtgttgagtatcattgttgtgattcggtagattcaagatagagttcnacgcattgcgtagacactcgacatcgcaaggcagttatgcgcatcatagtcagataagacgagacgagtggtgatagagcgctaaaatattatacgagctaatagtacgcctgtcgtagagtaagtatacgattctgagatatcctatagcgctgtatcgtgatggtagtgcggggagatcgacgtgaccatcgttttatgacattgtcgcgctgtcggcacgtacatagtgacaggatatgcagatagacgttcgcgatcgcagacgtgttcgaacgcgtactaattgaagatgattgtgtagacacgcgcgcctcgcgtgcgtgctcgatctctacttcctctctatctagctctcgatgctccacatacgagaggctactcgtggtacgcgcatgtgtgatggccgcgggtgattgcatgagataagttacaagatatagtgagagtagcgtatnagagagactcgacgtgctattagctcgtggtcgttcttagagtggttagttgttaggatatatcgtatctcatacgtatatcgctcgtgttgctagtgtctgtgatatactagtactnatgaatgtcctctagactatatctgactatctagcgtcttaattatatgagagtagtacatactctatgtaccacttatatccacgcttcgtgcgctacggcgcgcaggccttatagtggacgactagatggcgtcgcaccatctcgccccatacgtagacagacgactcaatccgtcgtgatgcgccgccctgagcctatcagccagtacgtagtgctacacggacgcatgtatacatgtggataagtagttagtagtccatacgttgtcgtgctgtgtgntaggctgtgttccgatctaagagataaatatatatagaccgcgactacggtgagatatagttagctagaacgtgtatatagtatcacacacactccattatacatgcagtacgggatagaagagagatacatcacgagcacgcaccaacgtactcaccagcagtacgaggaagtagcgcagaatatagtgaatattaatattagattagaacagaccagatgagaaatgtagagtagtagtatgcacacgagataggagcgtcgtcagagaagacagtcaatagacagaccagact

SEQ ID NO: 5078 - DNA, 346 bp, Glycine max
  misc_feature (196)..(196): n is a, c, g, or t
  misc_feature (319)..(319): n is a, c, g, or t
  Probeset Number=SeqID_14857
atcaatcctatcttcttctccccttgctccaccgctcagaacacactgctctgtctccgccacgcaatacagagaggagtggccttcgccggcgacgaggctcctccctgaccagatcccgccacagtcgcggcggcaggggtcgagggatccgcggagggggccagggatttggcgttcgctacagccgagcacnaggtactgccgtgctacgactcagctcctcgccgaccggagcgaggtgccgtcgcggtccgaggccgagcgccgccgcgagcaccaggccgccgcgctcggggcgacgctgcccgcaccatcnctgtgatgcgccacctcccacccggcg

SEQ ID NO: 5079 - DNA, 517 bp, Glycine max
  Peptide Sequence Number=SeqID_6975
  Probeset Number=SeqID_14858
gttatcttctccttcttcctcctccagcgacaatggcgttatcggtttcaaacctcgcctcctcactctcctcgctctccttctcctcccaggtctctcacggaccaaccaccctctccctccccaggtcgaactatttgttctcacttccggcgaaatcacctcgtcgcgcctctctctcaatcaccgccacggtagctgctcccgcggaggtatcggaggaggatgacacgatggagctgaagaagtacgtaaaatctcggcttccgggaggcttcgcagctcagaaaatcataggcacgggacggcgcaagtgcgccatcgctcgtgtcgttctccaagaaggcaccggcaaagttattataaactatcgcgacgccaaggagtaccttcagaggaacccgttgtggcttcagtacgttaaagtgccgttagtgacattgggttatgagaacagctacgacgtgtttgtgaaagcccatggaggtggtttatctggtcaagctcaagcgattac

SEQ ID NO: 5080 - DNA, 1360 bp, Glycine max
  misc_feature (1)..(1): n is a, c, g, or t
  misc_feature (50)..(50): n is a, c, g, or t
  misc_feature (179)..(179): n is a, c, g, or t
  Peptide Sequence Number=SeqID_6976
  Probeset Number=SeqID_14859
ntacgacacacatatgagccacgcgcctgacatacatagcagtgcgcgancgttatacttatgtatatgtacattttatatcgccgcaatatcatacatgatatatacgtctggcgataatattccgcggtaatagagagaagcggacggcgaaaatagagtgataaattaattctccntgtcggttctcgcgatattattgtgattccacacggctacagctgatatagtaatataataaggccgcgcgtcattaattcgcgcgggtttaacgactttcgcggcagccctttctcagttatgaagtgcgtttacaagacggcgcgcgccgccgggccaaataatatgcgggggttggcgcggcggacgtaatgtggagatattattattagaatatgaagagtgcgaacgaaagaaacgcgcccgcaaggaggaagaagggtaaaaaataataagcgcggtgtatatggcgaagtaacgtaaacacagcgatatattgtgttgtggcgacgattaatcttcattattacgccgctcgccctagacgcagttcacgcacagtccgttatatcctactatatatgtcatgccgcggtgttatactcgcaggcgttgtcacacgacgatcgcattttataaaaatagtttgctacacgagatataagacgtgcgtgctgaaacacaaagcaaaaacaatacaaatgtggaggaacaaaaaaaaaggatgataagggagggtaaggcgcggcgcttcggcacatatacacgacgtccgatcaatatagccccatgtattatgtttgtgcgatagtccaaaataaagccgcgcgtggaatttttcgtccccacgacctttaatatataagtaaaataagatacagcttaaatagcgattgcgcttagctatatagtataagattagagcccaaaaattcgagcatatgtgaaatcatccacaacgaactatgaattggggcgggctacctgtatcgccatcccctataatcataataagaatatagcggctaacgaataaaatgcggcgcggtggtactgcatacctatatatgttattagaaatggcaaacacgtatcatcattctggtggaggagcgagcgacctccggtgttttagcgatttttaaatttacagcgcccctctcgccaaaaatgtacaaacatattttaaggtcttgcataccgcatattatttaccaccccatataaggcaaaggggggggcgtgagacgcgccccatttccacggggatggtttttgtgaaaacttttttgttaaaatgttatatttgttgaccgcgccgtggcctttgaacagcgagggccgaggaaggcgggggaaa

SEQ ID NO: 5081 - DNA, 873 bp, Glycine max
  Probeset Number=SeqID_14860
tcgggtcagctacgtgggccccccccccgagcacgcctaggagctacccttcgccgccggcgtttggatgatggtgaatgggctgctgaggggcactgcggggcgcggtcagcaaggatgtgtcaaggttttttcaacgccgtgagtgggccttctgatgacttagatgtatcttccggaaagggcctgggtgatggtcgcaccacgacaactggctttggtgaagatcattttgttgtggcggttttaggagaggtctatcctgtgtggaagtggtttgacacacaagatgggatgctggatctgcagaagaatagtgattaaacagcaccgtagttctacaacatccaccttgaaaggccaaagtgtgatgcggatgggtataacttatttgtcgtcgatgccatgcatacggctaactatgccagtcggatatgtcatgcatgccgaccgaattgtgaagcatacgttactgctgttgatgctcattatcaaattggttttgatagtgttcgtgcaatccaacatggcgaggatatcactcttgactacaattctgttacagagagcaaggaggaatatgaagcttcagtttagtttgtgtggaagccaagtttgccgtgggagctatctgaatctaactggcgaaggggcttccggagtggtgctgatccagtgccttgcctggcttgagcctcctggggtggcgcgtcttgcccgggcaccagtccctgtttcgccagggctctgtagccacctcggcagtgcgggtttgggccgtggtccgcttggtcgccgcccgcttgggcggggtgcctgccccgctcgccttggcccattgaccggttttggtcgtaccaaacgtcctgagga

SEQ ID NO: 5082 - DNA, 579 bp, Glycine max
  Peptide Sequence Number=SeqID_6977
  Probeset Number=SeqID_14861
gaaatgcaggaagaaattgggataatagtagtgagtttgatcgcagagggaggggtaatcagcaagatcatggctcaagaggttcgcaaagaaatgaaagaagaagctgggatagaagtagtgagtttgatggcagtgacaggcccctcagaccttctaatagaaggtaagaatatggcaatgcaagtggcagcataagcatcgaaagtgtggacagtgtgcccaaaattcttggattcaaaactggattgatggcactggatcctgagaccctgccggtaagggatgttttaggaagtgttaatatttccaagattttttccaaggctccaagctagccaacaggtggagtgttacatcatggaatttggtatgttcagattttgtgaaagaactttttccttttttcttcaccatttactgcctcataatcttctcaaggaagggcctagaatgcagcgagagaacatgcctccatgcatgtatgtttaatatttgttgtatgagtttcttcatcttaaacattatatattcaaagataagttagtaatggagttcaattgtcatctgtgcaatgcc

SEQ ID NO: 5083 - DNA, 501 bp, Glycine max
  Probeset Number=SeqID_14862
aagtcctccagtcttctgcgagaatcagaaaaagcgaaaatcgaaagaaatggatgcgaagatcggaaaattctttgactccgtcggttctttcttcagcggcggcgataagatcccgtggtctgaaggagatgtcatcgctggatgtgaaagagaggttcgagaggccacaaactctggcaatgaaggactgaagaaagagtgtcttatgcggttgtcctgggctctcgttcattcctatcaacaggatgatgttcaacgtgggatagacatgcttgaagcgtctcttgcgaacagtgctcctcctttggaagaccgagagaagctctatctccttgctgttggttactacaggagtggggattgctccaagagcaggcagctcattgaccgctgtatcgagatgcaacccgattggaggcaagctttggtactaaagaagtgcatcgaagacaaaatcacaaaggatggagttatagggataggcatcactgcttcagc

SEQ ID NO: 5084 - DNA, 432 bp, Glycine max
  Peptide Sequence Number=SeqID_6978
  Probeset Number=SeqID_14863
ggagtggtgtaggcactttcaaatgcccctgccctatccaaggtacacccaacctgattataaggcaatcccaaagtggaggcttgcctgtttgctcaaaaaggatggctttcccatctttgggggtgttgaaaacaaaaaaaactttgccctgggggcccttttatgggaccaagtgagcttccaatgtttttaggcatattcttcccagggccctcttgaaatttggaccttgttatgtgtgatataagtgagagcttttaataatgattaggcctatagttagttaaacctagggggggggataataataaaataaccatgcctcttaaacatataattaaggatttgattttaagttaggggatatcaaataatatttgttggaagaaaataacccttaaatagatttcacccctttgttggtttttt

SEQ ID NO: 5085 - DNA, 666 bp, Glycine max
  misc_feature (528)..(528): n is a, c, g, or t
  misc_feature (558)..(558): n is a, c, g, or t
  misc_feature (604)..(604): n is a, c, g, or t
  Peptide Sequence Number=SeqID_6979
  Probeset Number=SeqID_14864
gggggtggggggttttctccaaaaaaagggcggggtgggagaccccctcttcttttttttttttaggggggcgcccttttttttctttttttttttttttcccccccaaaatatttttttcccgcagaaaaaaaaataacccccccttttttttccccctttttttttcccccgggtgtgggacgccccccccaaaaaaaaagggtgtggtgggaagaagaaaaccccctttttttttttttttttttgggacaaaattacacacacccgggggggggttttgccccccccgccgcggaaaatattaaccaaaaaaggggggggcccgagggggtttaaaactcaaaaaacaaacccgagcacctttttaaaaccttggttttcttttggtaaaaaaaagggtttaaaggaaaaatttggacctttggggtcaccaagaaatcccaatgagtgcttcgtcccaatggatttgaccaggaggcaaggacatggtatccccgtagaagtaatgttggaccagactgcacnttaactgacccgaagcatccatcacgcaanctgtgttgcactttgatcgaacgagggcgccatatatattcttctnccaagagaaaaaagagaataaaaatgaggaacggaacaggaagtgtttcaaaggttatttgt

SEQ ID NO: 5086 - DNA, 563 bp, Glycine max
  misc_feature (518)..(518): n is a, c, g, or t
  Probeset Number=SeqID_14865
acttttcattttctaggttacatggttttagttgatgtgacaatgcttggatcgttgtaaggggcaactgaattattttagtaatgtatgataaactatccctttataaatgtgcagccaatctcttgcaattagctaaagaaagtggggctaatattaaacatattttatacaatgatgagaaatataaatttatgaatataaaagcattatatgcccttgtatgtgaggcattgaaacattggagtatcattgaacttctaattaacgaatcaaaaatattgatcaatgaacaagaattagacatttggcttgtcagaatattaattacagagcacatttttggaaagaagaaaattgatagtcttaatgaatttgggcgtacaattcttcaatatgaatccaagtttagagaactgctctccaaacaagattcttataacacagaccatgtaaataagaatatagaaattaaaggtaagttctactactttcagcgttttatatagtttaatttnggttttgttgcagacagtctaagcattggcggattgagtggacat

SEQ ID NO: 5087 - DNA, 1646 bp, Glycine max
  misc_feature (29)..(34): n is a, c, g, or t
  misc_feature (36)..(38): n is a, c, g, or t
  misc_feature (57)..(57): n is a, c, g, or t
  misc_feature (64)..(64): n is a, c, g, or t
  misc_feature (80)..(80): n is a, c, g, or t
  misc_feature (93)..(94): n is a, c, g, or t
  misc_feature (105)..(105): n is a, c, g, or t
  misc_feature (141)..(142): n is a, c, g, or t
  misc_feature (188)..(188): n is a, c, g, or t
  misc_feature (192)..(192): n is a, c, g, or t
  misc_feature (199)..(199): n is a, c, g, or t
  misc_feature (208)..(208): n is a, c, g, or t
  misc_feature (214)..(214): n is a, c, g, or t
  misc_feature (329)..(329): n is a, c, g, or t
  misc_feature (425)..(425): n is a, c, g, or t
  misc_feature (431)..(431): n is a, c, g, or t
  misc_feature (493)..(493): n is a, c, g, or t
  misc_feature (592)..(592): n is a, c, g, or t
  misc_feature (605)..(605): n is a, c, g, or t
  misc_feature (733)..(733): n is a, c, g, or t
  misc_feature (737)..(737): n is a, c, g, or t
  misc_feature (777)..(777): n is a, c, g, or t
  misc_feature (917)..(917): n is a, c, g, or t
  misc_feature (921)..(922): n is a, c, g, or t
  misc_feature (924)..(924): n is a, c, g, or t
  misc_feature (1097)..(1097): n is a, c, g, or t
  misc_feature (1124)..(1124): n is a, c, g, or t
  misc_feature (1646)..(1646): n is a, c, g, or t
  Peptide Sequence Number=SeqID_6980
  Probeset Number=SeqID_14866
gtgtgtgtgttttgtgtgccccccccccnnnnnntnnntttgttttctcccgtcccncacgccncgctttccgtccgctnaggtgtttttttnngtgtggtttgnccggcggcactctactcactcgtgcgggggagagannctccacctacagggaagttacctcatccacacacaccgagatgggngacnccgtgangccgcatanaattanttacataagaagaggacctttaatccttaggttgtgatatactagagaaaaaacacataatatacacccacacacgcaccacctctacagtatatattactctctatataaatgnatcctaacaccattgacatcgctatattgtctcaatgtctgctcctgtcctcgctctccttcgcgcactgctatagattttataaatatatcgggntttccnactacctatcaataatttgtatactcttggaattgacacctcgtgacaaggatagaagtccnatataacatatctcacatatacacgctattctacatagaaaaaacacgtatcatcaagacaaactatgtgctgatattgagctatcctgtatgttatgntgtgtagtgtgantcccaccccacatatcatacaacactaatacactaatggatactcatcatcaacttctaacaacaaatactcactctatcgacctctaacatataccttatatagatatatggatatgatgaaaagancagnactattcttgtcctgtccagcgtcttcgagtactaatgcnatggaagaccggtatacgacatgtccagtcgtgtcatacacgcgcgtcggtcagatgtgaggagagtagtgctgagaggcagattagatggaattgtggtgagcgtttagagtggtcccccacggtgtgagaacagtaantaannanaagaacaacacaccagtcctgcgctctcatatatactgagagatagtctcaaacatatacacttcatacacccctaccccacgcgcagaatatgacattgatgttgtgaacggtcacgtccccaccaacacgtctctcaccttgatgcgttttcttgtgcccacatctgtagncacataccacgcctccgcaacacacanacactcttcctcatcacctacttctcataccccgacacacgcacagagctggtgtgcaatcgaactctgctcctgtgtctccatgtctgctgttgtgtggtgtatgcgtggtgcaaacttacaaagtaactattaccatactcacctacatctaatgcacactggctgaatcgtcatggcgtaagctctcgtgactgtacatctctacgatcacttatgagataggaacacgtcctcatgccaccagcttactcttgcgggtgccagttgtcccgtgacgagctgcggcgtcgctgttgctgtgatcttgctgtcctctcaccgctgtcactctgcgcggccacagagatacctccctcactctctcttctgcctagtgacgctcacaccatgcgcaatgtatacacacgtccctgactaccttactactcgctcaacgtgatagtgtgcttgtgttcacttgtcactctatcactctcccacacacccatgtctcctcgcccgtgcatgtatttctctatn

SEQ ID NO: 5088 - DNA, 2010 bp, Glycine max
  misc_feature (29)..(29): n is a, c, g, or t
  misc_feature (31)..(31): n is a, c, g, or t
  misc_feature (35)..(39): n is a, c, g, or t
  misc_feature (41)..(43): n is a, c, g, or t
  misc_feature (55)..(55): n is a, c, g, or t
  misc_feature (78)..(78): n is a, c, g, or t
  misc_feature (114)..(114): n is a, c, g, or t
  misc_feature (148)..(148): n is a, c, g, or t
  misc_feature (172)..(172): n is a, c, g, or t
  misc_feature (241)..(241): n is a, c, g, or t
  misc_feature (270)..(270): n is a, c, g, or t
  misc_feature (336)..(336): n is a, c, g, or t
  misc_feature (372)..(372): n is a, c, g, or t
  misc_feature (547)..(547): n is a, c, g, or t
  misc_feature (576)..(576): n is a, c, g, or t
  misc_feature (579)..(579): n is a, c, g, or t
  misc_feature (590)..(590): n is a, c, g, or t
  misc_feature (596)..(596): n is a, c, g, or t
  misc_feature (611)..(611): n is a, c, g, or t
  misc_feature (651)..(651): n is a, c, g, or t
  misc_feature (728)..(729): n is a, c, g, or t
  misc_feature (988)..(988): n is a, c, g, or t
  misc_feature (1070)..(1070): n is a, c, g, or t
  misc_feature (1191)..(1191): n is a, c, g, or t
  misc_feature (1508)..(1508): n is a, c, g, or t
  misc_feature (1570)..(1570): n is a, c, g, or t
  misc_feature (1576)..(1576): n is a, c, g, or t
  misc_feature (1603)..(1603): n is a, c, g, or t
  misc_feature (1606)..(1606): n is a, c, g, or t
  misc_feature (1651)..(1651): n is a, c, g, or t
  misc_feature (1678)..(1678): n is a, c, g, or t
  misc_feature (1702)..(1702): n is a, c, g, or t
  misc_feature (1722)..(1722): n is a, c, g, or t
  misc_feature (1760)..(1760): n is a, c, g, or t
  misc_feature (1772)..(1772): n is a, c, g, or t
  misc_feature (1781)..(1781): n is a, c, g, or t
  misc_feature (1897)..(1897): n is a, c, g, or t
  misc_feature (1919)..(1919): n is a, c, g, or t
  misc_feature (1925)..(1925): n is a, c, g, or t
  misc_feature (1937)..(1937): n is a, c, g, or t
  Probeset Number=SeqID_14867
ccccccccccccctacacaccccctcccncncccnnnnntnnntatatttatatnaatttcatatatatatcattatnattatatatattaattatgtaatctatattcctctntctcatttatacactctaatacatactcatccantgtctgttggtgagtgatttaggngggctcgctcctctgtttgtgtttatattacattgtctatgatattgctatattttcaacatatatagngattgtatgcacccagaccccaccacacntaactaaaatatgcgctgagagcactacacacttctaccacctctattctttgtctctctgttgtnctgtctactctcgcactcctctaccatatctgatancaaatcatattcacgtatcaaaaaatagaacaacacgagagtgttcactgtgcgctctctcttaatatattgtgtggcgcataggttatgttgctcttagtaactgcgctctccgcgtcacgctgtcagtagtatatagttgctctgcgctgattgcggcacaattgagccctanggggagggggggcgggggcgcgagacaanganaactgaatatncctcgnacgcacgccacccanacaacccacactcctcttgttatcgtagctatttgattantatatcactatatagtatatttgtgagctggcacacacatacagtcgtcggcgacagactttgttgtatgtacatgnnctcacccttcactcgtgcggatgtatacggtgcgctcctgcgatgttctttatctaagctattaaatactacagaccacatactcactgccacacttgcatctcttctcatctcaatgatcctcacatacactgtgttgtgtttgtgttgcgattgtgcttctctagctatactacatacataaactgttggatgtgagtggtgtgagagcagtggagtataacgacacaggagttgtgtggcggtgctgtggaagtgnattgtggtagtactacttagtgacggagtatgataacaaccacggcatggcggtagggatgtgaactagtaagatgagtggntgtgtgagataaatatacaggagtgagtgtgttgctgctataactgccgcgctgctgagtcactgcacataacatctcgcctcttctgatactaccaagcaatcacaccgctctctgatgngacagatattaggatggagacgtgttacagatatctacaccactgctactcactctctactctcactgtctctcttctctcttctatatatttcctacgtagactcccacggctgcaccatatgtgttcgcgactgataacacgcctcgaccacgcagaatagtgtacgtgagagagagtgtgagagtgtgaatcatagatatggccggtggatgtactctgactcgtagatgacttcgcttacatgcgtgtatcacattagcagcatcggaacaacgcatatcgtgactgctgtgctcagacgaaacactactatntatttgatgtgattcgcttgcacactctacacgtccgcagcgcaacgcgcacctaactcaanctaacncacgcacagctactgccactatagtanctnatcgtaggcgagatctatactaatatgtcacaatgataatcaagnaaattactctgattatcgacatatttngtttactggtctctctattctctntattctcatctatgagcccncgcatatcgacgcgctactgcagctctctccgtctttngtactactcgtntacgtatgngatttcgcgctacgccatcgctatggctcacatcgaacagatactacataccaccctccaacatctcgacctagcactacacacgacacacactatcatacttcacactcctcgcncagacgacgcactctcctagancgcaangtcactagcgangcgctagtagatctagctgtccgtcatacagtgctgtatggcgccacactattctcgtgtctatacctctacc

SEQ ID NO: 5089 - DNA, 443 bp, Glycine max
  misc_feature (2)..(2): n is a, c, g, or t
  misc_feature (267)..(267): n is a, c, g, or t
  Peptide Sequence Number=SeqID_6981
  Probeset Number=SeqID_14868
gngccttctggggaggccctgattatggggcactcagctgggataacaagcttgctgccgctcaggctcttctgacccgctcgaggctgctcttgagccctgggtatccatatgaagaaattttgaggacctttcacaatcagacaagcataatcatgtgctcctatctaccagttctcacaagctttaacagaaccaaaggcggctcgattcaattaaaccatggcaggcctcaccctctccaatatgcggccaacgcggcctttntgcctgccctatataccgattatctccgaccgctgctgacacacctggaccggatcgcggacctaacttctcttccccccccccgctccctccctctgccaccccccagattgattacatccttggcaataacccaacgaaaatgatttatgtcctacgttttggtactcattacc

SEQ ID NO: 5090 - DNA, 2217 bp, Glycine max
  misc_feature (1)..(1): n is a, c, g, or t
  misc_feature (6)..(12): n is a, c, g, or t
  misc_feature (19)..(19): n is a, c, g, or t
  misc_feature (23)..(25): n is a, c, g, or t
  misc_feature (28)..(31): n is a, c, g, or t
  misc_feature (33)..(39): n is a, c, g, or t
  misc_feature (43)..(46): n is a, c, g, or t
  misc_feature (62)..(62): n is a, c, g, or t
  misc_feature (90)..(90): n is a, c, g, or t
  misc_feature (122)..(122): n is a, c, g, or t
  misc_feature (134)..(136): n is a, c, g, or t
  misc_feature (138)..(138): n is a, c, g, or t
  misc_feature (154)..(154): n is a, c, g, or t
  misc_feature (168)..(168): n is a, c, g, or t
  misc_feature (173)..(173): n is a, c, g, or t
  misc_feature (191)..(191): n is a, c, g, or t
  misc_feature (194)..(194): n is a, c, g, or t
  misc_feature (205)..(205): n is a, c, g, or t
  misc_feature (209)..(209): n is a, c, g, or t
  misc_feature (216)..(216): n is a, c, g, or t
  misc_feature (245)..(245): n is a, c, g, or t
  misc_feature (259)..(259): n is a, c, g, or t
  misc_feature (263)..(263): n is a, c, g, or t
  misc_feature (266)..(266): n is a, c, g, or t
  misc_feature (302)..(302): n is a, c, g, or t
  misc_feature (304)..(304): n is a, c, g, or t
  misc_feature (332)..(332): n is a, c, g, or t
  misc_feature (337)..(337): n is a, c, g, or t
  misc_feature (351)..(351): n is a, c, g, or t
  misc_feature (357)..(357): n is a, c, g, or t
  misc_feature (390)..(390): n is a, c, g, or t
  misc_feature (395)..(395): n is a, c, g, or t
  misc_feature (398)..(398): n is a, c, g, or t
  misc_feature (417)..(417): n is a, c, g, or t
  misc_feature (434)..(434): n is a, c, g, or t
  misc_feature (451)..(451): n is a, c, g, or t
  misc_feature (482)..(482): n is a, c, g, or t
  misc_feature (517)..(517): n is a, c, g, or t
  misc_feature (530)..(530): n is a, c, g, or t
  misc_feature (542)..(542): n is a, c, g, or t
  misc_feature (544)..(544): n is a, c, g, or t
  misc_feature (560)..(560): n is a, c, g, or t
  misc_feature (569)..(569): n is a, c, g, or t
  misc_feature (584)..(584): n is a, c, g, or t
  misc_feature (675)..(675): n is a, c, g, or t
  misc_feature (705)..(705): n is a, c, g, or t
  misc_feature (752)..(752): n is a, c, g, or t
  misc_feature (754)..(754): n is a, c, g, or t
  misc_feature (759)..(759): n is a, c, g, or t
  misc_feature (784)..(784): n is a, c, g, or t
  misc_feature (823)..(823): n is a, c, g, or t
  misc_feature (826)..(826): n is a, c, g, or t
  misc_feature (828)..(828): n is a, c, g, or t
  misc_feature (859)..(859): n is a, c, g, or t
  misc_feature (948)..(948): n is a, c, g, or t
  misc_feature (969)..(969): n is a, c, g, or t
  misc_feature (1033)..(1033): n is a, c, g, or t
  misc_feature (1094)..(1094): n is a, c, g, or t
  misc_feature (1171)..(1171): n is a, c, g, or t
  misc_feature (1189)..(1189): n is a, c, g, or t
  misc_feature (1221)..(1221): n is a, c, g, or t
  misc_feature (1223)..(1223): n is a, c, g, or t
  misc_feature (1231)..(1231): n is a, c, g, or t
  misc_feature (1243)..(1243): n is a, c, g, or t
  misc_feature (1272)..(1272): n is a, c, g, or t
  misc_feature (1275)..(1275): n is a, c, g, or t
  misc_feature (1285)..(1285): n is a, c, g, or t
  misc_feature (1322)..(1322): n is a, c, g, or t
  misc_feature (1344)..(1344): n is a, c, g, or t
  misc_feature (1356)..(1356): n is a, c, g, or t
  misc_feature (1366)..(1366): n is a, c, g, or t
  misc_feature (1371)..(1371): n is a, c, g, or t
  misc_feature (1380)..(1380): n is a, c, g, or t
  misc_feature (1401)..(1401): n is a, c, g, or t
  misc_feature (1428)..(1428): n is a, c, g, or t
  misc_feature (1431)..(1431): n is a, c, g, or t
  misc_feature (1473)..(1473): n is a, c, g, or t
  misc_feature (1491)..(1491): n is a, c, g, or t
  misc_feature (1493)..(1494): n is a, c, g, or t
  misc_feature (1514)..(1514): n is a, c, g, or t
  misc_feature (1562)..(1562): n is a, c, g, or t
  misc_feature (1599)..(1599): n is a, c, g, or t
  misc_feature (1604)..(1604): n is a, c, g, or t
  misc_feature (1632)..(1632): n is a, c, g, or t
  misc_feature (1634)..(1634): n is a, c, g, or t
  misc_feature (1648)..(1648): n is a, c, g, or t
  misc_feature (1670)..(1670): n is a, c, g, or t
  misc_feature (1672)..(1672): n is a, c, g, or t
  misc_feature (1685)..(1685): n is a, c, g, or t
  misc_feature (1704)..(1704): n is a, c, g, or t
  misc_feature (1772)..(1772): n is a, c, g, or t
  misc_feature (1776)..(1776): n is a, c, g, or t
  misc_feature (1785)..(1785): n is a, c, g, or t
  misc_feature (1840)..(1840): n is a, c, g, or t
  misc_feature (1854)..(1854): n is a, c, g, or t
  misc_feature (1857)..(1857): n is a, c, g, or t
  misc_feature (1869)..(1869): n is a, c, g, or t
  misc_feature (1873)..(1873): n is a, c, g, or t
  misc_feature (1880)..(1880): n is a, c, g, or t
  misc_feature (1883)..(1883): n is a, c, g, or t
  misc_feature (1899)..(1899): n is a, c, g, or t
  misc_feature (1906)..(1906): n is a, c, g, or t
  misc_feature (1928)..(1928): n is a, c, g, or t
  misc_feature (1933)..(1933): n is a, c, g, or t
  misc_feature (1935)..(1935): n is a, c, g, or t
  misc_feature (1938)..(1939): n is a, c, g, or t
  misc_feature (1942)..(1942): n is a, c, g, or t
  misc_feature (1956)..(1956): n is a, c, g, or t
  misc_feature (1972)..(1972): n is a, c, g, or t
  misc_feature (1994)..(1994): n is a, c, g, or t
  misc_feature (1997)..(1997): n is a, c, g, or t
  misc_feature (2000)..(2000): n is a, c, g, or t
  misc_feature (2014)..(2014): n is a, c, g, or t
  misc_feature (2017)..(2018): n is a, c, g, or t
  misc_feature (2021)..(2021): n is a, c, g, or t
  misc_feature (2023)..(2023): n is a, c, g, or t
  misc_feature (2034)..(2034): n is a, c, g, or t
  misc_feature (2042)..(2042): n is a, c, g, or t
  misc_feature (2048)..(2048): n is a, c, g, or t
  misc_feature (2053)..(2053): n is a, c, g, or t
  misc_feature (2069)..(2069): n is a, c, g, or t
  misc_feature (2071)..(2071): n is a, c, g, or t
  misc_feature (2077)..(2077): n is a, c, g, or t
  misc_feature (2086)..(2087): n is a, c, g, or t
  misc_feature (2092)..(2092): n is a, c, g, or t
  misc_feature (2097)..(2097): n is a, c, g, or t
  misc_feature (2100)..(2100): n is a, c, g, or t
  misc_feature (2115)..(2115): n is a, c, g, or t
  misc_feature (2118)..(2118): n is a, c, g, or t
  misc_feature (2140)..(2140): n is a, c, g, or t
  misc_feature (2156)..(2156): n is a, c, g, or t
  misc_feature (2160)..(2160): n is a, c, g, or t
  misc_feature (2165)..(2165): n is a, c, g, or t
  misc_feature (2178)..(2178): n is a, c, g, or t
  misc_feature (2202)..(2202): n is a, c, g, or t
  misc_feature (2207)..(2207): n is a, c, g, or t
  misc_feature (2216)..(2217): n is a, c, g, or t
  Peptide Sequence Number=SeqID_6982
  Probeset Number=SeqID_14869
nccccnnnnnnnccccccnaaannnccnnnncnnnnnnncctnnnnttaagttagatagagncacgtcactgactcttctcgtattatantgttccgcatactgtcctagagagccccttcntcctctgcttcnnngngaaaaaaaacagatgngcggcgtggcgcgntcctnggggggtgttcgtggtcncgngttctggtgcntagntatacgnaggattgacgcgcctcattctactatacnatgttcagcgtgantgtncgntcatagacacaggagtactctatgtcatctaatcancnacttatatactactacgcgacacgactngtatntcccaatctcatcngtagtntgctgttagtactcttgtattatgcgtctggcngtctnatnctggcgtctcgtcgtcggncacgcacactgaggacnacgctggtcatgtccantggtgattcttagtagggacgcatcgcagcngtcgaggcacgctggatcattgctgtgctgagtgntgctgggatggtngagaacatacanantcgcgtcgcgcgccgnatggcacgntgacgggtgtagagntcgcgtgtaagccaagtaactgcggcagagccatgctctgcgtcgtctgatctgtactatctctctcgtcctcgagcaagtctactgcagntcgagactatagagacgcatactatatacnacatcatccatatcaacatactcacatatctatccgcctgtcgtctnancgtcncgatgcctcgactctacgctatacnctatagcagtctgtgcgatgactatctatctactctatnctntnactccattctcactctctagtactactcaantgacaactatcatcactcatgacacctgacacgtagtgagtcgtctgcgacgtgcacatgcgacgtcgacgactctgtaaacgagagancgcagtaggagatgacacganaaatacagacgacacgctagatggacagggcacagcacgatctatccccactaacgataacagngtactaaccgtgtcgacgcttcagcgcatacattcgtcgtcgcgctactcaacctctcagnctgttgctaacatctgtagcgtccgactactcactgtgctcactcacatctctgttgacgcagtacgtactcgagtnacacatgatcgtgcgacngtacatcatagcataagcgcatgcgacagcgngntcagaccnatatacaccgcnacatcatcattacatcgtggcactatcantantagtccactnatagtctctcgcgccctagtcggatcatactagctgngcatcgtcgcgctcgcgcgtcnagagtctgcgcntcatgctcantgctnatctgctantcagtacttcgtcactatctnactctagtgtgctgagcatactgtcantgntccttcatgatcagtgtagcgagcagcgatcaagcttctacntctaacgatgacgtctcntnncgatacattgcgacacgacnactatcacgctgcagctacgtcgcgacgatcgacatcagacacggcgngtgatcgacgggtcgacgcgactgctcgatatactcngtcangatgagtctgctctgcctgctgagatantnatcacacgccgtancgcatgatcatacttatgtcgntncagcgtatcgtanctgactagtagtgactctncacgactcatcatctactgcagtcgtatgcagtatctggcagctgcgatactctcaggaatctggatnagancagacgaangagtcgatatcactatcctgtcagacagcaatgctacgtactacgtacgtgatgnatacgatgctgttnctncagcgagtgcantatnctcattntangtccatctagcacgcntcataancatcatcaatcagtagcaactngtagnancannacnaacgtctgcaggcnagctgatgactcactngacgtcgcccgatgcgactgcngantcngaaccgctacgtancgnntangnatgcgacatgnatacgatngcatgnatcantcagtacgactgcgantncctatncatacgacnnactcntgatnacnactttaagcagcatncanattcgtatagatgactcagacngtacgcgacgaaatgnctgncgtancacagtactatcnagctagacgtaactgactgaacgncacancatcgtcann

SEQ ID NO: 5091 - DNA, 196 bp, Glycine max
  Probeset Number=SeqID_14870
tatcaacaaccaccactggaaacaatccagtgctgagaaggtaacaatcctcagggccgctgtgacaccaataaatgccacgagctgtgcagcaaactctacaggcaacacaagaacctaggcaaatgccagatgccctgccaaggaacctcaaaaagcggacggaaaattcaaattcactgtggggctagggact

SEQ ID NO: 5092 - DNA, 870 bp, Glycine max
  misc_feature (69)..(69): n is a, c, g, or t
  misc_feature (125)..(127): n is a, c, g, or t
  misc_feature (150)..(150): n is a, c, g, or t
  misc_feature (183)..(183): n is a, c, g, or t
  misc_feature (229)..(229): n is a, c, g, or t
  misc_feature (261)..(261): n is a, c, g, or t
  misc_feature (266)..(266): n is a, c, g, or t
  misc_feature (289)..(290): n is a, c, g, or t
  misc_feature (292)..(292): n is a, c, g, or t
  misc_feature (295)..(295): n is a, c, g, or t
  misc_feature (301)..(301): n is a, c, g, or t
  misc_feature (324)..(325): n is a, c, g, or t
  misc_feature (426)..(426): n is a, c, g, or t
  Peptide Sequence Number=SeqID_6983
  Probeset Number=SeqID_14871
aataataaagcataggctccttaaggaagattctttggtcttgagaagtcgagatattagatcaatttncgggcaatgcggagggacagcctgttttgggttctgtagaggatcatcattccccnnncgagacagggcattactacttgncatggggttaaaaataatattgaggtacatggntaaattaagagaagctctaaaatgcttacctggagtgctttaaaantgataaagtggatccatgtacgtcacattttntaaancgtgtagtaacttatacttctgnncnttncatggncttgaagtaatagggttccactnngtctggaaaaaggaaagaagtatgggaatctgccctagatcagtatgaaagaattccagataaaaagattcaagacatacttaaagtaagttttgattctntacaagaagatgagcataaaatttttcttgatattgcttgttgcttcaaaggatatgattttacatatgttaaagaagtactttttatccatcatggtttttgccctgaatatgctataggagtgttgattgacaaatctctcctatgtcgacggtccagttacttgacaatgcatgacttgatagaggacatgggtaaagaaattgtaagacaggaatctccaggagagccaggcaaacgcagtaggttatggttgcatgaagatatagttcaagtcttagaagaaactgagttgaggctagtgagcagtataacgcattgtgcttcctgatctgaactgaataaaataaggttcaagtgcaaatcaatttagccatgtgttggtatgaaaccaccataacagattgttaaacacaataaagttggaactggaggaagtaata

SEQ ID NO: 5093 - DNA, 2043 bp, Glycine max
  misc_feature (511)..(511): n is a, c, g, or t
  misc_feature (614)..(615): n is a, c, g, or t
  misc_feature (877)..(877): n is a, c, g, or t
  misc_feature (880)..(880): n is a, c, g, or t
  misc_feature (882)..(882): n is a, c, g, or t
  misc_feature (977)..(977): n is a, c, g, or t
  misc_feature (1094)..(1094): n is a, c, g, or t
  misc_feature (1134)..(1134): n is a, c, g, or t
  misc_feature (1142)..(1142): n is a, c, g, or t
  misc_feature (1213)..(1213): n is a, c, g, or t
  misc_feature (1251)..(1251): n is a, c, g, or t
  misc_feature (1448)..(1448): n is a, c, g, or t
  misc_feature (1483)..(1483): n is a, c, g, or t
  misc_feature (1565)..(1565): n is a, c, g, or t
  misc_feature (1567)..(1567): n is a, c, g, or t
  misc_feature (1588)..(1588): n is a, c, g, or t
  misc_feature (1610)..(1610): n is a, c, g, or t
  misc_feature (1712)..(1712): n is a, c, g, or t
  misc_feature (1715)..(1715): n is a, c, g, or t
  misc_feature (1721)..(1721): n is a, c, g, or t
  misc_feature (1733)..(1733): n is a, c, g, or t
  misc_feature (1742)..(1742): n is a, c, g, or t
  misc_feature (1744)..(1745): n is a, c, g, or t
  misc_feature (1748)..(1748): n is a, c, g, or t
  misc_feature (1795)..(1795): n is a, c, g, or t
  misc_feature (1797)..(1797): n is a, c, g, or t
  misc_feature (1815)..(1815): n is a, c, g, or t
  misc_feature (1844)..(1844): n is a, c, g, or t
  misc_feature (1852)..(1852): n is a, c, g, or t
  misc_feature (1878)..(1878): n is a, c, g, or t
  misc_feature (1884)..(1884): n is a, c, g, or t
  misc_feature (1893)..(1893): n is a, c, g, or t
  misc_feature (1907)..(1907): n is a, c, g, or t
  misc_feature (1920)..(1920): n is a, c, g, or t
  misc_feature (1941)..(1941): n is a, c, g, or t
  misc_feature (1955)..(1955): n is a, c, g, or t
  misc_feature (1964)..(1964): n is a, c, g, or t
  misc_feature (2009)..(2009): n is a, c, g, or t
  misc_feature (2024)..(2024): n is a, c, g, or t
  misc_feature (2031)..(2031): n is a, c, g, or t
  misc_feature (2043)..(2043): n is a, c, g, or t
  Peptide Sequence Number=SeqID_6992
  Probeset Number=SeqID_14872
tatgtgcacacgccataacagcgcgtcacgcctacatattattgcgggcgatctggcctattatgttacgcagcgcgagtatcaacactgcgctgcgcgtctttttgtcgttgttgtggtgttctgcgtcgcaccctaccgcgtcgtagcggttgtacggcgatttattttgttacgctctctgcacgctccgcgcgcgcataaagtgtagatttgtgagactcaacatggtggtgtctccagtggcgctgccacacatcactagcatatgaggcactcgtgtttgcacgaccgatgaagtactcatatctcgaacagtatcctcatccccgccgcccaatatttgatatgttgcgacctcttaatattcttataatcggttgtatcacgcgcatgatctacgcgctttgtagtatataccgcctctgacaaacatattaatataatatacaccacatctccacgtccccgctattatcatctctgtatagttagcgcatacaccctggtngttaggatacggcacgatttcgacgatgcgcgcgacgcggttgattataagataccgccgcggcgcggcgtggtagccggccgccgcgccgcccaaccataanncacacacaacagaccgactatagttataccaacatcaccgtgatacagtatgataatctattcagaccctgtagtacaatgcgcgggctcgatactaccatagataaatatgatggagatatgataaggtggcggttacgcaagattcacgtatgctcgtgccgacacattcgacaaacgcattgtctattgtgtttgtccacgcgtccgttgtatatatatgtgagcggcgtcgtatattgattacatacccgcgcgcgcnccngncggagaatagatataatgtgcgtgtgcgtcgcacgcatgtggtataggaacactcgcgccgtattatattgcggtgtcaccacagtctgtggtcngatgtgtaatatgcggcggtgcgtgcacccatataaagtgattaagtcatgtgtgcgtggctgtcacgacatatagtgcccgtcatcacgaacaatacataatatctgtttgtcaancgcgaccgagtacatatattatatataacagtccatatcncggcgcgntatcttgtcgttgttgtatacctaccaactgttgtatgttataactcaacacgacatatatttgatcactncgctcatacgcgtgtcatcttattgatgtgacagagcncagaacagacggagtgtcgtggtgctggtagatcatgctcgcacacatgaatgtgacagctacgcaccacatgagcgtgttggtgtgtacacgacacacgcgcgttattatcatcactcgtgctcgactctatatgtcgtgctgcgtgcacattatactctagtatatattatatataatagcgcgctgtcgtcgtnaaaataataacagcgcacgcggctctcgcatgcgntaaacacgagagatcagtaggataatacgaatgcagcgcgagagtagcgcgaggtgctgccacgcgacagaataataatgantnatcaaacatagagaaacgcanccgtgctgaatacaaatgatcnctcactgctgcgtctcgactgctctctttactatgtcatctatatacacaaaatatacgtgcgcgtcggcgactttcgtgtgtcgtgcgtgatgaataggcnganaactanactcatcgcaantatgactancnncgntcgtgctgtcggcatgcatatacacgcacgacgtgtcgactagatantnggtacgagagctgcagantgattactatgcgactcgccgtcggcgcngcgctgtnctattagatatatcgtagtagtgaantgattngtagacgcngagcagctgagtancttcgctgtatgntgcataagcggatattgatanttagactatcacgngtagtggtntgtgatcatgctgctcgacgcgatatactatagacgcacaacgangtatttgctggatgnctactantgatgcatatgn

SEQ ID NO: 5094 - DNA, 2147 bp, Glycine max
  misc_feature (4)..(4): n is a, c, g, or t
  misc_feature (13)..(13): n is a, c, g, or t
  misc_feature (172)..(172): n is a, c, g, or t
  misc_feature (283)..(283): n is a, c, g, or t
  misc_feature (295)..(295): n is a, c, g, or t
  misc_feature (349)..(349): n is a, c, g, or t
  misc_feature (351)..(351): n is a, c, g, or t
  misc_feature (361)..(361): n is a, c, g, or t
  misc_feature (401)..(401): n is a, c, g, or t
  misc_feature (403)..(403): n is a, c, g, or t
  misc_feature (437)..(437): n is a, c, g, or t
  misc_feature (505)..(505): n is a, c, g, or t
  misc_feature (572)..(572): n is a, c, g, or t
  misc_feature (719)..(719): n is a, c, g, or t
  misc_feature (793)..(793): n is a, c, g, or t
  misc_feature (806)..(806): n is a, c, g, or t
  misc_feature (939)..(939): n is a, c, g, or t
  misc_feature (1197)..(1197): n is a, c, g, or t
  misc_feature (1214)..(1214): n is a, c, g, or t
  misc_feature (1257)..(1257): n is a, c, g, or t
  misc_feature (1325)..(1325): n is a, c, g, or t
  misc_feature (1359)..(1359): n is a, c, g, or t
  misc_feature (1371)..(1371): n is a, c, g, or t
  misc_feature (1389)..(1389): n is a, c, g, or t
  misc_feature (1511)..(1511): n is a, c, g, or t
  misc_feature (1618)..(1618): n is a, c, g, or t
  misc_feature (1635)..(1635): n is a, c, g, or t
  misc_feature (1664)..(1664): n is a, c, g, or t
  misc_feature (2054)..(2054): n is a, c, g, or t
  Probeset Number=SeqID_14873
gctncctgcgcgntccttctaagtacgctgcccggattccttggctatctccgagccgttgctgacgttcatcttaacttaagcaatgtagtcggtgtaccattctgttcgagcatgggactgtaatagatgtggactactgtgacatgctacctcccgcctgctcctctgncacccggccatccggctttcgaagtcttacgacgcggcgggtcgtctcgttccgtatctcggtatctgtagcattgacttatcgcgctacgtgtagtacatcactttgccnagtttatgactngactatgcacgatcggtagctgtacctgtcgcgcatcaccatcgttcgcatgcnantcgcgcctgnggatcatcatatctcgtcagcctcagacgctgcgccgtcntngaattacgctggtctgtgccacacatccactctntggctcctgcccatcacgccttctgttcagtccctctgtcgtgtgatcagtgctgtcgtgacgccatntgagcactatggagtcgttcagcgtgcgcgtgtgtgactattcgctgtctggtacaagcgtatatantctgctgtacatgcgtcacatctctatgatctagtgcgcgtctcgattgcgcgcgcacgccaatacgcgtatataatatatgtcatcgatggcgctcagtacgtgatatagaccgtggcgaggcttgcaagcggctggacgaatatnttgtatatggatacgacgctcgtcgcgcatcacggctgaatctgcgtgctcgcgcgtctgttactctctgctgnccttatcattatntagtcgcgcgtctctcgcctctgacacccggccgcgtcagtgcgcacttccctccgtgcgctttgtgagtcgatcctctctcgtagctcgcgcctgtgcgcactttacgttcacacctcagtctctctcacgncgacatgccattcagtctcgcggcccgatgtcttcgatcgctcgcagctgtactgtctcttctctgtcgttgtcgtcgtcgtcggcgtgtactcatcctggtcgctactgtatttcattcagcatctcgcagtccgcgctcgcgctgcattattcttcggctcttcaccttcttctccgcgcattactcgcgttgtgcggtgcatcgtgcgcgtgagagtgctctcagtggacgcgattatctgatcagtgacgtgtntcgcgcggtgcggcacnctccattatctcagccgcagactctcgtgtgtcccgtccccgncgcgtattctcgcatcgtcgcgcacgccaccacgtcggcgtcacgccgtcttcatgtcttgctcatcntgcgttattagatgttgttcgagtccgcgcagtngagcgtggccgntcctctcgcgaggccgtncggtcagtgtcatatataaatagtttgatgtctatgtgagtcggtggatgttatgttgagctcgtgcgagtgcgcatgacatactgacttcgatatgcgcggtgtctgctctgccatacttnatcgtggcggccgctggggcgcgagtgcgcagcgtattcagtgtgagtgtgttcgcttctcgaggcggcgttcgcgcgccgtcctgcatcaatctgtgtgtgctatnttcttgtctagtttgtnatgacatgtgcatgctttattcctgtcgncgtgtccactgatgggcttcgcgtcgtccggacatagtatgacggtgcggtgttgagtcggcgtttaccgtatatgttatttattagtcgtcgctgttctctcatccactctagcatcacttattccgatagcagcggctgcggcggtcagacatacccgccgccgcgcagctaacgttactatcgacgcgctcacaactgtcgtccgccgtactcgagttagagcatccagcgcgctttgtgcgcgggcgtcgttcatcaggtgaataaatgccgcggctgcatcgcaatcatttctcgacttatcctcttgttgtcggggagcaatcatcgcggttccttttgtccttcgtgtgcgtgggtgtgttcctgcggtcgctcgtggagggnccgcgcgaccgtgcgcgtaggctgaccttcgcgcacctccgcctcctgcagctcactcactcgcagcgtcgctgcctctatctctcgctgccc

SEQ ID NO: 5095 - DNA, 286 bp, Glycine max
  Peptide Sequence Number=SeqID_6993
  Probeset Number=SeqID_14874
ttcctccaagcacgtcaaaaatctcgagaaggtttgtggggacttggttcgtggtgcaaaggataagatgctcatggttaagggacctgtcatgatgcccactatagttcttcaaatcactaccatgaagtcctcttgtggtgaatgtgccatcacatgggacagatttgaacttcttgtgcacaatagggtgatagacctctacagtctcccagatgtggttaagcagattacctctatcacgattgaacctggtgtggaggatgaggtgaccatagcagatgct

SEQ ID NO: 5096 - DNA, 477 bp, Glycine max
  Peptide Sequence Number=SeqID_6994
  Probeset Number=SeqID_14875
gattagttcgaagttgtactatttaaaatactttcatttccttttctacccaagtttcttatttctcccttccttttccaccacatacaaccttctttctactttttctttctctttctacatctcttttcctcccaccctatatactgcaaaatgggaggaattatcacatgatctgggaccatcatgtatctatagttccgattaatctctaggtgacatttaatcaagttttattatctcttcttggtaaattgaaaaaactcgagtacctatcaggttaagactatggatacgtactaaagatgactaagaccatgagacatacttggccaacatgggtcctcaagagggttttcctcaacctattatcatcgtgctccgtcaccctcatctgctgcctcatgatctccgcggcggtcatgggccgccgcggcctaaacggcggcacagtgcgcgacagagggctgccgggtg

SEQ ID NO: 5097 - DNA, 573 bp, Glycine max
  misc_feature (205)..(205): n is a, c, g, or t
  misc_feature (234)..(234): n is a, c, g, or t
  misc_feature (444)..(444): n is a, c, g, or t
  misc_feature (492)..(492): n is a, c, g, or t
  misc_feature (547)..(547): n is a, c, g, or t
  misc_feature (561)..(561): n is a, c, g, or t
  Peptide Sequence Number=SeqID_6995
  Probeset Number=SeqID_14876
tcagctacgtagggcccccccccaagaaattatcgaaaatcaaaaatacgaaatcaaacttctcactcaaactcttcatgatagagaaactcaagaaacaagagcgacaccttcaatctattctccacacactcattttactgaagaaggaccaggaactccatcattgggctccagagacacatatgaacataatcaagctttngataaactagctcatgattatcaatcttngtctgcaagatataaagaatcacaagaaatcatcaatagtttgagaaatgatagagacatgagagatcaagatgtttatatcatagatgaaaagtttgaaagaataatgaaagattctgaatccatcaaaaacgcaaaagaaagtatggagagagaaagaaattcactttacaaatatgcagaagaattaaattcaaaaataagaacttngactgaagaacatctgagccttcaaaaagcgtatgatgagatccaatngagaaacatgtctgatcaaactaaacttttccaagatatcgatgcaaaaaatctngaaatcagacaatngaatgcagcatt

SEQ ID NO: 5098 - DNA, 436 bp, Glycine max
  Probeset Number=SeqID_14877
gctcgtgctggaactcatcaaccctgagcttcgtgaaaacgcgcttctcgaactctccaagaagagggagctatttcaagatcttgctccatggctatgaaattcttttgggacaatagcttgactttagcttgaggtagttccagtataccctgttctttcaccaccaaatcttactcctggacaatcaaatcgagtgtgcaatgctcttgctcttcttcagtgtgtatcatctaaccctggatacaaggaagctattcctcgatgctcatatacctttatttctttatccctgtctttatacaacaagcagtcaagaacaattgagtacttgaaggtaacccagcatgggggtattgatgcatttgccaaacgttatggatacaatggttcgagttgccttcgtcgtacagatgtgatagggctttgcttgcac

SEQ ID NO: 5099 - DNA, 1381 bp, Glycine max
  misc_feature (223)..(223): n is a, c, g, or t
  misc_feature (427)..(427): n is a, c, g, or t
  misc_feature (595)..(595): n is a, c, g, or t
  misc_feature (1248)..(1248): n is a, c, g, or t
  misc_feature (1251)..(1251): n is a, c, g, or t
  Peptide Sequence Number=SeqID_6996
  Probeset Number=SeqID_14878
gatggcccccccccatacggaacatcggatttcttcgtcccgtttctttccccctcccacccccgcccggaatattcggtacgtttctccgacgcgttgcgcgcggcgtctactagtttactagtaggaattcccctcgcggactagcatggtagtattatgagatgctgcacgtcagtacccgcccaccacccaccttcactcttcgtagaccttagcagtnattggcccagatttaacgcgccccacttcatgggccgcagcgcgattatcaagattatagtatacgtatgtatcactaggtacctccgcagagcgaattatatatactctatttcgcgcccccgtctttcaattagatcagtcgcaccataatatttaagtggtctaagcgcccggttgatagatgcccgcgcgcggcgccctnccctccccgcaaaaataaccacagatcagggtgaacaatgcacaggcaggatttattctacatatttttccgccgccccacaagtgtatatgataacttggctgttaataaaccttgtattgcaagaaattctcaccttctatagttgtccgcacgctctttttaatnttgggaattataggaattttgtgggacggcccgctataaaaataggccgtggtgtggtaaaattatatatacccgcgctgaatgttccgcgaaacatcggcctcagcgttatcacgggcggacatataaatataatagcgtatggtggtgataagtaagccaatgttgataacttatatgtgttgagcgaccggcacgaaaataaaaatataaagggtgggtgtgcttggccctgcaatttgttttcagcgacaccctatgcacaatcttttaatgttttttgtagacataacaagcatgtgacgcgccatattattccaataataagatatgcgactgcggtcccctctgtacccgtttataattcgccagaggtgtgcggtgcggggtcgcgtgtataaatataaccccccgtgaaataaaaagttgcgctggttatataaatcatgtattatatacacgaaaggcctccgcgaccggaaataataaaattatatttatttataacatgcatggtacccttcttccttatgcgccagataataatatgtgcggtgtggtggggtgcgttgcgataatgacagaacaaatagcgcgcggctgtgtgtagcgaagccgctatatataatgcttgagatatttatttactcccngcntggtgcgttatattagtaaaatcatgaatattggtgtcgcggctctggtgcccgcgaataagtataattctatgctagtatacggcacacctatagaaaccccgacacagtgcagtcgcacgcgcgcgca

SEQ ID NO: 5100 - DNA, 978 bp, Glycine max
  misc_feature (4)..(4): n is a, c, g, or t
  misc_feature (14)..(14): n is a, c, g, or t
  misc_feature (17)..(17): n is a, c, g, or t
  misc_feature (24)..(24): n is a, c, g, or t
  misc_feature (26)..(26): n is a, c, g, or t
  misc_feature (29)..(30): n is a, c, g, or t
  misc_feature (33)..(33): n is a, c, g, or t
  misc_feature (59)..(59): n is a, c, g, or t
  misc_feature (76)..(76): n is a, c, g, or t
  misc_feature (80)..(80): n is a, c, g, or t
  misc_feature (84)..(85): n is a, c, g, or t
  misc_feature (90)..(90): n is a, c, g, or t
  misc_feature (97)..(97): n is a, c, g, or t
  misc_feature (104)..(104): n is a, c, g, or t
  misc_feature (107)..(107): n is a, c, g, or t
  misc_feature (109)..(109): n is a, c, g, or t
  misc_feature (112)..(112): n is a, c, g, or t
  misc_feature (116)..(116): n is a, c, g, or t
  misc_feature (129)..(129): n is a, c, g, or t
  misc_feature (138)..(138): n is a, c, g, or t
  misc_feature (141)..(142): n is a, c, g, or t
  misc_feature (146)..(146): n is a, c, g, or t
  misc_feature (156)..(156): n is a, c, g, or t
  misc_feature (159)..(159): n is a, c, g, or t
  misc_feature (161)..(161): n is a, c, g, or t
  misc_feature (163)..(163): n is a, c, g, or t
  misc_feature (168)..(168): n is a, c, g, or t
  misc_feature (175)..(175): n is a, c, g, or t
  misc_feature (177)..(177): n is a, c, g, or t
  misc_feature (180)..(180): n is a, c, g, or t
  misc_feature (189)..(189): n is a, c, g, or t
  misc_feature (191)..(191): n is a, c, g, or t
  misc_feature (194)..(194): n is a, c, g, or t
  misc_feature (200)..(200): n is a, c, g, or t
  misc_feature (205)..(205): n is a, c, g, or t
  misc_feature (212)..(212): n is a, c, g, or t
  misc_feature (216)..(218): n is a, c, g, or t
  misc_feature (230)..(230): n is a, c, g, or t
  misc_feature (233)..(234): n is a, c, g, or t
  misc_feature (237)..(237): n is a, c, g, or t
  misc_feature (239)..(241): n is a, c, g, or t
  misc_feature (243)..(243): n is a, c, g, or t
  misc_feature (246)..(246): n is a, c, g, or t
  misc_feature (253)..(253): n is a, c, g, or t
  misc_feature (260)..(260): n is a, c, g, or t
  misc_feature (263)..(263): n is a, c, g, or t
  misc_feature (275)..(275): n is a, c, g, or t
  misc_feature (278)..(278): n is a, c, g, or t
  misc_feature (284)..(285): n is a, c, g, or t
  misc_feature (287)..(287): n is a, c, g, or t
  misc_feature (298)..(298): n is a, c, g, or t
  misc_feature (300)..(300): n is a, c, g, or t
  misc_feature (312)..(312): n is a, c, g, or t
  misc_feature (314)..(314): n is a, c, g, or t
  misc_feature (321)..(321): n is a, c, g, or t
  misc_feature (329)..(329): n is a, c, g, or t
  misc_feature (338)..(338): n is a, c, g, or t
  misc_feature (343)..(343): n is a, c, g, or t
  misc_feature (357)..(357): n is a, c, g, or t
  misc_feature (359)..(359): n is a, c, g, or t
  misc_feature (364)..(364): n is a, c, g, or t
  misc_feature (371)..(371): n is a, c, g, or t
  misc_feature (376)..(376): n is a, c, g, or t
  misc_feature (387)..(387): n is a, c, g, or t
  misc_feature (392)..(393): n is a, c, g, or t
  misc_feature (395)..(395): n is a, c, g, or t
  misc_feature (402)..(402): n is a, c, g, or t
  misc_feature (409)..(409): n is a, c, g, or t
  misc_feature (423)..(423): n is a, c, g, or t
  misc_feature (429)..(431): n is a, c, g, or t
  misc_feature (442)..(442): n is a, c, g, or t
  misc_feature (451)..(451): n is a, c, g, or t
  misc_feature (454)..(454): n is a, c, g, or t
  misc_feature (460)..(460): n is a, c, g, or t
  misc_feature (462)..(462): n is a, c, g, or t
  misc_feature (470)..(470): n is a, c, g, or t
  misc_feature (494)..(494): n is a, c, g, or t
  misc_feature (499)..(499): n is a, c, g, or t
  misc_feature (505)..(505): n is a, c, g, or t
  misc_feature (560)..(560): n is a, c, g, or t
  misc_feature (582)..(582): n is a, c, g, or t
  misc_feature (586)..(586): n is a, c, g, or t
  misc_feature (596)..(596): n is a, c, g, or t
  misc_feature (606)..(606): n is a, c, g, or t
  misc_feature (609)..(609): n is a, c, g, or t
  misc_feature (619)..(619): n is a, c, g, or t
  misc_feature (664)..(664): n is a, c, g, or t
  misc_feature (683)..(683): n is a, c, g, or t
  misc_feature (699)..(699): n is a, c, g, or t
  misc_feature (705)..(705): n is a, c, g, or t
  misc_feature (707)..(708): n is a, c, g, or t
  misc_feature (728)..(728): n is a, c, g, or t
  misc_feature (742)..(742): n is a, c, g, or t
  misc_feature (760)..(760): n is a, c, g, or t
  misc_feature (763)..(763): n is a, c, g, or t
  misc_feature (776)..(776): n is a, c, g, or t
  misc_feature (779)..(779): n is a, c, g, or t
  misc_feature (785)..(785): n is a, c, g, or t
  misc_feature (794)..(794): n is a, c, g, or t
  misc_feature (812)..(812): n is a, c, g, or t
  misc_feature (814)..(814): n is a, c, g, or t
  misc_feature (826)..(826): n is a, c, g, or t
  misc_feature (829)..(830): n is a, c, g, or t
  misc_feature (847)..(847): n is a, c, g, or t
  misc_feature (854)..(854): n is a, c, g, or t
  misc_feature (859)..(859): n is a, c, g, or t
  misc_feature (885)..(885): n is a, c, g, or t
  misc_feature (887)..(887): n is a, c, g, or t
  misc_feature (902)..(903): n is a, c, g, or t
  misc_feature (905)..(906): n is a, c, g, or t
  misc_feature (919)..(919): n is a, c, g, or t
  misc_feature (927)..(927): n is a, c, g, or t
  misc_feature (930)..(930): n is a, c, g, or t
  misc_feature (932)..(933): n is a, c, g, or t
  misc_feature (939)..(939): n is a, c, g, or t
  misc_feature (944)..(945): n is a, c, g, or t
  misc_feature (948)..(948): n is a, c, g, or t
  misc_feature (950)..(950): n is a, c, g, or t
  misc_feature (963)..(963): n is a, c, g, or t
  misc_feature (973)..(973): n is a, c, g, or t
  misc_feature (975)..(976): n is a, c, g, or t
  Probeset Number=SeqID_14879
cccntatacgtatnatnacatatnanatnntanagatattaaatatacatacataaaangtataaaaattacaggngatnctanntatancgtaaantatatangantnatncaancagtaaataattnaaatattanagnntacnataccgctangtncncnacctnatacaangnaantgcattcananaanataagntttgnaataaangtannncaaacatcttanaannctnannngnacnaataagnagcaacntgngaatacttaggngtnatcacnntncaagataaganancttgtatcgatncnaaatcantggtctcngactacagnagagngaacaatgggaggncnactantctatgnaggtntgagagagatnaaagnntnagttaantcatatngtgaaacgatcccncgtaannnctgaatacatncagaacatntancatgtntntggatggntcggaggtccaaacatgcacaagnggttntccctnagaatcagcataaaccaaggcagcatatgtagaaaccggcaatccattgttcatnggaaatgattctgacagtatcnatanacatgatttnaacaactgtnggnaccgtaacangccataatccatgatattccaagtgatagatgtccatgtgtgtgnatatcttaaaaggtgcagngatctccattaatgcnatattntnnctctttacgacttcataggntgcagtcgaagatntccataaatacttgttcntcnaacatgttggagntgnaggagnttgcatatntttataatgtggatatcncntgtaaaatattnacnnaggccctttgtaaccancccggcngtagntgcaagcacacccctttgttcctatnanatgatagttttgtanntnntgtcttaagattngtattagnccnannctcatnatagnngcnanaacaaaaaaaaanaatcagcagncnnga

SEQ ID NO: 5101 - DNA, 1414 bp, Glycine max
  misc_feature (27)..(27): n is a, c, g, or t
  misc_feature (109)..(109): n is a, c, g, or t
  misc_feature (171)..(171): n is a, c, g, or t
  misc_feature (204)..(204): n is a, c, g, or t
  misc_feature (301)..(301): n is a, c, g, or t
  misc_feature (529)..(529): n is a, c, g, or t
  misc_feature (561)..(561): n is a, c, g, or t
  misc_feature (1030)..(1030): n is a, c, g, or t
  misc_feature (1086)..(1086): n is a, c, g, or t
  misc_feature (1325)..(1325): n is a, c, g, or t
  misc_feature (1409)..(1409): n is a, c, g, or t
  misc_feature (1414)..(1414): n is a, c, g, or t
  Peptide Sequence Number=SeqID_7013
  Probeset Number=SeqID_14880
gaaatgtaggcgtgggtaggggagtantggagattttcttgtaccctcacgtcacaatttatatatagccggttacgcgctcactctcaattatagacatttttttttntattcttccgcccccgctccccagtgcgagcgcctatgcccaccctttctaatatagagctntcggttcttcatgccagtgtggtgtgggtgtgncccgcagggtgctgcggaagagatgttttctctattgaggatgggatatatccttgagcgcgcgctccctcagagtgcgacgaaaggaaggtgatgngtaggatagaagttaggtgctgaatgaccccacaccctggtcctcctggatctgcctctcactcctccgatcagaggtggtggttggtagggcgcaggcttatgatctctctccctcttaggatagtgaatagttcgtggttttgtggcgtctgcccgcagctattactcgacggctgatagggcgatgtaagtgagagaggtgtatctgtggtgagtggatcgcgtnatgttatgttgcatcgcagatatcgcgcgcgngttgtaggtggcgcggcgctgggctgtgtatttcgcgcttcgctgctgtacacttgagccggcgagtgtgtgatcctgttcaccgctctgtctgcctaccacccccactaagtggttctagactcagtcgagaagagacagacagacaaatgatgtcttgtcacgctgtaggtgatacaagaaatcttgtgtacccgtcgagcgattctgagaacaacggatgtccccagtgtggacatacacacctctgtatattgtgtgtcgtcgacacgctctggcctcccagctcatcgctgtggtgtggttgttcgtatctgcctgccccggcatcctacgcggaagaagcagcacgcacggtgccgcgttgagtatagtagcgacgagcgcacgcgccgccgactggagagctggcgaggaggcgcgccatcatggcggtgttacgaccgcgctgcgcccgcatatgcgagtntactgtgacgcatctatggtgtgtaggatgagagcgctgccgtcagagcttctgtngatgaatactatcaagagatgagagaacgatgagatgagtgatacgacgcatgaaatcatcgcgagtcagtcacctagatgctactctatagtagcataagctgcgtctcgcctctcgtgttgagctacgtcggcgcgatgcaccgtgcgcgtgaaatgtataggtgtgtatatctcttctgtcatcgtacgtcttcgcgatgttgtcctcgactgacgcattgtgtgagtccgcgcgngcactcacgcgccacacgctcgtcgttccacaactactcatatcatgtctcacgtttctcatacaagtggcacatcgtcacctncccgn

SEQ ID NO: 5102 - DNA, 378 bp, Glycine max
  Probeset Number=SeqID_14881
ctcaatccaattggcacctgcaacacatttgtcgttttgttactatctggaaacttcggttcggcatacatggggtgggtctaacaagctcctcccggaaactccaagaacggtgagaagatcttcaagaccaagggcgctcagggccacaccgtaggacaaaggtgcccgacacaaacaaagacccaatctgactggtttgcttggaaggcaatcttgcacaactcctggatatagctattctactgctaacaaaaacatggctgctatttgagaggaaaagaccttgtctgagttcttgctcaaccccacaaagtgtatttcagggacaaagatggtgttttcctgacttaacaaacctcacgaacgtgcagatct

SEQ ID NO: 5103 - DNA, 292 bp, Glycine max
  Peptide Sequence Number=SeqID_7014
  Probeset Number=SeqID_14882
cttcatcctctaagatagatgcagagtcttctgaatatgcagagatattagagtttgatgctatgtaagaaccaccatcaattttacatgtcgaagttttagattttgatggtccatttgacaaggatgtttcacttggacatgctgagatcaattttctaaaacacacatcaactgagttggcagatatgtgggtcatgcttgaaggaaagcttgcccaatcttctaagtcaaagttgcacttgagaattttcttggataacaataatggagttgaaacaatcaaggaata

SEQ ID NO: 5104 - DNA, 1611 bp, Glycine max
  misc_feature (1)..(1): n is a, c, g, or t
  misc_feature (110)..(110): n is a, c, g, or t
  misc_feature (162)..(162): n is a, c, g, or t
  misc_feature (269)..(269): n is a, c, g, or t
  misc_feature (616)..(616): n is a, c, g, or t
  misc_feature (631)..(631): n is a, c, g, or t
  misc_feature (683)..(683): n is a, c, g, or t
  misc_feature (883)..(883): n is a, c, g, or t
  misc_feature (942)..(942): n is a, c, g, or t
  misc_feature (959)..(959): n is a, c, g, or t
  misc_feature (1065)..(1065): n is a, c, g, or t
  misc_feature (1075)..(1075): n is a, c, g, or t
  misc_feature (1078)..(1078): n is a, c, g, or t
  misc_feature (1147)..(1147): n is a, c, g, or t
  misc_feature (1150)..(1150): n is a, c, g, or t
  misc_feature (1156)..(1156): n is a, c, g, or t
  misc_feature (1182)..(1182): n is a, c, g, or t
  misc_feature (1217)..(1217): n is a, c, g, or t
  misc_feature (1225)..(1225): n is a, c, g, or t
  misc_feature (1236)..(1236): n is a, c, g, or t
  misc_feature (1251)..(1251): n is a, c, g, or t
  misc_feature (1269)..(1269): n is a, c, g, or t
  misc_feature (1277)..(1277): n is a, c, g, or t
  misc_feature (1295)..(1295): n is a, c, g, or t
  misc_feature (1335)..(1335): n is a, c, g, or t
  misc_feature (1368)..(1368): n is a, c, g, or t
  misc_feature (1396)..(1396): n is a, c, g, or t
  misc_feature (1455)..(1455): n is a, c, g, or t
  misc_feature (1494)..(1494): n is a, c, g, or t
  misc_feature (1502)..(1502): n is a, c, g, or t
  misc_feature (1522)..(1522): n is a, c, g, or t
  misc_feature (1527)..(1527): n is a, c, g, or t
  misc_feature (1542)..(1543): n is a, c, g, or t
  misc_feature (1552)..(1552): n is a, c, g, or t
  misc_feature (1563)..(1563): n is a, c, g, or t
  misc_feature (1572)..(1573): n is a, c, g, or t
  misc_feature (1575)..(1590): n is a, c, g, or t
  misc_feature (1599)..(1599): n is a, c, g, or t
  Peptide Sequence Number=SeqID_7015
  Probeset Number=SeqID_14883
ncatctatgctatcgtctatgcagctgtgatgcatgtgtacatagatcatagcatgacgtacatatgcatccgccgtcgcatacagtgtcgatatcgtatgaactgatantgtcgtgagtttttgttgtagagtgagggagtggtgagatgtatgtggagcnttgtatagtggatgtgagtgcgttgtagtgggtcgcacgcggcaggcggcgtgtgtgcaacagcggtcgccacgtactatcacagagagaacagatgaatgtcgagngagagagaggagcagagacgagaagcgcgagtactaccaacacatatagcacacgagtatacagcagcgatagtggagcagaggagtgtggatgataaagaggatagagagacgtgagtgctgcgcatgtccagacaagagaatgaggatatacaatgagacagacacatgagagtagagaggatgaggtgatagagagagcgatcgagactagtggatgatgtagctaatatatagctctgttgtacgagacatacatcacgacgtgtcaagaggcgactgtgcgatcggattactatatatattatacagtcgtactcacgcgatccggctcgctctccacgctncacacactcgagtanagagcatacggtgctgggtgtgggccccgcgtgtgacaaagcagcttactgntcaggcgtggatacacgcgatcatccgtcgcttcagtatatgtggaatagagtgaccatgacaaggcagacgcgcgcgattttaagtatgattgtagatcatccgattaatctatagatcattatctatacattacatatcaatattatagcactatgatacgtatatcacagtagtcggcgcgtatgtatatgatatcnacacatgtccatgtgtttgacccatgcgtatatatgcacggagcgaacgacacaacacngggtgaagatcaacgtncgacaggacatagtgtgtagacactcgaggagtactcggcgcgcggtagcggccggcaggcgggatgggctggtggcgcgcgcgcgggcgcggcgagatgttgcgngcgcacgagnacngagtcgcagggtcgcaggtgcggggagagttgagagagggagcgaggagggaggcgcgatgtaagcaangancatacnatcacatctcgtgcaccatcgccgcntcacgagagacacatcgctccagctggcgcgtttnctcgcacntcactcgcgcntgtgatgggtgcggncagctggatgcgccgcgncacgaggngcgagctgctagagcggngggcgacagaggtacaagaagagagagtgagcgagtgatnctgagcgagcagtctacgaaatagtgagattanagaactgatatatattatgccatctcantcgccctccctatccagcaccgccatcacaccgtatacaccctcccactcacacaccancgaggacgagctcgcgagaacgcgcacgggcgagcgtcncagcgatnaacgtcgccaacagacaagngagcncagatgcgacgatcnnaaacagtgnagcaaccaagntaacaaagnnannnnnnnnnnnnnnnnggggggganaggggaaacccc

SEQ ID NO: 5105 - DNA, 574 bp, Glycine max
  Probeset Number=SeqID_14884
gttttccgtagggcctcgtgaaaccaccgcattggtatcaggcacaaccctgatgatgaccctgtaggattagcttcccatcgtgttcaaagaagattggtcccagtggctgtagggccatgattggtccagttgcaggtggaaggaaaactgagaagcctcctttccaggctggaaatgcttacccccagttcaaaatgaaaaggaaatgctggccccagggtcgtggtggtgctattaaccctgtttagcctccccccggaggaagtaatccccagcatattggtcacgcaaggactgtcaggcgtgaagctcctcctggacaaaaggttggtttcattgctgctaagagggctggttgttttaaaggaccaacttctgccactgcttccaaggcttataaggcgtaaagaaaacgttggtaggggtattaaaattgaatgccaggttttcaggtttggttttcctttttctgaaaagttggttggtaaactaattgggcaccttcttcagaaccattttcttcccaacatatggagttttcaatagacggtcttctataaaaaaaaaaaaa

SEQ ID NO: 5106 - DNA, 671 bp, Glycine max
  Peptide Sequence Number=SeqID_7016
  Probeset Number=SeqID_14885
tcagctacgtaggccccccccccacaaaagtcaactcacaaaagataagtagactcgtaaattcgtaagagttaacgagttaactcgataatttgataaccatgtgtgtacatataatcaacattaccatatgatatatataagagggaggtaaggaaaaaaaaagagagagatggaggagtttactttccaatacatatgtaaagttaactagtttttttttattttcttatcaaagccctaatttgtacttctataaagagttaatgtcaaaacattcaagggaagaaaattaaatttatgaaaataaaacaaaccatgtatatccttcaaagtatttttctcctaattaaggattcttatagattcatttcattataaatttcagtcgtctcactttttactaaaatcccaacttcaagatatatagaggaaatcttgatacaagttataaacatgtgtaaatcctctcttttttacataatatatatcattttgccttaaaaaaaaaagaagaggaaatcttgctattaattaatgcctaatatggcctttaggcacttcccagaataaaataaataaattaatgcctaaaaatattcagtaaaatatactttgatttagatgtccaaattaaacagccaattgagactctagagacagatagcatt

SEQ ID NO: 5107 - DNA, 768 bp, Glycine max
  misc_feature (7)..(8): n is a, c, g, or t
  misc_feature (13)..(13): n is a, c, g, or t
  misc_feature (24)..(25): n is a, c, g, or t
  misc_feature (27)..(27): n is a, c, g, or t
  misc_feature (32)..(32): n is a, c, g, or t
  misc_feature (34)..(34): n is a, c, g, or t
  misc_feature (39)..(39): n is a, c, g, or t
  misc_feature (41)..(41): n is a, c, g, or t
  misc_feature (43)..(44): n is a, c, g, or t
  misc_feature (53)..(55): n is a, c, g, or t
  misc_feature (60)..(60): n is a, c, g, or t
  misc_feature (67)..(67): n is a, c, g, or t
  misc_feature (74)..(74): n is a, c, g, or t
  misc_feature (77)..(77): n is a, c, g, or t
  misc_feature (84)..(84): n is a, c, g, or t
  misc_feature (88)..(88): n is a, c, g, or t
  misc_feature (93)..(93): n is a, c, g, or t
  misc_feature (95)..(95): n is a, c, g, or t
  misc_feature (103)..(103): n is a, c, g, or t
  misc_feature (117)..(117): n is a, c, g, or t
  misc_feature (130)..(130): n is a, c, g, or t
  misc_feature (136)..(136): n is a, c, g, or t
  misc_feature (148)..(148): n is a, c, g, or t
  misc_feature (154)..(156): n is a, c, g, or t
  misc_feature (167)..(167): n is a, c, g, or t
  misc_feature (181)..(182): n is a, c, g, or t
  misc_feature (185)..(185): n is a, c, g, or t
  misc_feature (195)..(195): n is a, c, g, or t
  misc_feature (223)..(223): n is a, c, g, or t
  misc_feature (258)..(258): n is a, c, g, or t
  Probeset Number=SeqID_14886
aagaccnnccggncctttttttannanaaaancnccctnantnnttttcaatnnnggcanactctcnatggggnganaagcaancggnggaancnttccaagntctgtttttttgcncagcggggttgtnaagcanaaatggcgcgtnaaggannnccaggcgatgncgcctaaccttaanncgnacgcatcganactggcgactgaaggggcaagacgctcngaggctccgcgcgctcatcaagcaggctgacccgnaggtggtcgaggccgtcaagtgggcgaaaccatcgaactcgatgtccggggtcccggtttgggagcacgcggggatcatttgcacgggtgagcactacaaggataaggtcaagctgaccttcgcgaagggggcttcggtaccggacccgaccgggctattcaattcgagcctcgacggaaacgttcggcgggcgatcgacttcttcaaaggagtcgacttcgacgaagctgcgttcgtgacgctgattcaggcggcggtgaaggtcaacacctcgccgaagaagtaagtcgatggaagcggggacgtgtcgcaactgcggagcggccgtttcgtcgcgcttctgcccggagtgtgggcagagcaccgagatctcgattccgacgctggccggactgtttcacgaagtgttttcggccgcatggtcgctcgattctcgcttggcgaggacgattcgcgtgctggtgaccgagcccgggggcttgaccgtcgcctacctcgagggggggccc

SEQ ID NO: 5108 - DNA, 1459 bp, Glycine max
  misc_feature (71)..(71): n is a, c, g, or t
  misc_feature (169)..(169): n is a, c, g, or t
  misc_feature (188)..(188): n is a, c, g, or t
  misc_feature (201)..(201): n is a, c, g, or t
  misc_feature (214)..(214): n is a, c, g, or t
  misc_feature (257)..(257): n is a, c, g, or t
  misc_feature (312)..(312): n is a, c, g, or t
  misc_feature (726)..(726): n is a, c, g, or t
  misc_feature (818)..(818): n is a, c, g, or t
  misc_feature (930)..(930): n is a, c, g, or t
  misc_feature (1118)..(1118): n is a, c, g, or t
  misc_feature (1148)..(1148): n is a, c, g, or t
  misc_feature (1186)..(1186): n is a, c, g, or t
  misc_feature (1247)..(1247): n is a, c, g, or t
  misc_feature (1303)..(1303): n is a, c, g, or t
  misc_feature (1327)..(1327): n is a, c, g, or t
  misc_feature (1390)..(1390): n is a, c, g, or t
  misc_feature (1394)..(1394): n is a, c, g, or t
  misc_feature (1431)..(1431): n is a, c, g, or t
  misc_feature (1433)..(1434): n is a, c, g, or t
  misc_feature (1437)..(1439): n is a, c, g, or t
  Peptide Sequence Number=SeqID_7017
  Probeset Number=SeqID_14887
accgagtgtgtgtaccgacgttatgataaaagatgaggttgtcgtcgcactgttattattgtgtctatgtntcgcctaccagagtagttcgttgacagagagacgagcgcagatttgagagacgaatgatagcatgtcgcagtatattagaagcgctgtaagcacagcnatatgaagatagatacgangaccacagcccgnagtcgagcgtganattgacgcagtgaaccgatgtagacagttaagcgacgagtatnctacttaccgtatcacagcatatgtaatgcgaacgagtgttcttagaagatcaanacagcgtatcaaagttctcccgatcatacgggtgtggttgttgtgtgagtgggcgtgtcgcgttgtaatattccgagaccaccgagatgcaatcttagcacgaatatattaatatatatataatagaacagggagaggcgagatgtggtatgggagattgacttatatagtaatgatatagcagttaacacaacacattacgacaccgatgagatacggtgaggcgggtggtgcgccgtggatacacacccaacatgtttcatagatagtagatacgcttaccctctgaccaaacaataaacccccacagtcctgacgttagcgcgcgccgtttagatatgacctttgcccccaaaataatgaatatccataatacaaattcatatatcattcacattatacaacatcatagcncccccgatacgaatagtatcgcgaccggcagagtaagtggaatgaaaagagcgatgagaatagttcacgactcacttatgagacgctgtttntacccgcggttctatatattaccgcctttccttgtggcacgcgatgcgttgtctgtgcgcggcgggtctcgcgttcgacaacgagttgtggagatagtcacagtattattgncccggcgtgtcgcgtgcgctacaacccgccatgtatattacccctttatatatttgttataattctcgcgcgtgctccgtttgtccactctcccgtcccttcatattataacaccaagacacgctgaagagactatacgcacccggataacaacagataacaaacatacagtagtgaggcgaatgcanagacgcggagaccgcgtgtgtctttttatnccccaaatgctgttcatcactacgccatacagttcttncaccaaatcacagttatactcagattttcttgctaccgacgtacggtgttcggagcgtagnacaggtgggcaccgatatcccccagtgtattattgggcggacgaagaagagatcanttattcgtcacccaagcaagtagnaagcggggcgaggacacagcggagagccacatacagagggcgaaacaaataactttaccgatngttncgatcggataggtggtgtgggtgtggccgtcgcctgncnnccnnnccgcggggcgggtccgccac

SEQ ID NO: 5109 - DNA, 615 bp, Glycine max
  Probeset Number=SeqID_14888
attcttctctctctctgtaatggtctttgtgtcactcttcttatttctttggatgcttctcttctctctcgggtttcgagctccctctctctctctgttctctgaagaccgaaccaaatgaccttcagaggaagaagattcacctttctgtcttcacattttgccatacccaaatgcccccttctctctatgcggtgagttccaattcacaatgcgtttgtttcttcttgcttgtgtgttgctgcagtcttctctgcttcagacacctcctcacatgccacttggcgataatgcatatcttgtcgcgttggttcttgactgcacagatgcagtccacggcggcggtagccgctggagactgagatttcggcttgggaggtcttagattccgttaaagagaaacttgttttccagaatttaaaaacatgttgaattaaacgaaatttaaatcttggtcatggttaagtgtcaaggtaaaacgattttggttttcatattatgaatggtcaatgagtaatccaagatatactgtttaaaagttatgtaggaaatatatgcatttgtatataggtttgggtatcccttgtagcttaatttattatattttgtctttat

SEQ ID NO: 5110 - DNA, 1830 bp, Glycine max
  misc_feature (12)..(12): n is a, c, g, or t
  misc_feature (109)..(109): n is a, c, g, or t
  misc_feature (123)..(123): n is a, c, g, or t
  misc_feature (129)..(129): n is a, c, g, or t
  misc_feature (238)..(238): n is a, c, g, or t
  misc_feature (288)..(288): n is a, c, g, or t
  misc_feature (294)..(294): n is a, c, g, or t
  misc_feature (339)..(339): n is a, c, g, or t
  misc_feature (411)..(411): n is a, c, g, or t
  misc_feature (471)..(471): n is a, c, g, or t
  misc_feature (560)..(560): n is a, c, g, or t
  misc_feature (649)..(649): n is a, c, g, or t
  misc_feature (982)..(982): n is a, c, g, or t
  misc_feature (996)..(996): n is a, c, g, or t
  misc_feature (1263)..(1263): n is a, c, g, or t
  misc_feature (1271)..(1271): n is a, c, g, or t
  misc_feature (1286)..(1286): n is a, c, g, or t
  misc_feature (1326)..(1326): n is a, c, g, or t
  misc_feature (1439)..(1439): n is a, c, g, or t
  misc_feature (1464)..(1464): n is a, c, g, or t
  misc_feature (1471)..(1471): n is a, c, g, or t
  misc_feature (1494)..(1494): n is a, c, g, or t
  misc_feature (1552)..(1552): n is a, c, g, or t
  misc_feature (1578)..(1578): n is a, c, g, or t
  misc_feature (1748)..(1748): n is a, c, g, or t
  misc_feature (1758)..(1758): n is a, c, g, or t
  misc_feature (1806)..(1806): n is a, c, g, or t
  Peptide Sequence Number=SeqID_7018
  Probeset Number=SeqID_14889
aaccgcgcgtcngcgctgcgtcgcactctccactctatactacgcctcgctatctcgcgtactcgcgcgccgcatccctagatctatatgagactgacatcataataangagacagcagagtnagggcnccctgcccctcggcgcggcggacagtctgctatagttgatgtcgtattgtacggtacgtgccgctgtattctcgcgcccacccactaccgcgcctgcgtgtgaagggcngccacgtctggtgtgcgcgtcactactcatgtaataacatcacacatcgngatgtnatagttctgagtctctctgtatacgtcatcgcgcgcgcgacatcntccattgtatccgactcgcgtatcattaatgaactcgaagtaacgctgtccgtctctcactcctcctcatcncacgtctacatctcgtcttccacgaccacaacagacacgtgactctacatattctgatcnatatctgcagcggtatcatatgagctgaatagtcaacagagagagaagccggagagaacgacatagctgcatacaaacttcgacagcgngctacacctatgatgcacgattgaatagtgacgtgttaactacgtcaccgactgaatcgtagatacgacggtatcgcgtcgcacagcantgcgcgctatctgtctatggtatgtgtacataatgagtgtctgacacgctcctgccattgctgtagtgtcatatgactatgaagtactggtcactgcgagatattatgtagcgctggaagtggagtcgtactttgtgtctctaagtactgctcctctactcctatccaatgtctcgctatgatgtactatctgtgagttgttagagcgctgtcagcgatctcacgctacatcatcgtcatggtacattgcgagagatacagacgacatactgaggagatataggtgtcatctagagcactcggtaataactgtctcgttggacatatcctcanttcacatatacacngacttcgcgcgcaggacgcacatttcacggtatactgtatttcactagatctatatgcgtacacctacatgaaccgccagcatcgttatgacttactcacactcacatactctgtctacgagcgagatgatcgacgtagtctgtaagacacaacaggagaatactgctactaactgagacatatactagctgacgtgtacgactatacgcagcactctctgcggccctccacccgtcgcgatatcgatgatgctagtcgtgtgagangatacatnctgacgcacggcgcngtcagctaatcgatgacggcgcgcgcgatacgagagtagnatgcggactgaagtacttgcttatatcgatcgtagcatatgtgttgattgtgtattacgtgttctgtactcatacgcgacgctgagacgaatggttgataatatgacgtatgntgtgagtacgagagctgcgcgcgantatgggntatgctggagctaaccatggacncgcactctatgagacgtgtaactatattgtatatactgtatgtatacgtcatctgtgnatctctaatactcgtcgaagcagtantgagacgtcgtgctgtcgacctacagatacgttgataacgaatgcgattatgtcgctcagattgctgcatcgtgtctggtgcgtatatgtcgacggcagatcgtgtctctacatcaaaatgatagtggacgataataactaataatctacatatgacggtctgtctctgncgtgtcatcncaatgaatctcgcatacatcctcgtgatccgtcgtaactttacacatnacacacgcgtgcgataaatacgag

SEQ ID NO: 5111 - DNA, 1542 bp, Glycine max
  misc_feature (2)..(3): n is a, c, g, or t
  misc_feature (17)..(17): n is a, c, g, or t
  misc_feature (21)..(21): n is a, c, g, or t
  misc_feature (32)..(32): n is a, c, g, or t
  misc_feature (45)..(45): n is a, c, g, or t
  misc_feature (47)..(47): n is a, c, g, or t
  misc_feature (53)..(53): n is a, c, g, or t
  misc_feature (57)..(57): n is a, c, g, or t
  misc_feature (72)..(72): n is a, c, g, or t
  misc_feature (82)..(82): n is a, c, g, or t
  misc_feature (91)..(91): n is a, c, g, or t
  misc_feature (146)..(146): n is a, c, g, or t
  misc_feature (167)..(167): n is a, c, g, or t
  misc_feature (205)..(206): n is a, c, g, or t
  misc_feature (255)..(255): n is a, c, g, or t
  misc_feature (273)..(273): n is a, c, g, or t
  misc_feature (277)..(278): n is a, c, g, or t
  misc_feature (325)..(325): n is a, c, g, or t
  misc_feature (328)..(328): n is a, c, g, or t
  misc_feature (331)..(331): n is a, c, g, or t
  misc_feature (345)..(345): n is a, c, g, or t
  misc_feature (350)..(350): n is a, c, g, or t
  misc_feature (359)..(359): n is a, c, g, or t
  misc_feature (387)..(388): n is a, c, g, or t
  misc_feature (397)..(397): n is a, c, g, or t
  misc_feature (423)..(423): n is a, c, g, or t
  misc_feature (440)..(440): n is a, c, g, or t
  misc_feature (517)..(517): n is a, c, g, or t
  misc_feature (529)..(529): n is a, c, g, or t
  misc_feature (568)..(568): n is a, c, g, or t
  misc_feature (575)..(575): n is a, c, g, or t
  misc_feature (579)..(579): n is a, c, g, or t
  misc_feature (628)..(628): n is a, c, g, or t
  misc_feature (657)..(657): n is a, c, g, or t
  misc_feature (679)..(679): n is a, c, g, or t
  misc_feature (682)..(682): n is a, c, g, or t
  misc_feature (729)..(729): n is a, c, g, or t
  misc_feature (767)..(767): n is a, c, g, or t
  misc_feature (769)..(769): n is a, c, g, or t
  misc_feature (790)..(790): n is a, c, g, or t
  misc_feature (793)..(793): n is a, c, g, or t
  misc_feature (849)..(849): n is a, c, g, or t
  misc_feature (853)..(853): n is a, c, g, or t
  misc_feature (905)..(905): n is a, c, g, or t
  misc_feature (918)..(918): n is a, c, g, or t
  misc_feature (955)..(955): n is a, c, g, or t
  misc_feature (1184)..(1184): n is a, c, g, or t
  misc_feature (1319)..(1319): n is a, c, g, or t
  misc_feature (1353)..(1353): n is a, c, g, or t
  misc_feature (1415)..(1415): n is a, c, g, or t
  misc_feature (1467)..(1467): n is a, c, g, or t
  misc_feature (1473)..(1473): n is a, c, g, or t
  misc_feature (1475)..(1477): n is a, c, g, or t
  misc_feature (1479)..(1479): n is a, c, g, or t
  misc_feature (1482)..(1485): n is a, c, g, or t
  misc_feature (1487)..(1488): n is a, c, g, or t
  misc_feature (1490)..(1491): n is a, c, g, or t
  misc_feature (1493)..(1493): n is a, c, g, or t
  misc_feature (1510)..(1511): n is a, c, g, or t
  misc_feature (1513)..(1514): n is a, c, g, or t
  misc_feature (1517)..(1518): n is a, c, g, or t
  misc_feature (1522)..(1523): n is a, c, g, or t
  misc_feature (1542)..(1542): n is a, c, g, or t
  Probeset Number=SeqID_14890
tnntattcgtcatcatnagcngcacgagctcntcgccgcagacananccacgngatnacgagaaattgtgtngtgatcacangagtgtcgnagtcgcgagttgatgtttaacgtgcttcagtacgcaggagcgcggccccacactntgtagacgttactaaagcatncacacactcgcttgctgatacttgttgtctctccctgnntgatgatagtagtcttgttctatcctcacacgtgcgagacgatgtcgtnaagtgcttgtgtgctcgncgcnngtcggcgtgagatgcacgcggtcttgctgtaggtagtacatgcaccnccnagntcagagatggtatntaganccactcagnctgcgtgcagtatggcagtgcgcggagnngagatcganacatacatgatgacgccgcccactanatgatgtgcgcacacgncgtacagtgtgcaggaggaggcgcgtagaagcgcatagagggtgacggccagccgtccacgcagggccacccacatncacctccgctcncggtagcgtaggtgcgtcagatcgccggagccgcgctgnctggtgncgtngttgagtgggcgtgacgcgcggcggcatgcgagttctagtgtacgcgcnatctctttcttgtctcgacacacacatantctgtatgggttgtctgcgctncgnttgtgcagtccacacaggaggaacgcgcgcgccacgcattcgtattntgagttgtagtaaaggatgccatcaacaaatattacanancataaacccacacacacacanacnacaacacccaagaacataagggaagagagctgaagagcgtaggagagtaagatganagangagacgaagtaagccttagacacaaatacaacacacaatgactacatagagnacaactattaggnagactcgattacctagacaattggtctagctcggcgnctgtcaccgagacgagcgttgtgcgcgcagccataatgacattaccactaaccacacgaagagcaggaggaccattgaaggaggatggatgcacccaaaacatatattattccactcttcatataacataacaccacaccaacactatcatacccgccctccagacatgtgagaaagagacagatagaggtatgcacacagtaattgcaagagccatgcttaggcgggngccaaatcatgagtagtaggaagatgaggagaaggatgcatactacaagagaagcccggtcgcagacgcgctcgatagaatgatctggcacaagctctctcttactccgcaacagcgttaaacacgatcaacacnacaataacatccacttcgtatgcacacgctacgnggatatatgcgcaggtgtggcggggagagggggcgcgcccctttatgtgagagctgcgcganggagggggggggccgcggcgcgccgccacttcagtttcggcgagcgattatnggttcnannngngtnnnncnntnntnccggtgccccgcggggnngnnggnngggnngggggggggggggcgcccn

SEQ ID NO: 5112 - DNA, 703 bp, Glycine max
  Peptide Sequence Number=SeqID_7019
  Probeset Number=SeqID_14891
agtattagttggtcttctctctctctctaaaaaccctctgtcttctctctagcacatctcagatctgaatcgtgtttccggctctccaagccaccgtcggccagttttagatctaaatcttaaatccattcgttgagcttttggttttggttggtgctgattaaggagtctttgaacatgcatggatctttgtatctggtgtttttggacctggttcttccccaccgtttgtttggtaagatatccggttcgtctcgaaggttttggggctttggctccttatcatcagttcgtcgaaggcgtcaggtttaccgacctcttccatgagtcttctttggagatgtcaagtgctcgtggcttcttaagtggtatgttgtggtgacgtttggagcataataaagagtgtagccttgaactccattaataagtttgttctttgttgactttatccttcttctcttttttgtcccttccagttttaacattgttcagttattgtattgttggatctgttctgagtttgtttcatcctagctctaacgttttttcttttggttccgggaacatgtctgttgttcgccggctaaagtctccagggatggctctttcatccgctggcttagtctccggaagctatgtggcttgccggcttctgtgtcccaatcatgtattccatcaagttaatataatctctgtttcgatg

SEQ ID NO: 5113 - DNA, 730 bp, Glycine max
  misc_feature (3)..(3): n is a, c, g, or t
  misc_feature (34)..(34): n is a, c, g, or t
  misc_feature (66)..(66): n is a, c, g, or t
  Peptide Sequence Number=SeqID_7020
  Probeset Number=SeqID_14892
ggncgccttcggggcgcgcgggtcgacttcggcnccggcgtcggtcgcggtctgcccagtactgtnggagcaatggacaagcgccgcggcaccgccggcgcccgcggctagcaaaaagagcaaggcgcgcatggggcggttatgccctcttaaccccacgcggtaaagcgacgtcaccatagtttcaccgggtgaccccgttgcgcgggagcgggaaaacggggcctttctgcgcctgggacgggcttcttagctagctatcaaccccccacggtgatcccagtccgaccaagaaaatcgacaactgccctcgtagggcgtatacaaatacgtgtcacggtcgtgacattaccgtgaactttgcatgttcgctttggaccatttcggccatcaacgatggcagctcaacaccgtacggagagacatgcgccgcagccgcaaacacccgcacgctcacttctcgcccacccctcgccgcctccacctcgcgttggcctgcgctgcggcgtttctcaccgtggtctactcgtccacataccgggcgagcgccgacccttcgacgagcttctcgggcacgttggtcgatcgcgccgggcgagccccgctcgccggtgtggaggtcgcgctcgatgacggcgagttcaccaacaccgatgagcacggcaacttccacttcgcctccatcaagcctggcaagcacccggtcaaaatgtcgggcggcacgcttggg

SEQ ID NO: 5114 - DNA, 291 bp, Glycine max
  Probeset Number=SeqID_14893
tgcagctaacagatccagagagaaattatcactgcttttatcagttgtgtgcatgtgaaaggtacgagcccaagaagtaaaagataggacatccaagtcacttccactatctaaaacaaagaaaaatctatgagttaacaggtgaaagcaatgcccaagaatacctgaagactaggagggcaatggatattgaagacatgagctccaaagatcacgcgtaatattgctctttccgtaatcacgaatccatatgtctcgtcttatcagtgcttcaaaatgtggaaaacaaac

SEQ ID NO: 5115 - DNA, 1387 bp, Glycine max
  misc_feature (1)..(1): n is a, c, g, or t
  misc_feature (186)..(186): n is a, c, g, or t
  misc_feature (207)..(207): n is a, c, g, or t
  misc_feature (285)..(285): n is a, c, g, or t
  misc_feature (574)..(574): n is a, c, g, or t
  misc_feature (637)..(637): n is a, c, g, or t
  misc_feature (657)..(657): n is a, c, g, or t
  misc_feature (726)..(733): n is a, c, g, or t
  misc_feature (742)..(742): n is a, c, g, or t
  misc_feature (849)..(849): n is a, c, g, or t
  misc_feature (938)..(938): n is a, c, g, or t
  misc_feature (1201)..(1201): n is a, c, g, or t
  misc_feature (1203)..(1203): n is a, c, g, or t
  misc_feature (1325)..(1325): n is a, c, g, or t
  misc_feature (1328)..(1330): n is a, c, g, or t
  misc_feature (1339)..(1339): n is a, c, g, or t
  misc_feature (1368)..(1369): n is a, c, g, or t
  Peptide Sequence Number=SeqID_7021
  Probeset Number=SeqID_14894
ngtgtggtgtgcagtagtgagggagtctgtcgcaagactgaccactgcgatgtgtatgatacgttgtttggaggaagttagcagtggagtactccgcaagactccaggtccttcagtggtatagagacgagatgctcatgtttgcgtcatgccgcctcctggggtgcgctgacgtccagagaccanccacactgcaccggcgcacgncagtgatgcaatagtgtgtgataatagcggtgtctactgatcagctcatgtgtgtgtaggcacgttggtctcgtcagnggcggagagcgtgcggtgtgttagagtcatgtgttgtgactgtggtagatgccttagacgccccagggatcgtcaatgtcgatgacgaggtgcagcagcatgaacaccacaacaccaagacgcgactcacacaccgagactcgccgtcgacgtggcctcgaacactaggcgttggtgctgtgccacgcgccacgcactgacacagacgagaacgagagataaaggagaagggatatttcatagatttatattatctagccgtgggatgatgtcgtgataatctatggtnttgttgggttgtgttgtggtgggtgaggtgtataataatactgacacaaagctgagagagggnggtggggggcagacaattantttagcggtgatctggggcaggataagggagagcgcctccacgcagatacaggagttttgttattgtannnnnnnnaactaatanatatacaaccaaaccaggaccgccaaagcagagtctccccgtggtgttgagcgtccccgcgccgcacctccactcctcatatacctgatatatacagacgagacgcnagaactatcagacataaataggtgttaaattatcggtggttgtgttttgttaggcgccaggccgttggtggcatattgcgcagcagcgnggcgagcgggagattaattaacataactgcgcagcgcgcgtgattttagttattaatacaaggaaccggagatacaagggccagcatggacactaacaccctcccaaacagcagcgagctgcggggagtggttggtgtatgtatatcatataaactatttgcatacacatacaccgggtagtgcgagaaacaaccttcaagactagaggaattatatcttcgagagatgagtgcgcgaaggtgtattgtgatgtgcgggccancnccacctcgtcccggctgtgtggcggtggtgcgatttttcatattatggtggagagtgtagtaggaccggcccaggggctggcgtgtatctgcccctttgttccagagccgtatgtcacactnccnnnccgctgagncccgcaatatataagaggcggcggcagannggtgttcctcctctctcc

SEQ ID NO: 5116 - DNA, 1659 bp, Glycine max
  misc_feature (4)..(4): n is a, c, g, or t
  misc_feature (25)..(25): n is a, c, g, or t
  misc_feature (33)..(33): n is a, c, g, or t
  misc_feature (62)..(62): n is a, c, g, or t
  misc_feature (116)..(116): n is a, c, g, or t
  misc_feature (168)..(168): n is a, c, g, or t
  misc_feature (197)..(197): n is a, c, g, or t
  misc_feature (275)..(275): n is a, c, g, or t
  misc_feature (697)..(697): n is a, c, g, or t
  misc_feature (726)..(726): n is a, c, g, or t
  misc_feature (1487)..(1487): n is a, c, g, or t
  misc_feature (1554)..(1554): n is a, c, g, or t
  misc_feature (1587)..(1588): n is a, c, g, or t
  misc_feature (1649)..(1649): n is a, c, g, or t
  Probeset Number=SeqID_14895
tatnatggattcgacgtcgaagcantcatgganttaaccgtacagtgctacatgactacgtngcacagattcacagtgtgtgatactctatatcacatcgacgcgcatgcgacatnatctagcatctagccaagatagtgtgttgatgacgtactgtctgagcagttntatcagacatgtctggctattgctggtanagcagagcatacttatgctatcacgtcacgtcgccttacttcagtacaatgaacgtatgtcgaaacatgatacaaacntagcgcgcagatgtagactcactcgaagatactgaggctagacacattcggtagccgaagggtacgagatcacgtcgaacgatgtacacctgacgtatgcgatatgcgttagtatacgcaccgacggccacttcggtactcgtactcgagatgtatatatcagcaatacatatacgagacatagtgcatatgtcattcacggactcacaatcataacatgtagagcgtatcgggtacgtatggcacactgatccgacactcatcgaacactagatagtacagtcaatagcacaacggcgtgagtggcgcgcacatcagtcactcaccatcaacagtgtgataacaatcgtgcatcgcgtgcgtatacacggagcgatcactcgaactgcactcgtagctactaccactcacacgacacgctntgcgctcgtagcgcgccgcgctgtcatgnaagcagagactgagtcatgtacgacagcatacacagtatcgtgctcctcatcggctctcgtcacaacatcactgcagcataggccacctggcgtcagagacacgccaggcagaataagcagtcgcctaagcaaccagcatacaagagacgagagtgggcaagtcacagacggtgtcgggcggtccgatatcatgtcctccgctacctcatctgcgtgcatatctcgaacgacgtgatgactctctccgacatataccacgttctgagtgtctctcatgctaacgctcaccgcagcgcaacttaacacgaagatcgatatcacggcaccgccatgtagagtgtgacgcataacattcaccacatctcagtccacagcgcgcgtcgcacgacgacacaagaataatctctacgttcaacttcgtcggatcgcactacatatagagctcgtcatcgactacagcgacacgaacagcactcgtctcaatcggtcatactgttatatcagtcattatatcagcatcgcgcgctcgacgataacgcagatgtagataatcattttcaccgtggggtgcgcgcgctgtgttctatgccatagtcatcgtactttcgtcgtcactacgtcacggacatctcgcctagactctctaagaaacggacgacgagaagatagataacatagcacaccgacacagcgcgcagcgactatactataatacattactactcatcgcggacgtcaccctcgacacgccccgcagcgncgtctcgtgagcgcggttggttgtacgagtcaggcacacgcgtcctcgcactctactcgtatcttgngacctctcctgtatctctgttagggctattgannagatgcggatgatatatagcggcaccgcgatcacacaccgcaccaagacatccgagtacgngcggcgggag

SEQ ID NO: 5117 - DNA, 430 bp, Glycine max
  misc_feature (3)..(3): n is a, c, g, or t
  Peptide Sequence Number=SeqID_7022
  Probeset Number=SeqID_14896
tgngtttgagcaccctgccacttttgaaacactcgctatggatcggagaaagaaggaggacatacttaaagaccttgtgaagcttaagaagggaaaggattattatgcaaagacaggcaaagcttggaagcgtggctatcttttgcacggacctccggtttatggtaagcctaccatgactgctgctattgctaatttcatgaactatgacgagtatgatctagagacaaccgcggagaaggacaacactgagctaacgaagccgctgattgagactccgagaaagtccatcacggcgactgacgacatcgattgctcactcgatcttaccggcccgagggccacgcaaaagacagaaaaaaacaaacccaccaaacaccaagccaaaaacttcggggggggaaccggtacacaaataccaccaacaggc

SEQ ID NO: 5118 - DNA, 1419 bp, Glycine max
  misc_feature (52)..(52): n is a, c, g, or t
  misc_feature (219)..(219): n is a, c, g, or t
  misc_feature (299)..(299): n is a, c, g, or t
  misc_feature (397)..(397): n is a, c, g, or t
  misc_feature (421)..(421): n is a, c, g, or t
  misc_feature (563)..(563): n is a, c, g, or t
  misc_feature (1194)..(1194): n is a, c, g, or t
  misc_feature (1384)..(1384): n is a, c, g, or t
  misc_feature (1402)..(1402): n is a, c, g, or t
  Peptide Sequence Number=SeqID_7023
  Probeset Number=SeqID_14897
ttgccggcgacgaggagatgagaggagagagtgagcgagagggataacgtanctatatagtggacgtgcttagtgtgagcaatgccgaggcggtatattaggccgccaacacagcagatgccaggcacttcgacagcatcgccgactacgacgcactcgcacacagccgccacacacagcatcctatgtaccaatgtataacacaacacacacacgatnagtatatacatcgccacgagcgacataccagcgcagagagtgcataagcggagtgcaatcatacttcgtcacacccgagnacactcacgcacgcggcccgcctctcgaacggagagacggagagatcgcgaagctacgcaccacgaacgatatccagagcgctatgtagaaacacacnacaggagagcgagagactatcacnatgtcgctggatacaacaggcaccgaacaagagacgccgagagttgtgctgtatgtgtgcaggtagacagtgtcgcccccagcacccgtcgaattatcacatacagtacgataatccgcatagagggtccggcacccgaacnccaccgatagtgtgatggtcgcgcgactacaccgctagttgtaattgtagtgagagaggtggtggtgcgcgcggctcaagctcggtggtgttctctcgtccactctcgccgcgccctgcgcgtctacttatataccatttacaacctaaggaatatatcttgtctgacacatcctcacactctccatgatgtggcaatgagattgactatataagatgttaatatagttgtggtgtgtattctataaacaccctatgagtggtaaacagccagagaagacggaggacgagaggagccgataaaggaaacagcggaagcgcgcgactcgagatgaagttctgctctcgtctatactcgggtaagacgagtcaagacacgccgcacccgaatgtcaccacgccgccgaacgagatgagaaaatgcatgctggcagggtggacacggcggtcacgaagaccagaatacgtcatctggtaaattacttcatatacaatcatctctggtgacaagaggatactgttctatgagaggaccaacaccccgcacgccaggtgacaggggagggttgctacgagctcagagatatggcatagatggagacgcgacgaagacatcacgttacaagtctccntctctcctctgtctaggcgattggataacaccccctctccctagtccctgctctataataaagagaggtgctctcacattacagttatactgtgcctacgaagaagatagcgcacccatcacgactattgtggatgggccgtcggtccccacatgacaaaatagaatacacgcataagaatatgcatatnttattattaataaatatngttcccccccttttccc

SEQ ID NO: 5119 - DNA, 1384 bp, Glycine max
  misc_feature (1)..(1): n is a, c, g, or t
  misc_feature (51)..(51): n is a, c, g, or t
  misc_feature (74)..(74): n is a, c, g, or t
  misc_feature (230)..(230): n is a, c, g, or t
  misc_feature (536)..(536): n is a, c, g, or t
  misc_feature (1234)..(1234): n is a, c, g, or t
  misc_feature (1354)..(1355): n is a, c, g, or t
  misc_feature (1357)..(1357): n is a, c, g, or t
  misc_feature (1361)..(1365): n is a, c, g, or t
  misc_feature (1369)..(1373): n is a, c, g, or t
  misc_feature (1384)..(1384): n is a, c, g, or t
  Probeset Number=SeqID_14898
ntctctgggtcactcagcatcggtggatacgatagcctgcgctcgtgtttnctactgtctttgtcgtgtcaggntacgagctgtggcgtttgtgctctcatgatatctctgttgtctccacgttgtctgtgtacgcgatcgttgttcgcagcgtgtgtgtagtcgttgtgagcgccgctcggagatggtgatctagatataaatacgcccactctcaccctcgtaagttncttatatccacggggcggatatgatattatgagctgcaacgcaccacgtcgcatgtctcttcgtccccgtcgctatacaccatcgtagatgatcatattaatgttatgattagagtgcaattagataagtaatgtagatatacagagtaagtagttgtgcgccgcatcacatgactgcgcatcgcacgggtatatttccctcaccccaacgcattttctctgtttccccacgcgttctgtactatcgtcgcgtcaattgtatttacatactccacactctcttttattagactacacgccatactnctcatctttctgctatacatcctctctttatattttgtccttgatattcgccctaatatttatcaagcacccacacgagaagtccacaagtcgtgacaacatagtactccagtatgttacgtagaagacctcttagcgcacacacccgctggcgctgtgtgaatggacctcacaccccagagataaaagaacatgatatataaagacgttattatattgaatattgtgtattgtcgagacacgacctttatcccaagtcagttaagcgcactgccacaacagctgcagaggcatgagagttaaatacactatcgcgtccgctgtcagcacccgctcttatatcgtgcgctacttctctttccaatcatatcatcttatttataactatactgttataattcctctatttgttttatattgatgttattatatattcttataattattcatgatatatggtagtatttaattatcgtatagagagtttagtgcaataaatttgatggagtgtgatattatatttaaatctaacttctctttctcctcatcatctatactccttcacctctcgtgggaaaacgtcatagtgagaagatgtagacttaaatctcgaagttaatttattaaagaggtttgtgacctcgtcgctctgctgtcgcctcgcatcgcggtttcccggcccctgcagtcccgcaccncgtcgccaccctcttatcacacctcatcccttcataccctcacatctcccgtgcaccgcgcacatcgccgtttatctcccactttacttgttcgtcgcgcctcacccctcttaccccacnncncccnnnnncccnnnnnccccccccccn

SEQ ID NO: 5120 - DNA, 2147 bp, Glycine max
  misc_feature (9)..(9): n is a, c, g, or t
  misc_feature (17)..(20): n is a, c, g, or t
  misc_feature (22)..(42): n is a, c, g, or t
  misc_feature (100)..(100): n is a, c, g, or t
  misc_feature (103)..(103): n is a, c, g, or t
  misc_feature (169)..(169): n is a, c, g, or t
  misc_feature (174)..(174): n is a, c, g, or t
  misc_feature (186)..(186): n is a, c, g, or t
  misc_feature (197)..(197): n is a, c, g, or t
  misc_feature (235)..(235): n is a, c, g, or t
  misc_feature (248)..(248): n is a, c, g, or t
  misc_feature (287)..(287): n is a, c, g, or t
  misc_feature (311)..(311): n is a, c, g, or t
  misc_feature (327)..(327): n is a, c, g, or t
  misc_feature (337)..(337): n is a, c, g, or t
  misc_feature (356)..(356): n is a, c, g, or t
  misc_feature (421)..(421): n is a, c, g, or t
  misc_feature (425)..(425): n is a, c, g, or t
  misc_feature (434)..(434): n is a, c, g, or t
  misc_feature (446)..(446): n is a, c, g, or t
  misc_feature (509)..(509): n is a, c, g, or t
  misc_feature (525)..(525): n is a, c, g, or t
  misc_feature (543)..(543): n is a, c, g, or t
  misc_feature (580)..(580): n is a, c, g, or t
  misc_feature (753)..(753): n is a, c, g, or t
  misc_feature (837)..(837): n is a, c, g, or t
  misc_feature (888)..(888): n is a, c, g, or t
  misc_feature (1064)..(1064): n is a, c, g, or t
  misc_feature (1271)..(1271): n is a, c, g, or t
  misc_feature (1419)..(1419): n is a, c, g, or t
  misc_feature (1421)..(1421): n is a, c, g, or t
  misc_feature (1508)..(1508): n is a, c, g, or t
  misc_feature (1535)..(1535): n is a, c, g, or t
  misc_feature (1549)..(1549): n is a, c, g, or t
  misc_feature (1644)..(1644): n is a, c, g, or t
  misc_feature (1663)..(1663): n is a, c, g, or t
  misc_feature (1788)..(1788): n is a, c, g, or t
  misc_feature (1809)..(1809): n is a, c, g, or t
  misc_feature (1819)..(1819): n is a, c, g, or t
  misc_feature (1829)..(1829): n is a, c, g, or t
  misc_feature (1833)..(1833): n is a, c, g, or t
  misc_feature (1943)..(1943): n is a, c, g, or t
  misc_feature (2016)..(2016): n is a, c, g, or t
  misc_feature (2021)..(2021): n is a, c, g, or t
  misc_feature (2051)..(2051): n is a, c, g, or t
  misc_feature (2059)..(2059): n is a, c, g, or t
  misc_feature (2073)..(2073): n is a, c, g, or t
  misc_feature (2102)..(2102): n is a, c, g, or t
  Peptide Sequence Number=SeqID_7024
  Probeset Number=SeqID_14899
gggcgcctnttcccccnnnngnnnnnnnnnnnnnnnnnnnnntggcgggggggcgctagggagtgaaggcgggtgaggtgggaaactgcgatataactancgnaggagagagagcgtggcgaagacggaggaagccgaggccgcgagagaacaacgcggtgcgaggcanaagtntagagtcactancactcactgcntaagatgtggtaggtagaaggagggtctcagactaggngggggtagagagnatacaatatacttatccttcccctgatagttgtgattgntcatcgagtgggagaggagcgtgnataattatattagtcnccacacgcancgccacaaacgacacatantcgtgcggaccatctatagcgaacttgtcgaggagaacacactccgacacctctattaaacaatnaatnttctcactntgacagacgaancgaggagtagacagagcgaactaagagtcgcgtctctctgcgagtgtgcgatgtgtgactagntgcctgcggtgtgtgncgcgctggcggtgagaanacgcacggcaccgcagctcgcctagacagccgccccnccaacagcacctaccacgtcgaggacgaggggagtgagctcgcggggatgaggaagcacagagcctgaccaggtaacactcatatctgtcggaatagacatgctagaaaacatgaaccgagcacaacacaccatcaagcaacccatgcgcggcccctcccacaccacgctatngagcgagaagtctaacatataacgctccgtaattgagagatccattctatattctttataatatatatggtctccttgtccgcncgcgggcgcgcccccgaccgcgaaggagcaaacggatctcacaaactcaanagaaagaacgactatatcatgaaacttataatagtaattaggagattagtgacaacatagtgcagcagctaggacagagaaggcgggagggatgctgcgggtataagtgtggctgcgtggaagttagtgagagtggccagtgagttgtgctcacaccccccgcgggtgtggtacgntatatagtgcaagcgctaacatgcatacagaagaatatagtgcgtactactaagaatggactgcctacggatctcatcttcgtgtgtgcatcggtgtgcgaggttgatataatatatcctatgccacatcgattgtctctcgcatattcagctgcgtgtcgcgccacatcgcgcataaagtagcaaaaaacgtgcctacgacatctnagaacatataaaccgcgtgcgtagattggtgtagtgcttattaatatgacattataactcgtatctcgcgcgctcgactcacatcgaccgccacgacgcgcagagtgaacagccgcgcgacgacgtaggacacgatacgcagacacantntacaataacactatgaggaatatttacgcatcatactatatacagcaagacagagagtgagaagacacgctgcgatcagcaatgaangacgagacgagcgtgttcgctacatantgattctttctagnactcacacactagcgcgtacagacaggagcgacgctgacaacatgatcatatgaaagttgagtatatagtctcatatgtaaacgtcgagaaattnataacgagtgctgctagantgcgtactgccatctacacgcatgctgcctgcccgaagctatcatctatacctcacggtctattactggatgtcatagcaactctgcacgatgcacaaaccagggacagcaacgacacgtcacgncgagcatcagagacagacagngggaagatcntgcgccaaantcancgtcgcaacgacaccactactctcaagtgtcatcgcagcgactcgacgacgcgtcgagtgcggcgcggcgttcgtctgctgcgcgcgcctgcggagttcgggtggtgcgnggtgagtagccggggatgttaggaagccgtgtgcggtagccgcggggtggaggcgcgatggcccggccgctgncctcntccatatcctgcgacgcgctctgtgttgangctggtanccggcaaactgacntcatatatcaaataccgcttcacgcgatntggtagattagtcttatagtcattaattagtattgcctccgtcgg

SEQ ID NO: 5121 - DNA, 643 bp, Glycine max
  misc_feature (601)..(643): n is a, c, g, or t
  Probeset Number=SeqID_14900
gccgggagcccgcgcgatcctgccggggccgctctaccattccgcgccgaattcgttcggcatccgcgccggcaagctcggcggcgtgctggtgctgatgccgcgctttgaggcggaagattttctgcagctgatcgagcgctacaaggtcgacaccatcttcatggtgccgaccatgttcatccgcctgatgaagctgccggaggaggtccgcaagaaatacgacgtctcttcgctgcgccacatcatccacgcggccgcgccctgtccggcggacgtcaagcgcgccatgatcgaatggtgggggccggtgatctacgaattctacggctcgaccgaatccagcgccgtcaccttcgcgacgtcggaggacgcactcaagaagcccggtacggtcggtaagatctcgcccggcgccgaattacgtttcatcggcgatgacggtcgcgtgcttggtgtcggcgaaatcggcgagatctattcgcgcatgcctgcaatggccgacttcacctatcacaacaagcccgagaagcgcgcagagatcgaccgcgacgggttcatcacctcgggcgacgtcggctatatcgacgaggacggctannnnnnnnnnnnnnnnnnnnnnnnnnnnnnnnnnnnnnnnnnn

SEQ ID NO: 5122 - DNA, 573 bp, Glycine max
  Peptide Sequence Number=SeqID_7025
  Probeset Number=SeqID_14901
gctggtccacgaaacgtcttgcccttatttccaggataggatgggaaatgttcttggtaccaatggaccctcggctcgggtccaataatctgggcgcgaacacatggtgagaaattggggaaacgaacacatgaggagaggactcccttgacatggacaactgagcggctgatccagcaatggtcccccggaacacatgaggagaggactcccttgattcggaactcgtatgcgtcggcagcgatcggggaaggagattggtgatattttagtttaattaatctggaaacaggggcagtgagcctctgtttcttgctgctatactatcttggcgtatgggctactctttcaggttcatttcaccgcgtgcagattgttttaaaacatggggaggtgatctgatccctgtagatagatataaacctgcgtgctgcacgttcgtcgacagtttaggtgtttcatgtgcctggaatgaatgaatacacgggcttgcgtgctgtgtgcttgtcaacagtttcggtggttcatgaacctggaatccatgggcttggtgttattttatactagcagggt

SEQ ID NO: 5123 - DNA, 444 bp, Glycine max
  misc_feature (158)..(158): n is a, c, g, or t
  misc_feature (393)..(393): n is a, c, g, or t
  Probeset Number=SeqID_14902
tcagaatcctcagctgagctccgcgagagaagaaccagacatggcttccagctccaacaactccccatcattcaagatcatactcgggtcgtcgtccccggcgcgccgcgcgatcctgtcagacatgggatatgagttcgccaccatgagcgctgacntcgacgagagggccatcaggagggagaagccggaggagctggtcaaggccttggccgaagccaaggccgacgccattaaactgaatctggtcgacggctgtgctgatcgagacatcagagatccgcctacccttctgatcacttcggaccaggttgtggtgagtaaaggggtgataagggagaggccgaggagcatggaagaagccagggaattcatcaaggcgtactcgggtgntcgagcattggcagtgaactacgttctcctgaccaacctgagcaccggcgc

SEQ ID NO: 5124 - DNA, 750 bp, Glycine max
  misc_feature (218)..(219): n is a, c, g, or t
  misc_feature (244)..(245): n is a, c, g, or t
  misc_feature (250)..(250): n is a, c, g, or t
  misc_feature (254)..(256): n is a, c, g, or t
  misc_feature (280)..(280): n is a, c, g, or t
  misc_feature (364)..(364): n is a, c, g, or t
  misc_feature (368)..(368): n is a, c, g, or t
  Peptide Sequence Number=SeqID_7026
  Probeset Number=SeqID_14903
aaagcattgccatacacctgctaccagaaggcaattgttcagggaaaatgatgtcgtgggcgtgtcgttcggaagagtcagagagccccaacaacctaatcccgtacctcccaaacgacgtcgcattgaactgcctagcacgcatccctcgttcccaccacccaaccctctcgcttgtgtcgaaaccaatccgaagcctcctctattcccctctcttnngtcacacgcgctccctcctcaatgnnaccancccnnntctctactcactctcggttcacgngattcctcccctcagtggtcacgctccaccgcacaaacctaaccccctctttgtctctttctcccatccctcccccgcgttggntcgnctaccgcgtccttggcccacatctacgtctcggggttccatcaagagtcccttctccaagtttggtcccgattggcgttccacgttggttcggggcccccctggggtcccccgaagttcccgccccgggtcttcccgaaaaattaattctggaggtgggtccccaacctgggcccctttcccaatgtggaaagtttttacccccctgggcggggggaaagggccccccccccaacgggccggaagaaagatgttcccccccccctccttgggaaacaatttaagagggggggcgcgggggggtttttttttacaccccacatttgtgtgggaaagaggggaggaaaaattccaccccgggggggggggaagttctgtgttgt

SEQ ID NO: 5125 - DNA, 459 bp, Glycine max
  Peptide Sequence Number=SeqID_7027
  Probeset Number=SeqID_14904
aaattttcaacaatcgcaaaagtctccccgaacgaaaaatcaaatcttccgtgaacccaaaaatgtcacgtctcccgatcctaatcgccgccttcctcctcctcctcctcaccaccgcaaccgccgaatcagactccccgacggcgtactccctcctccagagctacaacttccccgtcggaatcctcccaaaaggagtcgtcgcttacgatctcgacacgtcaacaggcaagttccacgcctacttcaacggctcgtgcagcttctccctcgtgggctcgtaccagttgaactacaaatcgacgatcagcggctacatctccgagaacaagctcacgaagctgagcggcatcaaggtgaaagtcctcttcttgtggctcaacatcgtcgaggtcgttaggaagggagaggagatggcgttttccgttgggatcacgtcggcgaatttcgatatcgagg

SEQ ID NO: 5126 - DNA, 517 bp, Glycine max
  misc_feature (58)..(58): n is a, c, g, or t
  misc_feature (137)..(137): n is a, c, g, or t
  misc_feature (164)..(164): n is a, c, g, or t
  misc_feature (183)..(183): n is a, c, g, or t
  Peptide Sequence Number=SeqID_7028
  Probeset Number=SeqID_14905
gaagacaaaggaagggaaagcaggaagacaagacgggaagcatgacagggaccacagncaaccagaagcccaacaaggagaaaacagcaaccaagcctcggagaaagaaaccaataagggcagaggtagccgacgancccacagaagcagcgacaacaaccccncacaaaaaaaggaagaaanggggcagccacagaagttttttttcagcctcagcgtcacaaactccactgattaggagacgtcatcatcggacgataatgatcagaatagcactggcgggggagtaaaggacaatgactccatggagaagaggagaaagagggtgagaggaagaagttggaaggtgaaaataaaggaattcattgactcacagatgaggaagctggtggagaagcaagaggagtggttggaaaaactcacaaagacactggaacacaaggagaaggagagggtgttaagagaagaagagtggaagagacgagaagctgcaaggggggagagggaaaacaatttt

SEQ ID NO: 5127 - DNA, 1795 bp, Glycine max
  misc_feature (14)..(14): n is a, c, g, or t
  misc_feature (31)..(31): n is a, c, g, or t
  misc_feature (39)..(39): n is a, c, g, or t
  misc_feature (49)..(49): n is a, c, g, or t
  misc_feature (55)..(55): n is a, c, g, or t
  misc_feature (57)..(57): n is a, c, g, or t
  misc_feature (69)..(69): n is a, c, g, or t
  misc_feature (90)..(90): n is a, c, g, or t
  misc_feature (98)..(98): n is a, c, g, or t
  misc_feature (138)..(138): n is a, c, g, or t
  misc_feature (154)..(154): n is a, c, g, or t
  misc_feature (360)..(360): n is a, c, g, or t
  misc_feature (487)..(487): n is a, c, g, or t
  misc_feature (495)..(495): n is a, c, g, or t
  misc_feature (510)..(510): n is a, c, g, or t
  misc_feature (665)..(665): n is a, c, g, or t
  misc_feature (857)..(857): n is a, c, g, or t
  misc_feature (980)..(980): n is a, c, g, or t
  misc_feature (1095)..(1095): n is a, c, g, or t
  misc_feature (1218)..(1218): n is a, c, g, or t
  misc_feature (1225)..(1225): n is a, c, g, or t
  misc_feature (1327)..(1327): n is a, c, g, or t
  misc_feature (1359)..(1359): n is a, c, g, or t
  misc_feature (1368)..(1368): n is a, c, g, or t
  misc_feature (1409)..(1409): n is a, c, g, or t
  misc_feature (1415)..(1415): n is a, c, g, or t
  misc_feature (1427)..(1427): n is a, c, g, or t
  misc_feature (1436)..(1436): n is a, c, g, or t
  misc_feature (1455)..(1455): n is a, c, g, or t
  misc_feature (1493)..(1493): n is a, c, g, or t
  misc_feature (1518)..(1518): n is a, c, g, or t
  misc_feature (1526)..(1526): n is a, c, g, or t
  misc_feature (1551)..(1551): n is a, c, g, or t
  misc_feature (1568)..(1568): n is a, c, g, or t
  misc_feature (1587)..(1587): n is a, c, g, or t
  misc_feature (1652)..(1652): n is a, c, g, or t
  misc_feature (1707)..(1707): n is a, c, g, or t
  misc_feature (1739)..(1739): n is a, c, g, or t
  Probeset Number=SeqID_14906
gagatacgggaacntagcactcatatgtctntgggtgtntgtgtgtcantagcantncataggactagntcagatcttgggatagctatntcggtgtntctgtgtctctctgcgtatctacatgtatgtgtcggtatntctatatatatctctntctatatatatatatatatatatatatatctctatatatatatatatatatatatatatatatcacaatatatatctatatatatatatatatcacacagagtgtatatatatatatcatatctatatatatatacaatatatatatatatatatatatatgtatatctctgtctcactctatatgtatatctatctatgtgtctntgtgtgcgtgtgtatgtctatatgtatatatatctatatatacctgtgtgtgtctctctgtgtatctagctgtatatatgtatgtaactaacagatatatatatacatatatatatataaccatatnactactcnatacatatacagatngacgtatctacctacatcacacactgacatacacagagacacagtatatacatatgtatgagagacgatatagagagaatacatatatatgtatagatatacaccacacccactgtctccacataccgacacctatacacccacacacaccctcnacaccgacatcgacccaccatatacatgtactataagatatctaatagacacacagatagacacctagccaggacagcagcacagagacatagatcgacacgtatctgcacacacccagcaagacagagagagactgagagacacctctccgcggcgtgagtgcacgctatacgtcacctcgagtagcacancaggaccaaactcacatctgaatctcacaataccagacacagcacacgaatactctcacatctcacacgcaaaaatacgccactaacactacacacgacagataatgcacacgcccgacacancaaacgcgccaccaacaccacggcacaccattatcagtagcagcgcataggtcataacacatgatactgataatcgtcactggtctcgactccatcctcgcacacacagcagagngcgcggcgacccactcgccgcactatagtgtacgatacacacctacgaacgtcagccacagcacacgacaatagtaagagaacaaaggaccacagacacacgaccctcactcacgcatcacancacacanccactatcaaccaacgacacgcgatcgtatgagcgagacagcactacgcgcacgctctgactgcatcccgaacagtcgagagcagacggagaggagcgatangatatgtacagacgagcgaagacacgagagtngcatcacgngcagaccgacacaacgatctcatcggcggagaacgaaatanataccnactggcacacantcaacacancagatcctactgtgtacangattgcgacatcggacgtacgatgcataatcgacatancagaacaactcatacgcacaacaancgacatcnaccatacacaccacactaacacagnactaaagacgacgcacnataggactgagtacgagangctgtaacgtaaccatcgacgtgatctagagcatgacacaacacgcgagacgcacagcatgctcnaccagcgtcccaacaagagcgatactcgcacgatcctgcgcgacagcctaacgancgcgcgccacacatacacacgcgctcgacacncgcacgcaagactctgagagacacactcgcagcagacgtccctacaccactagcac

SEQ ID NO: 5128 - DNA, 493 bp, Glycine max
  Peptide Sequence Number=SeqID_7029
  Probeset Number=SeqID_14907
tctcgagccgaatcggctcgagcggctcgagacggctgcgagaagactacagaagggggagaactgaggaggcaaatacatgacgaacgagggtgtaaacacggtggtggtggagcaacaacctgtggcatccacgtccaagtttccgttgagcttttgggaaaccaccgtggcttcctccgtggcgctggttttcgcggtgggccttctcggcgtctaacttaccatgcccgattcccattaccggtttcttaaacttcctctgaccctttcagaaccttccttcttccggatatcctttaaaacttatcaatggactcacctggcaaatcttgggggggtctgcggggggtatattttcatgcccactctcatgatttcccgggcggggttcagtgatagtctgttggagcctcttttgaagactttaaagggtggctcttgttggttcaccagccacagcggagactcttattgctatttctggtgtaaa

SEQ ID NO: 5129 - DNA, 223 bp, Glycine max
  misc_feature (161)..(165): n is a, c, g, or t
  Peptide Sequence Number=SeqID_7030
  Probeset Number=SeqID_14908
acttcagtgacacgttcaatgaaaactccccacctaccaatgatccagaatatatatcaaatcttggagctgcagtatataaagggatttccaaaggtgacaaggatgctgtctggttaatgcaagtatgtttcagttgacttgggatcttctggtttccnnnnngattccttccattatcttcaggagtacctttcttatattctcctgttccagatatctt

SEQ ID NO: 5130 - DNA, 642 bp, Glycine max
  misc_feature (197)..(197): n is a, c, g, or t
  misc_feature (327)..(327): n is a, c, g, or t
  misc_feature (350)..(350): n is a, c, g, or t
  Peptide Sequence Number=SeqID_7031
  Probeset Number=SeqID_14909
acatcgtacacacacacacacacacttttttcaaggcataggattggtgaggcaaacttgaattgaagtgaagaaggagatggctgcaacctcttccttgtgctcatcgaccctccaatcccagatcaatggattcttccttcacaaaacctctctttcccatactccttccctcactttctccaggaggaaatttncaccacagtgaaggctacatctcgagtcgacaagttttcaaaaagcgatatcattgtctctccgtccattctttctgcaaacttttcaaaattgggagagcaggtgaaaagcagagaatggcctgggtgnagattgattccacgtgatgaatnggatgcccgctttgtccaaatattacaatggaacttcttgggggtgatgaatggcccctgggacaaacttccttttggatgaacccctgatgatggaaaaccctaacaaagggtaccaaatttttttagggcgggacctgaaatagcccgggttcttgggaaaatctttcccccttcctttttcttccaaaaggtaacccagggaaaaagccgggaaataaaaagtgggagttttctttaaccccccggcccccccttaggggaaaaaaaataactccctgggggggggggg

SEQ ID NO: 5131 - DNA, 1608 bp, Glycine max
  misc_feature (49)..(49): n is a, c, g, or t
  misc_feature (53)..(53): n is a, c, g, or t
  misc_feature (1270)..(1270): n is a, c, g, or t
  misc_feature (1314)..(1314): n is a, c, g, or t
  misc_feature (1457)..(1457): n is a, c, g, or t
  misc_feature (1514)..(1514): n is a, c, g, or t
  misc_feature (1567)..(1567): n is a, c, g, or t
  misc_feature (1608)..(1608): n is a, c, g, or t
  Peptide Sequence Number=SeqID_7032
  Probeset Number=SeqID_14910
tgggagtgcgcctgctcaccgttacctcgtagtcaatattacctttagnacantagaacacccccctccatttgcagtcggtgcgggcccgcccccctccgcggttgagaggggggtagaaggtttctcccacctaaacctctattatcttctcttaaatagtagtttgaaggatgcgagatacaccctactcatgtctaccgagatagatgaagtctctcctcctataataatagtcactaaaccagcattgtcgcgtgacgtctcagctatggagtgtgccacactggcgtgagccggagaactatagcggcacagtgctatccgcgacacatagattaatcagcagtcttatattattgatcttcctatagaccatccgcagtgaagaaagttctactactcggcatgcaggccacgttcggtctgtagcataagatcatcggggataccgtcggctcacaccacagaatatgcagaaccctcccaaaacttcttacacatatatgccaccggtcactaaatatagtctcttactgcctgttattgtatccttatgggcgtgctgtcaccctccactcctacacaggaccaaacacaccgtagaacacgaagatcacattatatcataatccatcagttgagtattgataggaaatttatatatagatcacgactcaccgagccgggttagaggcatgacctccgatggcgcattttctagtataggcgttaagcaccacctcagcgcgacatcctactatatgccattgtctgtcgaagaaatccccaacgcattcctaagagacagtcctctctctctgtctctttcgagctccagttccaacatacgtcgatgtagagtcgtagccgagatgtctaccgcgaggctcagacagcatgccgacagttatttataatacgtgcgtcttgtatagccagcgaaacgagagtcaataattcctatataaaccgcaatcggtgcctcgttgtgcgcatgatctcattggtgtctgtgatcactctccaaattgcaagacttggtacacaatccttacccactcacatgtcataagaaccctctgttctcctcacctccttctggcactgaccgtaacattagccgtgagtacatatcagacgttaaccacgatttgcgaatgagcagcgacgcggaagagctctacgacctacccacacatacgcacatcatatatgttacgctacgaatcagcatgactcgctaactgctgccagtgtcctgttcttntgtgaattatcgctatacttctatatctatccatcactagtagntcgatcccagctctctgtcatcggctcaatgttgtccggagcggatgtactatccgtacgtgtgaactgctgcgttctatcacgctacgtatgtagcgatatattgcacacacataatagtgactgatgtgcagctacctacntgtataatgaagcagtatcacagcgacgagatccacgatatgcattcgcgttctctngacatgcgatcgtgcgagtgctgccgagacagcggtctgtatctatcaggtancgtgagctctgcggtgctgtaccaatctgtctaacacgatn

SEQ ID NO: 5132 - DNA, 1723 bp, Glycine max
  misc_feature (5)..(5): n is a, c, g, or t
  misc_feature (61)..(61): n is a, c, g, or t
  misc_feature (183)..(183): n is a, c, g, or t
  misc_feature (292)..(292): n is a, c, g, or t
  misc_feature (453)..(453): n is a, c, g, or t
  misc_feature (495)..(495): n is a, c, g, or t
  misc_feature (598)..(598): n is a, c, g, or t
  misc_feature (778)..(778): n is a, c, g, or t
  misc_feature (896)..(896): n is a, c, g, or t
  misc_feature (961)..(961): n is a, c, g, or t
  misc_feature (1264)..(1264): n is a, c, g, or t
  misc_feature (1447)..(1447): n is a, c, g, or t
  misc_feature (1449)..(1451): n is a, c, g, or t
  misc_feature (1453)..(1454): n is a, c, g, or t
  misc_feature (1460)..(1460): n is a, c, g, or t
  misc_feature (1462)..(1462): n is a, c, g, or t
  misc_feature (1465)..(1465): n is a, c, g, or t
  misc_feature (1467)..(1467): n is a, c, g, or t
  misc_feature (1469)..(1469): n is a, c, g, or t
  misc_feature (1472)..(1472): n is a, c, g, or t
  misc_feature (1478)..(1481): n is a, c, g, or t
  misc_feature (1483)..(1483): n is a, c, g, or t
  misc_feature (1485)..(1486): n is a, c, g, or t
  misc_feature (1502)..(1503): n is a, c, g, or t
  misc_feature (1506)..(1506): n is a, c, g, or t
  misc_feature (1514)..(1514): n is a, c, g, or t
  misc_feature (1521)..(1521): n is a, c, g, or t
  misc_feature (1524)..(1527): n is a, c, g, or t
  misc_feature (1533)..(1533): n is a, c, g, or t
  misc_feature (1550)..(1551): n is a, c, g, or t
  misc_feature (1572)..(1572): n is a, c, g, or t
  misc_feature (1574)..(1574): n is a, c, g, or t
  misc_feature (1603)..(1603): n is a, c, g, or t
  misc_feature (1616)..(1617): n is a, c, g, or t
  misc_feature (1662)..(1662): n is a, c, g, or t
  misc_feature (1666)..(1666): n is a, c, g, or t
  misc_feature (1689)..(1689): n is a, c, g, or t
  misc_feature (1704)..(1704): n is a, c, g, or t
  misc_feature (1709)..(1709): n is a, c, g, or t
  Probeset Number=SeqID_14911
agtantaagtacacatagcatctcagcaataaacactcgtagtaatgtgctatcgtgtgantatcaaggtcgcaggcgcgactcttcaaataactgcaacataacagactacttcatgtatgcgccggcttggtatgtcaacgacagcgtcgacgattacatcatgtagactggaggttatanaggcatacgtatacacacataacacagacaacaacacaaacacagatgctcgacagagtactatcacgacagacgagagagacagacgtgttgatatgttagttcggtnttgtatatggacagtatctatagagatagagatcaaagatagaaatatatctatatatctaccgctatccgtcatatacagcgaaggacagacaatcacacgatgtgaagaggagagagtagaaggtgtgggggggggcgggtacacagagggcgaccggncagggcgcggagggacggagcgcggagtagagcagtaatatntaggtgactatagatagatatgctagtagtatgtactgatcgatcacatgcctgtgatcagtcgctcactcattctcattcagcacgactcatatcgatattnaatagaggtagtgagtcatgtagtagcgtggtagatctggacgcggctgaagaggtggggtgtgtgggtgtggcatagagatatcacgtacaccaagtgctcaactagacagctattagtaacaatatactagtgatagagtggaagtgtgtgagtgtaatacagataggaagagagtanaaagagatagataagatgtgtagaggctcacaggacatcgaacacgaatgtctagcaatcgcacatcgcatgtcatatacgtcggatgtgtcagccagagagaagataggacgtgtgncggcgagaacacgaacagacagaaagacgaacaggatagagtaacaagtacaacagagaagcacntactgtgtggagggcgaggaggagagacgacagtatatctatataaaaatactagtatatcttatatttgtgtgtgattggttgccgtagagactgtacaatgagaatattctactcgtcatggtcaaaacatacaatctctaagtatatatattaatacataatacttctagagtgatgtggagaggtttgtgggttggagatgtgttggaggatcgtatgtttgtattcaggtgcagtgaacggacaatcacaccaggataagatatcgataagaccgcgacagaactacaataacggcanatgagaatcagataggatagtaataatagacgtagaggagaggaatgtgtaaggctgtaaagaaagttgagagccgaccacgcatcatgagcagcatcatgctcgttcagactgcggccgaggcactatgatacacgcgataagagaaatcgcaagatagacgagagagaacgaagaatgcanannnanngaaagngngangnanaanagagannnngngnngcgctaacaaggacannganaagagganaatgagngannnnaacaanagaaaccagacataganncgcggtggggcgcggcgcgcncngcgccgggatgcggctcgcgtggcgcgancggcggcggaggnngggggggggacacacccaccagcgagaagaagaaaagggcacaanaaanagagaacaagaaacaggcggcgngcgacggcgggggcnaggangaggagggggggga

SEQ ID NO: 5133 - DNA, 468 bp, Glycine max
  Peptide Sequence Number=SeqID_7033
  Probeset Number=SeqID_14912
acacgcgctctaccgttttctttgccttgttatttggctttctccacactttccgcaagactgttctgttcttgaaacatccgttgttccaagatgagtgaagaagtgaaagagaatcaatctgacaagcttcagagaacagctccacgtttgaacgagaggatactctcatctttatcaaggaaatcggttgctgctcatccatggcatgatcttgaaatcggacctggagctccgtcgatcttcaatgtggttattgagatctcaaaaggtagcaaggtcaaatatgaacttgacaaaaagacaggactcatcaaggttgatcggattctatattcatcggtcgtgtatcctcataactacggttttatcccccgcacattatgtgaagacaatgaccctttagatgtgttagtcatcatgcaggagcctgtgcttccaggttgtttcctgcgcgcacgagctatc

SEQ ID NO: 5134 - DNA, 205 bp, Glycine max
  Peptide Sequence Number=SeqID_7034
  Probeset Number=SeqID_14913
tgctggtattggtagaactggagcatactgcaccattcacaacacaattcagacaatacttgctggtgatatgtctgctgtaaatattgctgacgcagtggctaccttcagaacccagcgtcttagaatggtccagactcaggctcagtacaatttctgctataaagctatcatagaataactggaagaccttgtatctcaacag

SEQ ID NO: 5135 - DNA, 541 bp, Glycine max
  Peptide Sequence Number=SeqID_7035
  Probeset Number=SeqID_14914
tctttatacctaagctaatagtgccatgatggctctatcgtcacaagcaaataaaaaatacacaaaagttttgtcacagtttactatgcgtagtagacgaatgaaatgaaacgtaattcattttcgattccattttactatcagttgggaaacagaacgtcaaccgatggcctcacatcgatagtttcgaacgtgattccaatacgtttacatttacattggaaaccggaaagcaacaattgacacttgaatcatacatatcgtttctttcatcgcgtcaattaaatgagataagtgagtccattttaccagtaaataatcgattgttaagccgattcattcatctactgatatcacatgtggtttatttgcttattatgggacgtgcactgcaaggggtaactcactccgcacatggttagaaagcatggttttagacgacatatcgtcaaaaatttaggcatccgaccacattgagtgtccccttaaaatgcgcatgatcgagctacacgtgatatcgtaagaaaagtaacacacactc

SEQ ID NO: 5136 - DNA, 553 bp, Glycine max
  Probeset Number=SeqID_14915
ttacctatttcagtcggtcgattctactgagcttacagttctttattccattgcagatgcagcattgatcacatcgatcagggatggaatgaatttagtttgccaagaatatgccgcatgcaaaaatccacttaattcggagcagtcaggcgttttaatcttgagcgagttctgtggcgccgctcaaagtttgagtggagccgtgatggttaatccgtggaacactgccgatctcgctgatgccatcaatatggcgttgaccctaactcctcaagaacggcaggatcgtttacggggtgtaatcaagcacatccatacgcataccgccgcacattggggtaaagcgtttttgaaggaatttcaaagggccgtatcgaattcggaaaaaatcacccgtgtcctacctatcccttgccctgaagtagcccaagcgttcatgagaagtaaacgacgattattaatgtttgcatacgatggtacattagtgccatattcatccattccttcgctatgtcgtcccccgtcaaatttattaaagtggctagcaaagtta

SEQ ID NO: 5137 - DNA, 1426 bp, Glycine max
  misc_feature (1)..(1): n is a, c, g, or t
  misc_feature (14)..(14): n is a, c, g, or t
  misc_feature (42)..(42): n is a, c, g, or t
  misc_feature (108)..(108): n is a, c, g, or t
  misc_feature (118)..(118): n is a, c, g, or t
  misc_feature (189)..(189): n is a, c, g, or t
  misc_feature (253)..(253): n is a, c, g, or t
  misc_feature (270)..(270): n is a, c, g, or t
  misc_feature (516)..(516): n is a, c, g, or t
  misc_feature (550)..(550): n is a, c, g, or t
  misc_feature (910)..(910): n is a, c, g, or t
  misc_feature (1225)..(1225): n is a, c, g, or t
  misc_feature (1376)..(1376): n is a, c, g, or t
  Peptide Sequence Number=SeqID_7036
  Probeset Number=SeqID_14916
ncattatcatggantataattaatgtcgcactcgtgatgacnagatcattcagtcggtgacgcgtcagctgtaatatagcacgagaactccagctcgtgcactgacgnctcccactangcatacgcatagcgtcattactgcaccatgatatatcttatgacagtacgatactccttctgttgacatanctctgctcgccgcgcattcgagcgcgcgcgcacgtcacgtcaggcagctgcgatgcaggtcagnatggtcgcattgtctantatatcggctcctagtatcgggtgtagcgctcctacgctccagccgcaccgtatatgatccacctactcattacgtacgcttcgtcgtgacgatcaagctgacgcgacgcatagtacgcttacaagtcttactatgtgagtgtagaatagtctgtacagcaagacgcgagacgtgacactcagcaattgtagcatagcgcagtcagacatcctcgatggaagccagcaacaccgatcgagactctntcacgtgtactctcgcacaacatcattagcatanagatgtattctgacagacatagagctgtgagtctcatctcgtcgctatcacacgactcggtctcgcgtgatcagagcgtgtaatcccgtatgtaccacactatgtatgcgttcacgcagtctctttaatactgagagatatgatgctggatgagagggcgagggataccaacacgagacgcagtgagtacagtgagctgtgctgctgcaccgacctcctgctggacacccgacagctgctgataatactcaatctgtacggtgaggtatgtacgaagtacgctagggcaactagatcagtatgaacggtagtatcttcttcgcgttccacagcatcccatcactgcttcgtacttctacntttctataagtaatacagagcaattagtagacgtcacgaacagacatgatctatatgcaatagctgctgacgtcttacacctacgatctgctcttcgtatgtattcgtcacacatagtagcatgacacgctcgtaaatacgaagccagctgtcatagccactccgcactcgagagactcgaagttactctaccaatgccgttatcactagagggtgacggtaacacggagatacgtattatcataatagttagtgaagtagtaaaataacaaacacataccacacacacctagactactcatatcacattgtttncgttacagatactatatattatccacatcacgtcctctcgcattgctctctcgtggaggcgaatgccccatctcacacgagaatctaatttctgtcgtcgcggggagtggtaatacatactttatatagtctataagtcccacagcctccnctctgttctcgcgcgtgaatagaggtagagtagaaaggagaaagaacaac

SEQ ID NO: 5138 - DNA, 693 bp, Glycine max
  misc_feature (647)..(647): n is a, c, g, or t
  Probeset Number=SeqID_14917
atatctcacagagcaaaatcgaaaacgcatagttgataagaaatggtgaagtcagagaagaaagccacggtagagcggaagaagaggaaagcatcgcgacccgccgctaatatctcaaatttacgcgccagtgtcgagaagaagaaaggtttcgcggagctgcgcgacgatctattccgcgaagcagcgaaactcgtcgcggaagatccctcccagagaatcgcgatcctcatcaaacctcccgcctccgaatcgagcgtcgctatgcaatcgttcgggtatccgtctgcggaaggagtggttcgacagttcctcaaggattctgctcctcatgttcctttaccagaggacgacgctgagaaggacgaaggagaggacgaggattggtctaagtattactggtgggaagatgacaagctgcttaattcgaaggatccggtggagattatggcggcgatggaggagatgaagaaacttcaaaagcaactcgagcattttgttccacgtgaaacaggtcaaggctctgggactcaggacgatggatcaaaaccctaattgcaagatgggattcatgttcaagtcttccatctccagcgacgtcgttttaggttttaattataactatgatcatttgctttttccctgangttatattgtaagttgctaatttcgaatcaagactgtgtttttgct

SEQ ID NO: 5139 - DNA, 1532 bp, Glycine max
  misc_feature (712)..(712): n is a, c, g, or t
  misc_feature (800)..(800): n is a, c, g, or t
  misc_feature (1226)..(1226): n is a, c, g, or t
  misc_feature (1359)..(1359): n is a, c, g, or t
  misc_feature (1439)..(1439): n is a, c, g, or t
  misc_feature (1469)..(1469): n is a, c, g, or t
  misc_feature (1471)..(1471): n is a, c, g, or t
  misc_feature (1495)..(1495): n is a, c, g, or t
  misc_feature (1519)..(1519): n is a, c, g, or t
  misc_feature (1532)..(1532): n is a, c, g, or t
  Peptide Sequence Number=SeqID_7037
  Probeset Number=SeqID_14918
tccccccctcccccccattatttttttgtcgcccggcacgcccacgctcatacgtcctacactcatcctttactttaattacattgttcgtttctcactcgcaggtatgagttgtgcagatctctttacatattaatcatggacatcctccacgagcacatgatctgcgtctctcttcctacgcagcatgtatttaatctctagtcaactttctcttacctacgtatatatgtctttatgatctctttcgcttatgcacacacttttggaaaatattgactaaccacctcgccagtagcgacacacgacatacatgccttatcatatctcacttatacacttcgcctccatctgtccaccgtctgcccgctactttaaccgctcgtccagcccactcttgcgcgcgttcctgtctcgtaccattactctacaccccctccccacttcttctctccccatccccctacactcctctactcttcattccacccgctaaccgcaacttagctatttttttctctcactctcttttctattctctttgttttgtcacgacccggcgtgtcagactctctctatatcttatcatatctaccatcacctcaccgctcgcccacagtatcatctccactttgtattcccgccgttcaccgatactagcctctatcgctccctttactaaagtaaccgccaacctctcgctcactctcancgcccacttactctatgtagttggcacaacaaccctcttagttcctccgtatcctacttattcctgactactacttcctccaccacgnaggctcgtatatgatataatccgctactatcgaatactctagttgtattactacacggtcctaccccaacatctctctcctctcctttgccgtcaccctattagtctatatagctttatgtctctctccgcattcaagcctatatagtgttttaatgccgagctgcgctatacttttcacacctcagttgttaatgccctcatcgcgtcctatcctcacacaactactctgcactatatccgcaccatagtagtagacctcgtcttagatattctagctcacatcaatctttactttcctccaccgcacacagacacgtcttctgatgtaatatgggagagtatattggtatggtatagttcgtacaacaattgtcccacccacgaccgactgacgcacgcatagtgtgtgacgtgccacccgttnttactcgcaaacatcaccctgatccatcgtgaatcactacagctattactcatgctatatgcatagatttcacctccttcttctcatgcacactccacgcactctggattctggctgcattctatgtagtttngatacagctccacagtgatacccacagcttgtgctattaggtctacatcttactcacttactcatgcgtactgtcttatntatgatgttaatatcacgactgcactactngnagtgatcacagacgtcgctcgtgntgattttatcacatcacgctctcngcacgcactcctn

SEQ ID NO: 5140 - DNA, 1407 bp, Glycine max
  misc_feature (1)..(1): n is a, c, g, or t
  misc_feature (73)..(73): n is a, c, g, or t
  misc_feature (131)..(131): n is a, c, g, or t
  misc_feature (258)..(258): n is a, c, g, or t
  misc_feature (286)..(286): n is a, c, g, or t
  misc_feature (348)..(348): n is a, c, g, or t
  misc_feature (350)..(350): n is a, c, g, or t
  misc_feature (456)..(456): n is a, c, g, or t
  misc_feature (1139)..(1139): n is a, c, g, or t
  misc_feature (1168)..(1168): n is a, c, g, or t
  misc_feature (1254)..(1254): n is a, c, g, or t
  misc_feature (1344)..(1344): n is a, c, g, or t
  misc_feature (1355)..(1355): n is a, c, g, or t
  Probeset Number=SeqID_14919
ntgctgtgagtgtctgttatacactattctctctcgcactcagatctgaaatgtgaaagatgcgctcagcgtnttcatgacaacaaatgcacagtatgtgggagcgtcgagattatatatgtacgagtacntaatgtagtgtataaaggagatattggtcatgatactctatacagtcgtgacatactatagtacatagaaatagtcgtccttacaacagcgcgacccacactactctgacattgtcagtgtgcacangatataaacataaactcaagatctagcntacacagtcatacgtgcgcagcttcacgataatgaagaatgtacatagagtcgagcgcgcangncacacgaatctctcgcagcggatacgctcgctcgatactactgccgcagcgtgtatctactcaatatatatattatcgatgcatgtactgacaccatgaaggtatnacaagtactctccctgattatcgcagccgttgtgtatactcttctctcatcgctcgttttgctcagcaagctcctccacaggtcgcaccgcaccctactctacacactcgcggcatcccacacatagagagagcatcccacacatcgtacataggagtacgcagagcacgatatagatattctctatatcaggctcgagagctgataggtcacatatggagatttccggctactattctcactgtggcataccgctagtctcatttgatctccctctgcgctatcctgaaacagcgcggccttgcattcatttcttgggttatgtcgggtgcctgcactattaactccaatcccactcttcatctactccaacctctttcattacatctctatctaatttgcttagtatgttgttagaaatgactatattgtgttatatagagttagacacataacgaaccaccacaccaggagctcattcctaatatccaactctacatcgtctgaaataaactaaactagcaatagctgttgcttccgctagtgtctgtctcacatccacctcatctcatcctagcgaaatcatcaacttccagcaccatagaatttacttgttgttagtagtacagacaaagcaacaacagctacaaccctcccccactcgaccaatttatcaacaacanacactcaatagtggggtgcgatagaaacnaaagaaaccaggccttactcgccagacacaacatacacgagggggggggggtgggcccttacgctattcctgcctcctgatcgcanggccgtccctctctcctccttcttcggtgcgtcttaataataagtgtgtggcagcacaccccccaccgattggcggcgcgcgctgtccgnagctcccctgnccggggcggggtcctgtaaacaacacaaagccaccaacacaaccacaaaaca

SEQ ID NO: 5141 - DNA, 1395 bp, Glycine max
  misc_feature (15)..(15): n is a, c, g, or t
  misc_feature (18)..(19): n is a, c, g, or t
  misc_feature (21)..(21): n is a, c, g, or t
  misc_feature (27)..(27): n is a, c, g, or t
  misc_feature (29)..(29): n is a, c, g, or t
  misc_feature (164)..(165): n is a, c, g, or t
  misc_feature (167)..(167): n is a, c, g, or t
  misc_feature (468)..(468): n is a, c, g, or t
  misc_feature (658)..(658): n is a, c, g, or t
  misc_feature (1395)..(1395): n is a, c, g, or t
  Peptide Sequence Number=SeqID_7038
  Probeset Number=SeqID_14920
ttttttttgcgccgnggnngngcgggngncggggtggggggggccggttttggtgcccccccgcataacgaattaatgttataaagtgtataacttattaggtagtatggttatcaaataaacccccacatttattaaattaaaatgtgggtttattaaataannanaaaataacatattacaagaaaaaaaccccacggtggcctatttgtgtagcccccccccccagccttcggaggtgttgtttggtgtcttccccaccccacccccctgctcggtgtgttttggtcacccacccacctctaccccataatttatttttttccgttgttgtgttatttatccccccccccccccccacccaaaatagaatatagtagatacctatgcttgagtgaaacaaaataaaaaaaaaataataaataaactgcattttttttatgtttattttttattaataagataaanacactattagacccacaccagtttattatattaaattttaaataattttttaaaatataaaataatagaaaaataataataaagatatattaatataattagtttttattgtattatatatataaacaataataaaaaaaatatttttagaattgattgtgatttaatatattaattggttatgacatancttatgtaacttacagacattacgacagaccatgtaatactatatagtattaagagtatataatgtaagttataaattttataattataaataattgacaacaaatctaagatgtatctttatggtgtttagattctaatattatacattatctatatttgtatattgttgatatataaattaaattataattaaataataaaatttctgaagccgttcactatcatgttatttggttgttggtatatgtataccaatacaacttcactacttccgaaaaaaataacaatattagtctatgttgtatgtcattatctattactatttctcttgttatgtatactttcatagtggtgtttaattatgatgagtatataagatattagttatctggtagaaagtttgtatgagtatttagtatacatgtgcagagagagagtacagtacaatttattttaaatttacaagataaatagataatgacaacatacacacaaatattttggttaaatatttaatacattgtcatattattagtacgattgataggatcaacgaaattttataatatttattctcattatctattttatattatataaaacttatcataatattgaatatcaaaatatacagatactctattatgttgacttatcataaagagaagcacaattcaaaaacgtagaaaaagtaaatgttttttgatatatatatcacctatcacaattactccn

SEQ ID NO: 5142 - DNA, 500 bp, Glycine max
  misc_feature (222)..(222): n is a, c, g, or t
  Probeset Number=SeqID_14921
aaaaaagtcaaaacccaacctttattttgtttctgccaaacacttctcttcctctctccaatggcttcctccttatccttcgtctcatcctctcacctcactctccgcactccttccctcaccctacgcaaactctctccccctagaacctccgtttcgttctccgtcaaggcccagtccgtcgcactctcccaagacgatctcaagaaactcgcggcgganaaagccgtggaggcgatcaaaccggggatggtcctcggcctcggaaccggatccaccgccgccttcgccgtcgaccaaatcggaaaactcctctcctccggcgagctccacgacatcgtcggcatcccgacctcaaaacgcaccgaggagcaggccagatccctagggatccccctcgtggccctggacacgcatcctcggatcgacctggccatcgacggagcggacgaggtggatccgaatctggacctggtcaaggggcgaggaggcgcgctcct

SEQ ID NO: 5143 - DNA, 446 bp, Glycine max
  Peptide Sequence Number=SeqID_7039
  Probeset Number=SeqID_14922
atcagtttttcgatttctctcgaaataaacagccamaacaaaaaattaattcatcatgaaattcgtcgtgctcgcagttttattcggcttcattgctgttgctgttgtcagtgcattaccacaagaaggtagtccagttggaactgttcaaaacgcaacacaagatgcttcggacaagagtgctataacaagtgcattgggagagatcttaaaacttgtagagaatgttttggaacaattaggcgtccgtgctggtactgacacaataactgatggacttcctatgggtgacatgggtagtggtaatgatggtgctgcttaaaatcaagataacctcagaaaaatcaaaggaccacggaaaatcattctcagaatcaaactaaaaaaattcaaaaacctgcaggtcaattttaattggaaaaaaaatgcaataatttacatttatc

SEQ ID NO: 5144 - DNA, 450 bp, Glycine max
  Probeset Number=SeqID_14923
gtcgccgtcttcacaaaaaaatattagctttccgcctccatcgagatctccaccaactaaaatgaaggttgtcgccgcctacttgctcgccgctttgagcggaaaagcttccccagccagtgccgatatcaaacaaatactcggatctgttggttgtgaatctgaagactctcagattgagcttttgttgaaggaagtcagtggtaaagacttgtgtgacctgattgctactggaagggagaagttggcttccgttccaagcggtggtggtggtgttgccatggcctctgctccttctgccggcggtggtggtggtggttctcctgcggctgaggccaagaaggaagataagaaagaagagaaggaagaatccgatgatgacatgggtttcagtctatacgagtaaggcagtaatgcttgttggcttatgtttttgtaatccttttccat

SEQ ID NO: 5145 - DNA, 969 bp, Glycine max
  misc_feature (1)..(44): n is a, c, g, or t
  misc_feature (476)..(483): n is a, c, g, or t
  misc_feature (580)..(580): n is a, c, g, or t
  misc_feature (969)..(969): n is a, c, g, or t
  Peptide Sequence Number=SeqID_7040
  Probeset Number=SeqID_14924
nnnnnnnnnnnnnnnnnnnnnnnnnnnnnnnnnnnnnnnnnnnngcacgaggctcgtgctaaacttcttttgacaattggaggaacattcttcttgggatttgggccgttgatcctcataattgttgcaaccttttctgctctttacttttattttggaccaacatttgtccatgatgcaagcaagatggctatatcacctccacaatatgtggacccttacgcactcctagaagacgaaaggatatctcagatagcaccacggctaaactaaaggcaataccacacatacttagctcttaggaatctagttgcatatatcaaatttctgtttgatttagttccattgtaaaatatcatccaggatgaacttgttatctattttgcgttcatcattgaatcaattctttacatctatctgcccttttcactttgcataaaaaaaaaaaaaaaaaaaaaaaaaaaaaaaaaaaaaannnnnnnnaaaaaaaaaaaaaaaaaaaaaaaaaaaaaacctcgggggggggcccggaccccaattccccttatagggagtggttttaccccccctcattggccgnggtttaaaaacgtggggatgggaaaaaccttggggttccccaattaaatcgcttggcagcaaatccccttttcgccagttggggtaaaaggaaaaaggcccgcacgatcgcctttccaacagttgcgaaccctgattggaaagggaacccccttgtagggcaattaaccgcggggggtgtgtgtgtacccccaggtaccgttcattggccaggcccataggcccgtcctttggttttttcccttctttttgggcagtcggcggtttttccggaagctttaaatcggggctccctttaggttcggattatgcttacggccttacccaaaaaactgttttaggggtatggttacgtggccatgcctgataaaacggtttgcccttttgcan

SEQ ID NO: 5146 - DNA, 457 bp, Glycine max
  Peptide Sequence Number=SeqID_7041
  Probeset Number=SeqID_14925
cattcactcactatccattgcagaataaaaagaaaacctcagaactttaacgttcgtctagagagagagagaaaagaaaagggaaaaatggaagggaaggaagaggatgtgagagtgggagtgaacaagttcccagagaggcagcctatcgggacatcggctcagactgacaaggactacaaggagccaccaccagcgccgctgttcgagccaggggagctgagctcgtggtctttctggagagcagggatcgcagagttcatagctaccttcctgttcctttacatcacagtattgacggtgatgggagtgaagagagcaccaaacatgtgtgcatctgtcggaatccaaggcatagcttgggcttttggtggcatgatctttgccctcgtctactgtactgccggaatctccggtggacacataaacccagcggtgacattcgggctgttcttag

SEQ ID NO: 5147 - DNA, 1050 bp, Glycine max
  Peptide Sequence Number=SeqID_7042
  Probeset Number=SeqID_14926
gaaaactttttgtaattttaaaaactatccaagccaatcgaaatgaacttcattcgcaaggaaattagcgcagcgctcaatacattcactttctggatcatgccaccagcagtaagaagatataaatacccaaaaccaggcaccagattgtatagatattcatcaatcggtagcgaaccctccgatcgtgaaaccagttacattgactacaagaccgccttcagagactctactcatcacatcagatttaacgtagatacccaaaagactctacaaacctacctttacctccaggaccccatcggagaaagtgttaacgaaaagctccgtagatttggataccttgctactgaagagtttagcaataatgacgctatccaaaaagctagaacacagtacgaaagcgacattggtgaatctgttgatgtcaaaaaccatcacgatgattttggattctctgagctcggtattggcagagacaatcgtgaagctgttggtgagtacgttaccagtgtcttcgaaggtattaaacacggaaatgcctbtgaagcttggcttaacgaccttgacgatatttacaatgcttcattctacgttcttagaaacttcgactttgctgctgatgatccagtttacagacaaatgaatcttgatatgatgcaacaattggatgagattgccaacaacagagaagcaattggacaattcccagtcttcaagggtaatgccgcaacttgggctattctcgatgattctttctcagctgaaaatatcaagaaggtacaagctagcgtaagaaactttacaggatatgctgatcttactcccgttgtttatggagaaggagaaatcccaccagcaaagggaggtccaggagttgccgttccccatattagtaaagtagttgaataagattatatacaaatgatttatacttatgaattataaagtatgctcactgatatataaatatacatatattgctatcatttaatacaaagatttgatagccatgaaaaggttttcaaccaagaatgaggttgaaatttc

SEQ ID NO: 5148 - DNA, 1434 bp, Glycine max
  misc_feature (15)..(15): n is a, c, g, or t
  misc_feature (18)..(18): n is a, c, g, or t
  misc_feature (20)..(20): n is a, c, g, or t
  misc_feature (98)..(98): n is a, c, g, or t
  misc_feature (118)..(118): n is a, c, g, or t
  misc_feature (128)..(128): n is a, c, g, or t
  misc_feature (1089)..(1089): n is a, c, g, or t
  misc_feature (1315)..(1315): n is a, c, g, or t
  misc_feature (1350)..(1350): n is a, c, g, or t
  Peptide Sequence Number=SeqID_7043
  Probeset Number=SeqID_14927
tttttgttgtttatncgngnggaggggggccggccgacagcggagtcggatgagggtccggcagcttgtcgacactaaggcgggctgtttgcgctgcngagaaaaacccatgattttntgccctcccntccaccccccgcaggtctcgtcggctgtaccgggccgcgcccttgtgcaccgacgacacgcccccgggggttggtttgttgtggggttgcccgcgggagagtgtatctgtcagggaggttttggtttaagaacctgttcacatcgccgccgcgcccgtctcgtgtgtgggttatggggctggtatgttggtctctgtttgttcttgctcgtgctcatcttttgtagctggtccacgactcgaaactagggcgacaataataataataaaacacacatcaataaatatgatcagaaacagtgagagcggtgattctgtttgttcgacccccaatacgatcgtctaattcttcggacccccactttctcttcggcctctccctcacctctattatatcatttctctgcttgtgtatacaatgaatctaccactctcgtcaccgtcccgctagcgcgctggagtcctagatacgacccgcgcacctctctcctcatacttattgattctcctctactaactgtatacctcctacatctgccatatcacgtactagcaatcacagttaatctaaacaaaatccaacgggctctgcgcccgccgcagccgcgaacaggtgttgcacaggaggcctattcagtgacgtacctccattagccccctgatgtggctgttgttttcccgtgaaatctctcgttcgtctgcgggcgtgccctgttgcgtccgacacctgctcgccgggcgtggttgcgaaggcggtgtgtggtcgaacggatacccttctaacaaatctcgttccctaacgggcgttgtagtgtgcacaacgcgacttttgaggtggtgattttcaacgcctatcgtcgcaggtgctctccgacgtcctccgccgcgcacacgcctcggtagaatcgagtgaacgcatgcactgctcgtgcgttttccctccctcacaccatgcacctacncgacattcactaactcccggcgtacgcgcctccgcctctgcctcctccttcgctcgcgtttcatcggcgtgtccatgatcgcgtataaaggctctatcacttgtctgtcctgactctcttataccgcacacatatgatatctatcgacgtctcggtgtaatcacccacgtttgccaccaaacccaggacgttgtgtcgctcatgcactcgtcctgtgtggcctctngcgtgcgcactggtcacccactctggtgaggtctnaccacctccccgtcgcgttgtcttgtcctccacatcgcatatctctcgccgcttctcgcatctccttatatatatattctctct

SEQ ID NO: 5149 - DNA, 541 bp, Glycine max
  misc_feature (480)..(480): n is a, c, g, or t
  Peptide Sequence Number=SeqID_7044
  Probeset Number=SeqID_14928
aatctagggttggtatccagatctgggattgtgttttcatcgggtgtttagggcttgaagctattgcggggatgaagcagttccacgtcgcaatatatgagattgtggatgatccttcactggattcaacaatctcatggagcaaaaacaacaagagttttgtcatctggaatcctaatgagctattcaccaaaaagattcttaagagattcttttgctgcaatctgtcacagtttctcaccgaacttgacacatacggatttgtaagaattaagggatctgagcacttggaattcggacataagcagtactttgtgagaggtaaacctgagcttttgaagaagatgcgtctcgaagctgcgatgaataggatgaagaaaagtgcccagagagccaaagctagagccgaagcagagaagaacggctctgtgactgtgagacgtgaacctcggattataataaatgccgacgaagcaaggntgaggtacaagcaaatatttgaatcatcatcatcatcaacgattgctaaaacgccactaga

SEQ ID NO: 5150 - DNA, 959 bp, Glycine max
  misc_feature (1)..(1): n is a, c, g, or t
  misc_feature (83)..(83): n is a, c, g, or t
  misc_feature (107)..(107): n is a, c, g, or t
  misc_feature (126)..(127): n is a, c, g, or t
  misc_feature (199)..(199): n is a, c, g, or t
  misc_feature (279)..(279): n is a, c, g, or t
  misc_feature (288)..(289): n is a, c, g, or t
  Peptide Sequence Number=SeqID_7045
  Probeset Number=SeqID_14929
ngtgaagagaaagacaattaattgttttggttggaattatagagaccagaggaaatgagcggaataatctgttgatgtgtgantagaatatacgtctactatagatncgtggttagggccgatgtnnctggagacgcgagagagttattcggcgtatagtgataaagtggcctcctgtctggagtaataatatgcaganattagtctgttgactgtagatgtgttgccctagattctcatcatgggctggaggggagcaaagatatgaggggaggtcgnagagcgaannaaaggcgataaagactcccgggcgggtaataaatggacatatgcgtcgtcacggcgccgtgggtggtttggaggagagagaactatggtatagtcttatcatacgagcggtgaagagccaagcggaataggggtgcgattatttcctgcttgtgtaacccggtggtgcctcgggagggaagtaaaagcttccttgctcaaccgggccacgaaagaaaacacgtgtacggttgtgctggtttaaataaacttgacggatggcggggcccggtgaaccaaatgttttttgtggacagaccagacgggtttcatgtccatgggtcgaggggtttccgggggcagagtggtcgcatgcatcaacgtggccgaggtgagggagatggcgggcgccgaacacatggccatgctctccgcgccggaggaacttacgggcctcctaggggacatcggcagcatctacacttgatcgatttagggagcctacctgtactgttcctaagataaaccgcatttcttccgtagttggatggtacttgcaattagaggaagaaatctcctgaaatgtgagtccagatgtaccgcagacgagggctctttttcaaatgaattttatataaattacatgtggtatgcaaatctgtagatatttgccagtaaaaaaaaaaaaaaaa

SEQ ID NO: 5151 - DNA, 1541 bp, Glycine max
  misc_feature (1)..(1): n is a, c, g, or t
  misc_feature (41)..(41): n is a, c, g, or t
  misc_feature (397)..(397): n is a, c, g, or t
  misc_feature (1074)..(1074): n is a, c, g, or t
  misc_feature (1138)..(1138): n is a, c, g, or t
  misc_feature (1242)..(1242): n is a, c, g, or t
  misc_feature (1371)..(1371): n is a, c, g, or t
  misc_feature (1413)..(1413): n is a, c, g, or t
  misc_feature (1439)..(1439): n is a, c, g, or t
  misc_feature (1455)..(1455): n is a, c, g, or t
  misc_feature (1464)..(1464): n is a, c, g, or t
  misc_feature (1486)..(1486): n is a, c, g, or t
  misc_feature (1495)..(1495): n is a, c, g, or t
  misc_feature (1501)..(1501): n is a, c, g, or t
  misc_feature (1505)..(1505): n is a, c, g, or t
  misc_feature (1510)..(1512): n is a, c, g, or t
  misc_feature (1515)..(1515): n is a, c, g, or t
  misc_feature (1517)..(1518): n is a, c, g, or t
  misc_feature (1527)..(1527): n is a, c, g, or t
  Probeset Number=SeqID_14930
ngagggtagatgtttgacgtgcaatgtgatgtgggtgtgangtgtggggtgtacgtgtggttggctgcgcgttagtgacggtgagcgataggttgtgtcggatggggagtagatgtagagtgaggagagagcgaccacgacatgcggatgtgtatcagtgtttcgtgtttttctgaacgcgcacatgtatgggagacgagtgatgaccgtgtagtctatgtagtgtggttgtttgtcatctgtactggttatctctatatcgtcttagtatatagtttgttatgatccgtccacgacgatgtgagtgatttgtgtgttagcccctgcgtcgtgatgtagatcgtcttgtgatgatccgtcgcgcgcgatgtgtgtatatcgtgtttacggtgggtgngctgcgagcgctgtcctatgtagtgtgcgagcgatgtacgcatgcggagacgtcgcgcgaggatagcgtcggtgtcgtatgtgtgagtatatagtgagtctctgagagtgttaggtggactcggcgtagacgggttataaccctcattgtgtagagataggtaggcgcgtggcgtagtcgttgtagagtataggatcgcgatgtgtgtgtagatgatacgccacgcgagtgagatggcagagttgcgcgcacgtgtgcgttaaacaaatagtgcgcgagtcaaggctctgaggtgtaggtatatctcgtgtagttgatgttggagcggtctcccgtgaggtgtcttgtgggctcccgcttgtgtatgttcgtccatcatcgggcattcactttcttacgctactttatttaacacaccacccacgcgacttctgacctcaccgcccactaccacatgtgtgaactatatcgacatgaaagtatgagaaacatccagtgataagggtatcatgataaacatagaatgactatagagcgtatggcgagtatgtcactatgtgacgtgtggaagacgcgctgtggtagtaatagaaagaagagcgcgacaaaagagagaacaatagtgaggagcgtgaagagtagaatatgccccagatgtgtgcgtagtgtggtcacgncgagtgcggacataagagtacaggtagtcacatagtagcatacgcatcattagacacacacgtnagagtgtgcgaggtaggtcgcctagatcaccacctaacagagatagtatttatcgtgagaactacgttctataaagatgataaacataagaagatagtatgcancgtaattgtgcaccagacacgtatatcaccacatatggtcatgacggtgtatgacgagtggttcgttatatgtattacgtggtggtggggctgctctggtagcgtgagtgagattgctctgagcggtantcgagagagacgatagatatgaaagatataatctcgtttttntgttgtgtatgattcacacagcgatngcgggccgccgcgcgncccggggcnccgtggcggcgcgcccagcgcnccctacgcngcgccncccnccccnnnccncnncaactatanttctacaactactt

SEQ ID NO: 5152 - DNA, 1982 bp, Glycine max
  misc_feature (38)..(38): n is a, c, g, or t
  misc_feature (40)..(42): n is a, c, g, or t
  misc_feature (44)..(44): n is a, c, g, or t
  misc_feature (46)..(46): n is a, c, g, or t
  misc_feature (48)..(51): n is a, c, g, or t
  misc_feature (53)..(61): n is a, c, g, or t
  misc_feature (64)..(64): n is a, c, g, or t
  misc_feature (66)..(66): n is a, c, g, or t
  misc_feature (68)..(68): n is a, c, g, or t
  misc_feature (73)..(74): n is a, c, g, or t
  misc_feature (78)..(79): n is a, c, g, or t
  misc_feature (90)..(91): n is a, c, g, or t
  misc_feature (105)..(106): n is a, c, g, or t
  misc_feature (120)..(120): n is a, c, g, or t
  misc_feature (133)..(133): n is a, c, g, or t
  misc_feature (140)..(140): n is a, c, g, or t
  misc_feature (143)..(143): n is a, c, g, or t
  misc_feature (164)..(164): n is a, c, g, or t
  misc_feature (180)..(180): n is a, c, g, or t
  misc_feature (194)..(194): n is a, c, g, or t
  misc_feature (203)..(203): n is a, c, g, or t
  misc_feature (213)..(214): n is a, c, g, or t
  misc_feature (246)..(246): n is a, c, g, or t
  misc_feature (275)..(275): n is a, c, g, or t
  misc_feature (315)..(315): n is a, c, g, or t
  misc_feature (325)..(326): n is a, c, g, or t
  misc_feature (332)..(332): n is a, c, g, or t
  misc_feature (417)..(417): n is a, c, g, or t
  misc_feature (419)..(420): n is a, c, g, or t
  misc_feature (429)..(430): n is a, c, g, or t
  misc_feature (442)..(443): n is a, c, g, or t
  misc_feature (456)..(456): n is a, c, g, or t
  misc_feature (517)..(517): n is a, c, g, or t
  misc_feature (522)..(522): n is a, c, g, or t
  misc_feature (588)..(588): n is a, c, g, or t
  misc_feature (662)..(662): n is a, c, g, or t
  misc_feature (700)..(700): n is a, c, g, or t
  misc_feature (738)..(738): n is a, c, g, or t
  misc_feature (924)..(924): n is a, c, g, or t
  misc_feature (929)..(929): n is a, c, g, or t
  misc_feature (935)..(935): n is a, c, g, or t
  misc_feature (953)..(953): n is a, c, g, or t
  misc_feature (1111)..(1111): n is a, c, g, or t
  misc_feature (1140)..(1140): n is a, c, g, or t
  misc_feature (1176)..(1176): n is a, c, g, or t
  misc_feature (1181)..(1181): n is a, c, g, or t
  misc_feature (1234)..(1234): n is a, c, g, or t
  misc_feature (1366)..(1366): n is a, c, g, or t
  misc_feature (1442)..(1442): n is a, c, g, or t
  misc_feature (1453)..(1453): n is a, c, g, or t
  misc_feature (1535)..(1535): n is a, c, g, or t
  misc_feature (1539)..(1539): n is a, c, g, or t
  misc_feature (1574)..(1574): n is a, c, g, or t
  misc_feature (1617)..(1617): n is a, c, g, or t
  misc_feature (1619)..(1619): n is a, c, g, or t
  misc_feature (1681)..(1681): n is a, c, g, or t
  misc_feature (1795)..(1795): n is a, c, g, or t
  misc_feature (1831)..(1831): n is a, c, g, or t
  misc_feature (1913)..(1913): n is a, c, g, or t
  misc_feature (1917)..(1917): n is a, c, g, or t
  misc_feature (1961)..(1961): n is a, c, g, or t
  Peptide Sequence Number=SeqID_7046
  Probeset Number=SeqID_14931
gtgtgttggtgtggtgtggcgcccccccctctctcttntnnntntntnnnntnnnnnnnnncgngnancgacnngggnncgtggttctcnnccactcctcctgtnnttcatctagcctcnactcgtcacggantggtgtnacntctggtatgtgagtttaattncgatcacgcgctgtangttgctgggggcanataatattncagaagaggnnttgcgcactgtagtatatgatattgggggagnatagtttcgatgtaatatcgctttcactntcgtcgtctcgatatgttgtcgtgtagtgtgtgtgtgtanggatgtggtnngtctcntagccaggatactagtactaccgagacgacgacgaaggcgaccagagatacgcgtcgcgtggtgcgctcagtccctccccgcgananngacatgtcnnatatcacccctnncacgtggtggtgncatgcgagagtgaataggagtgacgccggccatgccgcgctctgtgttgtgacgagttgtntcttngatctcgagccgacgaacgaggtaggcgaagaaacacccgacgcggcgaaacacacgtataatacnacaaaatcagttacatcagcatcacgtcatcagtctagctgtggcatggtcatgtcgcgctcgtgtccgactcntgcagtagatctgtgtgatgctgagacttcttgtctgncgtggatctgtcagtgcggcgtgtggtggtgaagagtntgagagagggtgagaagtgcgtgcgaggagacggtacagaacatataacacggatcacctccaagcctccaacgagtgacatactctccaccggtgcctgagcgacgctcagcactcacaaactaatatataatcatacaacacacacatcactatattatgtcaataatagtagttggtgtggtnctcancgcaanagaccgagtcgatgtgantgaattcgaacactggatcactcactatgtgatcggtactatgctgactctgcgttatacgacctcacagggcgtgatctacctaccaacacattataactatgatctgcgtatacaaccgcatgtacagtgaacggacactatgctagacttgtganccattctagagtatagagtatgcacaaanacggacgcagagtgcacgtatctgagattcgagtgncacgnatctatcgctcgacttgtcgtcgagtagtgatatagcgctaggtgagctgatngcattgcccgtctccgctagtatcataagtcgtgggtcgcgcacgcacgcgtagtgatatctatctgtgtcttcagcactcgcgacagcgcgtatacgctcggataactcgtctcgtcgttgttgcgtcttngagcaggatatcacatgtgcacacgcacaatatggctgtagagaaacgcacgcgagcatacgactacacacatgcnacgaagacagncgtgccacgcagctagcgcgcactagcagcatcgtgtcggcgaccacaccgacaccgtgcgacggatgcgagagtcagtacngcgntgatgcggaggtcgactgtaccagataggtctcgngcgcgatagtacatgagtgctactgtcccactcgacccgacgngngcaggacgccgatgagcgagcatacatatagatggtgtacacaatgccatcgtcactcattncaacgatgaaaatacataccacgcgctctcgtctatcagagactcaactgcgtcgtgtaacactatatatgtgtactgattacactgatcttgtatggtgttgcgtcgtcatancactagttacttatgtgctcttaatcacacaaccanccactgcgctgacgtgtaagacgcgatcgctagtcatcattctagtctcaccgatataacaagcgtgcgacgtcagatgacnaacntcgacggacacgtcgagctacaacgcacgtgctgaatgaggaancacaacgaaggatcgcgaagg

SEQ ID NO: 5153 - DNA, 1416 bp, Glycine max
  misc_feature (9)..(13): n is a, c, g, or t
  misc_feature (18)..(28): n is a, c, g, or t
  misc_feature (35)..(35): n is a, c, g, or t
  misc_feature (40)..(40): n is a, c, g, or t
  misc_feature (42)..(42): n is a, c, g, or t
  misc_feature (57)..(57): n is a, c, g, or t
  misc_feature (59)..(61): n is a, c, g, or t
  misc_feature (82)..(82): n is a, c, g, or t
  misc_feature (84)..(84): n is a, c, g, or t
  misc_feature (127)..(127): n is a, c, g, or t
  misc_feature (129)..(131): n is a, c, g, or t
  misc_feature (133)..(133): n is a, c, g, or t
  misc_feature (165)..(165): n is a, c, g, or t
  misc_feature (254)..(254): n is a, c, g, or t
  misc_feature (312)..(312): n is a, c, g, or t
  misc_feature (372)..(373): n is a, c, g, or t
  misc_feature (378)..(379): n is a, c, g, or t
  misc_feature (509)..(509): n is a, c, g, or t
  misc_feature (567)..(567): n is a, c, g, or t
  misc_feature (759)..(759): n is a, c, g, or t
  misc_feature (808)..(808): n is a, c, g, or t
  misc_feature (958)..(958): n is a, c, g, or t
  misc_feature (1020)..(1020): n is a, c, g, or t
  misc_feature (1185)..(1185): n is a, c, g, or t
  misc_feature (1366)..(1366): n is a, c, g, or t
  misc_feature (1370)..(1370): n is a, c, g, or t
  misc_feature (1372)..(1372): n is a, c, g, or t
  misc_feature (1384)..(1384): n is a, c, g, or t
  misc_feature (1396)..(1396): n is a, c, g, or t
  misc_feature (1414)..(1414): n is a, c, g, or t
  Probeset Number=SeqID_14932
ttttttttnnnnnttttnnnnnnnnnnnttttttnttttntngtccacgctttctcntnnncctcctccctccctgtcgccnantctgtatcgcgtcgtcgctctcctcgcgccggcgccgcgcgtncnnncncgcctcactgaccggctcgcggctctctcagnacgctccacggcagcctccgctcacacccagccgcacgggtgtgggtgatggaggatgtctcaggtagatggtgaagagtattgtgtanatctatcatgctccttctattatctcctacctattgcactgcgcggtcctcttacttntggttagtatatatattaatatatagtatatatctacacctatcaaaaacatcaccacannccaannacctcgtccctcctcgctactgaccaccgtccgcacgacgtggtcgtatatgtcagaagagtgaacagaagtagaaataagaaataactggtagctgctcgtgctgacgctgcgagcgcggcagtcgcgngctatccgcgcgcgcgcagacgtgcgagatgtggtggcgcgcatgtaccgcatgcgancgacagaagcgtcgtgcgcacaagcgtcccttctactcgacgtcgtgagcccgcttcgtctgttctgacggtgtctattgcattgtctatatcacgatcgcggagccggactggtgcgctgcgcggagtgtggatgtactagcgcggctgtgacaatattgctactctcattcttactcgggaccgcgtaangcgggttgtctcatgcgatcgactgtcagcactagtgtgtattatattnatgaatgcatattcctaataacatcctactctcatcgcaaccatatcggtagaggcgatgggtatgtctaatactctgtcttatgttgatcatcatgatcagtagcgtgatatgcggttgcgacgaggcgcgagagtctgcggcagtggntagagaagagaggagagagagagtgtacatatcattatatatctatgatgtgtatactggtntgtcatgtgagctcgtaagagtgatgtgtttagtcagtatacgacgctatatatgtgagtgtatggatgagcggcgacttcagctctcgacgtaatatactatattactatatcgcgcgcatactactgcgaggaccatacagacgttgagatgacatcgcagtnacttcacgtagtactctatgtctcgctataattaatcatctacacctcccttcactcttagactacctgcgactcatatgcggcatgtcgcgtgtatatgtgtcggtactgtacggcgcatgccgtgcgtgctgagtggcgcgagcagatgccgatgtatgttgtgagcacgctagtgcgnagcngncgctaagaccgngcagatccacgnacagcatcgatagacaancg

SEQ ID NO: 5154 - DNA, 1899 bp, Glycine max
  misc_feature (1)..(1): n is a, c, g, or t
  misc_feature (28)..(28): n is a, c, g, or t
  misc_feature (39)..(39): n is a, c, g, or t
  misc_feature (51)..(51): n is a, c, g, or t
  misc_feature (57)..(58): n is a, c, g, or t
  misc_feature (105)..(105): n is a, c, g, or t
  misc_feature (112)..(112): n is a, c, g, or t
  misc_feature (126)..(126): n is a, c, g, or t
  misc_feature (134)..(134): n is a, c, g, or t
  misc_feature (156)..(156): n is a, c, g, or t
  misc_feature (159)..(159): n is a, c, g, or t
  misc_feature (178)..(178): n is a, c, g, or t
  misc_feature (188)..(188): n is a, c, g, or t
  misc_feature (212)..(212): n is a, c, g, or t
  misc_feature (222)..(222): n is a, c, g, or t
  misc_feature (228)..(229): n is a, c, g, or t
  misc_feature (231)..(231): n is a, c, g, or t
  misc_feature (262)..(262): n is a, c, g, or t
  misc_feature (265)..(265): n is a, c, g, or t
  misc_feature (276)..(276): n is a, c, g, or t
  misc_feature (336)..(336): n is a, c, g, or t
  misc_feature (350)..(350): n is a, c, g, or t
  misc_feature (352)..(352): n is a, c, g, or t
  misc_feature (397)..(397): n is a, c, g, or t
  misc_feature (402)..(402): n is a, c, g, or t
  misc_feature (433)..(433): n is a, c, g, or t
  misc_feature (435)..(435): n is a, c, g, or t
  misc_feature (439)..(439): n is a, c, g, or t
  misc_feature (441)..(441): n is a, c, g, or t
  misc_feature (447)..(447): n is a, c, g, or t
  misc_feature (475)..(475): n is a, c, g, or t
  misc_feature (481)..(481): n is a, c, g, or t
  misc_feature (567)..(567): n is a, c, g, or t
  misc_feature (621)..(621): n is a, c, g, or t
  misc_feature (666)..(666): n is a, c, g, or t
  misc_feature (668)..(668): n is a, c, g, or t
  misc_feature (708)..(708): n is a, c, g, or t
  misc_feature (733)..(733): n is a, c, g, or t
  misc_feature (766)..(766): n is a, c, g, or t
  misc_feature (781)..(781): n is a, c, g, or t
  misc_feature (806)..(806): n is a, c, g, or t
  misc_feature (849)..(849): n is a, c, g, or t
  misc_feature (1040)..(1040): n is a, c, g, or t
  misc_feature (1145)..(1145): n is a, c, g, or t
  misc_feature (1174)..(1174): n is a, c, g, or t
  misc_feature (1281)..(1281): n is a, c, g, or t
  misc_feature (1370)..(1370): n is a, c, g, or t
  misc_feature (1485)..(1485): n is a, c, g, or t
  misc_feature (1549)..(1549): n is a, c, g, or t
  misc_feature (1620)..(1620): n is a, c, g, or t
  misc_feature (1670)..(1670): n is a, c, g, or t
  misc_feature (1745)..(1746): n is a, c, g, or t
  misc_feature (1752)..(1752): n is a, c, g, or t
  misc_feature (1765)..(1767): n is a, c, g, or t
  misc_feature (1770)..(1770): n is a, c, g, or t
  misc_feature (1772)..(1773): n is a, c, g, or t
  misc_feature (1775)..(1781): n is a, c, g, or t
  misc_feature (1828)..(1828): n is a, c, g, or t
  misc_feature (1839)..(1840): n is a, c, g, or t
  misc_feature (1843)..(1843): n is a, c, g, or t
  misc_feature (1867)..(1867): n is a, c, g, or t
  misc_feature (1869)..(1869): n is a, c, g, or t
  misc_feature (1874)..(1878): n is a, c, g, or t
  Peptide Sequence Number=SeqID_7047
  Probeset Number=SeqID_14933
ncgctgtgtcgtgtcagatgcacgagcngtcgatgaatncgaaaggagcangagagnnggagtgcatatgagtgtgacgatgattatagtctgcacgctgatcgngtcgacntacgtcgctgatcnagtagcantagctatgtagaccgtatatgntantgagatgatagtagctgcngctgagtgtntgatgcacttgtggcatcaatatntcagcatctncagtanncngtttctcactagtgtggtatgatgatgtgantanttgtacgatanactggtagcacgttgcactatcatagtcatagtatcgagcgcgtgtcgtgtgaggatcangtgcactctcgtcnangcatcgagcacagtccgacgacgtatgccgatgtgagcgcacgcncgcgnatgcagtctgagcatgtcgatagatcagctncntacnangagctncggagatggtcagcgagcagcgcgacgnagcacntcagcgtaggcggcagtgacgcactagagattcattctgcgctgagtcgtcgtagcgaggttgatgtgtgagcacatcgtgatagnacgacagcaagcctgagagagtcatcggacggtgtcgtgtctagttcggattgntactcgtatcagtatatgacacgcatgacatactatcgtacagcnancgctatgccacgcagtgtcgttgggggtgggtgcgctcgntgcagcgacgatcgagtcgcgcgantcgtatgataatgattccatgctatactatcantactggatctgctangtagcgtacgctcttcaatattcgngcgaagctgcgtggttagtacgtagtgcgtggttgctctcagngctgctaggtgggcatgtgctgggtgatacactaatagcagtagcatgactagtcctatcactatatacgccgtgtagacgtgcgtcgatgacacctcatgtatgctgcttctaggcagtgtgtgccgtctatcatatgatgttgaagaatagtgctatatcgtgatgatcctcatctctatatcacatantatctaggcactctctattctctccacatcgtatacatcggtgcgcgtgggctgtcaactataacaacgtgtatcatagatgtgtggtgtgtgtcgtcggtatgnactcacaacaacacgatcaaccgccactncatcactacaccacacgacacagctgcagctaagctccagcagaggcgtgacgacacgtcggcgacgcgagaagaatgcgtgatagtcagtagcagcacgacaggtngatatcagacaggatgagagtcgacacgtacaccacactccgcgtgtgtagccagcagaattacacaacaatggccatgatgtcactantcaaactacgacaccgtcaacctagagagtcgcgtctgcgcgcatacatgagagagtggctgctcgaacatgaccatacacagatcatgcacgctgcgtagtcactactcctacngttgttgacgcactaccgtcagtgtgtgtatgtagatctctcattctctgccgcgtctactatnctcactgttgtgcgctcctctctcgatacagctaagtgtagtttttgtatcgatatctatgtatagacagntataagtagactcttaggacaagtattaacttatcgactttctcttctcntcactactgtatatatacagtactgcatcttcgcttctgacacactgtgttgatggttgaggtacggtgtttctnngggtcngggcgcgcgccgnnngtntnntnnnnnnnttttggttgcacaactgatacgacttacattgacgcgagcgattganttgcggttatnntanagcgcaaccaccgggaaagacacnangaaannnnntcttctactcttctgtttttt

SEQ ID NO: 5155 - DNA, 407 bp, Glycine max
  Probeset Number=SeqID_14934
aattccatgggtagtgaatggaacatggagccccagtaagagctttatgctcgcatggtaggtctccactgccggcagtggtaatctttcgaaggccctcaggtcctctgtctcaatgccaagtctcatcctcatggcgccgttgcgggtgcgctattctgtggggtgccgaatccctcatgatgtggagttagcagcagcagtggcagagctatgtatttgagttagagccaggcgacccaggattgtatgtatttcttgccctcatataagtagtgttagtatagtggcgagaagtaaagaagttgcggcacagcgtttggtgtgcagggcctaaagcacagtatcaggtggtagatgaacaaagggccaaggtatgtttaccgccttgttctgcggtcgatatg

SEQ ID NO: 5156 - DNA, 1344 bp, Glycine max
  misc_feature (27)..(27): n is a, c, g, or t
  misc_feature (65)..(65): n is a, c, g, or t
  misc_feature (87)..(87): n is a, c, g, or t
  misc_feature (117)..(117): n is a, c, g, or t
  misc_feature (167)..(167): n is a, c, g, or t
  misc_feature (200)..(200): n is a, c, g, or t
  misc_feature (211)..(211): n is a, c, g, or t
  misc_feature (241)..(241): n is a, c, g, or t
  misc_feature (261)..(261): n is a, c, g, or t
  misc_feature (284)..(284): n is a, c, g, or t
  misc_feature (305)..(305): n is a, c, g, or t
  misc_feature (456)..(456): n is a, c, g, or t
  misc_feature (646)..(646): n is a, c, g, or t
  misc_feature (792)..(792): n is a, c, g, or t
  Peptide Sequence Number=SeqID_7048
  Probeset Number=SeqID_14935
ctacgcggcagagatattactagtcancttggaactcattagcgcgcacggtgtacggaacatcntcatatcacatactgcatgcgngactctgagtatactagtggccggcactantatgtatccggtgctacatcataccgtgatatacgttctaggccgactcngacgcataccgacgcatacgcacacacagcggngttacattaantaatatccatatccgataacgatataccgnccacaccaggcggctgctantatatagctactgcgacgtatcncgcgtcccgtaaatcgcgtantcaattgtatgatagttttatcactccggataagcgacgcggagagagtacggcgcgagagtggtgtcaatatggtcgtctcgatcgcaggagcatgcacgcggggagtttccctctcctactacctcttcactacatcatatcataacanaccgcggcggcggccgatatgtatatgtgtatcgctaacaggggaacaccccatagtggagtaggtgggggttcgaaccgtcgcgagcgtgataaagattagacgaacacagcggcagaacgggtgtatgtataatacagcggtcactgaaggctggtatggaattaatgaagttgtaaatctacagatncgactgaacagcacgggggcgcagtgacgtaccgcaatcattgatgtcgataacatcgacggaccactcccgcgcatagcgttacacactgatacaaggaatacagctagcggtccggtgttaactggataccccagcgtcgcacnatcaacaatgtgtagttcttcccgcgtattcgcttccacctccgcgcgttcctccgtacataccgatttagatcatttctgtgtgcggggttttgtcgtcaggagaagtgcgcttattcgttagacgtgtagtttgaatgcataattattacttctgagattgatgagcacaagtgtcacattacatgtcgtaagtggttcaacgtgtctcactttattatttcattataaaaggtcgcgttggctttggactgttctgtatggcaactcaccattctcagactagtaggtacgttgtgtttgttactcatctctgtaatgcttacgcacgagggcaacaagactcgtgggcaaggatcaatttactctcataatacaccgtatgcgttgtgagagcctgattatttgcccgggtacgcagatcgaatacataccctcgccccccaccctccccataaatgtttcttcaatgcccctgttgtcgtgggggggggggggggccacgcgcgccactctatcagcacttgatatatttagtgctccagctctccc

SEQ ID NO: 5157 - DNA, 2361 bp, Glycine max
  misc_feature (1)..(1): n is a, c, g, or t
  misc_feature (25)..(25): n is a, c, g, or t
  misc_feature (50)..(50): n is a, c, g, or t
  misc_feature (55)..(55): n is a, c, g, or t
  misc_feature (67)..(67): n is a, c, g, or t
  misc_feature (70)..(70): n is a, c, g, or t
  misc_feature (112)..(112): n is a, c, g, or t
  misc_feature (114)..(114): n is a, c, g, or t
  misc_feature (119)..(119): n is a, c, g, or t
  misc_feature (123)..(123): n is a, c, g, or t
  misc_feature (142)..(142): n is a, c, g, or t
  misc_feature (177)..(177): n is a, c, g, or t
  misc_feature (195)..(195): n is a, c, g, or t
  misc_feature (200)..(200): n is a, c, g, or t
  misc_feature (206)..(206): n is a, c, g, or t
  misc_feature (230)..(230): n is a, c, g, or t
  misc_feature (238)..(238): n is a, c, g, or t
  misc_feature (261)..(261): n is a, c, g, or t
  misc_feature (276)..(276): n is a, c, g, or t
  misc_feature (299)..(299): n is a, c, g, or t
  misc_feature (304)..(304): n is a, c, g, or t
  misc_feature (310)..(310): n is a, c, g, or t
  misc_feature (313)..(313): n is a, c, g, or t
  misc_feature (328)..(328): n is a, c, g, or t
  misc_feature (423)..(423): n is a, c, g, or t
  misc_feature (441)..(441): n is a, c, g, or t
  misc_feature (467)..(467): n is a, c, g, or t
  misc_feature (485)..(485): n is a, c, g, or t
  misc_feature (535)..(535): n is a, c, g, or t
  misc_feature (581)..(581): n is a, c, g, or t
  misc_feature (583)..(583): n is a, c, g, or t
  misc_feature (585)..(585): n is a, c, g, or t
  misc_feature (615)..(615): n is a, c, g, or t
  misc_feature (620)..(620): n is a, c, g, or t
  misc_feature (636)..(636): n is a, c, g, or t
  misc_feature (668)..(669): n is a, c, g, or t
  misc_feature (745)..(745): n is a, c, g, or t
  misc_feature (773)..(773): n is a, c, g, or t
  misc_feature (831)..(831): n is a, c, g, or t
  misc_feature (833)..(833): n is a, c, g, or t
  misc_feature (835)..(835): n is a, c, g, or t
  misc_feature (888)..(888): n is a, c, g, or t
  misc_feature (935)..(935): n is a, c, g, or t
  misc_feature (1019)..(1019): n is a, c, g, or t
  misc_feature (1047)..(1047): n is a, c, g, or t
  misc_feature (1065)..(1065): n is a, c, g, or t
  misc_feature (1077)..(1077): n is a, c, g, or t
  misc_feature (1214)..(1214): n is a, c, g, or t
  misc_feature (1240)..(1240): n is a, c, g, or t
  misc_feature (1299)..(1299): n is a, c, g, or t
  misc_feature (1316)..(1316): n is a, c, g, or t
  misc_feature (1402)..(1402): n is a, c, g, or t
  misc_feature (1406)..(1406): n is a, c, g, or t
  misc_feature (1453)..(1453): n is a, c, g, or t
  misc_feature (1528)..(1528): n is a, c, g, or t
  misc_feature (1612)..(1612): n is a, c, g, or t
  misc_feature (1679)..(1679): n is a, c, g, or t
  misc_feature (1690)..(1690): n is a, c, g, or t
  misc_feature (1747)..(1747): n is a, c, g, or t
  misc_feature (1752)..(1752): n is a, c, g, or t
  misc_feature (1781)..(1781): n is a, c, g, or t
  misc_feature (1814)..(1814): n is a, c, g, or t
  misc_feature (1862)..(1862): n is a, c, g, or t
  misc_feature (1962)..(1962): n is a, c, g, or t
  misc_feature (2010)..(2010): n is a, c, g, or t
  misc_feature (2023)..(2023): n is a, c, g, or t
  misc_feature (2034)..(2034): n is a, c, g, or t
  misc_feature (2065)..(2065): n is a, c, g, or t
  misc_feature (2090)..(2090): n is a, c, g, or t
  misc_feature (2193)..(2193): n is a, c, g, or t
  misc_feature (2239)..(2239): n is a, c, g, or t
  misc_feature (2273)..(2274): n is a, c, g, or t
  Probeset Number=SeqID_14936
ngcagccatgcagacgatgcgaacnatcacttagctttcctcagtcgcgnaatcngactttcatatnctnatccatcatgccagctaccacgctcgtggtcactactagagncnaccgnacgngacgtcgcgcttcgatcancctgtacacacgcatctatatgatctcgacgatcnactagtatactatcgctntgacncggccntagcagagacggcgtagtagtcgnattgcgtntctgctcgcatctcgtagtcgantgcgcatgactcagntccgcgtgacgtccattacgacnagtcnagcgcntgntgcgtactgactagngatcagatcgtatatattcgactcgccgtcacctcataatagtagcgtatggtagtcgttctcgatcgttcagtagctctagcattcataatctnatctcatgtgctatcagntgtacgcgactacttcgcgtgactgncgctcgtgcagatctacngatctcgcatgacatatgagtcacagcgtcgcttgctttacactgtgtcnatcagtgtcagattcatcgcatcgagtctctcgtatattcgactantnantcgagtgcaactgatatcagtctgtgtcanatagncgttccatttcgttanacgtcgttctgacagcactagatctagtatannaacgtgtacattcgtatcgttatcgtatggtagttctatatcgatctgatcactagatgcagatgtcgcgacgtantatgatacgtatcttcagcgatgtggtnagtcgtgcatcgtgcatctcgtcgtatcatacgtatgtctacatgtacagcatgcgcncncncgtacactgatgtcagactactcacagcgcggtcacgcgcgacgcaacgtccngacacacagcgcgcaggctctcacgtcctatatagtcgctatcgtcnacgtgatcactctacaggactctagctgatgagttatagatctagatatagtagatgacgatcgctagacacatagcttgtacnctctgcgctatgtacatacgtgttggtntactgcgcttctatcgtnctctactcttcngcatacgtagctactcgcgtcgactatacgacttgcacagagcgatgtacgtgactagtcgcgctatacgcaccgagagcatgtatcatactacgatatgtcagagcactcagaccttccgtccagactctgcgganaccgctatcgcgatcgatctatgcanccacgctatctatcatcgtcgcgacggagcgagtgcatgcgtatatccgtctactgcgnctccgccgtcattcatnttctatatctgatttgttcgacaaggctcgtactatacatcactcggtgacgtgacgtacacctcctacgcatgagattagtgcgnctcntgtcagctatcacgccactcgtcatcgtatgctcgtcgagtagcctngcattctatctcgctcatctggtcgtgtcatgctgctcgtattgcctcgtgctgctcgtcgtcggtcgctgagtngcgtctgtcgccgtcgttgtctttacgctacatatatatacattactatttgatttgagaatgagtactatgatcgcgagacancggcgagcagcatacgtcatagtcgacgactaatactgcgatacgtagtatcaatcgactctatgtnatatacacgtncgacgtggctacagcgtcatcatatagtcatatgttaccgctcactcagcgtcctgnggganccaacgagctcagcgtactaattacagtnttcgacatatgttagaatcaatctcactctgtnattcagtgcgccagtcgcgttcagtgagtgtacagcgacatcattcgntcgcatccctcgtcgcgtgtgggcagctgtgtatagtgttctcacgatggtgaagtaatgatatatacataaacagcgagacgtcgctatgcataggtgntagatagtttgtgttgtcgggggtgctcatagagaaaatatattactntcgcgtgtggcgncacgctcgctncatcacgtaaacagacagcgtgtatatatgnaatgcgattacttcctcactgattnagctggactctcgtactcaggatgaacacacattatatcgactcagtcgcagcgtccctcctctcagcacctacgtctcagtgcagagaacacacacgcgcgncggctgcccttcccgccacagcgcggtcgtcgtcatagagtcgtcnggcctccagtgtaggagccattaatcactgtacnnacatatctcatttatccctacctctcctgttactcgatctataatatatatcgtgctactgtatctattcatatgtgcgctgtaaca

SEQ ID NO: 5158 - DNA, 508 bp, Glycine max
  misc_feature (486)..(486): n is a, c, g, or t
  Peptide Sequence Number=SeqID_7049
  Probeset Number=SeqID_14937
ttttcgttcagattttggtagaatggtgatgggttcatcgaaaggtagagtgaaagcatggttcaataagaaaatcaccgatcctcttctccagatcttgcgtagaggtactgagcctaagcaacttgctttctccgcagcactcggcattaccttgggaatatttccaatttgcggtgttcctgtgtttctatgtggagtagctattgcatttcttggatctgcttgtcatgctccaaccgtcatgttggctaacatcattgccactccagtagaactagctctggtggtgcctttcctacgacttggtgaaaaagtcaccggtggtcctcattttcctttgacatcagatgcccttaagaaggttttcactggccaagcctcccaggaagtctttttaagcattggtaatgcgttactagggtggcttgtagcaactccatttttctttattgcgctatacgttgtgttgatgccatgtttcanaatcctggtccgtaagtttggc

SEQ ID NO: 5159 - DNA, 1170 bp, Glycine max
  misc_feature (1170)..(1170): n is a, c, g, or t
  Peptide Sequence Number=SeqID_7050
  Probeset Number=SeqID_14938
ggaaaggggggaatttttccaaaggggaataaagtggggtacccccagggttttcccccgtcccggacgttttaaaaacggcgggccgtggaaattgtaataagtcccactatatggagaattcgtaccgggccccccctcgagtcaggtacgtaggcccccccccccaggttgatcagttgttttcttcaggcaagtggggttctttttcttgtcctaaaacttttagtaacaaggccattctctaatagtttgataactttctgggaatttttgcacttggatatgcattcacgtagttgtttctgaaaaggggttaaaagtacaaccaccctactcagttcaggagagacattcaagaagtttggtgaattccaggttcctaggatgttgtatctttcaaagggttgtggatgtgaagttgttctgttcttgtggttctgctgctatttactattaactgctggtcagatcactgagcccactgaaggtttatttcttttccacccctttttttgttggtattccatgctttgcacgcccttcttttatgattgtggaagtagtagctattctattggggagtactttctgttagatctcataggagtcataacatatattaccaaatggaatttatcaatcagttcatttgtttctatgtatataatcatgcaaagtattgtcaataaagctattagcaaaatatggaaatattgtatttatgtcttaaaaaaaaaaaaaaaaaaaagaaaaaaaaaaaaaaaaaaaaaaaaaacagaatttaaaggtcccggcccggcggggccgctcatgctgagtagaagcaggttgccccccctgtacgcgggatccccttcgcgttttgcggaacccctttcataggggtttcgattttggaattgtcacccgcttccaattctcctcatactttcagccggagggttaaacgtaaattcccgcgaggcctaacgcgggaactaattcacccttaatggggttgcgatcacaggccccttgttcaggcggtaaacccggcggggcagggtgaattattgaattggcccaacttaagggagaagggggttttggccattgggggcctttttgggttttttcggaaaaagaccccatgcgatcggcctttccaaagggggcgaaagggtaaan

SEQ ID NO: 5160 - DNA, 1388 bp, Glycine max
  misc_feature (54)..(54): n is a, c, g, or t
  misc_feature (205)..(205): n is a, c, g, or t
  misc_feature (242)..(242): n is a, c, g, or t
  misc_feature (395)..(395): n is a, c, g, or t
  misc_feature (397)..(397): n is a, c, g, or t
  misc_feature (431)..(431): n is a, c, g, or t
  misc_feature (438)..(438): n is a, c, g, or t
  misc_feature (752)..(752): n is a, c, g, or t
  Probeset Number=SeqID_14939
ggttgatcacgtatgtagtgcgaagctgatatgcgggctaggtcggcgtgactncatactccatagttacatagtcggagtcttagtccgactgccgagcgagcgcgtgtctcacctatacatgatgaagttagggatgagtcgcatgagacggtatgcgtcttacatcacacacaagtcggcacacgcgcgcactcgggtcatngcctcaccaatagcgatgcacacagtacgcggcacantgtgccatagatattacgctgcgagcagtatgcgagcgatgtactcgaatgagctccagcgacacattgtcgagattgatcgtgtctgtatgttagagtcctacgtctcgctcgtcgattatcgtggtgcgcagcactctgatgtcgctcacncnatctctatacacacccagagtcgacttagatacngctctgnttgctttcggatgtagtagagcgcgagttgcagtagatatagatacgtagtactatctggatcgctattctgcatgcgcccatgtactcccagtctcttgtcactcggacgcctgagctgcagagccatattatgtaatcgctgtgtgtctgtagagtgtcgggctcaacctgatgccacatatctacacaatatactatcatttagtaaggtggcgggactgcgcagtccttcacgactgtaatagttggagggtgggtgggtgggagagtgctgtgtgcgaggggttgtaatctggattttattatttgatnattatctaaattgtactatttaacaatcatcattatattatcattactctaagcaatttgtacgatgtcgtatttccacatgcaattcccgttttgcggtgtagatcattgtctacctattcgtttcggtcttcggataggagggctgtacttactctgtgatgtttgcaagtgatgtgtggagcgcacggcagcgaagatggccgtcatgttttgaagataatagctatgacgacgtaacacgatcgcggcgtgtgtttcgtgtattatccagttcgctgagcataagtctactctcgtcttttatacgttgtgctatcagccaccacgcgtgaacgcgaagcagacttcaatcagtataatacatacatggggggaggatgagaaggccccgcgcccgcgacaaacaagaagcaggaagcaggggaaaaagagttatataaggactcagcatgtaggtcgatccccacccaccaccctcgcccgcgatcgggtcacccgcatcggagtacgaggtcgtgtgcctgtttgtatatacgggtggttccgcgctccctaccgccagcacgatgtcacttttctaatgtgtgtgttttgtctcctgcatcagacaccaccacccaactcacacgccat

SEQ ID NO: 5161 - DNA, 1463 bp, Glycine max
  misc_feature (42)..(42): n is a, c, g, or t
  misc_feature (52)..(52): n is a, c, g, or t
  misc_feature (231)..(231): n is a, c, g, or t
  misc_feature (807)..(807): n is a, c, g, or t
  misc_feature (1170)..(1170): n is a, c, g, or t
  misc_feature (1286)..(1286): n is a, c, g, or t
  misc_feature (1298)..(1298): n is a, c, g, or t
  misc_feature (1340)..(1340): n is a, c, g, or t
  misc_feature (1441)..(1441): n is a, c, g, or t
  misc_feature (1463)..(1463): n is a, c, g, or t
  Peptide Sequence Number=SeqID_7051
  Probeset Number=SeqID_14940
tgtgacaccccccccacagacccccctaaacattaaatacancacaactacncccacgttacgttgcggaatataattaaacacttcaccacccccatcccgcgagacgcccacacaaatatataaaggtatctaccctacaacccctccgagagcacaggaggcaagagtatctgttgttaatatctttacgtaaacaaacagaaataagcgagaaggccgcgccacatnatatttcactaatcctaccgtgacacgaaacgcacgcgcggacaaagcagctctcagtatggagcaagcttattcatctatatgtgttactgcttgcttgcacttggaatgctactgtcagataaacggtgtgcgatacgcgccacaaataattatgctatgatatcaaaacaatactcgtatcttgacgacactggataacccagaccttacagacttcgcctgtgatagagttattgtgtgcaacataaagttttagtatctgaattactaaatctctctccctgagatagtaaagcatggatctatgttctaatgatcttgtattggatagatgctggtggacgtgcgcctgcgcatgaagtgctctatgaaaataaaatcataaatggcttgctcccaccaccctccttctcaatctactctaccacataatgcctatagcttgcttttgacgagtacgctatggattaatagtattattgtgggagaaggacacatgcccacttcgtggcatacttcgtatgttttcaagttattaattagtagaacacgacccttccacccacacacccntccgtacatctgacagatgattggacttacgctctgatgtggtatgacttcgcggcacaacataatgtgagtctgctcatctggcccgaccacaccctcacctcactggctgtctgcacatctcgacagtattgattgaaaatcaaagtacctgatagttacacggataaggtgggcactatgatctacggcgcgcgcgtagttataatcttatcgtccttctgcagcgcgcgccaacatgcgatgactaaataataacgtggcgcgcgagactagatagtcatgcagactattgtctcctctccgcctcctacttcactgttgcagaattgtatagtatatatgaagatgtgcgcttgtggncccccttgtgttcttgtgtgagcccggagatgatacatgcgatgtcatgctggacattatatgagtgtgcactatgtcagtggcgatgaagacacaccgcgctcgccgtaccaccngtaggacgtatngtagacttcaagcgtggctggcgctattgtatcatgtaaagngccacacagcgtagattgtgtaggcattgcacagtctgacgatgctatgcatatgcgggcgagtatcacatattctggtcatgatatagctctgaatcagncgcgacgtgactgatgtctgtn

SEQ ID NO: 5162 - DNA, 2089 bp, Glycine max
  misc_feature (2)..(2): n is a, c, g, or t
  misc_feature (28)..(28): n is a, c, g, or t
  misc_feature (77)..(77): n is a, c, g, or t
  misc_feature (119)..(120): n is a, c, g, or t
  misc_feature (147)..(148): n is a, c, g, or t
  misc_feature (158)..(158): n is a, c, g, or t
  misc_feature (199)..(199): n is a, c, g, or t
  misc_feature (213)..(213): n is a, c, g, or t
  misc_feature (243)..(243): n is a, c, g, or t
  misc_feature (252)..(252): n is a, c, g, or t
  misc_feature (255)..(255): n is a, c, g, or t
  misc_feature (258)..(258): n is a, c, g, or t
  misc_feature (320)..(320): n is a, c, g, or t
  misc_feature (328)..(328): n is a, c, g, or t
  misc_feature (332)..(332): n is a, c, g, or t
  misc_feature (336)..(336): n is a, c, g, or t
  misc_feature (364)..(364): n is a, c, g, or t
  misc_feature (372)..(372): n is a, c, g, or t
  misc_feature (381)..(381): n is a, c, g, or t
  misc_feature (385)..(385): n is a, c, g, or t
  misc_feature (408)..(408): n is a, c, g, or t
  misc_feature (410)..(410): n is a, c, g, or t
  misc_feature (412)..(412): n is a, c, g, or t
  misc_feature (425)..(425): n is a, c, g, or t
  misc_feature (460)..(462): n is a, c, g, or t
  misc_feature (467)..(467): n is a, c, g, or t
  misc_feature (497)..(497): n is a, c, g, or t
  misc_feature (499)..(499): n is a, c, g, or t
  misc_feature (573)..(573): n is a, c, g, or t
  misc_feature (604)..(604): n is a, c, g, or t
  misc_feature (631)..(631): n is a, c, g, or t
  misc_feature (634)..(634): n is a, c, g, or t
  misc_feature (644)..(644): n is a, c, g, or t
  misc_feature (649)..(649): n is a, c, g, or t
  misc_feature (652)..(652): n is a, c, g, or t
  misc_feature (685)..(685): n is a, c, g, or t
  misc_feature (695)..(695): n is a, c, g, or t
  misc_feature (706)..(706): n is a, c, g, or t
  misc_feature (715)..(715): n is a, c, g, or t
  misc_feature (718)..(718): n is a, c, g, or t
  misc_feature (741)..(741): n is a, c, g, or t
  misc_feature (781)..(781): n is a, c, g, or t
  misc_feature (786)..(786): n is a, c, g, or t
  misc_feature (817)..(817): n is a, c, g, or t
  misc_feature (825)..(825): n is a, c, g, or t
  misc_feature (871)..(871): n is a, c, g, or t
  misc_feature (873)..(873): n is a, c, g, or t
  misc_feature (877)..(877): n is a, c, g, or t
  misc_feature (903)..(903): n is a, c, g, or t
  misc_feature (906)..(906): n is a, c, g, or t
  misc_feature (965)..(966): n is a, c, g, or t
  misc_feature (978)..(982): n is a, c, g, or t
  misc_feature (997)..(997): n is a, c, g, or t
  misc_feature (1017)..(1017): n is a, c, g, or t
  misc_feature (1063)..(1063): n is a, c, g, or t
  misc_feature (1144)..(1144): n is a, c, g, or t
  misc_feature (1146)..(1146): n is a, c, g, or t
  misc_feature (1163)..(1163): n is a, c, g, or t
  misc_feature (1189)..(1189): n is a, c, g, or t
  misc_feature (1231)..(1231): n is a, c, g, or t
  misc_feature (1234)..(1234): n is a, c, g, or t
  misc_feature (1293)..(1293): n is a, c, g, or t
  misc_feature (1317)..(1317): n is a, c, g, or t
  misc_feature (1334)..(1334): n is a, c, g, or t
  misc_feature (1350)..(1350): n is a, c, g, or t
  misc_feature (1372)..(1372): n is a, c, g, or t
  misc_feature (1400)..(1400): n is a, c, g, or t
  misc_feature (1425)..(1425): n is a, c, g, or t
  misc_feature (1437)..(1437): n is a, c, g, or t
  misc_feature (1441)..(1441): n is a, c, g, or t
  misc_feature (1497)..(1497): n is a, c, g, or t
  misc_feature (1504)..(1504): n is a, c, g, or t
  misc_feature (1613)..(1613): n is a, c, g, or t
  misc_feature (1725)..(1725): n is a, c, g, or t
  misc_feature (1742)..(1742): n is a, c, g, or t
  misc_feature (1747)..(1747): n is a, c, g, or t
  misc_feature (1785)..(1785): n is a, c, g, or t
  misc_feature (1799)..(1799): n is a, c, g, or t
  misc_feature (1821)..(1821): n is a, c, g, or t
  misc_feature (1861)..(1861): n is a, c, g, or t
  misc_feature (1881)..(1881): n is a, c, g, or t
  misc_feature (1896)..(1897): n is a, c, g, or t
  misc_feature (1902)..(1902): n is a, c, g, or t
  misc_feature (1967)..(1967): n is a, c, g, or t
  misc_feature (1980)..(1980): n is a, c, g, or t
  misc_feature (1984)..(1984): n is a, c, g, or t
  misc_feature (1987)..(1987): n is a, c, g, or t
  misc_feature (2005)..(2005): n is a, c, g, or t
  misc_feature (2071)..(2071): n is a, c, g, or t
  misc_feature (2083)..(2083): n is a, c, g, or t
  misc_feature (2088)..(2089): n is a, c, g, or t
  Probeset Number=SeqID_14941
cnactaaagtgatggacacatgagcgancggaaacgatcacgagcagtatagcaagtcagtagcagtatcacagcangacgacaagcagaaggatgaatggagtacgtgatctcaactnntgaatagcagtagatttgcatgctgtnnacagacgggngtaatgatgacatgagagacgagggagactatcttctgacnctgatctgtactgngacgaactgattctatgaatgaatgggagntagagtgantantancgtctgatctagcatgcattaatgaggtagatagacgtagtcatatgccaaagtagtacttntggagtcngtanagcngcgacaagcatctagacagtgtgactantctagtanctacaaccnagtngcagtgacagacagtgtgtgctncntntcgacagtggtancgctacgctctgactacgcgtatctgatcggggtnnntcatnctcacacgcgctacactacgtatgctcacntntctctacgtacatgatgagaatgagtgacgactgtcacgcgtcatccgacagctagtgtcgtatagttgtgcgnacaatcacatcacgtgatgcagcgcgacgtnagtctcagggaagtagaggcgagagangtnacaaacacanggtgnagngcgcttctcgcatagtagacgcgtatctcctgnggtgagtgtngtgtgatgtgnactaattgngtngttggagcgggcgacgcgagcgngaagtctgtagacagacagatcgactacgcacagacagtnactcntagcacataacatatgacgtcgacagtgagngtgtgcgngggcgggtggggtgtggagatacagaagacagacagaagcagaacnancgcncctactatataacactcagtaatcancanccatcaccagaaatctaagtgtatgattcgatcacccgcgtcactcgtctataactctnnagctagataaannnnnaatcaatacacacancctcatcacatgcctatatnaatcgcactactaaatcactaatcgagcgcaaccgcaaccacacanccagatcgcacacatcgcacgatcgttctgcatcacgcctatgtcatcacgcgtctgcctagccgtccgacgagtatgtgnantcagcgccgacgcggcncgctacgtcgctacgggaggtcagtncagcgccgcgctgcgctgcagagacgttcgctccgcacgcgntgntatcgcgtctctcccgtctcttgtcgtcactgatatgcgttgtgacgtcgctcactgtnttagatgagagaggcgaggagatngtcgggcgcgtgatagntgacgaccgctgttgntttacgtgtgctgctgcgttanttatgataaagtacggcgctcgtcgcgnccgcgggtgactgagttcgtagtgntgcgtgtgatcntctncataacatgtggttgatctgtgcttgtacgacatacgtcacggagtgtcgcgacgntaatcgnaagacctcgtcagcagacgtaggtcgtagagagtcaatcagtagacaacaacagaacagaagcgtcgcacaggcgaggagaggggtaggacgcgcgagccgcagccgancacacatgcaactcacgaagcggagaggcgaggattgcacgaaatcgagaagagaaacggagacagtgaaaattgagtcaatataagacgtactacatactaagacgaactnagatagtacgatgtacntgtangagagatatatactaataatactagacgatatacagcnaccgtgttaaagtntctgctgctccgactcgcctantactattacacatatagtctatatgtagattatagttagnggatagcggctggtgttgtntctgtttgcaatttnnttatnataatacctacccgaaatgttgaggtgagtgataccacctagaggactataatagatatatggtngaaagaaataatnatgngtnacaaaaccataacgaganacgacgacgacgactgtgagcgggtgacacaagaagacggcggcgggccgcgcgtccgcggccagncccggaaaaaanccccnn

SEQ ID NO: 5163 - DNA, 350 bp, Glycine max
  Peptide Sequence Number=SeqID_7052
  Probeset Number=SeqID_14942
cgataatctcccaactgtcgattacgaaggcctctattattctttttatcttaacggcacaaacttacgggtgcgtcttgtacatttaggggggaaagacaaaggtcttttcggccaagatttttaagaagtttcaattcctccaaatttgatgactgcctcttcagatgcatctttcgattttataccatcagctcttgcaacgtttgttcattcagaacctgatcgttttcatcctcccccttgaagacaaaaataactgggttttacattctcattcccaatgaggcaaacatcgatttcatctgggactctaataaagtgaactaaaggtttcaatatttaacatt

SEQ ID NO: 5164 - DNA, 441 bp, Glycine max
  Peptide Sequence Number=SeqID_7053
  Probeset Number=SeqID_14943
agtccagtccactaccgaccgacaatatgcacgctctgaccatcatcttctccatggccgttgtggcggtctccgcccaatatcacggctccgctccttcctacggtggcgcttcccatggtggcgcttcctatggtggcgcttcctatggtgccgctccctcatacggcaagggagaagctacctccttccagaacttcaggctggagagcgtacagcagggatacggcaagccttcatacggatcaggacacggctacagcgctcctgcccctgcctaccacgctcctgcccccgcataccacgctcctgcccctgcctacaagccttcttacagcgctcccgcttacaagcccagctactaaacacctcttctctcgacctctgtcattcactgttatttatgtcatcgtcatcagtcacatgttaaataaataatgc

SEQ ID NO: 5165 - DNA, 2182 bp, Glycine max
  misc_feature (1)..(1): n is a, c, g, or t
  misc_feature (9)..(9): n is a, c, g, or t
  misc_feature (43)..(43): n is a, c, g, or t
  misc_feature (53)..(53): n is a, c, g, or t
  misc_feature (67)..(67): n is a, c, g, or t
  misc_feature (72)..(72): n is a, c, g, or t
  misc_feature (84)..(84): n is a, c, g, or t
  misc_feature (94)..(94): n is a, c, g, or t
  misc_feature (124)..(124): n is a, c, g, or t
  misc_feature (140)..(140): n is a, c, g, or t
  misc_feature (153)..(153): n is a, c, g, or t
  misc_feature (238)..(238): n is a, c, g, or t
  misc_feature (245)..(245): n is a, c, g, or t
  misc_feature (342)..(342): n is a, c, g, or t
  misc_feature (354)..(354): n is a, c, g, or t
  misc_feature (356)..(356): n is a, c, g, or t
  misc_feature (564)..(564): n is a, c, g, or t
  misc_feature (566)..(566): n is a, c, g, or t
  misc_feature (649)..(649): n is a, c, g, or t
  misc_feature (670)..(670): n is a, c, g, or t
  misc_feature (690)..(690): n is a, c, g, or t
  misc_feature (704)..(704): n is a, c, g, or t
  misc_feature (852)..(852): n is a, c, g, or t
  misc_feature (854)..(854): n is a, c, g, or t
  misc_feature (882)..(882): n is a, c, g, or t
  misc_feature (886)..(886): n is a, c, g, or t
  misc_feature (898)..(898): n is a, c, g, or t
  misc_feature (902)..(902): n is a, c, g, or t
  misc_feature (917)..(917): n is a, c, g, or t
  misc_feature (952)..(952): n is a, c, g, or t
  misc_feature (995)..(995): n is a, c, g, or t
  misc_feature (999)..(999): n is a, c, g, or t
  misc_feature (1009)..(1009): n is a, c, g, or t
  misc_feature (1022)..(1022): n is a, c, g, or t
  misc_feature (1086)..(1086): n is a, c, g, or t
  misc_feature (1098)..(1098): n is a, c, g, or t
  misc_feature (1100)..(1100): n is a, c, g, or t
  misc_feature (1217)..(1217): n is a, c, g, or t
  misc_feature (1278)..(1278): n is a, c, g, or t
  misc_feature (1303)..(1303): n is a, c, g, or t
  misc_feature (1316)..(1316): n is a, c, g, or t
  misc_feature (1359)..(1359): n is a, c, g, or t
  misc_feature (1381)..(1381): n is a, c, g, or t
  misc_feature (1418)..(1418): n is a, c, g, or t
  misc_feature (1487)..(1487): n is a, c, g, or t
  misc_feature (1491)..(1491): n is a, c, g, or t
  misc_feature (1496)..(1496): n is a, c, g, or t
  misc_feature (1583)..(1583): n is a, c, g, or t
  misc_feature (1651)..(1651): n is a, c, g, or t
  misc_feature (1695)..(1695): n is a, c, g, or t
  misc_feature (1763)..(1763): n is a, c, g, or t
  misc_feature (1833)..(1833): n is a, c, g, or t
  misc_feature (1901)..(1901): n is a, c, g, or t
  misc_feature (1903)..(1903): n is a, c, g, or t
  misc_feature (1913)..(1913): n is a, c, g, or t
  misc_feature (1930)..(1930): n is a, c, g, or t
  misc_feature (1945)..(1945): n is a, c, g, or t
  misc_feature (1964)..(1964): n is a, c, g, or t
  misc_feature (1969)..(1969): n is a, c, g, or t
  misc_feature (1974)..(1974): n is a, c, g, or t
  misc_feature (2010)..(2010): n is a, c, g, or t
  misc_feature (2017)..(2017): n is a, c, g, or t
  misc_feature (2020)..(2020): n is a, c, g, or t
  misc_feature (2023)..(2023): n is a, c, g, or t
  misc_feature (2032)..(2032): n is a, c, g, or t
  misc_feature (2148)..(2148): n is a, c, g, or t
  misc_feature (2153)..(2153): n is a, c, g, or t
  misc_feature (2164)..(2164): n is a, c, g, or t
  Probeset Number=SeqID_14944
nctgatttnatcgactgatgtatcatttagtatagcaacaaancagccgtgcntgtcagcaccgtcnctgcngattgcggtcangatctacagncacgcctgaacaccatactgcacatcacancatgtcatcctcacgnatagtctacgaangctctgtgacgcattcagactaatgtatagtactcacgatcatgcacgtgacgcttctgatgacacacacgtgtccccggaatancaatacngtgtgactatatcacacgatatacatggtgtactatatactcgaagcgatagagtaaagcatagtaacgtgatgatgccacacacgtgcgatgtgtntacagcatgttnangatagtaccaaccgtatgagtgtcagtcatgcattgatcgaggtcggtcgtctggcgtgcagtcgatgtgattgatatgatcggcacttgcgtgaatcaccactcagcttgtcatcacgatcgctgcataatacacatctacgcatatccgtcgtccacacatatgacatatatatatatagctccatcttcgtacatcgtacacagnancagagatcatagtacattatgtcgctgtcgtgcgtgtctcatcatctatagtcatgtgtatccatcatataataagtcaagtnttctatatatatatatacggngcgaccatatgatgtcgganccgcgcaccgcgcnaaactataatactaaatataaacatcactcatcgattgtatgagtctatgtcctcgatcgcactctatctttcatacttcgacagtaagagataacagacgcgtaatcttactccacgacttctaatagacgaccgctgtctgtgtgngnaattgatcatgcagctgacgtgatcgtntganaacacatataancacntctcacatcgcgctnccgcgcgatcgccaattacatattatcgtgacgcntccgactagtcagctgtgtatacgcagacgcgacagcgacganacgncgtgtactancatacgcacatcncttagtgtcgcgatcgcgctatgtaatgagatatgtgagacgacaatagtagacgcagtgctgncgagagtgcgancncgataacatatagtggcgcactcatatcatatatatatatatcaaccatgacgcgtactcatattgcggatctgatacgtcactatacgtgtcgcggggcacacacgtctccccatncacaatacgttcgtgccgctcgctccgctgagcggtgcgatgagtgcgcactcacgtgctngtgacgagtaccgagcgagagaagnacactatcatcantagaactacatataatcctacctcggctgcggacacacatcgntcctgcgctgcgtacatcgtcncgtcgttgcgtgctcgtcgcgctagctacagtcgacnatatatgtgtatatgatatactagtgagtgtacgatcatatactgtgagcatcgtctgcgtgtcggacnatcnctgcntagtcagcgtcacactcgacggctacggcagctctcgtctgcacgcatatgtacacaatgctcacagtgtgagtgtcgtacagacanaaagacacgcacgttcacatcaataacatcatgcgttgcctttcaatacgtatgctatacgcatagtngtcagtctcacatacgaccacggcggagagcgagtcagatcgtntggcaggcgtaccaatctgaatgttctgtctgatgcggtctgcgctcgatgggactaggcggtagcgnacgcgcgacgtcacacgaccatcgaccgtcatcactcgcgcttcgcactcgatcgaacgtcgactatcantacaagagtacagagcgcttaccctacgcgcgtgacgtatgatggaggatcatcagcatcgagagcancncacgcgcacnatctactacatctacgntcatgtgctgctctncgcgtcaggcgcgataatnatatnatcgntgagtgttatagtgatatgtcgtcgcctatcgcacngagatgnagnatnaaatctganagtatcggttctcgtggagtagtagagagagcacgtgctgacgagtgtatctcgctctcttgactgctcgactaagtgctacacgttgtatgtcgaagtctatctgtgtaggggtnactangggctagcagncaggcggagcgcccgcat

SEQ ID NO: 5166 - DNA, 1537 bp, Glycine max
  misc_feature (1537)..(1537): n is a, c, g, or t
  Peptide Sequence Number=SeqID_7054
  Probeset Number=SeqID_14945
acaattatataacaacaaacacaatcttctaaaatcttaatcttttaaactatgttttctgctgctgtacgtcaaagctctcaagccctatacagacaatcaactagggcagtctccaagaacaacaacttccttaacatcctcaagcaattctctgttaacaatacccaaggttacaagggctatagaggaattcaaactgacaacaagaccgactcaactttaaaggcagctgagaaggttggtgaacaaatgaaacaaagcactaaggacatgagtgaaaacattactcgtaaatatgaggaatggactagatcttcaactggagttggtgctcaagctcaaagctgggctgatagtattaaggataccgctgctaaaaagggccaagaatggacaaaccaagctcaagagaaggtcagtgaagctacatcaggtatgagtgtagatggcatggccaagactgctaaagatgctgccaactatgctaaagacaaaatgagtaatgccacatctggaatgaacatggatgacatgggtaaaactgctaaggatgctgctaattatgctaaaaataaaatgagcgatgccmcaggccaaatgaacgtagatggtatgactaaaactgccaaagacgctgctaattatgctaaagacaaaatgagcgatgccacatcaggtatgagcatggataccgtgactaagactgctaaggatgctgccgattatgctaaaactaaaatgggcgatgtcacaggtcaaatgaacatagatggcgtgactaagaccgttaaggatgctgccagttatgctaaagaaaaagtgagtaatgtcgcaccagatatgagtatggacactgataagatagttaaaactgttaaagatgctgcaaacgccgctaaagataagatggctgacaccacctctggaatgagcatggataagatggcccaacaagccaaagaagccgcttctactttagctgaaaaggctaagcaagctgtaggtcaaggaagctcagcaactgaaacccttaaagattgggcttccactgctcaagaaacagcttccaaagtaactgaaaaggccaaggaagctgtacaaggatctactactggttatgttgacagtgccaaagaagcaatgaaaaacataaaggaaggagcatctactgttactgagactgctaaagaatacgctcagactgccaaagaaaaggtgcaagatgttgcctcttcaagtactgttgaaaccatgaagaagaagggtgaggaaatgattggcactgctaaggaagctgtcaagaacgcctctgacaagatgaagaagtaaatatatatcattgattctacagaaagctataagactaaaggctttcttattgttaagatataggtaaattatattatatggtatgaatgttaaggttgttaacatgacaactctatttaatatgaacagtaaaatacttttcttaatcgtaagtaccataaactccttacataaaccttgtatataaataacatttaaacacttn

SEQ ID NO: 5167 - DNA, 1588 bp, Glycine max
  misc_feature (29)..(29): n is a, c, g, or t
  misc_feature (56)..(56): n is a, c, g, or t
  misc_feature (103)..(103): n is a, c, g, or t
  misc_feature (447)..(447): n is a, c, g, or t
  misc_feature (863)..(863): n is a, c, g, or t
  misc_feature (1073)..(1073): n is a, c, g, or t
  misc_feature (1563)..(1563): n is a, c, g, or t
  misc_feature (1588)..(1588): n is a, c, g, or t
  Peptide Sequence Number=SeqID_7055
  Probeset Number=SeqID_14946
tcttttccattggggttgggttagtgaantataatgagtaggtgagtagtgggcanggagttgtcgatgaggataacacgaccgaaacaccgcgccgtcttcnttattctctctctcctcgccaccctccttggaccgcgtcacctactcttatcacacgaagttaggacaccgatcgccgccgcgcggaagagcgatgaggtgacaactctatgttatgttcgtcgcatcgtgtacaagacacgaagatctttgtctagatagagctagctagactcttaatatattgttttctctctgcagagagtaggagaattagagaatatgcggagtgatgggtaatgctggacgcgcgagatgctcgtacagtggtgcggctatatctagttgacctcctacactaaagctccgccgctaccgcgcgctcgccctcctcgtcacacatanacaaccctcacaaaacaacctactctcactcaaacatatcgaaacccactacatacactcgtccgtgcacagacccacgacactcacgccacacagaccacacacaccaccagaactccgcgatctgagcgcacgagacgcccgaaagtccaccactcaccgctccgctagcaagactctaagactaacttacgcttgtctcactcacacatacatatatcacgcattcagaacctacaacaaaccctgctaacgtatagatgcctagatagaagagagctcacacacatcgaaggcgagaactgatagatatctgggatagtgaccacgagctgatcatggaacacgaattgctagcgcccgatgacagtgaggtagatgttggattagacgactcccgtcctctaccaacacangaaccgatcccgcccggaagaactcgacacgatccaaccgctgcacgatttaatcaatgacatgcgatgcggtcagtgtgactcatatatctcgacgctccccggcccctgcacgccacgcaccatgccaccacctatgactcactacgctacaggtcttacagcactagttatgacaatacagacgacttatactgcaatatcaacatncatcatactcacaattcgttacatatatcagacatctcaacagaacacggcctaggaaaggtcgcgcgagactagcgacgctaaatcatctgtaggatcatacaacgactaccggtgctgtacgcatatgaaacgtcgcttactgcgctgcacgcactcgacgctcggcgaagtcggcaaatgtgtgtggattgtcactcagacgcgtatcactccatctctgatcctgctcgcgtagatgattggtgagatgatgctccgatcacagacgtagcgccgcgcactagcgcatggcgcataacaggacgaacgctcatgcggatacagacgcacataccacacatagtcgtggctctgcatctctcgagatgtctcgagctctcgtgatcatacactttgtgcgtaacgtgcagcgtcgatggcgactacgcgcatgagaccattagtcactgcgaatagtgttccgcgtctcgtctgaggagaggaggangatgaagctcacggacgccgcgcan

SEQ ID NO: 5168 - DNA, 1498 bp, Glycine max
  misc_feature (42)..(42): n is a, c, g, or t
  misc_feature (74)..(74): n is a, c, g, or t
  misc_feature (98)..(98): n is a, c, g, or t
  misc_feature (103)..(103): n is a, c, g, or t
  misc_feature (105)..(105): n is a, c, g, or t
  misc_feature (122)..(122): n is a, c, g, or t
  misc_feature (134)..(134): n is a, c, g, or t
  misc_feature (244)..(244): n is a, c, g, or t
  misc_feature (277)..(277): n is a, c, g, or t
  misc_feature (298)..(298): n is a, c, g, or t
  misc_feature (397)..(397): n is a, c, g, or t
  misc_feature (423)..(423): n is a, c, g, or t
  misc_feature (476)..(476): n is a, c, g, or t
  misc_feature (486)..(486): n is a, c, g, or t
  misc_feature (596)..(596): n is a, c, g, or t
  misc_feature (680)..(680): n is a, c, g, or t
  misc_feature (688)..(688): n is a, c, g, or t
  misc_feature (826)..(826): n is a, c, g, or t
  misc_feature (829)..(829): n is a, c, g, or t
  misc_feature (839)..(839): n is a, c, g, or t
  misc_feature (843)..(843): n is a, c, g, or t
  misc_feature (847)..(849): n is a, c, g, or t
  misc_feature (866)..(866): n is a, c, g, or t
  misc_feature (879)..(879): n is a, c, g, or t
  misc_feature (881)..(881): n is a, c, g, or t
  misc_feature (1403)..(1404): n is a, c, g, or t
  misc_feature (1406)..(1406): n is a, c, g, or t
  misc_feature (1410)..(1411): n is a, c, g, or t
  misc_feature (1452)..(1452): n is a, c, g, or t
  misc_feature (1454)..(1454): n is a, c, g, or t
  misc_feature (1480)..(1480): n is a, c, g, or t
  misc_feature (1483)..(1483): n is a, c, g, or t
  misc_feature (1491)..(1494): n is a, c, g, or t
  Probeset Number=SeqID_14947
cgcgctcacgagatgcgtgagagcagaccgtgagacagtcgnagacatggcaaagcccacgcagcgcacaccgngggtcagtgtgagtcacagcgcgncgtcngntatgagtctgttgttgngcgtgcgacgtntacgcacaccgccaccctgcgcatgcctccattgacatacgatacaacgcacgtctgacaggagtatcggcgcgcggcatacgatagacgtcagtccgtatgagatatgnaacggtgcatatggagcgacacgcatgcgtgantagagatgatgcgacagccgnttctgatgtctggcgacgggcgccacgcagaccaaagatgatgatgcaacaacacagagagtcagccgacaggagtatgtcgcgcccgtcacagtgtcncccgacaccgcaccacgatacaggcnccgtacagcgtacagcgccacgcgccgcgcgcactcgtcagcacacaataganacggacagangagcggagagagaggaaggacaacggagactagtatcgacgatcatcatgcgcgaacactatgatattgtataggtgtctgccctcgcgtttgttcgcatctgtgctgcnggtgtatttgagtgtggcgctgcagaagacaacagcacaaccaaagccacgcagagcgcgggtggcgaggcagagacccacccnaatcttcnccattataattctacagccgaaaatgtgaacatacctgtctatgacactaccacacactcatcgtcagtgtagtgcaccgcgattgaggagtggcgacgcatgcgttgttgccagcggcgcgttattttatatttgtngtnattctatgtntatntttnnncaatttttctctttatntagtaaataattntnagaaacgcatatgatgacatatgagacgacacgcagcaaacacgaagcataagaagcgcagaaaagaaaagaaggacgagtatcagcgagggacggactagtctagccacaccgacagactagcgggcgccacggccgcgacagattgagataggaagagaagattaaattatcattataaagtaggtttttatatagaatagttgtaagcacgcgatattatattgaaaatagatgtatcgtatctcgtgtgtttgatgtttatagtacacacccttctatactttagacttcggtctatctcatcccactccattctctatcgccctactatgtcatctcacgtctggtgtgtgtagagatatccctctccactctaatacacgcggtagtaaaacagaagatgttataataaacgaaatatatatgtatgaagcgcgatatttttgtcgccacccggtggttgattacattgttacatacaaaaacacaacaagactactatcactatttcccactcannantttnnttttagggaacggagcgcgccccactgtttttgtgtttgtntnatataaaatataatctctccgacttnttnaatttttnnnntttt

SEQ ID NO: 5169 - DNA, 476 bp, Glycine max
  Peptide Sequence Number=SeqID_7056
  Probeset Number=SeqID_14948
agtaacaacaactcaattaacaaggaaaaaataacaacaaagcttgtgggtaaaaagaagtgtaaaaacctagtttctctctaaagacccctctttcaaaacagagccgcctccactccggcccggtgctctgccggagccggaggtaaatcctccttccctgtctcttttttttcctttgcttccctcttcttctacctcacttcagaaccgatataccttctgctctgaacctatcgattcctttaccggcgacccttagcggttaaaggtaatgacaatcgacgtcttggaggagcggtgaggatttgaagcggtagtcgcgagggaggccggtttttagggctaagtgaaccgcctgatctagtttcaccttttaagatctacggtggctctcttcacggcggggcacgtgactcagtgggaagctcctccaccttggatttcacctaccatgtgacagtgagactatcgga

SEQ ID NO: 5170 - DNA, 595 bp, Glycine max
  misc_feature (186)..(186): n is a, c, g, or t
  misc_feature (218)..(219): n is a, c, g, or t
  misc_feature (231)..(231): n is a, c, g, or t
  misc_feature (238)..(239): n is a, c, g, or t
  misc_feature (390)..(390): n is a, c, g, or t
  misc_feature (395)..(396): n is a, c, g, or t
  misc_feature (537)..(537): n is a, c, g, or t
  misc_feature (542)..(542): n is a, c, g, or t
  misc_feature (568)..(595): n is a, c, g, or t
  Probeset Number=SeqID_14949
atattcctcacacgcacaccctcttcgatctcaacgcctctttggcttatattctcaccgacccacattgccattctcaccattctttgcagatcacgcacccctttaggaagagaggaaggaaagtctagtttttgggtcgtgggggtggtttgcgaaatgcctcttttctcgtcccatgccccnaagtgtctacacttcttcttctccccccttgnnggtgaatctctnaatgttnncatttcaagggtgttgagcttgaagcctttctcttcatcggatctttgtctgctgaatctgctgcatcaaggattcagtgccttaacaggaaagcattttctggtctggaagctactaaaagtgaaattccattctgccccctgtatggtncatgnnacctatgttgcttcatcgaaagaaaagagtgcataatgaaaactctcgggggtactatccagatgatgcttcaattatgcattcatgcctcagttccgaccctggaaaactcggggatccaaaagatttggggaacttcantttanaacagactgaaagatctcatagcgcnnnnnnnnnnnnnnnnnnnnnnnnnnnn

SEQ ID NO: 5171 - DNA, 1527 bp, Glycine max
  misc_feature (20)..(20): n is a, c, g, or t
  misc_feature (45)..(45): n is a, c, g, or t
  misc_feature (76)..(76): n is a, c, g, or t
  misc_feature (223)..(223): n is a, c, g, or t
  misc_feature (240)..(240): n is a, c, g, or t
  misc_feature (253)..(253): n is a, c, g, or t
  misc_feature (270)..(270): n is a, c, g, or t
  misc_feature (300)..(300): n is a, c, g, or t
  misc_feature (1299)..(1299): n is a, c, g, or t
  misc_feature (1499)..(1499): n is a, c, g, or t
  Peptide Sequence Number=SeqID_7057
  Probeset Number=SeqID_14950
agcgcacagcggaaatagantgacgatgcgtgcacgtatcgtganacgcgcacagagcagacgatcgcacgacgcntgcggcgcgcggcgcgagttgagatcgcaaccgcacagcgtgagatacagacacatagcgaagcgagacaatgatcggaacgacgacgaagcgacgacgtctaacacctgagcacgagcacaacgagacgaatctatgacgtgatgncgtcgcacacgcgagcnggcgacgtatcgncagcacgcgaccaccgnacgctctcacgcgcgccgcaccacacaatnaggagcgcgcgcgacagccacgagacggcagctcaacgtacgccggagcgcgcataacctccacaacgcggccgagatatcacagtcatcaacgaccgttcaacctaccacgtggctctctctgaacactagtacacgcgcgacacacgctcacctgcgaccacacacgcgacggccgaccagaatcggaggagacagatagtgcaacaccgagagaagcgatcgcaaccgcatcgccgcgctgactactccagagcgtcacttccgcgagcccgaggcagacacgcattgcagtgcccaagtcaaactaatactacagagagacgcgcagcagaaacaaatgggcttcgtaaagcaccatgcgcgccacgagactcagactacatcaaatgagagacaacgtctacgtctaatcgcgacgccagcgagaatgagtccagcgaaaatgcaggcgaaggacagcaagacaagccgcaagaaaaggcgagaaggaggggggagggtgcgagtaaataaaacgaccgcgtaggcagaaagccaatacggggcgacacgtggctcccggcggcgcttcgccggcggcggcgaacaggcaagcgcggccgggacactgcagcgccgccaccccaccgcaaggaaatgccgcagacaacaaaagactaacaagacgacggccgagcgcagcgggacgagcaataaacgccacgcttaggcgtcatctcttccgaacagccacttaacacaaataaaaaagaaccaatcacaaataggcgaccatgcccagccgagacggagggagagaaggatacgctacgagagaatggggcggcccgcagggaacaagctccgactagacagccgaccaccagcggggcgcggccgcagacgaaacaatcaagaaccaaacaaaatagaagaacgcgcaagcctggccactcgcccgctgcccccacacacacgaggcgagccaccacagtgcgcccaccccgaagcaccgcnagatgcagggtgtacgcggtgaggggtgggcgggagcgggggcagaagcagcgcgacacacaaaaccacgcccggcctcgcgttcgaagaccccacccccgttacaacaaacgcaggctgggccggagccgcggccgccgggggcccgcggcttgacggccgcgcgcccgagcacggagctaacccaaccgaacagaagncgcaggggggagacggagtcgggcaggc

SEQ ID NO: 5172 - DNA, 578 bp, Glycine max
  Probeset Number=SeqID_14951
gagtcagctacggtaggcccccccccaaaatacaaaaacttgagcaagagttatatggaaaggataggatcccaaacatcaccaagaaaggtagaaacgtcaacagagatcaaaatgttcatacaagactttatgatctcgataaatcaagaagggatcgatcaagggaaactctttctgcatcaaggaatcaaagcaagtcgattgagcttcagagatcaaagtcaaaggattctatcaaaagaaagagtctttattcgattttaaggacctcaaagcaaccctcaaataacgacaatcagaccttggattactttaaagatatgttttctccgataaatcgagttggcatcaatacaggaagagatttcaccatttcacctcaagcattacttgcctcatctctaacttcatttggctcgccagtgtatagtggcagaaatgcagagcataattattttcagagaaatttttctatgcacgagtcgcttgataacaaccatattagtccacgaactcagctttccgtggctcaaaacaaaagagggttaagtcaatccagagggtctccaataagt

SEQ ID NO: 5173 - DNA, 495 bp, Glycine max
  misc_feature (136)..(136): n is a, c, g, or t
  misc_feature (154)..(154): n is a, c, g, or t
  misc_feature (163)..(163): n is a, c, g, or t
  misc_feature (201)..(201): n is a, c, g, or t
  misc_feature (217)..(218): n is a, c, g, or t
  Peptide Sequence Number=SeqID_7058
  Probeset Number=SeqID_14952
accgactccttttggttgctacagagacagggagacaagacagagtagtacagattactaccaatggctaccaaggtttacattgtttattattctacgtatggacatgttgagaagctagctagagagatagaanaaggggctgcttctgtgnagggagtanaaagcaaactgtggcaggtaccctgaacattgcctgangaagtcctttgctagnntggagcacctccaaggagtgatggtccaaattattactcccccatgagctccctggaggctgatgcttttttggtttgggtttccaacaaaattttggatccattggccgttcattaaaggcattttttgagggaactgggaggccttttggggaaaccgggactaaccagaaaggggccccggggggtcttttattagccaaattcccccaggggggggggccaaaaaattcccccgcgtgggaccctttaaaccccccttggcccccccgggggg

SEQ ID NO: 5174 - DNA, 1148 bp, Glycine max
  Peptide Sequence Number=SeqID_7059
  Probeset Number=SeqID_14953
atcgaaacctccaccaactctgacgctcgttgattgagcgagagccacttggatcaccatgaccgccacctcgcggccacagcatcccaacgggagcctagccccggcctccgacggcggcgagtccttcgccaagttcttcgagtgctggatcttggagcagtcccgtgacctggccgcgctccgcgccgcggccacggcgcggcccgacgacgctgacctccggcgcctcgtcgatcgtgtcctcggccactacgagcactactaccgcgccaagtccgcggccgcctccgccgatgtgctccccatgttcgcgccctcgtggatctccgccaccgagagcctctacctctggtgcggcggctggcgccccacttccgcgatccagctgctctactccaagtccggcctgcagctcgaggcccagctcccggccttcctcgacggcggcagcctcggggacggtgacctgggcggcctctccgcggagcagctccaggccgccgaccagctgcagcgccgcaccatccggagggaacgggagatcgaggaggccgccgccggcgcgcaggagtcgttggcgacgacgaagatggtggagctcgccggaaagggagggatggacgcggcggaggggatggagctggagatggatgccaaggcggaggcgatgaagcgcgtgctggagatggcggacgggctgaggctggagacgctgcgcggcgtggtggggctgctccggcctgcccaggccgtgcacttcctcgtggccgccgcggagctccacctcgccgtgcacaagttcggccggcgcaaggacggcgccgcggcggcggagtgagcctgcaggctgctggtggcgcgcgcaagtggttgctctgctccgcgcaacgctcgtcgtctagctagctccgagctgccttcgttttgcctggtcaacgcgaggtgtcgcgataagctttgaccgtgatccccttctgtttggtcagcatgtgcgttctgccattgtgtgaaacctgtggtaacttgtacgaagtgggctagctacttgtgtatgtataatgcacaagctcatgccatggtggtttagctacttgtatgtatgtgtaatgcattattatggaaaatggaggcgtaaaggggtggcc

SEQ ID NO: 5175 - DNA, 334 bp, Glycine max
  Peptide Sequence Number=SeqID_7060
  Probeset Number=SeqID_14954
ctgcaggcattggccttccagaggccatagaaattttttatgcttgcatatagtaacgtcagagccactgctgcgaggatacgacgaggcggattgtatatgccattaaggcacacagatgtacaggactatgccgctgcatgtgctgacatgggaactgactagtcaggagggcaacggcattacctacccctttctcacgtcaatgcaaatcagggggctctcatgacctgacgcaggaccaggaaggcctgtgatacctattgccaaaggtagagggtacaccagggatcgagcgcgacgaggatcaggtgctgcctaccagaccggacga

SEQ ID NO: 5176 - DNA, 1590 bp, Glycine max
  misc_feature (1)..(1): n is a, c, g, or t
  misc_feature (22)..(24): n is a, c, g, or t
  misc_feature (49)..(49): n is a, c, g, or t
  misc_feature (145)..(145): n is a, c, g, or t
  misc_feature (164)..(164): n is a, c, g, or t
  misc_feature (169)..(169): n is a, c, g, or t
  misc_feature (229)..(229): n is a, c, g, or t
  misc_feature (338)..(338): n is a, c, g, or t
  misc_feature (620)..(620): n is a, c, g, or t
  misc_feature (647)..(647): n is a, c, g, or t
  misc_feature (665)..(665): n is a, c, g, or t
  misc_feature (684)..(684): n is a, c, g, or t
  misc_feature (852)..(852): n is a, c, g, or t
  misc_feature (869)..(869): n is a, c, g, or t
  misc_feature (951)..(951): n is a, c, g, or t
  misc_feature (1030)..(1030): n is a, c, g, or t
  misc_feature (1032)..(1032): n is a, c, g, or t
  misc_feature (1093)..(1093): n is a, c, g, or t
  misc_feature (1097)..(1097): n is a, c, g, or t
  misc_feature (1118)..(1118): n is a, c, g, or t
  misc_feature (1150)..(1150): n is a, c, g, or t
  misc_feature (1159)..(1159): n is a, c, g, or t
  misc_feature (1200)..(1200): n is a, c, g, or t
  misc_feature (1251)..(1251): n is a, c, g, or t
  misc_feature (1262)..(1262): n is a, c, g, or t
  misc_feature (1360)..(1360): n is a, c, g, or t
  misc_feature (1374)..(1374): n is a, c, g, or t
  misc_feature (1427)..(1427): n is a, c, g, or t
  misc_feature (1590)..(1590): n is a, c, g, or t
  Peptide Sequence Number=SeqID_7061
  Probeset Number=SeqID_14955
ntttttttttttttttttttgnnngccacgtgccacctgcgcgagccgngcgcgcgcgcgcggccgggcgtgttgacccgtggtgtcgactcacccaggaagtattgagagtggagggcgccaaacgcccacacaaacagagcanatataacacatactatacnaacangagatacagaatgagtagagtatatattaaatatacatcacgtctctcatctatacattntatattaatgtgagaatgagaatgtacaatataagaaaactcgcattaatccgtgccgcgcgaggtagagcgatagatggctggaggactgtggtatacgacgcaaagnattagcgacggagtggatggttataggcgcgcgtgcatcatatcggagccgtcacagcacgacacgccacaccatacaccctacctcccagacaagacacccatacaaagttatgatatgttcatatactaatagctcaatacatacacgatacctcatctgacacaagattagttggagaatagttgatatagaatattttgatgatactagacatcggatgaactacttagctgacagcattcggcggtttggtggtcgataggaccgtatgtatgtccnggcatagcgctgccgcatctctacggntctcgctctctccatccngtctcttctctcgttatantatcttatgccatatcctattcctgctttgcataatcatatatatagacacactatcacgctctacgcgacacttctcactgattatatagtattatgatcattatgatcctagacgatccacatcatacacttgttcgagatgtgacacaactcgacgcatcgcagnctgtagccagcagtgcnacgtgtctatattacactacatgaatgaagtaagatcaccaaagtagtcgtgtgtctgatgcgaagcagagcacgtgatctngaatgcgacgcgcgagtcgtggtgggtgtggtatagttatatactcatctacctacaaacacaacgtgaggcaattacnancgcacaagattatatatacgtatatagcgatgtataacgacgctcctgactcgatacatgntgtncgagctccatatagcatacanacatcactgtcgacagttagagctgacactantctccagancatactgcgcacaacacaatgtctcaacttactatatagtnatctatattcacactacactgatacaacactcactacaagacacataacanagacccgaccntacacgcagctcgtcgacgcgcgcagattcatgataactcgcaacctgtatctcggtcatgcctctacaccgcgtggctctgcacacagcgagtcgtnatagacgacacttncaccaccgcactcgtggcgtctagctgcttcactatctcatcgctgcgcgcgngcgcagctgctgcgcgtagcagaatacgccgatcgctagttaacttgcatagagttgactctctatacacgtgctagcaccactatgatcgagtatatcgacgacgagcatgcagctgtgtcgacctgactatcgtcacgcgcacactcgacctacgaacacn

SEQ ID NO: 5177 - DNA, 316 bp, Glycine max
  misc_feature (303)..(303): n is a, c, g, or t
  Probeset Number=SeqID_14956
agaggatcaggatacaaattactgtaaaaagctcttcaaaaatatgacatgctacgtaagcagggaggtaccaagggaatcgaagctttatgcaattcctgcttttggcggcataattttctgggagggagaaagggcaccttttggtgaatctgaccagagcatttcttatcagattgttgacagggaagcacaagggcatccgttcctctcatgataatccgtacaaccacagtgggcttatgagtgtgtgaatgcacgatattttttgccaactgaccattatgagttgggaaggccctnctcccccacatta

SEQ ID NO: 5178 - DNA, 1796 bp, Glycine max
  misc_feature (1)..(1): n is a, c, g, or t
  misc_feature (86)..(86): n is a, c, g, or t
  misc_feature (205)..(205): n is a, c, g, or t
  misc_feature (207)..(207): n is a, c, g, or t
  misc_feature (230)..(230): n is a, c, g, or t
  misc_feature (351)..(351): n is a, c, g, or t
  misc_feature (459)..(459): n is a, c, g, or t
  misc_feature (489)..(489): n is a, c, g, or t
  misc_feature (512)..(512): n is a, c, g, or t
  misc_feature (551)..(551): n is a, c, g, or t
  misc_feature (791)..(791): n is a, c, g, or t
  misc_feature (849)..(849): n is a, c, g, or t
  misc_feature (851)..(851): n is a, c, g, or t
  misc_feature (856)..(856): n is a, c, g, or t
  misc_feature (859)..(860): n is a, c, g, or t
  misc_feature (996)..(996): n is a, c, g, or t
  misc_feature (1049)..(1049): n is a, c, g, or t
  misc_feature (1064)..(1064): n is a, c, g, or t
  misc_feature (1146)..(1146): n is a, c, g, or t
  misc_feature (1194)..(1194): n is a, c, g, or t
  misc_feature (1226)..(1226): n is a, c, g, or t
  misc_feature (1247)..(1247): n is a, c, g, or t
  misc_feature (1250)..(1251): n is a, c, g, or t
  misc_feature (1370)..(1370): n is a, c, g, or t
  misc_feature (1547)..(1547): n is a, c, g, or t
  misc_feature (1566)..(1566): n is a, c, g, or t
  misc_feature (1636)..(1636): n is a, c, g, or t
  misc_feature (1649)..(1649): n is a, c, g, or t
  misc_feature (1676)..(1676): n is a, c, g, or t
  misc_feature (1697)..(1698): n is a, c, g, or t
  misc_feature (1702)..(1704): n is a, c, g, or t
  misc_feature (1706)..(1706): n is a, c, g, or t
  misc_feature (1708)..(1710): n is a, c, g, or t
  misc_feature (1712)..(1714): n is a, c, g, or t
  misc_feature (1719)..(1720): n is a, c, g, or t
  misc_feature (1723)..(1723): n is a, c, g, or t
  misc_feature (1727)..(1729): n is a, c, g, or t
  misc_feature (1735)..(1735): n is a, c, g, or t
  misc_feature (1745)..(1748): n is a, c, g, or t
  misc_feature (1756)..(1769): n is a, c, g, or t
  misc_feature (1776)..(1789): n is a, c, g, or t
  misc_feature (1794)..(1796): n is a, c, g, or t
  Peptide Sequence Number=SeqID_7062
  Probeset Number=SeqID_14957
ncgcgatccaaccatactgagcgcgcgagtcgacgactctactggctgcgccacgcgagcccgctgtcgcccatcgcattctcacncaccgttttactacgatggcgaatacctcatggttatatatatcgagtatataacatatataggaatagtgcaagacagtgtctgagccacgtgatccacatcgcgctgacagcacacncntatgtcgcgtgtagtcagctacngtgacggcggtctatgtcgtggctgtcgcgtggatctacagtacactgtcatatgcgctctctactccgtttcaatacgtagtacagtgctgttagcgtcgtgcgagttaacttacgcttnaggcgttaccggtgcgaagatcacaggaccgacacagcgcatggtcgctactctgtactctataactagaccaaaaccccaaagtactgctatggacagagagtggtntacgtcgtgtcagagcgtgcacagccagcntcgaacgccagtatcgttacagnaactgtcatctagacctggtggtagacgttttgacgagnatatatgacgagctagatcgagcgatggtaatagagtagacgcgagagggcgtcgacgctcaccattctatatcataatcacacacgccgcggcctggtgggcgcatactgcagagttagtgtgagtgcggctcgctgtgtaagctcagatcattgcgaacatgtgcggtgagtatatgatgtgatgtgtggtgtgatgctcgcacgcagtatataatagaactgtttacgccgctagcntcattgtagcagagcgcaagaacaggagagtatggagtatgtacagagaaacacgatntnaatanaannaattaatcgcgcgaacagcagagaaagacgtgtgtccgtgatgtctcacgtcgcagtacaaaaccagtttattaggcagtctacgcgcgagcacgagacggaggacacacagacaagtcgagagaacgagctactngacgactaagcgtgacttgccgtttcacagaagagtagtcaataaaagaggancaataatcgttatanctatatccctacgtatatgccctctacactctccactctatactcatagttctgtgtttctctcatcatctagtaacacgantgaagtatagtcaaatatcatcactagtatatacatatagcgttgtgncggcggaggcgcggtatgaatctcataatagnataatcatgaagtaaaataanaannccgtactgcctcagtgtgctctcgagtaacttcgcgcgctggcgtctggtcgggcgctccgagcgacggacggcgacacatgctcgtcgctcaagcgcggcgcagagcagcgaggcagnatgcctacacatttgagcaggcagagcgctacattacgctcacattctatagcgtgatgatgcacacacactgccgattgcaacgactgagtgcaccacgcgtgcacaaccgcacacaccggtcgaatagtcccgaacacgccgcgctcgacacggcgtaatgcgcggacttacacnataagtaaaaatctccaancatacacacaaagtagagatcagacacaacataaagacacaaaaaaatcagtataaatacagtatatcantgagtagtcaaanacaagtatagaatgacagtttcatatnacacacaatcaacgagagagnngaannngngnnnannnggagnngcncggnnnaagggnaacacgcagnnnnaaaagccnnnnnnnnnnnnnnggggggnnnnnnnnnnnnnnggggnnn

SEQ ID NO: 5179 - DNA, 3255 bp, Glycine max
  misc_feature (1)..(1): n is a, c, g, or t
  misc_feature (336)..(336): n is a, c, g, or t
  misc_feature (3178)..(3255): n is a, c, g, or t
  Probeset Number=SeqID_14958
ntcacagaggtggacctctcctctatcgtggacgcgttgttgtcgctcgttcactctcacagaccctcgcacaagcctctctcgttctcgttctcgttctcgttctcgctcttgtagatcctcgttcgttctcactctcgagctctcgagcttcttctctgggtttaattcaaagcgttggagtttttgaatttgttggttcatgtgcagcaccagccccaaactcctgctcaatcctgagttcagcgggttgcattgtctactgctgcaaatatgtgcaagaagcttccttagatgcagctgattttgtgatggaagttgtttctcttttgacanaccttcagtaccatgattccaaggttctggagctggttccggtgtttcttctaacacctctgtttcgcctgcattgagtaggccagcggatcagatatttgagattgtgaacctggcaaatgaacttctgcctccattgcctcaaggaaccatttctcttcctgtcagctccaacttgtttgtgaaagagtctgttgtgaaaaaatctcctccttctgggaatcccgggatacaagaagacacaaatggaaatgttcatgaaatatcagctcgtgcaaaattattaaatgataagcctgagttacttaagcaatttgggatggatctcctcccagttttaatgcagatatatggtgctagcgtcaatggtccagttcggcacaaatgtctttctgtcattggaaaattgatgtatttcagcacagctgagatgatccagtctttgttgagtgtaacaaatatatcaagtttcttagctggtgtgttagcatggaaagatccacatgttttggttcctgccttgcaaatttcaaaaattcttatggaaaagcttcctggaattttctccaaacatatgtggagtttctcaaccttttgtttcgtgaagagggtatcgagccatctgtgtgttatggcgacatggatcaagatgctcgcaaaatccatgtatcaaggtttaggtctagaaagacaatgttgttgattgtgacagacgttgcggcccggggcattgacattccattacttgataatgttatcaattgggactttccccccaagcctaaaatatttgtccatcgagttggaagggctgcaagggctggtcgaactggtactgcatattcttttgtgactcctgaggatatggcttaccttttggatctctcgatgtttctttggaaaccaatcaaacctgctcccaccgaagaagagttcttgcaggatatggatggagtattgtctagatgtgaacaggcaatggcaaatagagaaactatttatggtcgtttcccgcaaaaagtcatcgaccttgtttcagacagagttagggaaattattgatacttctgcggaactggaattgttgcagaggacctgtaaaaatgcatttcgtttgtattcaaaaacaaaacccttacccgcaaaggagtccattagaagagtaaaggatttgcctcacgaagggctgcatccaatgttcatgaatgtgttggaaacaggggagttaacggcacttgcattttctgagcatttgaaaaagtttaggccaaagcagactattttggaagctgaaggggaagcagctaaatcaaagcatcaacagggcccttctggccaatgggtcgatgtgatgaaaaggaaaagagccattcatgagaatattataaatttggttcgtgaacagcagcagtctaagagtaataaggaaaaggaggaaattcaatcagaaatcagtccttccatggagaaaggaagaaaagcacgtggttctaagaggaagccccaaagtttcaaggatgaggatcactatataagttcaataccaaaaaatcaacatatggaggctggccttacagtaaaagctaatgaagactttgcttctaatagattggaagcagctgtccttgatctagtggcagatgatggtactggcattcagaaacaaagatctatgtatcactgggataagaggggtaaaaagtacatcaagttaaacaatggtgaccgtgttgctgcaaatggaaagataaagacagagagtggtgcaaaaacaaaggcaaacaagactggtatatagtaagaagtggaaagaacgctcacatgttaggatatcacttaaagggacaaataatggtgatcctcaggattcaacaagtttgacaggatcttaccaaagaggtcgtagtaattttaaaggcagcaagaagcagcattcaatgcccaatgctcatgtgcgttcagaactcaaagatatggatcaaattcgaaaggagaggcagacaaaggccaacagggtttcttatataaagagcaagtcgacaaagggtaaaaggtttggtaaaaatggtaaaaaaagaaaaggcaaatagagtttgtttgaagctctggaaattaattagttcaggagaaaaaggtttgccatcaaaattcttgcgggaagtgttgtgccataaatttttatattttggagtgagtaggggggaagtgagaaacccaactgagaaaaaagtgactttttgtttttgtttttttcttggttagcctacaaattttgtttgtttaaggttatgattcttgcacttgttgtacatggatcacacacctgtgcacttccttttatccttgaagttccctttttgtgcttttggtgctctatgggtgtatttctgttgcagtttaatttggataactatcaactttggcggtatcgagctatttcaatttcagtctttagttgaaataagcatgaatgttttaagtgaagcggactccagtttcttatttcaaatgagttgacttgaggtacgaaaataaagtgacttctgatggggttggttgttgcgtccgtcgaaggatatggggtactcggctgagcacttcacattatgtaggatatcccttaggaaaaataatggtgatcctcaggaatcaacaagtttggcaggatcttaccaaagaggtcgtaggaattttaaaggcagcaagaagcagcattgaatgcccaatgctcatctgcgttcagaactcaaagatatggatcaaattcgaaaggagaggcagacaaaggccaacagggcttcttatataaagagcaagtcgacaaagggtaaaaggtttggttnnnnnnnnnnnnnnnnnnnnnnnnnnnnnnnnnnnnnnnnnnnnnnnnnnnnnnnnnnnnnnnnnnnnnnnnnnnnnn

SEQ ID NO: 5180 - DNA, 2254 bp, Glycine max
  misc_feature (1)..(7): n is a, c, g, or t
  misc_feature (2254)..(2254): n is a, c, g, or t
  Peptide Sequence Number=SeqID_7063
  Probeset Number=SeqID_14959
nnnnnnnagctacgtaggccccccccccttctctctcgcacacgcaaacacttgttccggtgtccctctctctttcgcttcatcttcaacattaggtcttctctgactctgtggttgtcactgttcaacgtctttgagagtttatgctgagtagttcggctttacctcaaaagtcctgatcaattgaattcagtttccattggtaggatttattgccgggccttgaggtaatcagcttaccaacatgggaacacaaccccagcaaacatttcgggaggaagaggaggaggagatgcaaggccatggaactacgatgtcaggtcaatcaatgtcaacaagcagaagtgtcgggtctccatccagccggagtgagcagacaatggcaacacctgctagtgatagcacttttcttaggttaaaccatcttgacatacatggtgatgatgctggatcacagggcaccgttgccaagaagaaaaagaggggccaacgggctgttggaggtgataagagtggaagaggtctccgtcaattcagtatgaaagtgtgtgagaaggtagaaagcaagggcagaacaacttacaatgttttgtatacgcctatctggggcgatggggtaccgggccccccctcgagtcagctacgtagcccccccccccagaatattaactgtttccaacaagttgtattgtaaggaaatgtttctgaaaacaggtactctaaaactgagagaaaaaagaaactggtgagaattcacgtctttctttgtagttcaacttgtcacaaaaattctggtttggattcctcaaatttagtacatatacctagtttattttaaaaaaattcaatatggattgtggttatatttaggtagctgatgaacttgtggccgaatttgctgatccaatcaatggtgtttcaactcctgatcagcaacaatatgatgagaaaaacattcgtcgaagggtgtatgatgctttgaatgttctcatggcaatggatattatttctaaggataaaaaggggaccccccggaagggcatccctgtaggcccccccccccatattgaagagctaaagtcggagcgtcttgggctaaggaatagaattgaaaagaaagcagcctatttgcaagagctggaggagcaatacataggtcttcagaaacttatacaacgaaatgagcaactatatagctcaggaaatgctcccaatggaggtgtatctttgcccttcattctggtgcagacacggccccatgcaactgttgaagtggaaatatcagaagatatgcagcttgtgcattttgatttcaatagcactccctttgagctgcatgatgataactatgttctcaaggcaatgaaattttgtgagagatctcagaatgataatacaacagataattctacagatggcggtgaaggttctagcatatatgcacaggttcctacttcagtttcaaaccctccaaataggcctccttcatctccaccactccctggaatattaaaggcaagagttaagaacgagcattgatatgcaattttgtactgcatcgccttatttaagcatgtttgtatatttttgtaaagtaatttgtcagtaattaattgtccttcataatagttaatcagtacagccaattcactcagtaggttagaagcgaaccagtgtgcttgagtctatattcttctgggttgattttggcaaattctttgctaaccatatccattatttactaccttaagaccttaactgatttttttccccaaaaaaaaaaaaaaaaaaagcccttttgtacttcggagagagaaattggtttgcaccgccccgccgcgggccccagcttttcctttagggcggggaaataatccctgaaaaaagggggaaaaccccaaattcacaaaccggccccccaaaaaaaaaaaaaaaaaaaattgtgttccccggacccgggggtattttaaagggttggggaaagggcacatcaatccctgaaacgaaatctccttggccattggaatccataaaaaggggtccctcatttcccacacaattaacttcccccgaagggggattccccaaaaagcgccccccaaaaccaaaaaaaaaattttttttgcccccaaggggaaaaatttttgcccgggaaaaaaatgtggggaaatttttcaagccctttttccccccagggttgggaaagggccgggcacccttttcccgcggggaaacctggtttacacttttccgn

SEQ ID NO: 5181 - DNA, 878 bp, Glycine max
  Peptide Sequence Number=SeqID_7064
  Probeset Number=SeqID_14960
aggtgagaagaaaagcatcgatcaggagccaccgcgcgcgcacgagagagtcgatcgaggaggaatcgcctgagacgatgggcgccggccagcgtrgtggcgtctccgcctgcggcggtggccgtgcctctcctgcttctgttcgtcgtgcccttctggagccatgtggcgtcggcgcacggcggcgcttcggcctggacgacggcgctgcagaagcacgtggcgttcttcgacgccgacaacgacggcatcgtttccttctccgagaccgagcaagggcttcgagccatcggtcttggagctgccgaggccaccgtcaaggcaaccttgatcaacggagtcatcggacccaagaccagacctgaaaatgctacgacgtcgaagttgtcaatatacatagagaacatccaccaagggatccacggaagtgacagcggctcgtacgatgctcaaggaaggtttgttcccgtgaagttcaacgagatattcaccaagcatgccaaggtcgaaccgaacgctgtgaacgagagcgagctggaggcgatgcgcmccgcgaacaggaaggacggcgacgacataggaagggcggcgtcgaaggcggagtgggacttgctgtacagcctcgccaaggacaaggacggcttccttcacaaggacaacgcacgcaccgtyttcgacgacaccctyttcgttcagctggcgaagaagggcggctcgtctcgaaattaaccaagcatgatttgcatttgtatttgtacttgtcctgtcgttgattgttgattacaaagtcactgcacaattattgtcatgtagtcaactgaaatacaattgagcttcattcarattttggatcaaatagaaaactgacacatgtgcgt

SEQ ID NO: 5182 - DNA, 1488 bp, Glycine max
  misc_feature (1)..(10): n is a, c, g, or t
  misc_feature (15)..(27): n is a, c, g, or t
  misc_feature (35)..(39): n is a, c, g, or t
  misc_feature (50)..(52): n is a, c, g, or t
  misc_feature (59)..(59): n is a, c, g, or t
  misc_feature (61)..(61): n is a, c, g, or t
  misc_feature (64)..(64): n is a, c, g, or t
  misc_feature (75)..(75): n is a, c, g, or t
  misc_feature (165)..(165): n is a, c, g, or t
  misc_feature (282)..(282): n is a, c, g, or t
  misc_feature (322)..(322): n is a, c, g, or t
  misc_feature (403)..(403): n is a, c, g, or t
  misc_feature (425)..(425): n is a, c, g, or t
  misc_feature (459)..(459): n is a, c, g, or t
  misc_feature (1030)..(1030): n is a, c, g, or t
  misc_feature (1264)..(1264): n is a, c, g, or t
  misc_feature (1404)..(1404): n is a, c, g, or t
  misc_feature (1488)..(1488): n is a, c, g, or t
  Peptide Sequence Number=SeqID_7065
  Probeset Number=SeqID_14961
nnnnnnnnnnaaaannnnnnnnnnnnnaaaacccnnnnnttgccaccccnnncaccccnanacncacacacccancacacaccccatcaccaccttccacacttattcattgtcgttgtacaagattgcttaacagccattctcttgctctccgcctgacttgcngagccgcgtccacacaactcccttttgttaggatactattgaactatacaaaattggtttaacatagaccttgatacaaccatacgtaccttatgatattattataatgttgttacnatttgcatgaatctgtgatacaatcttgtagacatggaancacatgacattgaattgaaagaaacgggagtgcgttggacagtaagacttacaagaatctctattggtgagccgcagctgngtttgcgtctccgccctctgtntttcattccttttgcgtgttgtgtcctctttttntattctccctcttctcactttccacctacatccatatctcctccactatcttcctaaataacttgcagacgatctctcgtggtgtgcctctgcttcgcttctgctgccctatcctttcttgtgcaccatctagattcatgctcttagctcactacgacaatactctacttaattttatctatagtataaacaatatctcgagagcaccctctgcacgtggtgcgtcgtcgtgctatcacgcgattctgtgggccatatttcttgacagcatagacacacttagcacactcccactatactcagatacgataaacaaatcttctctacctcatctacgacgcagtatatacatatgtatatataactttggatatggtagcgtatgtcgtgctctggttttgattcttttccccacacccctacaactcccatccacccgcgccacctacgataaagtgaaatactacacaactcactgcagaggcacgacgactcaggcacggcatccgctacggacctaaccagaccatgcacacggaggaccagcagcgcgcgcagagcagcgacgctncccaacccgccgccctactccgcgcgtctcactatccatatgtgtcatttaagacatcacatcttatatatcttctaacatagtgaattgacactgtctgtacatacatatatatgtagatcgtctagagatgaggatgagagcagatgaggatgtctgtcctaggagttcgtgtatcgcgtggataacacgtacgcattctgacaacgcgacatctatttctctgctgaccgntcttcatcgctactgtctctctctatccgtatcacctccttctcacatctaggcgctcaacatccacaacgcgcgaattcggattaaaaattgacgcgcgcgaagattaacagttagcgcgcctatatgactatgtatgntcgcacagctcagaactctcgtagtacacgaacacgagtacacatcgtacagcacacatactcacacctaatacttaatcactn

SEQ ID NO: 5183 - DNA, 1796 bp, Glycine max
  misc_feature (227)..(227): n is a, c, g, or t
  misc_feature (404)..(404): n is a, c, g, or t
  misc_feature (1074)..(1074): n is a, c, g, or t
  misc_feature (1208)..(1208): n is a, c, g, or t
  misc_feature (1319)..(1319): n is a, c, g, or t
  misc_feature (1326)..(1326): n is a, c, g, or t
  misc_feature (1333)..(1333): n is a, c, g, or t
  misc_feature (1340)..(1340): n is a, c, g, or t
  misc_feature (1379)..(1379): n is a, c, g, or t
  misc_feature (1579)..(1579): n is a, c, g, or t
  misc_feature (1594)..(1594): n is a, c, g, or t
  misc_feature (1618)..(1618): n is a, c, g, or t
  Probeset Number=SeqID_14962
ctagcacatgcatagcgacgcgagtatcacaagtcgatcatgtacacggcgcagcagcaccagcggcgagggtgaacgtcgtcggcacatgacgatgagacacggcaacgtggagacatcatcacgggcagctagtgacagtgatcgagggcagggcatagtgtggagatgcacgtcgctcggacgaggaggcaaactaggtgacaggaggcgatgagcaggagcancgcactagcgtccggacgaacagacaacatacaatgtcgtcacagccacgcagtcacccagcacatgcattcactgtgatcgagaacgagtgcagctcaaatggtcatattgagcggagacagagggcgacaccgtggacgaggtaccaggggcagtacaagaggacgatattgagngagatacacgtatctcagttgtgtcagtgccgcagttgagtgtgcaacagagataattcagtttgttcatctcagtgcgatacatagcatatcagattcgatttgtcatcttagagctcgagcgttagctctgttttacagtttaaatcaagacatatgtatagatgcaggtgtgatacatagtcagactaaacagcgagaacacatgactcgcagcagagcttatgtctcaatatgctgtcgcacttattagttgtaatgcgcggaagatgcggtccgtcgataatgtatgagcgaggtctgtgcagtaggcaagaagcaggaaatcacagtaagatgatcaaaggcgagtagtgtaatctatctctctcacgcaagagtcagcaagcagcacgtggcatagtaacgcagagtgaaagacgcgtggggacggcagggatacggcagacgacagcggtgtacgagcgccgaccacgcagtgagggcggaagtgaagcgagacgctatgcgagcgcggcagacgtaggcgcaggcagcacagcacctgtggaagagtcgggagacgtcgcggaggcgagaagatctgaatagatgcgataagacatgcaaggaaagacgctcagcacagcactttacacatcgggagggaggtgacaggcctcaaagcatnagtatagatagctcaactcggtaatataatgggctggacctcaaacacgcaacaacgaaggagaagtaaacgaagagagcaggagagctgcaggcagctaaacagacatatggagcgcagaaaaggcaagaatnatccaagatagcgtaagtaaacaatacacaacatcgtatttaaacacaaagaatagaatctgagactaagggcaatataatcgtacatgtatcgtagctcgcgctgatacnatccatntcgtatncgccttncatcagtaatattatcaagcgcaatcgtagtcttgctgnatggtgcaatctataatagcaacactcacaatgtgcataatatttgagtcgtggtggatagaaacgaagagtaatgtaatagatagagagtcagaacatgacaaagcacaagtagacgtaatatatgtcgaggatagcagttctgtcacatgcggacacgcatacatccatcacaccgccacacagcacaaccgcgcagntcacacacgcgccgngatcaacaggagtagtgcgaatanacattggaccgggagacaacaggccggggagactcgaaaaaaggccagagtaggagcgggtagtagaggcacagacacagggtgcgggaaggaaaggagatggggagagagtgcaagaaagacaacagaccaacaacacaacaaaacaacacacaaacaaaaccaacacaccaccaca

SEQ ID NO: 5184 - DNA, 1681 bp, Glycine max
  misc_feature (28)..(28): n is a, c, g, or t
  misc_feature (375)..(375): n is a, c, g, or t
  misc_feature (662)..(662): n is a, c, g, or t
  misc_feature (821)..(821): n is a, c, g, or t
  misc_feature (823)..(823): n is a, c, g, or t
  misc_feature (906)..(906): n is a, c, g, or t
  misc_feature (982)..(982): n is a, c, g, or t
  misc_feature (1042)..(1042): n is a, c, g, or t
  misc_feature (1065)..(1065): n is a, c, g, or t
  misc_feature (1104)..(1104): n is a, c, g, or t
  misc_feature (1177)..(1177): n is a, c, g, or t
  misc_feature (1215)..(1215): n is a, c, g, or t
  misc_feature (1217)..(1217): n is a, c, g, or t
  misc_feature (1310)..(1310): n is a, c, g, or t
  misc_feature (1451)..(1451): n is a, c, g, or t
  misc_feature (1532)..(1532): n is a, c, g, or t
  misc_feature (1584)..(1584): n is a, c, g, or t
  misc_feature (1586)..(1586): n is a, c, g, or t
  misc_feature (1681)..(1681): n is a, c, g, or t
  Peptide Sequence Number=SeqID_7066
  Probeset Number=SeqID_14963
gttgttttttgtttttttttttcttttntgatgtattatgtgtgtgactatgtcgcgaggtgtagggtgaggcgtgtaataggagttacacggggtcccctatctactaagagcagtaaggattatcatagaatgactattattttttcttctttattcttctgcccttccggcccgcgcaagccgcctcacccgcgaagcgccacaggggagcccgacagtcacaggcgcgcgctgaattgcaactcgcgcgctcgcatcgctacgcactcgatctcatcgcttcccctgtctcgctgcgcccacgttcatcgtactgactgctcggctgcttacttgtgttctgtcttgtgtgtcttctacggtggtgctgtncatcgctcgggcggatgcaggaactgacctcagcccgactccgcactgacgcctctaagtgcaatgaaagagcaatacaaccaccacaatttgtacatagataatattggaaggaagatgagggaagaatagatgtgacgattatggattgctgtccatcacggacaatgaactgacactagtcgaagacagagatcgagcgtacctgaacgcgcaccaccctgcgcctgcgatgtcgagctgtgagattcatgagtcgctgattacgactgtagactacgtagacntacctgacacactcatcgccatggacacaactctcacagtgcctcgacgtactctcgacacgaggtcgccgcgcgctcgctgtcgcgccgtgatgtcgctacgtccgcgcacctggcatagcttagagtgccgccatgctgtagagtcgaatgtgcgcnantctgaatgtactgtaatggactcacggccggattcgatgcagagccgtcctgaggctatactgagtggttacaaacgcatagnaactgagcagtcattcagcatacctaactactctgcactatcacaccaccgcgcgtcacccaatatgcaatcagcnccgatgtgagtgtcacggcgttcgtcgagcgacagatgcaaggataggctgtatctgcgnagctggacgcatgagtgtgaagngatgagtaggacgatggcgtgaagtgagcgcagcgacangcgtcgcatagcgagacacggcggtctcatcacgactatcgctcagtgggacgccggatcgcctctcttctcntgcactcgatcgctataccggacgacgcatcgacgcgncnccacgcgatgtgaggatcggtatcgcgcgagagatgcagcgtgacacagatgacagagattagcgcgagtcgcgtgaacgtacgtatctctcnatacgtcgctatgactgcgcgtctgctgtccgccgcggtgcgccgagcgagtaggagctgcttatacatacgtgtggattctgtcggtctcgctgatagtagcatcgatcgaggtacgatgatgttacgcttcatcctttngacgtcgaactctagcatgtgtgcgtagctcatcatctacgcgagcacgcatcacgcgtcgagtctagctatgactatgangtacgagcgacgctctgcacgtcaaccctgctcgcaccggttgtgacgcatncnctacgtctcggatctcacgagaagtacgcactcttgaatcaagcagagtcaagatacacgacacgctcacatagaatactattcattattgtgan

SEQ ID NO: 5185 - DNA, 1559 bp, Glycine max
  misc_feature (1)..(9): n is a, c, g, or t
  misc_feature (14)..(14): n is a, c, g, or t
  misc_feature (25)..(25): n is a, c, g, or t
  misc_feature (29)..(29): n is a, c, g, or t
  misc_feature (31)..(31): n is a, c, g, or t
  misc_feature (45)..(46): n is a, c, g, or t
  misc_feature (53)..(53): n is a, c, g, or t
  misc_feature (55)..(57): n is a, c, g, or t
  misc_feature (59)..(59): n is a, c, g, or t
  misc_feature (62)..(62): n is a, c, g, or t
  misc_feature (69)..(69): n is a, c, g, or t
  misc_feature (71)..(71): n is a, c, g, or t
  misc_feature (75)..(75): n is a, c, g, or t
  misc_feature (108)..(108): n is a, c, g, or t
  misc_feature (114)..(114): n is a, c, g, or t
  misc_feature (175)..(175): n is a, c, g, or t
  misc_feature (205)..(205): n is a, c, g, or t
  misc_feature (264)..(264): n is a, c, g, or t
  misc_feature (273)..(273): n is a, c, g, or t
  misc_feature (283)..(283): n is a, c, g, or t
  misc_feature (381)..(381): n is a, c, g, or t
  misc_feature (424)..(424): n is a, c, g, or t
  misc_feature (736)..(736): n is a, c, g, or t
  misc_feature (1134)..(1134): n is a, c, g, or t
  misc_feature (1207)..(1207): n is a, c, g, or t
  misc_feature (1222)..(1222): n is a, c, g, or t
  misc_feature (1475)..(1475): n is a, c, g, or t
  misc_feature (1559)..(1559): n is a, c, g, or t
  Peptide Sequence Number=SeqID_7067
  Probeset Number=SeqID_14964
nnnnnnnnnccccnccccccccccncccncncccccccccccccnngccagcncnnncncgnaagcgancnatanttgatagggggggggcagatatgatgctagagngaccgnttgtctatctcttgcgcgcgctgcctcatatatcactgtatagaagtacaaactgaatatnagagaatgatatgtgttcgtggtgttgtcntgctgcgtgtggatgatagcaccgttaagtgactcttagatacggcgtgcggccgcccnatcctggcngtggtagggnagcgcctgccaggagtgtatattatctactctatctatagatatgacgggtgggcgtgatgatctgtagtagcgtctatcacacagatacaaatcccngccttcctcgtgtgatcttgttcttatatacattctccctccntattacttcaatctacacttgagcacacgaggagcagtattgtacgcacagacgagactaggcgacgtagaggagtgtcgacggacgtgtgcgttgttgttgttagtgttgtttgctttctcactcgaacacgactcaccacacaatcacctctcaccgtcggaactacttatccaacgatactatatcttagcatgtgacctgatatctgactcatatattgctccgcccagcgcgcgccgcgcgcgcccgccgaccgcgctgatcatcgcagcagcgcccaagaccacacaccgcctacgacaagacgcncgcgacatctctcacatacggtctttgagatctaatgaaattactatccttgcctatttatgtgtcgggctgtgtgggttcgtgggtgtgtttactgcgtttgtgtcataacttcttccttcactccctaatctcttctgcactagtactaatctcatatcgtctacgtctatgtctccacgactataaataaatcacctatccgcaccgttgcgcttgattagcacaccatcactacatcgtacgctgaggatgtgtactacatcataagaaagtggcatacgcgtaggaatggagagagtcaccatacatacaacacgaataagaacttacatccatgtcatcattggctcactatgtccgatctcaatgatgatatacagcgatgtcatcacgtngaacgaaagagatgtcgtcgaccacaacacgcctcgcgcctgtcgctcttcacactcatgtacgtgatatatncatcgagcgttatcngagtaactaattatgtgcgtctattagatcagatatcaacactacacttcaactaacccacttgatactcacgctactcactactctcgcgtcacatgattagattcctcatattctctcatccgtgtcggcggcgtggatatgtccgctaacccatatgtctaacacgtcgcttagcttcagcaccgcacctcataatactcgtcactgctgtaacatagactacatgcaacgacagctcagcagactcgangtagggtccacgagtacgtcatgcgcacgactatgctgagatactctctagcacacgacgcccgtagacactgtacgaactgan

SEQ ID NO: 5186 - DNA, 2212 bp, Glycine max
  misc_feature (30)..(35): n is a, c, g, or t
  misc_feature (44)..(44): n is a, c, g, or t
  misc_feature (64)..(64): n is a, c, g, or t
  misc_feature (77)..(77): n is a, c, g, or t
  misc_feature (99)..(99): n is a, c, g, or t
  misc_feature (104)..(105): n is a, c, g, or t
  misc_feature (213)..(213): n is a, c, g, or t
  misc_feature (392)..(392): n is a, c, g, or t
  misc_feature (633)..(633): n is a, c, g, or t
  misc_feature (651)..(651): n is a, c, g, or t
  misc_feature (817)..(817): n is a, c, g, or t
  misc_feature (826)..(826): n is a, c, g, or t
  misc_feature (864)..(864): n is a, c, g, or t
  misc_feature (867)..(867): n is a, c, g, or t
  misc_feature (924)..(924): n is a, c, g, or t
  misc_feature (928)..(928): n is a, c, g, or t
  misc_feature (990)..(990): n is a, c, g, or t
  misc_feature (1078)..(1078): n is a, c, g, or t
  misc_feature (1081)..(1081): n is a, c, g, or t
  misc_feature (1083)..(1083): n is a, c, g, or t
  misc_feature (1085)..(1085): n is a, c, g, or t
  misc_feature (1111)..(1111): n is a, c, g, or t
  misc_feature (1176)..(1176): n is a, c, g, or t
  misc_feature (1232)..(1232): n is a, c, g, or t
  misc_feature (1246)..(1246): n is a, c, g, or t
  misc_feature (1321)..(1321): n is a, c, g, or t
  misc_feature (1331)..(1331): n is a, c, g, or t
  misc_feature (1335)..(1335): n is a, c, g, or t
  misc_feature (1455)..(1455): n is a, c, g, or t
  misc_feature (1494)..(1495): n is a, c, g, or t
  misc_feature (1543)..(1543): n is a, c, g, or t
  misc_feature (1605)..(1605): n is a, c, g, or t
  misc_feature (1632)..(1632): n is a, c, g, or t
  misc_feature (1668)..(1668): n is a, c, g, or t
  misc_feature (1790)..(1790): n is a, c, g, or t
  misc_feature (1825)..(1825): n is a, c, g, or t
  misc_feature (1854)..(1854): n is a, c, g, or t
  misc_feature (1898)..(1898): n is a, c, g, or t
  misc_feature (1916)..(1916): n is a, c, g, or t
  misc_feature (1919)..(1919): n is a, c, g, or t
  misc_feature (1941)..(1941): n is a, c, g, or t
  misc_feature (2035)..(2035): n is a, c, g, or t
  misc_feature (2042)..(2042): n is a, c, g, or t
  misc_feature (2123)..(2123): n is a, c, g, or t
  misc_feature (2127)..(2127): n is a, c, g, or t
  misc_feature (2132)..(2132): n is a, c, g, or t
  misc_feature (2140)..(2140): n is a, c, g, or t
  misc_feature (2171)..(2171): n is a, c, g, or t
  misc_feature (2203)..(2203): n is a, c, g, or t
  Probeset Number=SeqID_14965
gggggcttttttttttcttttttttttttnnnnnncccccaccncgaccccgccccgctgcacntgtggggttgtgntatagagggtgcgggttatctncaccnnccacactctgattctctgcacatcgtaccaagtacccaatacgcggagtatatcttacctgattgctattgcgaaacggacatacaccatctagatgcgaaggcgcanacagtacaaataatatatttgtgtgattttcccgccatccgcgcgcccgatgtgtgacggcactaagcgtacgcgcgaccaagaggccaccacgcgacaccaccgccgcggcaacaccgcacgcgcgcgccggccaactcaacagcatacagcatacgtagcaagagggagtgggtagngatgacagtggtattgcgctctagctccgcaataacagagacgagaatcagtattagcacagcgagtcgatcttcctatctgtgttgtcgcgctgtcctcgtcctgtcacccgtactctgtggtgtgggtcgctacatcgtcgtggcgatatgcactcagactaatgcgatgctagccagcaatagccgtctgagacaaacagacacgatgaaagacacacgagcagacagacacgcacanccacactacaccactacntaaacgcacgcaagccacgatagcgacaaaattatcatactactcactgctcatcacacctcatcatcatacatactagaatggagtatgcgcgaacgtactagatataataatatatcttactattctcagctagtactacatgagggatgatataggagtgaanagatatatnatgtgcagtcgtgagtgtgagcataggctacatacatngtngtacgcttgcctatgaatgtattatcaatactgatgacatgtcaagtgcctgaccgnaccnaccatcactacaatacgatgaacacacgatgaagaaggaggcatagcattgtgtacaacgcngatagcgacgcgtaatgagatactcgtatagagagtatcgtaacgtgacagccacactatataccaccatcgcacacagatgagtaantananancacactccactcaaagatgcactctntccttttactccacacacgagctagagatacatactagacgatgacagctgcgagtagtgcaagncagccacgatctgcgcgtcgcgcgcgcacgtcaggacagacactccgcgagcgcgnggcactctactcanacgcgacgcgattagttcctatctctctcttactctacccctctattcgtacgcgactgcgcgacgagagctaanacacgagaanctanactactagtgagactatctagacacgcaccgagcgcgcactcgtcgagtcgacagtcccgacagctcaggagtccatacacagctagacacgcagcgaggcagacgagagctatgacagnatagtatgacactggggagtaatatacacgtcactcgtnncgctacctattctgtctagtacgtcatcgtaatcgcaagacgcacatnactcgaacacggtgacagcaccacgctcgctgcactagacacacgatccgacgtcatagatngcagctgatctacgcgcacgactgcgnccgaccgcgtagatcgctgcgactcacgacctaccntcgcgcgcaccaacacacaccaactacgcatcgactacgcacaatagcatatctactactaacacgacgctacaacagatgatctgtaacacgctactacatcatttactctctcactatantgatactaccatacgatatatatgagtgtcgactnacagagtactgatagtcctactcgacgantctactacgcaacacacacacatcactgtcataactagtataanttcctcctgtctgaatcnctnattgtcggtataatgcattaanacgaggatgattatatagtagtcgtaacgacaataacacatctgaactcgtcgtcatcatcggggtactctcgtactagtacacaggagacaantcactanctgatctatcatccgacttctataatactatagatacttagcagtagcagctgtcgctacccagctctgcagcgttactangagncgtcnctaacganacccgtatgcggcggacgcacagaaaatgcngcacgctacaccacgactcagtacaaactacnacacagcaa

SEQ ID NO: 5187 - DNA, 1940 bp, Glycine max
  misc_feature (5)..(5): n is a, c, g, or t
  misc_feature (30)..(31): n is a, c, g, or t
  misc_feature (49)..(49): n is a, c, g, or t
  misc_feature (61)..(61): n is a, c, g, or t
  misc_feature (70)..(71): n is a, c, g, or t
  misc_feature (83)..(85): n is a, c, g, or t
  misc_feature (94)..(95): n is a, c, g, or t
  misc_feature (98)..(99): n is a, c, g, or t
  misc_feature (108)..(109): n is a, c, g, or t
  misc_feature (117)..(117): n is a, c, g, or t
  misc_feature (144)..(144): n is a, c, g, or t
  misc_feature (207)..(207): n is a, c, g, or t
  misc_feature (231)..(231): n is a, c, g, or t
  misc_feature (282)..(283): n is a, c, g, or t
  misc_feature (295)..(295): n is a, c, g, or t
  misc_feature (298)..(298): n is a, c, g, or t
  misc_feature (301)..(301): n is a, c, g, or t
  misc_feature (308)..(309): n is a, c, g, or t
  misc_feature (311)..(312): n is a, c, g, or t
  misc_feature (368)..(368): n is a, c, g, or t
  misc_feature (376)..(376): n is a, c, g, or t
  misc_feature (382)..(382): n is a, c, g, or t
  misc_feature (398)..(398): n is a, c, g, or t
  misc_feature (412)..(412): n is a, c, g, or t
  misc_feature (420)..(421): n is a, c, g, or t
  misc_feature (427)..(427): n is a, c, g, or t
  misc_feature (457)..(457): n is a, c, g, or t
  misc_feature (462)..(463): n is a, c, g, or t
  misc_feature (469)..(469): n is a, c, g, or t
  misc_feature (511)..(511): n is a, c, g, or t
  misc_feature (513)..(513): n is a, c, g, or t
  misc_feature (517)..(517): n is a, c, g, or t
  misc_feature (541)..(541): n is a, c, g, or t
  misc_feature (544)..(544): n is a, c, g, or t
  misc_feature (565)..(565): n is a, c, g, or t
  misc_feature (593)..(593): n is a, c, g, or t
  misc_feature (598)..(598): n is a, c, g, or t
  misc_feature (616)..(616): n is a, c, g, or t
  misc_feature (624)..(624): n is a, c, g, or t
  misc_feature (668)..(668): n is a, c, g, or t
  misc_feature (685)..(685): n is a, c, g, or t
  misc_feature (711)..(711): n is a, c, g, or t
  misc_feature (746)..(746): n is a, c, g, or t
  misc_feature (751)..(751): n is a, c, g, or t
  misc_feature (770)..(770): n is a, c, g, or t
  misc_feature (782)..(783): n is a, c, g, or t
  misc_feature (790)..(790): n is a, c, g, or t
  misc_feature (1019)..(1019): n is a, c, g, or t
  misc_feature (1100)..(1100): n is a, c, g, or t
  misc_feature (1173)..(1173): n is a, c, g, or t
  misc_feature (1204)..(1204): n is a, c, g, or t
  misc_feature (1349)..(1349): n is a, c, g, or t
  misc_feature (1622)..(1622): n is a, c, g, or t
  misc_feature (1638)..(1638): n is a, c, g, or t
  misc_feature (1730)..(1730): n is a, c, g, or t
  misc_feature (1793)..(1793): n is a, c, g, or t
  misc_feature (1828)..(1828): n is a, c, g, or t
  misc_feature (1937)..(1937): n is a, c, g, or t
  Peptide Sequence Number=SeqID_7068
  Probeset Number=SeqID_14966
ttttncctcccgccctcctccccttccccnncctcccccgccctctgcnatttacacttantgcccatgnntctggttggttnnnttataatcnnaanncacacactnncccgcctngctaacatgaggatggagagtgtaganctatcagctacactgtggacgtgatatgtgtggcttctacggatgatctacgatggaagcagncagtcacgagttaaatattgaagnataaagctctgcggcgggcaggagtaggtccatagaagcacgagaagtggnnataaacattggngtngcncgcgtcnntnntcgtcatctccctatcaattatcattatatcagacatatctcatatacctaattcnatatatanttgtanatcaatatacacacanctatatgtgtttgncgtgaccnnactctntatatttattagtatctcgtaggtatatantgtgnnccttgngcgacgatagatgtttaccgctgcagtgtgttatgtatacananactntctacgttgcgcaagcagccggtnatnagcgcactcgacacacgtcangagcggacgacgacaagcaccatgtcanactancgtgatagagctctgaangtataggnagagagagagcggatattaactgatgtatgaaaaataaataaanctcatagatcaacatanaatattacacagacagaataaccacnctcacgcgacacacactcagcatcacaaacacaanacganctactagagaccgacgacnactatgcatcannaagtcgncaatatgaacgagaagacgacatttatgagtgagatactgagactatacacgacgttgtcgactatcggacctaatctatacgtgtgtccgacacctactctttactcattccaccatctctagcggactgctagtccactctctgttgtcgcgtgctttgtctctgtcttgttttgatgtcgtcgttagcgttggttatcttctgtactccaactgcctcgcgactcnacgtatactacgtgctagcggatagtggcacacgtataatataatatgtcatattatcaccgccgcatcccgatatacctnttctaagcgatcatgtgtatgatatgagcatctgtcactcctatacttgcgttctgctcctgtcgctaccacnacactcccgccttaccatcgatgagcatagnctcgctaacggaatataatttctacctgcactcatctgtagttgcgtggtcgtatgtactacattctgattctgtgatcgtagttctgttattcggcgcgtcctactgcaccgcgcgccgcacgcccggtgtctgctcggatcgnatctgcgtgcgacgtcatctgatagctagcctatgtcagctagtgtcccgctcctacaacagaacacaactcgtatgatgtcgccgcacgctgtgagcgctgctgcgcgtgtgtacgtcttgatcaactctgtgatactatatcattacgtcatcatctcgagatccgactagcacgccacgctcgaatctacgatgtatatcgtcttctagtacggtcgtgatatgtagtagcactgtatgtctgtgaattgtgtattagcacgaacgatcngcaccatgcatcacangatatctgtcgctcacttgtgctgtgcgcagagtgctcgctacggtgcgtagtgtcgtgcagcgtgatgtaggtcgaggggtgcggagccgncggcgtgacgtcacgagacgacgtgaggccgaggcgtgatcgtgcgcgctcggcagccgcagncgatgagacaccgtgacgtatgaggagtcgagtgnacagcgatgaggacatcgctacgtctcgcgctgtagaccatcgtacgtctgtgcttgagcttagtgtcgtcttcttataacttgagctgagtgcgtattcacgtcgtgntcg

SEQ ID NO: 5188 - DNA, 758 bp, Glycine max
  misc_feature (3)..(3): n is a, c, g, or t
  misc_feature (16)..(17): n is a, c, g, or t
  Probeset Number=SeqID_14967
ctnttcagcttttcannctaaccctcacatccactctagccgctgaccctcccacccactgctcttcccacggcccggcctccctccgcgccggccgtctcccctccctcctctggctttactttcttctccttttggttcacctggcgtcgtctcttcgcctgcctatgtctttttagtttactttattttttgttgcttttcttctatgttttctggttctcctcgcctccccgcccgcccccttccccctccccgacccgggcccccccccccgcccccgcccccacaccacatttgttcttctttttgttttttttctttttattagttatgaagtcacgtcaatacacacacaaaaaaaaagaaaaacataagtaaacaaattctctggtgttgtctttttttttttttgagtttattttttgttgtttaaaacataagggtttttgtcatttttcttttttattttagcagtccacaccaacaatttgttttgcgattcttgtttgttcacgcagggagaaaaatgttttttttgccgcccaccacgcaggctgccgcacccgggggggggtgcgaagaccccccccccgctttttttttttttttgaagaaaaaagccggggcgcttcccctcccccccaccgccctccgggggggcggggaagttcccccccccccatttttttttttgtgttttccatctctttccttccgttgtttctctgaagcagcaaagtgggtatgagaaaact

SEQ ID NO: 5189 - DNA, 2251 bp, Glycine max
  misc_feature (35)..(35): n is a, c, g, or t
  misc_feature (39)..(39): n is a, c, g, or t
  misc_feature (41)..(41): n is a, c, g, or t
  misc_feature (52)..(54): n is a, c, g, or t
  misc_feature (62)..(62): n is a, c, g, or t
  misc_feature (69)..(69): n is a, c, g, or t
  misc_feature (210)..(210): n is a, c, g, or t
  misc_feature (215)..(215): n is a, c, g, or t
  misc_feature (279)..(279): n is a, c, g, or t
  misc_feature (286)..(286): n is a, c, g, or t
  misc_feature (289)..(289): n is a, c, g, or t
  misc_feature (291)..(291): n is a, c, g, or t
  misc_feature (304)..(304): n is a, c, g, or t
  misc_feature (363)..(363): n is a, c, g, or t
  misc_feature (378)..(378): n is a, c, g, or t
  misc_feature (426)..(426): n is a, c, g, or t
  misc_feature (447)..(447): n is a, c, g, or t
  misc_feature (479)..(479): n is a, c, g, or t
  misc_feature (665)..(665): n is a, c, g, or t
  misc_feature (708)..(708): n is a, c, g, or t
  misc_feature (750)..(750): n is a, c, g, or t
  misc_feature (756)..(756): n is a, c, g, or t
  misc_feature (761)..(761): n is a, c, g, or t
  misc_feature (778)..(778): n is a, c, g, or t
  misc_feature (860)..(860): n is a, c, g, or t
  misc_feature (870)..(870): n is a, c, g, or t
  misc_feature (969)..(969): n is a, c, g, or t
  misc_feature (985)..(985): n is a, c, g, or t
  misc_feature (1131)..(1131): n is a, c, g, or t
  misc_feature (1135)..(1135): n is a, c, g, or t
  misc_feature (1146)..(1146): n is a, c, g, or t
  misc_feature (1161)..(1161): n is a, c, g, or t
  misc_feature (1176)..(1176): n is a, c, g, or t
  misc_feature (1220)..(1220): n is a, c, g, or t
  misc_feature (1245)..(1245): n is a, c, g, or t
  misc_feature (1250)..(1250): n is a, c, g, or t
  misc_feature (1274)..(1274): n is a, c, g, or t
  misc_feature (1279)..(1279): n is a, c, g, or t
  misc_feature (1288)..(1288): n is a, c, g, or t
  misc_feature (1349)..(1349): n is a, c, g, or t
  misc_feature (1362)..(1362): n is a, c, g, or t
  misc_feature (1372)..(1372): n is a, c, g, or t
  misc_feature (1390)..(1390): n is a, c, g, or t
  misc_feature (1419)..(1419): n is a, c, g, or t
  misc_feature (1438)..(1438): n is a, c, g, or t
  misc_feature (1455)..(1455): n is a, c, g, or t
  misc_feature (1458)..(1458): n is a, c, g, or t
  misc_feature (1483)..(1483): n is a, c, g, or t
  misc_feature (1502)..(1502): n is a, c, g, or t
  misc_feature (1516)..(1516): n is a, c, g, or t
  misc_feature (1527)..(1527): n is a, c, g, or t
  misc_feature (1564)..(1564): n is a, c, g, or t
  misc_feature (1574)..(1574): n is a, c, g, or t
  misc_feature (1581)..(1581): n is a, c, g, or t
  misc_feature (1599)..(1599): n is a, c, g, or t
  misc_feature (1603)..(1603): n is a, c, g, or t
  misc_feature (1623)..(1623): n is a, c, g, or t
  misc_feature (1643)..(1643): n is a, c, g, or t
  misc_feature (1652)..(1652): n is a, c, g, or t
  misc_feature (1709)..(1709): n is a, c, g, or t
  misc_feature (1719)..(1719): n is a, c, g, or t
  misc_feature (1757)..(1757): n is a, c, g, or t
  misc_feature (1768)..(1768): n is a, c, g, or t
  misc_feature (1797)..(1797): n is a, c, g, or t
  misc_feature (1802)..(1802): n is a, c, g, or t
  misc_feature (1821)..(1821): n is a, c, g, or t
  misc_feature (1865)..(1865): n is a, c, g, or t
  misc_feature (1873)..(1873): n is a, c, g, or t
  misc_feature (1884)..(1884): n is a, c, g, or t
  misc_feature (1912)..(1912): n is a, c, g, or t
  misc_feature (1914)..(1914): n is a, c, g, or t
  misc_feature (1918)..(1918): n is a, c, g, or t
  misc_feature (1950)..(1950): n is a, c, g, or t
  misc_feature (1958)..(1958): n is a, c, g, or t
  misc_feature (1962)..(1962): n is a, c, g, or t
  misc_feature (1968)..(1968): n is a, c, g, or t
  misc_feature (1984)..(1984): n is a, c, g, or t
  misc_feature (1990)..(1990): n is a, c, g, or t
  misc_feature (2010)..(2010): n is a, c, g, or t
  misc_feature (2012)..(2012): n is a, c, g, or t
  misc_feature (2015)..(2015): n is a, c, g, or t
  misc_feature (2060)..(2060): n is a, c, g, or t
  misc_feature (2093)..(2093): n is a, c, g, or t
  misc_feature (2096)..(2096): n is a, c, g, or t
  misc_feature (2125)..(2125): n is a, c, g, or t
  misc_feature (2135)..(2135): n is a, c, g, or t
  misc_feature (2161)..(2162): n is a, c, g, or t
  misc_feature (2166)..(2166): n is a, c, g, or t
  misc_feature (2169)..(2169): n is a, c, g, or t
  misc_feature (2200)..(2200): n is a, c, g, or t
  misc_feature (2213)..(2213): n is a, c, g, or t
  misc_feature (2215)..(2215): n is a, c, g, or t
  misc_feature (2221)..(2221): n is a, c, g, or t
  misc_feature (2241)..(2241): n is a, c, g, or t
  Peptide Sequence Number=SeqID_7069
  Probeset Number=SeqID_14968
tgtgacgcgcctgcgcgctgacgactccctagtcnagantncagcgtattannnactagctncgagtancgactagctacacgtcgacacgactacacacatatagagtgcagtatcgatgctatcacgcatcagtcaggtatcgtgtcacagagcagtatcatcctctgaccacacagacgggatgaggtgtctagagtgagtcgggtnctagnatgatagagacagccgagatatactacatgctcacgaagagtagatgagagggcgacgggtagnagtaggngananatgaaggatggantctcagaatactcgacagcagtaaagtgtataggactgtggacgttcagcgctcgagangactgtgacacatancaacgtagagcacgccgactcgtggctcccgattactgatgtgcgcanagacgtgcgttgagagcgcangagtgatgtgagcgcgaaccgacgatgcacanagcacgacagacgagtgatatcgtaagtagtatacaatatgtatttctctgtatagcgcgtgtgtgcgactcgtcgtgttgccgtgttatgtatgttgtgtcatactcactagtagtacacagtacatattatattgagtgtattacttagacttatccgactgtggatctgggcgtttcgtctcntatagtatatatagtccagtacgactgcggcggactacgcgtnatgagtcgtcgcgcgtccgtgctagcgtgcgactacgataancatagntctanatatgtgcatatagttngtcgttctgagctgccactgcatgcgctgtctctgtgcatctctgatactgtcgtgacatgactcatcatgcttatgtcgcncactgcgtcncacagtctacaatctctcctgcctcatgtttctgtatctacctcactatcgtatacaacgaccgccgagcgtgtctatagacactagcgattacgtagncgtcggtctaccgcanactcgatatagatgcgcgctcgatcgatcacgtacgtcatctcactcttatctgctcatctctgatcgcgctgtactcactatcttcgagaactcagacacacgagatgacgctctactcgacgtcaccactcgctctcgtgtatntccntctcgttgtcncatatagtattgcanagtaacacatccctnatcacacgctagcgactgatgtacgctcatagcaaacgactagncacgcagcactgccattacacaganctgcnctctcgcatgatgttccgatcgantcgcncactgatgntacatattgaccgctacacaatttatcgtgagatcgatcggcgtagtcagagagtcgcagntactgctctctgnctgatacgcntacagactgactaccccntcgctcgacatgcgcatctaactgacatntactacataacgcgactancatcatcggcacttganccnacggccgtcccgcgcgctgcagctnactcgtagctactgtgatnatgagtgataccantcacgatctgntcgctagcgtagcgacgacacgttctaagtagcaagntctcccgtgntacgtancatcgcaccgactatgcngcgntatcacttcgtcacgatgtnacgacgataatgcagtggcntacgtcctnattgtcatatagtgagtcgacgagtcagtgacgatgacgcgcgcgaattgctaagtngaacacgtcntagctccatgacacgtcatgtcgactgcatcgcgcgcnaccagcgctancagcgtaaaatactaacgtacagtgaccngacgnacatgctacgtcgatactnactcagcatacgatcagcgctaccactcctctactatgcttgantcgtactntacgaccggcngacgctgactcactcgacgcactctgtncncgtngcgatacgagcatgctgcgccgacgcgacggnagtctacngcgntacctncgtactactgatctantaccanatactgaatgctgctgccancnacntatcatgctacgtgtcctacggtcgttcgccgtcagcagagctgnactatactactatctctgacatctgatgtcgcntgntcgggcgagtcatcatgtgcgtgtagtantgacaaccanacactgctctagtcgtcgatatcagnntatncantgacgcatacgcgccgtactcagatgtgctngttagtagacgtntngcatcncagctgtcgtgtatgcctangctgactgcg

SEQ ID NO: 5190 - DNA, 646 bp, Glycine max
  misc_feature (601)..(646): n is a, c, g, or t
  Probeset Number=SeqID_14969
gtccactcttagctcaacccgttacggaccaatccacatgaatcgaggtggcccgttttgacagctccacagaaaactgacctgtaattattatgagcctacgtacccagaaggcacgcgagttgatggacgttttactaagaatgtcccgaaaaaagaaaagaaaagaaaaagaaatagtgactgttcatccatgtaatcatatacagtgattggttctgactattagttagtcattggctgcctacccgaattttacacagggactgtgattggcgtttaccattacacaatcaaacagagtacatgcaaatttgtaatctttttgtttctatatcattcgatcagagagatgaaccaaaagaaacatctttgcaaatcaaaaaaaaaaaaaaaaaaaaaaaaaaaaaaaaaaaaaaaaaaaaaaaaaaaaaaaaaaaaaaaaaaaaaaaactaggggggggccccggaccccaattaaccttatgggggggggttttaccccccctcattgcccgttgtttaacaacttcgggcctggaaaaaccctggtgttaccaactttaatcgcttggaaccacttccccttttcgccagttgnnnnnnnnnnnnnnnnnnnnnnnnnnnnnnnnnnnnnnnnnnnnnn

SEQ ID NO: 5191 - DNA, 1351 bp, Glycine max
  misc_feature (1)..(1): n is a, c, g, or t
  misc_feature (3)..(3): n is a, c, g, or t
  misc_feature (114)..(114): n is a, c, g, or t
  misc_feature (121)..(121): n is a, c, g, or t
  misc_feature (127)..(127): n is a, c, g, or t
  misc_feature (191)..(191): n is a, c, g, or t
  misc_feature (194)..(194): n is a, c, g, or t
  misc_feature (225)..(226): n is a, c, g, or t
  misc_feature (230)..(230): n is a, c, g, or t
  misc_feature (266)..(266): n is a, c, g, or t
  misc_feature (315)..(315): n is a, c, g, or t
  misc_feature (318)..(318): n is a, c, g, or t
  misc_feature (324)..(325): n is a, c, g, or t
  misc_feature (327)..(327): n is a, c, g, or t
  misc_feature (333)..(333): n is a, c, g, or t
  misc_feature (364)..(365): n is a, c, g, or t
  misc_feature (367)..(367): n is a, c, g, or t
  misc_feature (373)..(374): n is a, c, g, or t
  misc_feature (376)..(377): n is a, c, g, or t
  misc_feature (379)..(379): n is a, c, g, or t
  misc_feature (382)..(382): n is a, c, g, or t
  misc_feature (392)..(392): n is a, c, g, or t
  misc_feature (394)..(394): n is a, c, g, or t
  misc_feature (403)..(403): n is a, c, g, or t
  misc_feature (405)..(405): n is a, c, g, or t
  misc_feature (495)..(495): n is a, c, g, or t
  misc_feature (510)..(510): n is a, c, g, or t
  misc_feature (588)..(588): n is a, c, g, or t
  misc_feature (1269)..(1269): n is a, c, g, or t
  misc_feature (1272)..(1276): n is a, c, g, or t
  misc_feature (1280)..(1280): n is a, c, g, or t
  misc_feature (1314)..(1314): n is a, c, g, or t
  misc_feature (1321)..(1322): n is a, c, g, or t
  misc_feature (1331)..(1331): n is a, c, g, or t
  Peptide Sequence Number=SeqID_7070
  Probeset Number=SeqID_14970
nangactagagagtagcgcgtgcgactctcttagtcggcaatggggcgagagagaatgggtagacgaggcgtgggggggccacaccaatcacaactgctgcgtcgcggccgtgngatagangacgtngcgtcgtctcctcttgatcaatacaaaacaaaagcacgtgggcatgtgatggtcgggcgcgccngtngccgaatggacaaacataaaggaaaggggannaggnagggcggcgctgtctctctctcactagtagtgtttntatatctcatcacaccattaaaacacatacataacatcagtaggagtgnggntttttnntncttctntcaaattaaatcgatataacaacactcaaanngnggaganngnngnggnagtgaataananagaggacananaaaggtgtactagtagtaggtgggagggggcgtggggtgtggggtgttacacacatcactcacatcacatcctcacccctaaccaccccnactcggcgcacaacnatgccgagccgcacgcacaacaacacatactcgcaccacagtgaaggttcatcatgatgacaacaaccacacacatanatcacaacaccacgggggattgtctagctagactgagctcatgcaacaccacaccctgaagtgctgtgtgccataagacgccccacacacatgctatattttagtgtggggggtgggtaaggggagctggtgtatagataatatctttgacaacacccacagcatacaggtagtgatcactctgcatatatgcaccccaccaacgtgcgcgcgggaggcgtggcagccccaacccacacgcgtggggagcagagattgctaagatacatactatcatatcttatgagtttgagtagttagtgcttagctgggcgttgtggtgccccttcatcacaggccagggctggtgtgtggtgggtgtgagatcgctgccgtacacaatatccatagatatgtgctgtggctaatggctagatatattaggctatgtggctgcacgacagctactaggggactccagatggctcgtagcgtgtgctcttataatgaagagacgtccgtgtacacaggtctctcttgctctcacactatgagctgtgaggtctactgtgcagagtgtgtaagcatccagagccaaacacaccatggcgggtgttgcgaagctgagggtgggggggcgggggcgcacctcacgtcagacacagctccgagcggggggccctttcaattatcgtataattnggnnnnntccncccccccccaagacggccgaggacgaagaatacnagccccnncggagggangggacacccacaccccacac

SEQ ID NO: 5192 - DNA, 631 bp, Glycine max
  Probeset Number=SeqID_14971
tgcttctggggctctctctttgtcttttaaaatggccattccgaaatgtaattaatttccttttgggaagccactccctttttggtttatggaatgcccattttggagggtcaaaaatttttctgaaaagagtgtaggaaccaccttaggaagtgctggaagtaccacccttggatggggtgtaatgggaaattttgggatggacccagtttttaaggtgtatgtatgtagtgctgacctgtgttttcaggggcttggcaccctccccctactttttttttaaaatgtaaggtaaatgttgttttctttattttccaacccaagtttggtggttttggcatttgtttaagggatgaaaagggatttttggttggggggatttttttttgtagatccatgagggagaggttttttttttgttccacctccaaagtgtttgatagaatgccccacccccctttaaatgtttgagtgttgagtcctataggaacattttttatgtaattgcccattccaagggcattttttaggtaattgctcattccaggggcaaaaaaaaaaaaaaaaaaaaaaaaaccaaaaaaaaaaaaaaaaaaaaaaaaaaaaaaaaaaggaaaaaaaaaaaaaaaaa

SEQ ID NO: 5193 - DNA, 1462 bp, Glycine max
  misc_feature (134)..(134): n is a, c, g, or t
  misc_feature (196)..(196): n is a, c, g, or t
  misc_feature (248)..(248): n is a, c, g, or t
  misc_feature (256)..(256): n is a, c, g, or t
  misc_feature (344)..(344): n is a, c, g, or t
  misc_feature (466)..(466): n is a, c, g, or t
  misc_feature (502)..(502): n is a, c, g, or t
  misc_feature (752)..(752): n is a, c, g, or t
  misc_feature (1380)..(1380): n is a, c, g, or t
  misc_feature (1407)..(1407): n is a, c, g, or t
  misc_feature (1410)..(1411): n is a, c, g, or t
  misc_feature (1436)..(1436): n is a, c, g, or t
  misc_feature (1439)..(1440): n is a, c, g, or t
  misc_feature (1450)..(1450): n is a, c, g, or t
  Peptide Sequence Number=SeqID_7071
  Probeset Number=SeqID_14972
ccgcgcgagagtagcgcggcgacgtcagatgcaggagactcacgatcttacgtctattcagacgtgagggcctctgtctctagaggtatctgcgttgtggcgtgtcgatacttcttggtaatacagatacggtnattgggtcgcggagtccgggtgtgttgatgtggagtgctgtgtcgagtgtgcgacatatacntcacaggcacccttagactcggtgcgcaggtgcctcgtcatgagtctaccantatgcctntcagacttcctgtagactatcgacagtgtcttcgtcgtactgcatatgtagtgtgtcgaccgcgtcaagaatgacagaccgcacgttnaatttccggcagtcactatctatgcgtgacactcgttggtggtaggagaagtggagggcggcactgcgacgctctcgcagtgtagcacgtaggtaacgaccagcgtatcgcgtggtggatgngtgatgtgggtgtagtagatagtggcgacgtatagnggacgcattcggtggactgggagatggtgtagggagtggcataggcgccggccacgcgtggcggttcttgaatcattagctccgtccgtggcacgcttactctgagctagcgtggtggcggagaccgactccgagtggtgaacccgccgattatgggtggtcgtgagtcgcatgaaggcacggtcgcacctcactccgaagatggcgcgccgccgtcgggccgctgcctcgtcgcgtgtgtgcacagggngcgcacgtgccccgccttgcctggcgggcctcaccctccgcgcacctccgcgcaccgcctctctgagtcacgtaatcgcggtcgctgtgtagtggggggtcggatgcgtaggcgggggcttgtacatagacgcgcctcgcgctctgcgttgggcgattaatacagattgtgcgtgtgcgaatcgttaagcgggtcggtcgagtactatatgggagggcggagtgtgcagctcgcgcggcggggtgtgcgagaggagggaggggggctcggtgtggtgtgccccgctggggacttatgactctcttagatttcgcgctggatgttgggttggatgaatcccattctgtggggcgccgtggccttcccctttatctaacacttcctccgacgccgctcgggagatgtgctgtctctcccggcgtgcgggcggtccgcgtctacctacgtttacagtagtggtctagcgtccgcgctcggcgtccccgttacactctcttagacgtcttttcggccagctggcctcctcgtggactcacccaggggggcttaggtaataagcgagtacgctcttacctccatctagagggggcggggtggctgacgaaaaacaacccagaacagggggggngtaataccacctctaccactatggtgnttnntcactcaccacccaagcaattcttnttnngatagatatnggggggagggga

SEQ ID NO: 5194 - DNA, 624 bp, Glycine max
  misc_feature (601)..(624): n is a, c, g, or t
  Probeset Number=SeqID_14973
atttcgcttcttttcctaacctaaaccctactcattctccatacctcaacgaagaggttaaagagacggcaacagctttggtggccggcttgaccgagcagagcttcgtcttgggcctcgattttgccctaaaggactctcagtcacaacagacaccggcgtcgtcgtcctcgtcatcaatggcaccggagcagaccaagggtgagaacaagatcggttacgatgcgaagctgagctacctaatggaggagtacgggcagatcctcatagtgaactccgatagcgagggatcgaaccagcttccataacagtcgcaagggtctccgtggcgactccgtcgtcctcgtggggaagaacaccatgatgaagcgctcatgcatggatgcacgctgagaaaaccggaaacaacgcctatctcaaccttatcccggctcttggtggcaggtgagattgattttcaccaaggggacctgaatgaggtcagtgacgaggttgactagtacaaggatggagctactgctcgagttcggtcgttagcccagatgatggtgatggtcctcctggcacagagggctcgatctctcccagactcttgtctcannnnnnnnnnnnnnnnnnnnnnnn

SEQ ID NO: 5195 - DNA, 1452 bp, Glycine max
  misc_feature (21)..(21): n is a, c, g, or t
  misc_feature (24)..(26): n is a, c, g, or t
  misc_feature (28)..(31): n is a, c, g, or t
  misc_feature (33)..(33): n is a, c, g, or t
  misc_feature (44)..(44): n is a, c, g, or t
  misc_feature (46)..(48): n is a, c, g, or t
  misc_feature (59)..(59): n is a, c, g, or t
  misc_feature (147)..(147): n is a, c, g, or t
  misc_feature (226)..(226): n is a, c, g, or t
  misc_feature (228)..(228): n is a, c, g, or t
  misc_feature (247)..(247): n is a, c, g, or t
  misc_feature (279)..(279): n is a, c, g, or t
  misc_feature (412)..(412): n is a, c, g, or t
  misc_feature (416)..(416): n is a, c, g, or t
  misc_feature (418)..(418): n is a, c, g, or t
  misc_feature (422)..(423): n is a, c, g, or t
  misc_feature (454)..(454): n is a, c, g, or t
  misc_feature (496)..(498): n is a, c, g, or t
  misc_feature (500)..(502): n is a, c, g, or t
  misc_feature (572)..(572): n is a, c, g, or t
  misc_feature (673)..(673): n is a, c, g, or t
  misc_feature (675)..(675): n is a, c, g, or t
  misc_feature (694)..(694): n is a, c, g, or t
  misc_feature (1140)..(1140): n is a, c, g, or t
  misc_feature (1196)..(1196): n is a, c, g, or t
  misc_feature (1198)..(1198): n is a, c, g, or t
  misc_feature (1230)..(1230): n is a, c, g, or t
  misc_feature (1244)..(1244): n is a, c, g, or t
  misc_feature (1281)..(1281): n is a, c, g, or t
  misc_feature (1284)..(1284): n is a, c, g, or t
  misc_feature (1312)..(1312): n is a, c, g, or t
  misc_feature (1319)..(1319): n is a, c, g, or t
  misc_feature (1322)..(1322): n is a, c, g, or t
  misc_feature (1326)..(1326): n is a, c, g, or t
  misc_feature (1395)..(1395): n is a, c, g, or t
  misc_feature (1397)..(1397): n is a, c, g, or t
  misc_feature (1405)..(1405): n is a, c, g, or t
  Peptide Sequence Number=SeqID_7080
  Probeset Number=SeqID_14974
tttttttttcggcgggtcccntcnnncnnnntnttattgtttgntnnnttgtggtttgnggggggtcccccccaatcctccacaaatctgggttaccggggcccccaccccatacaaaaacgagcactactctcaatacaccaccgngcgccatggaaaaaagtgggttgctgaacgggagagttgcgcgtctccgagggctgccggcgccgcggtcaacacgctncnctactctctgtgaggagtnacacaggagaatagtaacacggacttgctaanaaagatggggggtagtagaagtacacaccatacctatatcaactgaacaagaacgtactatgtattgatattgtcgtgactcgttgggtaagctatcctcctcctgtattacgtacacgtggtatttgtaagncgcngncgcnnccacgtggtgatcgcggtctgcgtcggcgcngcctctggggtgtgtgataggtgtagttttggctagtccggnnntnnngtgccctccgctcactatttgtcgggtgtggcgtgggtgtacacccctctcatggagattctgctcgccntgaggacgcgagcgcggcagcggtgctcacaccggagagatagttttcattgaaagagctcgcgaagatcagacaatgcagcgcgaacgcacgcccacagnanactcgcccttctatacggnaactacaccactccgattaatagagccagtgagattacatactaagactagtgaagaaagtctaaaacgacgaggtgacgtgtatttactcctctcgtatgcgcttgtttggtatagcgtgagaacgtcatatatataaatcccctgctcatgacctaaatctctcacgcccaccctcgcatggaatagcagtgaactacgccacaaaccatgtcatcgtgtgcgatttttattgtatattaacaccacactgcactatcatccacaccagacaacgtcggacgagtaggagtggagtgccgcgtggagtgtgtgagggcgccgcgtttatccgtgtgacgatggatgttgtagctgtcgcatcgatatcgtcacacgttctgtcggtgtgttgaaatcatccttttgcttgtgggtgtgcgtctgagacaacactgcgtgctctntgggatgagaatcctctgctctctatcatcagggatctcacgacctctcgtgtacntntgtacctctccgctctcatgatagcagtctcntctaatgacgattnagtatgtgagatgtcgtatacatatacatgctatgtntancttctctctatatactctacttattccntatatcncgntcanaccatcaccgccacacctgatcatatatgtcgtggcaggcgtgcggagtgtaagagatgtcaatctctntntatactgngtatctatcacatgtagacttttatagatattatgtatattatcgag

SEQ ID NO: 5196 - DNA, 1508 bp, Glycine max
  misc_feature (1278)..(1278): n is a, c, g, or t
  misc_feature (1384)..(1384): n is a, c, g, or t
  misc_feature (1420)..(1420): n is a, c, g, or t
  misc_feature (1486)..(1486): n is a, c, g, or t
  misc_feature (1488)..(1488): n is a, c, g, or t
  misc_feature (1508)..(1508): n is a, c, g, or t
  Probeset Number=SeqID_14975
ggatcctccccttcctctcgccctacttatatcagccgccgctattgttccgccgcggcctcttcgccgcgtttgttctgttcggtgtcttttccgcgtatgtgctgcggtgttcggatgttgtgaatcaattccacctctccgacactagtttatatggagttcttattgtgtaacgatcaccgccacacaaccccagactcaacgcgttccatcccctacaacgtttccaacaacctatttaggctacacaattgtttaggccaacttgacattttaatttttgagacgcggcgcacctctgataaagatccactaaatatgtgatatatatccgtcttactcccccctttttatctattattcgcgagcccttatatgcgacgcggtatgtcgtcgcgctccggagtatccgatgcgtagtggcggtgcgcacccccctccctcaaaccacacacacacacaattgatatacccgagccggttgttttatgctccacgcgcaagcatcgcgcggcgtgtagaatgaaaaatgtatttatttctgaaacgaaacactcagtgcccacataccgaccatatctatttttctccccccctcttatttattcgcgcgcccgtttagattaagttgagctagcgcgttaaaaacacctctcgcgcggcggcaagtataataaaaggcgcgttaatttgccagaccacatgttcgtacctagaaacaagtgcgcggatcaataaagacggaagaagatggtgtgtgttgcagggattcatctcactaacaaatactgatttgtagaacaaccacacgcctcttgttgatccatataccaccgcgtgccgcgttgttggaatatccatctctgttgtaagataacgaccgtcttgttccatcggatccgatgttaagatgtgtcacatgtgaaagacaggtggcgtgggtgtagctgcgctggatacatgacaggtgaggtaaattcgctcgcgcgtcttgcgcgcgctgttatgaaagagcgtgctgcaatggtgatatgcgcgctcgcacatatgtcaatataataaatatcgcgcgcgcgcagaatataacgagtgggtgtcaggtgtggagaaaatatatgatagaatagcgtctgaaggaccggcgcgcggcggcataatagatagaaacaatacgaatcgggtcgaacaatcagctgcgatgctcgagactctgtgtatactgctcacaaacaatacatagccgccgctgttgtgtggtgcggaatatgtgaacanaccaatcatacacatcgcagacgcgggtgcgtgtaggcgtcacgctcgtatactacacactatcgcggagatattatacagcgcgccgcgccgcatgaaaatatangtcgtgagaatacgctggccgcgcgcgtcgcgcggntgcaaattgcgatgaccggtgcgtccgtcacgcgcgccatgcgacacatatatatcacacgaaaantntgtctatatgcgatcccatn

SEQ ID NO: 5197 - DNA, 452 bp, Glycine max
  Peptide Sequence Number=SeqID_8263
  Probeset Number=SeqID_14976
ggaacactttattttatgttctactacattagcgaatgtattatctgtctgtcgcataattgagatcggagtcacatttatgggctccaccaaatcatcatcgcctgcaacgatatctatgtgttgctaagaatgttggtgttccattcgagcttgacctgcaagcactggattgcgttgattgcgacttctttggcatatgttattccctatcaacacctcgcgaagatagcgacccctgcttacgctgaagatggagaacttgtatatggtggatctgatatgtctacaggtggagtttgaggatatttacatgatcttatctacataacatgctttggacaagggaatgtccatcgactctggaaagttctggtacacataatttgtgataccggctttttgaacataccaaacctttgggaccatttaaagatttttgtccccgggtt

SEQ ID NO: 5198 - DNA, 1358 bp, Glycine max
  misc_feature (20)..(20): n is a, c, g, or t
  misc_feature (79)..(79): n is a, c, g, or t
  misc_feature (1314)..(1314): n is a, c, g, or t
  misc_feature (1331)..(1331): n is a, c, g, or t
  Peptide Sequence Number=SeqID_8264
  Probeset Number=SeqID_14977
ccctccccttcccttccttnccctcgcgcacactcgctcgctctcggctctagtacgatcttataataggagagatagnagggaccgccgaccgcacgcgacgcccgcgcggcacgcagcacgaccctattttatattacgtatagggtttattatatatgcataggtacacgcacagagggaggtaggcgctcgttccaccatcgtctcagtatttattagtctacaactgcaactttcaccgagtgagtggagaaacgacggcagagaaatattgataggagagctgtatgttaacaataatgtcatataggtcgaactgcgttgagcgcgctccgcctccctgtagttgttatagatgtacatgtttatttttatcatcatcatatcatacttctaaccaagaagccataataagtcaacacaaagaacggccgcgcacatgcgatgcgtcagaatcgagtatatgcgacacagtttaattctaggctgcactcggtcgcacgactcagttgtagtgctgagatgcggcgtagacctcagtgtggctccatcattcgctgcgattaactcagcacacgcgccccattatctcatccgtatctcggcgctcttcgattctgtcgcaggctcgatcgttaaatggctattacaccacagccgcagccaacacagagttgtcgatatttacgtagcggttgatatcgatatgacgccgacagatacatataacaggctcactattataacgccaagacgtagacacattctcgtcaggcgcgctctccgtcacgtgctgtactttaatctatttcagttgtatcacgccagcgtccctctaattcacgcagcctacacgacgactcacacagcttactatgagcagtacacaagattgttggcgacgaataagttatacgaatgctacgtgaaatatatccatgctcctatacttccaacagaacggcgcatcatatacaactattacagagctactaatataagaatcggcagatattgataagatgctgttcgatgtcgagtctgccaactaagctgcaggctgattcggatcgatatttatacgactcgtactcattgcaagcttgattatatgttcttaaatgaactatgatactgcattctgactatgtcgcgtcgcaccgtctatcgctctcgcttcaacactatgctatactccatatctgagagagatagctcgcgacgagtcacggatgcatttgtagctgcgaacgtagggaggggcttcaacacatgatagaggctgcgatacgagagtgtgagcgatgcgcngccgtcgtgacgtgatnacttcgagtcaccgatgacgacctatg

SEQ ID NO: 5199 - DNA, 1489 bp, Glycine max
  misc_feature (1)..(1): n is a, c, g, or t
  misc_feature (17)..(17): n is a, c, g, or t
  misc_feature (47)..(47): n is a, c, g, or t
  misc_feature (50)..(50): n is a, c, g, or t
  misc_feature (56)..(56): n is a, c, g, or t
  misc_feature (108)..(108): n is a, c, g, or t
  misc_feature (132)..(132): n is a, c, g, or t
  misc_feature (139)..(139): n is a, c, g, or t
  misc_feature (154)..(154): n is a, c, g, or t
  misc_feature (189)..(189): n is a, c, g, or t
  misc_feature (263)..(263): n is a, c, g, or t
  misc_feature (373)..(373): n is a, c, g, or t
  misc_feature (383)..(383): n is a, c, g, or t
  misc_feature (385)..(385): n is a, c, g, or t
  misc_feature (604)..(604): n is a, c, g, or t
  misc_feature (779)..(779): n is a, c, g, or t
  misc_feature (1101)..(1101): n is a, c, g, or t
  misc_feature (1200)..(1200): n is a, c, g, or t
  misc_feature (1285)..(1285): n is a, c, g, or t
  misc_feature (1358)..(1358): n is a, c, g, or t
  misc_feature (1364)..(1364): n is a, c, g, or t
  Probeset Number=SeqID_14978
nctgcgtaagtacgtancacgtacgttgcggtcacgcatacattgtntgntgacancagagagttcgttcgtgtagcaccgcgtcgtctgatactggcgtcacgtgtncaggcgatactcgtcacctgtgcnatctcgnctgttagtgtgagtnctaggcgtacatgtagacggtactacacatccganatgtgttggccgtcgctcaacacagcgaatacagcacgatgtagctattcagtcaccaggagcgacggctgccncaggatcgagatatacgcgttccgctcgtgcgctcaccagtcatgagtcatgagcattgatccggaagctcagcgcgatctcgcattcgaatgtatcatattagtcacgnggctgcttcntnccagcgtcgcgatccacgtcactgcactcccacagttacataatatctcacagatattacagacgctcgtagctgtcgtcacaatcagacgagtcttagtctcatatatcgtgacgtcatgcactacggtcgcgtcacccagcacgaccagtaagcagcctgagctacacaatcagtgaggcgcacacctcgcgcttgtacgtcacgtagacgatgagnagatcaacacgcaaatcgaatgattactcaccggggagactgcactagtatagatactatgaggtgatgcatctcatagctacaattagttgatatgtgcgtcatggcctcgacatatgagccatgttccatagtgcagtcgtcagacacatgatacgtgcagtgtctgcagtancgttacgcatagatgtccacgtttgcacaccgcgtagtactcatcggtctctagcgtatcgccatagtactacgcgtatctcataagtgcagcgtacgactcgtgcagcgtagcatacatatcgcgcctaagctgagtggcttgttgttaactcatagatagaccagtagcgtgcgagataagtgcgccccgacatctacccatcatctcctccgtcgcccgatttctaagagttgcacgataactttgcattaatcacgccgcctctacatgtccgccacatgcgcgctcgggcggtcacaactatagagaggtgtgacantgagtgtatggttcgtaagtgatggtgattggtagattagtgtagtgcaagtcgcgctgcatacacgtatacaccctaatcacactagccacactgtgnctccgcatacatcatatacagtaaacaccacacaactcgaacagctctatacaaaccacgcagccttatgaacatatagattatntatatgtggcgcgcttcacgagcttctcgtctccacttcatcatgatgagcgatggatgcgtggtgtgttgtnttagtngttagtgatcatagatatatagacggggttatcaccctacgccgttagtgggatgcgccagtaatcaggttgcagtccgcgcattcagtctatgtgatactgtattactgtgtgtggtgtgggtg

SEQ ID NO: 5200 - DNA, 1636 bp, Glycine max
  misc_feature (84)..(84): n is a, c, g, or t
  misc_feature (281)..(281): n is a, c, g, or t
  misc_feature (460)..(460): n is a, c, g, or t
  misc_feature (512)..(512): n is a, c, g, or t
  misc_feature (551)..(551): n is a, c, g, or t
  misc_feature (668)..(668): n is a, c, g, or t
  misc_feature (850)..(851): n is a, c, g, or t
  Peptide Sequence Number=SeqID_8265
  Probeset Number=SeqID_14979
cagcaagtagtgtcatctatggacgatgcggtgatgcacagcagcgtgcagtctgtactctgcgtccgcctagttgacaatatnccttgcgcactcttctactgtccttcatgtcctactaccgatctccatctctcgttccgtcctcagtacagcatatcctagatatactcgcctgcactactgcgtaaccagcctgtagtatttgcgtcgtcatcagtaggtgcatgtaagcatcactcactctcctctcatacataggtacggctgagtaggaagcncctctgcgtcaacactacacatagaactgcggcgccgacgcacgtattctacgtatccgcgctggttgatctcctaatgtgttatccgagcgctatatgcccgcctgtctccgattctctggctcgataccatcgtatgctctactgcttctgagttactacatactctcacgaattcnccagcgagacgcgatccactcggtttcccctctctgcgtgtgccggcgcgtnttatccaacatatcaggcagcgggtgctagtctgagctntaccgtctagctactcctacatactatgtctatcgttgtacgtatcgagtcgctacaccgactcgtgcattgtctgttccgtcacagcctcacgggtgcgatatggtgtggttgggngtgtgtaagactcgccgtaacataatgagcgtttgcgaattatctactaaatcttgctcgtcgtactagagacggtcgtcttatgatctgcagaaacttgcgctaaaacgtcgccaataatcggcagccgcctggtgatcccgactatccatttcattgtggacacaactcaacatagacgnngagtgccctatttgatcatacgcccagcggagcgccaccacctatgcccgcagtatgtctgtgagagttagcgggacacactatcgggaggtacttatgggtcctgtcaaatgccgccactgcagagcccatcgaaataattgcttatgaagtgacatgggcgcgcggcgagttagcggtcttcttatgtagtctcgggcgtgtttatgcggcgagcaggggctctcttctccgtgcgctgtatccgctcatggtgaatatcgctacagaagattactgctcatatggtcggtgcttctccgtcatacaagagatatttatagaatgccagctgccaggctttaaaatatcattccttgctcttgtcaagggtagattcgccatacacataactcaatgcgccgtcgggctcgatccttctagtaccagcttagatgtctcctatccataagtacctccgccctgcagaagctagcctgaggatgtctcttagtacactctttgcagagagagtactaccactgggatgcgccgctggggacacaacagcgcctccatacactcgatccatgccgacaagtccaagttaaatgttaatagtcccagacgtctttgtcctacttttctcctccaacaacaagagaacagaaaagaagatagccctttttcgtatggcctttcgcccctccgagggggagggcccccggtaccctcattttagccccacccaacattccgtctctatactgcatcactttatcacttatatatatttcgttacacac

SEQ ID NO: 5201 - DNA, 1499 bp, Glycine max
  misc_feature (269)..(269): n is a, c, g, or t
  misc_feature (290)..(290): n is a, c, g, or t
  misc_feature (484)..(484): n is a, c, g, or t
  misc_feature (493)..(493): n is a, c, g, or t
  misc_feature (1189)..(1189): n is a, c, g, or t
  misc_feature (1443)..(1443): n is a, c, g, or t
  misc_feature (1474)..(1474): n is a, c, g, or t
  misc_feature (1481)..(1483): n is a, c, g, or t
  misc_feature (1486)..(1488): n is a, c, g, or t
  Probeset Number=SeqID_14980
catcacacctgcctctcgcaccagatcgtgcagttgacgcgacattgagcatacctgtgttatgtaatgttcatgtgttcatatggctctgttatatctaaggagcagccgctcgacctgcgactgccgttctcgcgcataccctcggtcacttttctctgcgcgccccacatccgatctccaccgtattgtgtcgctatggcgcaagacttatccgtctgtagctctgagtctcgctcagtacttatgtatgactccgctctgtcagncagcgcgagtcacgagccgcnagcatctcctagtcatctcgagcgcatcgtgtcgtcccgtcgttgttctggtagcgacagcatacaccaccgtgtcgtcgctcttctcgggtcggtatgtcggcgtcgagatgagtcatgcgcggcgcgagacagtaatgagtaatcaatatactcgagcttgtcggacagcacacactcgccgcaaaccacgnacgctatgngtgcggcgcgcgctctgctctgcgcgcagcgccacgcgtccgatcgtcttcatcttcaattctcgagcgcgcgcgcgggcggatgtgatagatctccaccgtaccatcctcatgttgttcgttggcttgtttctcttctcgttgtgcgtgtatagtttgtgtaatggtagcgtgcctataactctccggcgtaatcccctaccggccgtcgtattcctctgatgggtgcccggaccgctatgttctcactacggccaatgaggacttatcttgtgcttgtcgacctctttcactctttcttaggctctgtgttctcttgtattctctcatattcgctagaactgtgtcaaccctaacatacctcacatgatgattgagtccaggcaccaattctgcgctaacgatatcgcgttgctgcgtcggaccgattgtgtagattatgagtaatggattggcggagtataatgcgtgttagagttaggtgattagaggatagtgataatgtggtgcgacccgcgcgtagcgtaatacgatgaatcatgtgatccacgcgaggttatcttatatatgagtcttatatctcatatatatttatatgtaatatgtacaccagcgccagcgacgagcacctgatttagatcgctctacgtattatactgtgttctgcgtcagctcgctgtgttgctgtgagtatgncgatgtgcgtcacgtccgggcgtccacccgcgtcagcgggccacagtcgctagatgaaagcgcgcgcgtaagtcgtgtagatattaatgacaagcatttaatgacaatcaataatgctgtatagacagagagatagatgggcgagttgtcgcacctcgtccatcacttctcgtgctggcgtatctcccttcctcgccgtcgcgcgcgagcggtcatacgtcgggctctctcatcttctgctcgtcgcctgtgtnccgcgcctgccccttcactcactccatgatnaccaaannnttnnnaaaaaaaaaaa

SEQ ID NO: 5202 - DNA, 1204 bp, Glycine max
  Peptide Sequence Number=SeqID_8266
  Probeset Number=SeqID_14981
aattcaaagttaacaaaataagttgtaagttcccttagtaagacgaatatgaatagcggcttccctatccaccctagagtcatccaggtcatccagaaacaagtgactgagctggttaagagaccccctgattgcatccaatatgccctgaatgaatctgatttccttgatatccaagcagatataattgggccagttggaactccttacgctggtggagtatttagatgtaaattggtactttcaggtgaattccctaaggttcctccaaagggctttttcttgactaagatgttccaccctaatgtctcagagaaaggagaaatctgtgtcaatacattgaaaaaggactgggacccagcaaactggtcactaaaacatatattcgaggttatcagatgtctcttgattgtgcctttccctgaaagcgctttgaacgaagaagcaggaaaagctttcatggaagactatgaggaatacgctaaacatgctcgtttgataactgagctctatgctttacctaaggagaaaccaactsarggtccagcatcttcccctacattacaggaaaaaccaggaatggacatttcctttgaaaacactcaatcagaaagcccaataaaagttttcccagttccaactatgtctgctagtttcaacccaggcaaccaacttatgaaggacaaagcaacagaatcaatgtttgggttcggatttaaggctgaaaggccagaagaggtattgatgacagttacaaactcactcaacaccaacccaatgagccctctggatgaaggaatgttaaagaagccaggctcagtgccatttagtggtatctcaggaattggaagtggaatccaagtgaacttgaacccaaatgccaatctgaatggaaatctttcagcaaagaaggagaatgacgataagaagaaatggagaaaacgtatttagacggctttgaaccctcttaaaatgtgtcgaaactaggattagatttaggatgttaagaggtggaggcaaaatttcgtaacactttgtgcatataaattcaatctttactgtgtctcattttgaaaagtgactgcatcttgttgttttttttaatattttttttagaagcgataatttattcaaagcaaaatgcatacgtttattgtttgatctattcaggtcaacgcaacttatttgaaacctactaaatttg

SEQ ID NO: 5203 - DNA, 470 bp, Glycine max
  misc_feature (453)..(453): n is a, c, g, or t
  Peptide Sequence Number=SeqID_8267
  Probeset Number=SeqID_14982
gacgccgaaactaaagtttgtttcttacgcgcatccatccgcttcaattgacgaagggaacggggagtttcggaaagaggaggaacaagagtcacactctctgtgtcagatgtggtcgccgcagtttccacatccagaagagccgttgctccgcctgcgcttaccccgccgctcgcaagaggacctacaactggagtgtgaaggcaatccgtagaaagactacaggaacaggaaggatgaggtatcttcgcaatgtgcctcgcaggttcaagaccggtttcagagagggtaccgaagctaagccaaggaacaaggcagcggcttcatcagcttaaactttagtttttgtgcttctgagtttgttcgcaggataactgttattgatcatttgattagtaatatctttcgttgtgttttcttcttctttttttaaaaagtttgtatgtttttggnttcaagttttcgaaccc

SEQ ID NO: 5204 - DNA, 570 bp, Glycine max
  Peptide Sequence Number=SeqID_8268
  Probeset Number=SeqID_14983
cgcgtccgagcgagtgagggcagtgttgcttaatagggaaaacgaacggtggtgataggcttcagtctagatctcaatcgactccaccttgctttcttgtccagcgaccgtttctctcaacgaagtcacgccaaatagcagaatatgtgcgaacccaacccagggttgcggcgaacatgggcgcattgtgcggctaggcgagtcgacagtagcgacgaaagcaccggcgacggccctatgtccggcgcgcgtctcgagagcggcgacctcgttatcgctcgcgtaattcacctcatcaggagcggcctgggttacgacatggcgttcaggatggacgccgagcataccgagcgcgtaggcaacaagttcgagttcgacgagtttaatttggagccctttattcaaacttgcatgagcacactctcctacaaaattgggaatcgatgcaagcgtagctggggtggcattgctgctaagggtgttattgctgtcgctgatctggcgaggaaggatggtaacttgggatctgataaaagtgaagggaaagctgggggtaaaattggaggatac

SEQ ID NO: 5205 - DNA, 904 bp, Glycine max
  misc_feature (896)..(904): n is a, c, g, or t
  Peptide Sequence Number=SeqID_8269
  Probeset Number=SeqID_14984
attctctgttttcttttaacatccgataaggatcggatctagctctcttcttattcgattcctctgtctcgtcgatcgaggaactaagcagtgatgggtgctggccggagatgggccgtcgatttctccgatcaatctaccgtcccatcttcccgggacatcctagatccacctggcttctctcgtgtttctcccgagcaggatgactcagcaacgagccgccaaaagaaagacgctgaagctaactggaaacttcagaaagcgtgggaagtagcgcagtcaccatttaagaatttgatgatgatgggtttcatgatgtggatggctggaaacactgttcatctctttagcattggtatcactttctctgctctttggcagcctctcagcgccctccagagcgttggaaaggtttttgagccattcaaggataacaaggtggaactacttatgcccaagctggtgtttcttgcccttaaccttggagggttagctttgggtatttggaagctcaacactttggggcttcttccaactcatgcatcagattgggtttcatctctaccccctcctcaggaggttgaacactctggcggaggatttgctttccactgatgagcatgtgtctctttgagataattacgaaagatacttaagtgatttgttcaatcctatatcatgaggggaagattcatgtggaccttctcatctcgtgatcttcttgtagcattttcaaaactctgaaaccatagcttttttcacttatggtgtgatgttcattgctcatcataactttgaattgtattattggcactgaaggaactttcccagcttttttatagacaggaatggataatgttacagactgaagtttggttcttaatttgcttgaaccnnnnnnnnn

SEQ ID NO: 5206 - DNA, 1730 bp, Glycine max
  misc_feature (1)..(1): n is a, c, g, or t
  misc_feature (9)..(9): n is a, c, g, or t
  misc_feature (25)..(25): n is a, c, g, or t
  misc_feature (102)..(102): n is a, c, g, or t
  misc_feature (104)..(104): n is a, c, g, or t
  misc_feature (160)..(160): n is a, c, g, or t
  misc_feature (165)..(165): n is a, c, g, or t
  misc_feature (207)..(207): n is a, c, g, or t
  misc_feature (252)..(252): n is a, c, g, or t
  misc_feature (336)..(336): n is a, c, g, or t
  misc_feature (357)..(357): n is a, c, g, or t
  misc_feature (360)..(360): n is a, c, g, or t
  misc_feature (429)..(429): n is a, c, g, or t
  misc_feature (626)..(626): n is a, c, g, or t
  misc_feature (705)..(705): n is a, c, g, or t
  misc_feature (792)..(792): n is a, c, g, or t
  misc_feature (942)..(942): n is a, c, g, or t
  misc_feature (1158)..(1158): n is a, c, g, or t
  misc_feature (1246)..(1246): n is a, c, g, or t
  misc_feature (1522)..(1522): n is a, c, g, or t
  misc_feature (1707)..(1707): n is a, c, g, or t
  misc_feature (1717)..(1717): n is a, c, g, or t
  Peptide Sequence Number=SeqID_8270
  Probeset Number=SeqID_14985
ncaacatanacacagtgcgattgtncgacaactgtagagtagtgatagaatcacgagatgtgaatagtcatgctgatgagacacgtagaaaggtaatagtancncgagcgagtggcaatgactcgagagctacatgtaagcggcgaggtgtgcagcttantaggnacatagacagatcagtagaacagcgcgcgccacatgatagtncgagctgatacgcagatgtaatatgagtgcgatgacgtatcacantgcaggatatagatcagcgatacgactacgcgtatctcgctagtggagagagatgagtatagaccgatgacatagtgtgtatantttgaatatactagtagttanagngtgacgggagcgttagttgtatcacataccacagatggtgagcctctgtcataagcgagcgctgaaacncagacaggaggtcgtgcataatcgatcaacaattatactagacgttgcaccatactgccactgactcagcgcgcgaagcttggcgggtgggtgcgaattcagcagacacatgcatgcagtcaggctcatgcgcacggcataccatcgtgagtagacgtatagcagtacgacgaggattggacgtagttgtgtgtganacgtctcacacgacgagtatgaatacgactacagtagacattctgtcacggcgcgcgaacggcgatacatatgcgcagnagaatagagtacgtccgttcacggctagagtagatctatacagcgagcgaggtagtcgtgtcggaacttgtccgctggtatagaagncggacatgccggtcgagagatataaagagtagatgagacacacgtgagccacagagcatatgagatctataagaaagtacaatgtacgcgggaggctcgatacagagtcgttatgtaatcctaattactcactatcaccgtcgcacaganacattgatgatgacggcgacatctaggtaacgtctatagtgagtgagtggatgtagaagagacatagattagtcggagatatgagcgatgtaaagatctctacagcgcagagatgcagagttagcgcacgtagctctgatgcgcgtgcatgcgcagagacaatatactcgcagacaacagatcatcgacgtagactcgctgactccgagcgacctnccgacatacaatgagtagcgtgatacatgctattatgacgaataagacgcggacacagataagatcactctcttaccaacgagctgtngcagacaacggagaatattagactctatcgttacacattttactagtgataagctgtcgctgtagacgacatatgacgttatacgcgcacggtagtaggagagttgattggtgtgtggtcacaggcgagtgtctgcgacatagatcgtagcacatgtaagtgacacagtcatcatgcgagctctactacacaacgatagcccgttcgagcagcgacagcaacagcatggagagagagtatagatatgaaatagatgtcgctaacatctgctctagntccatggacacacggacgtagagtcactacacatatatatagaagagagataggcacagtacgcatccaccacaacattctcagcacggcgtagcgagagataccagccagactattttgacactacaacatataatagtataatatcatatacaagatagatacaaagagagagaggaacggangaagagaganaggatgagaggga

SEQ ID NO: 5207 - DNA, 1380 bp, Glycine max
  misc_feature (1)..(1): n is a, c, g, or t
  misc_feature (59)..(59): n is a, c, g, or t
  misc_feature (90)..(90): n is a, c, g, or t
  misc_feature (224)..(224): n is a, c, g, or t
  misc_feature (255)..(255): n is a, c, g, or t
  misc_feature (310)..(310): n is a, c, g, or t
  misc_feature (318)..(318): n is a, c, g, or t
  misc_feature (414)..(414): n is a, c, g, or t
  misc_feature (715)..(715): n is a, c, g, or t
  misc_feature (988)..(988): n is a, c, g, or t
  misc_feature (990)..(990): n is a, c, g, or t
  misc_feature (1164)..(1164): n is a, c, g, or t
  misc_feature (1197)..(1197): n is a, c, g, or t
  misc_feature (1204)..(1204): n is a, c, g, or t
  misc_feature (1280)..(1281): n is a, c, g, or t
  misc_feature (1283)..(1287): n is a, c, g, or t
  misc_feature (1300)..(1304): n is a, c, g, or t
  misc_feature (1315)..(1316): n is a, c, g, or t
  misc_feature (1325)..(1325): n is a, c, g, or t
  misc_feature (1329)..(1329): n is a, c, g, or t
  misc_feature (1340)..(1340): n is a, c, g, or t
  misc_feature (1343)..(1346): n is a, c, g, or t
  misc_feature (1348)..(1350): n is a, c, g, or t
  misc_feature (1352)..(1362): n is a, c, g, or t
  misc_feature (1374)..(1375): n is a, c, g, or t
  Probeset Number=SeqID_14986
ngctgacgcttcgtctctgcttgtatctctgtatgagcacatgcacagcgtggagcatntgagtgtgtcgtgtgtaattatatatgtacncacgattcctattctcagatacgtcgttcacgatcctgctccgcctcgcagccttcctctcacttcactaaccgcgacatcttcatattcacatacacatctcgagtagtaggagatgtcacgcactcagagtncctcagtcgatgtcagtgactgcagtatgtncggtgcctcgcgtgtgttctagctgtggcagcgcggtcgcgcgcctcggcggctncgctgccncggctcgatgatgtcatctgctctcattgagttctcagcgtcctctatgttggtatatacagtagcagatagtctccgtcataaagttcacctcangctcgcatacacgtcgatagttttcatagtgagatgtgctgtcgtgagagtcgctcatctcttccgctagatgtgttcaaatatacgtatacgtattcatggttgatcgcgctatgctcctacatggagctagtccgtgaggagtagtcgttctgtatatgattatgggttcgactcacttataaacgcacccgcgaagacttataatttagcaaaaagaacatatcttatagaaatatacatcgttttactactataattacacactcacgcatgatctctcaaatcgcgacttcatatntcccctcgcccacctatatcacctctcacctccacctccattctaatcacaccacctatcatgttaatataacaactctatacatatactatcactgtttatcgtgatgctcgggcgtattttgagtaggttgatgtgagcggtatgtggtcttgcaggttgcctaatcattatatatatattaattatttgttgtgtttttacatttactagccattctttgcgacttgtgatgtggcttctattctttgttttattttcgttttccacgcnanttccgcgcgcactcgttacgccctgatgttcactgcgcccctcccagcgtcacccctgccctcttaccctttatgtcttatgtttatattgtggtatgtgtgatattagagtatagattctatatcttattatgtatataaagaaatgatacgtctccctcaacagtactcctnattgagatacaaacaagtgaacgactcgggcgngcctgtntcgcccgcccccccccactaccaacctccgcgacccagtggtccaccaggcctcgcgggtggcccggcgcgagatnntnnnnnttgaggttgcggnnnnnttgggtggatnncagatagangtanagaacacccancgnnnncnnnannnnnnnnnnnccacaaaccccnnaaaac

SEQ ID NO: 5208 - DNA, 528 bp, Glycine max
  Peptide Sequence Number=SeqID_8271
  Probeset Number=SeqID_14987
ccctgcccctcaaggtgcaattttttgcttgcgggagcaacctttggccatagaccttaattttggggaagggggaaaaattttttcccgttacctctttctggtgggggccagattcccccatcaagccaatgtcctgggtttgggtggtcccaaagccccaaggggttttccttggtcctacgaagtatttaatgttttttctttttctttcccctacccctcagcacccccccccgacgtggtaggttttgcttgcacaaacgaggcggtccagggttccatttgcttcttggaggggggtgggttttccttttcccccgtttccggggctaatggggacaactcccccttgccggggggcggtgttctttattataatgggggggggggggttattttttttaaatctaccccccccgggtttgggggtttttccttctctgtcccagtcccaaatagaaagggaaaaacattaaaaaaaaaaaaaaaaaaaaaaaaaaaaaagaaaaaaaaaaaaataatgag

SEQ ID NO: 5209 - DNA, 1732 bp, Glycine max
  misc_feature (1)..(2): n is a, c, g, or t
  misc_feature (9)..(9): n is a, c, g, or t
  misc_feature (11)..(11): n is a, c, g, or t
  misc_feature (14)..(14): n is a, c, g, or t
  misc_feature (76)..(76): n is a, c, g, or t
  misc_feature (111)..(111): n is a, c, g, or t
  misc_feature (133)..(133): n is a, c, g, or t
  misc_feature (137)..(137): n is a, c, g, or t
  misc_feature (152)..(152): n is a, c, g, or t
  misc_feature (156)..(157): n is a, c, g, or t
  misc_feature (159)..(162): n is a, c, g, or t
  misc_feature (167)..(167): n is a, c, g, or t
  misc_feature (206)..(206): n is a, c, g, or t
  misc_feature (208)..(208): n is a, c, g, or t
  misc_feature (214)..(214): n is a, c, g, or t
  misc_feature (221)..(222): n is a, c, g, or t
  misc_feature (225)..(225): n is a, c, g, or t
  misc_feature (230)..(230): n is a, c, g, or t
  misc_feature (285)..(285): n is a, c, g, or t
  misc_feature (309)..(309): n is a, c, g, or t
  misc_feature (320)..(320): n is a, c, g, or t
  misc_feature (393)..(395): n is a, c, g, or t
  misc_feature (416)..(416): n is a, c, g, or t
  misc_feature (489)..(489): n is a, c, g, or t
  misc_feature (536)..(536): n is a, c, g, or t
  misc_feature (539)..(539): n is a, c, g, or t
  misc_feature (541)..(541): n is a, c, g, or t
  misc_feature (573)..(573): n is a, c, g, or t
  misc_feature (622)..(622): n is a, c, g, or t
  misc_feature (632)..(633): n is a, c, g, or t
  misc_feature (636)..(636): n is a, c, g, or t
  misc_feature (641)..(641): n is a, c, g, or t
  misc_feature (645)..(645): n is a, c, g, or t
  misc_feature (659)..(659): n is a, c, g, or t
  misc_feature (665)..(665): n is a, c, g, or t
  misc_feature (711)..(711): n is a, c, g, or t
  misc_feature (725)..(725): n is a, c, g, or t
  misc_feature (817)..(817): n is a, c, g, or t
  misc_feature (851)..(851): n is a, c, g, or t
  misc_feature (890)..(890): n is a, c, g, or t
  misc_feature (1068)..(1068): n is a, c, g, or t
  misc_feature (1070)..(1070): n is a, c, g, or t
  misc_feature (1112)..(1112): n is a, c, g, or t
  misc_feature (1225)..(1225): n is a, c, g, or t
  misc_feature (1263)..(1263): n is a, c, g, or t
  misc_feature (1476)..(1476): n is a, c, g, or t
  misc_feature (1508)..(1508): n is a, c, g, or t
  misc_feature (1554)..(1554): n is a, c, g, or t
  misc_feature (1652)..(1653): n is a, c, g, or t
  misc_feature (1655)..(1655): n is a, c, g, or t
  misc_feature (1703)..(1703): n is a, c, g, or t
  misc_feature (1706)..(1706): n is a, c, g, or t
  misc_feature (1709)..(1709): n is a, c, g, or t
  Peptide Sequence Number=SeqID_8723
  Probeset Number=SeqID_14988
nntgtatgntncgnacttaatcgtcgctcatcgataagtcatgatctttctgggttgcgacgtaattacagtagcnttgatgaagtccacgtcgaagttctcgcgctactncgtcatccgtgtacagagtagnggangcacgagggaatgangagnnannnngagancatgcgacggtagtgaagagtagtgccgcggatcgtcanantctatnaccctannganagcancacatccgtactctactgacactgatgctatggcacctagtgcagtgctcagctntcatgcagctcggatctagtgcangaagcatctcntactcatcgatgcagagtcgtgacgtgtgtagcgtcgtgcatggtagtgtgtcgtaggttcgacgtaggttannngtctgacgatgcggcatacgnagacctcatcactcgcagcgtgatcgctcatgattcgacgtatgacacagctctctatatacattgtgtggcnggtcgcatcatctcggtgtgggagtcgcgcacgcaacttgtacgctngtntntgctatataaagcaaggatagcgcacatatantcacagtgcgatctactgcgctacggtgtgtatatagcgtaatcatcanatcactcgannganatgtntcancatatcgctgctancaggtncccatgctgcagcgtgcgagtgagagagagacatcgctacgatatntcggtgaagatcancattactcgctagttaagagcgcagcatgtgccgagagatactcgacatattctcgcaaggagtacacacatgagagctctcgtcaacgcgncgtagtgttgatgaggatgaggtcacataactgnaattcacgcagaccgagtcctccagtgatcacgccagangcgcagatcacgagaaggcagatgccatcagcatagtgcacatctactcactctgacttcacagtgaggacaggtggagagtgagtggtgaggggtcgcatctttcttcaacacactcgtagtatgataataactgtggcctgcgccgcgcctatagccggcatcgcagagaatcagntntgtaatcatatcaataaaactgcgaggctgtgacgagatagnataagagggataagaggggataaacacgcgtatagctgtacagtggactcgcaacttacaactctgccggtgtgggtgtggtgaggacgagtcggctactgtggggtgaattnactatgatatatacgcgaacaatatgaagaataccgtnagtgcgcgctgatatgtagagatgcgtgcgcctacaaggtcagagttataagcgggaaagcgtatatagcgttcatgctgaaatagcgttagtaataaataatctccgactatatctgtacctactcatattgtgagggagtctcttccctccgagtatctactatcactgcgccccccgtcatatgctagttggagagaagtgaaatagcgnccacgacgtaagcattccgagatgtagataanacatcaatataatatgatgatatatataatatcttctctcgtcgtncctcgtgtgtggggcatactcagcgctacactccatgagacagccgcaacggatctcacctcagcccgccggtggggtggccgacgcatctgtgcgcnngntgtgtgcggccggcgacaccagagagatgtgtggagagagctaggtgnggnggnggcggcagagagcgagagatagg

SEQ ID NO: 5210 - DNA, 1525 bp, Glycine max
  misc_feature (76)..(76): n is a, c, g, or t
  misc_feature (80)..(80): n is a, c, g, or t
  misc_feature (108)..(108): n is a, c, g, or t
  misc_feature (212)..(212): n is a, c, g, or t
  misc_feature (435)..(435): n is a, c, g, or t
  misc_feature (622)..(622): n is a, c, g, or t
  misc_feature (788)..(788): n is a, c, g, or t
  misc_feature (807)..(807): n is a, c, g, or t
  misc_feature (809)..(809): n is a, c, g, or t
  misc_feature (825)..(825): n is a, c, g, or t
  misc_feature (950)..(952): n is a, c, g, or t
  misc_feature (1175)..(1175): n is a, c, g, or t
  misc_feature (1182)..(1182): n is a, c, g, or t
  misc_feature (1222)..(1222): n is a, c, g, or t
  misc_feature (1323)..(1323): n is a, c, g, or t
  misc_feature (1325)..(1325): n is a, c, g, or t
  misc_feature (1334)..(1334): n is a, c, g, or t
  misc_feature (1373)..(1373): n is a, c, g, or t
  misc_feature (1400)..(1401): n is a, c, g, or t
  misc_feature (1419)..(1419): n is a, c, g, or t
  misc_feature (1431)..(1431): n is a, c, g, or t
  misc_feature (1434)..(1434): n is a, c, g, or t
  misc_feature (1440)..(1440): n is a, c, g, or t
  misc_feature (1481)..(1481): n is a, c, g, or t
  misc_feature (1484)..(1485): n is a, c, g, or t
  misc_feature (1494)..(1494): n is a, c, g, or t
  misc_feature (1497)..(1498): n is a, c, g, or t
  misc_feature (1502)..(1502): n is a, c, g, or t
  Probeset Number=SeqID_14989
cacagaacacgcatgtgtcgtatgtcatatatgcgaagacggtcagaagtgttatacaccctaggtcatgtgcgcngcgnggctgaggaaccgaaaagagcacagcangacacagcatatcgggtccctgctcgtcgatcgatcacatcccacactagcatgacagagatatacgagtggatgtgcgaagatctcacgtgacacacatcctncgcaccgatccacagtaaacatgagcagcacagcgattaactgttacagtcgctattgcgcgcatgtgttacgcgctgtagcatacgtaacatactatatcactcctcagcacccatagacagacaatagctacaatacagcacatcgcatagtgtagctgtgtcgtagcgtagcgatgacgacgtgcatgctccgcgcacgtagccactcgtgcgtgacgancatatccgatcgtgtctcggttaggtagaatatgtagccagtgcactcagccgcctaatcaatcttctacgtatatagtatatcgtgagatatcacggctgctaataaacgctacaaatcttcaccacatcacactctcccatctctcacaacctcagatgggtggtggtggcgtgtcgcgttttcntcctgcgcggtagcagatcgagcgttgttacgttgtagtatatgtatgtatgtataatcactaccacactcagcgcgcgcaacaaacgcgacaacacaaacataatcacaactgtatctcgcactctatatgtggtggtgttgtgtggttatttgatatcagtatntatgtaagaatatattttntntttatgtctaattttntaatttcacatttcactacaccatcaactcatattaaatattacttattttggggtgtgggtgtgtgtggattatacctcttgtttctctgtcatatatttctatcactcaaatatgcaggattnnntttaatctataatactaaaccgtaatatcaacacgtacactcaatcttactaccctgtccgctaaacttctatatcaccacccacccatcctctctctcttatcccctctctcctacatcctcactcgcatgtgccgccctctccctgtcgattagccggtcgcgcgcgcacatctcgccctctgttacataccaacatcacagtcgatcgctgtcaccactnacacgancatagaagacaacacaaaccactatctggtgtgggtgtgnttgtcctctcctctatctatcttttcatcctttctcactccatgcgcggagacggtgacaatataacaaaactacacatataataattatatataagatgnanactcacganctaccatacatcctctgtgcacctatactattactatcnacactatattgatatttgttttgtttnngtgtggcatgacgacgcnttgaagtatgtntgnttcgtnataggaggagagctagtgtgcagcttcaccctcacataaanctnnttccccccnccnnctcncttttcaggggcgaccatcacac

SEQ ID NO: 5211 - DNA, 1343 bp, Glycine max
  misc_feature (527)..(527): n is a, c, g, or t
  misc_feature (688)..(688): n is a, c, g, or t
  misc_feature (827)..(827): n is a, c, g, or t
  misc_feature (830)..(830): n is a, c, g, or t
  misc_feature (857)..(857): n is a, c, g, or t
  misc_feature (961)..(961): n is a, c, g, or t
  misc_feature (973)..(973): n is a, c, g, or t
  misc_feature (1042)..(1042): n is a, c, g, or t
  misc_feature (1060)..(1060): n is a, c, g, or t
  misc_feature (1085)..(1085): n is a, c, g, or t
  misc_feature (1158)..(1159): n is a, c, g, or t
  misc_feature (1162)..(1162): n is a, c, g, or t
  misc_feature (1182)..(1182): n is a, c, g, or t
  misc_feature (1208)..(1208): n is a, c, g, or t
  misc_feature (1227)..(1227): n is a, c, g, or t
  misc_feature (1234)..(1234): n is a, c, g, or t
  misc_feature (1265)..(1265): n is a, c, g, or t
  misc_feature (1271)..(1271): n is a, c, g, or t
  misc_feature (1275)..(1275): n is a, c, g, or t
  misc_feature (1296)..(1296): n is a, c, g, or t
  misc_feature (1307)..(1307): n is a, c, g, or t
  misc_feature (1313)..(1315): n is a, c, g, or t
  misc_feature (1317)..(1317): n is a, c, g, or t
  misc_feature (1323)..(1323): n is a, c, g, or t
  misc_feature (1326)..(1326): n is a, c, g, or t
  misc_feature (1329)..(1332): n is a, c, g, or t
  Peptide Sequence Number=SeqID_8724
  Probeset Number=SeqID_14990
cgccgacgggcgagacacacagcacacgcacaacactgtcggcactcgcacacgacacgcacagggagcaacgcggagaggcgtaggcatctgcaacgaagaggcgtcgcagcgagaggaggcgcggcggagggcgcgcatgaccaacgaagcagtccaccgtaacacactacctcgtgatcgtgcgagctgaacacggacgagtaggcgtaggcgatcatgaagcggagtagagtgctgatcgcgtgcacgcgcgcacgcggccacatcactgtctcgcaatacgagtgaagcaggcgccgaagcatacgaggctagacgcgcagtagcagcaacgcaggtgaagcgggcgcgcgacgcgccgagacagcacgcgcagccggagcgaaagcaacatgagacagcacgcagcaccgcgacgccacacgcgcaggccgcacccgcgcgggcaacaacagtccccgagcgcgcagtcccgcacgcgctggtgtgtaacacattcacatgcctccaccccacgcctatancgtacgcacggacctgacacccaagcgaccagactataagtcaagatgcagacatacggccagcacgcgcgacgagcacgcgctcgcacgcaacatcagcaaagacaacgcgcacgacgcaacagctcatcgaatcatcaccgcggccagacactggccanccgctacgtcgaacacagctgcacatacacagagtaacggcgccacgtacgcgcgcgcacagacagagagaggacgacgggacgtgatacaaatcacaacacacgagcacaataacgccagaacacagacaagcgagcncanggcacgaaggcagcgcgaccgcggcgnccgccgcgcgcagaggcaggagagctgcactcccgcgcgcgcgccgccgcgcgcggcgccagagagcgagctgtgttcaacacctacataaaaggcgacacatngcaaaagagagngacagaagccggtgaggcagaggaggagacgcccgcacgtcacaccgagaccacgacaacaccacgacnccaccatagaaacgaagncgtccgctggcgcgcaacccaccgncgcacgccacgtcggacgcgccgacgaggcagcgacagatcaccaaagcagtgcgtggacgtagaggtggagnnacnaagcacaagctgacaaatgntagacgaggaagagacggtacaatanccggtataatacatcggcnacgcgantacataacaaacgaactccatattccaactncactcnccanccgcacactcaccacccacancgccacaccanacaccnnncncggttnccnatnnnnacccccacccc

SEQ ID NO: 5212 - DNA, 458 bp, Glycine max
  misc_feature (389)..(389): n is a, c, g, or t
  Probeset Number=SeqID_14991
catctatagctacggtgtcctgctactggttcttatctctggccgccggccattgcaagtgtcggcctcgcccatgtcggagttcgagaaggcgagcctcatatcctgggcaaagcacctcgcacgtgtgagccgccttatcgatctcgtcgacccggccttgaaagatgtaaaccaggaggaggcgctgctctgcatcaccgtcgcgctcctctgcatacagaggtcccccgctcgccgaccaacaagcgaagagctgctccggttgctctccggagagggagagccgcctcacctcccgctagagttctcgccgtccccacctggtgggttccatttcaaatcccggaagaaagttcggtgagtcagttttaggttcttgcttagangcaaagggttctgttaaccacctaacttgtgccctgagatatgtttatcgttccgtccggtacacgttc

SEQ ID NO: 5213 - DNA, 271 bp, Glycine max
  Peptide Sequence Number=SeqID_8725
  Probeset Number=SeqID_14992
gcggggacggaaaagaagaaagaaggaggtggaggcttctgagcggtgctttgtcatttgtcgtgtttgccctcgcatcctttagactgacgagactgattgtgtttgataccattactgccccttttcgccgtctatttcatgaagaacaggaagaggtaaacgaacaaggtgaggtcgaaacatatatcatcattaaagggggaggactgcggtcttgggttggagaactgttaagctgttattggtgtacctcggccgcgaccacgct

SEQ ID NO: 5214 - DNA, 1916 bp, Glycine max
  misc_feature (35)..(35): n is a, c, g, or t
  misc_feature (38)..(38): n is a, c, g, or t
  misc_feature (43)..(43): n is a, c, g, or t
  misc_feature (77)..(77): n is a, c, g, or t
  misc_feature (120)..(120): n is a, c, g, or t
  misc_feature (132)..(132): n is a, c, g, or t
  misc_feature (366)..(366): n is a, c, g, or t
  misc_feature (539)..(539): n is a, c, g, or t
  misc_feature (568)..(568): n is a, c, g, or t
  misc_feature (581)..(581): n is a, c, g, or t
  misc_feature (586)..(586): n is a, c, g, or t
  misc_feature (705)..(705): n is a, c, g, or t
  misc_feature (730)..(730): n is a, c, g, or t
  misc_feature (732)..(732): n is a, c, g, or t
  misc_feature (782)..(782): n is a, c, g, or t
  misc_feature (797)..(797): n is a, c, g, or t
  misc_feature (846)..(846): n is a, c, g, or t
  misc_feature (888)..(889): n is a, c, g, or t
  misc_feature (927)..(927): n is a, c, g, or t
  misc_feature (941)..(941): n is a, c, g, or t
  misc_feature (943)..(943): n is a, c, g, or t
  misc_feature (975)..(975): n is a, c, g, or t
  misc_feature (990)..(990): n is a, c, g, or t
  misc_feature (1012)..(1012): n is a, c, g, or t
  misc_feature (1041)..(1041): n is a, c, g, or t
  misc_feature (1082)..(1082): n is a, c, g, or t
  misc_feature (1108)..(1108): n is a, c, g, or t
  misc_feature (1251)..(1251): n is a, c, g, or t
  misc_feature (1287)..(1287): n is a, c, g, or t
  misc_feature (1355)..(1355): n is a, c, g, or t
  misc_feature (1408)..(1408): n is a, c, g, or t
  misc_feature (1426)..(1426): n is a, c, g, or t
  misc_feature (1537)..(1537): n is a, c, g, or t
  misc_feature (1575)..(1575): n is a, c, g, or t
  misc_feature (1616)..(1616): n is a, c, g, or t
  misc_feature (1641)..(1641): n is a, c, g, or t
  misc_feature (1648)..(1648): n is a, c, g, or t
  misc_feature (1662)..(1662): n is a, c, g, or t
  misc_feature (1722)..(1722): n is a, c, g, or t
  misc_feature (1769)..(1769): n is a, c, g, or t
  misc_feature (1780)..(1780): n is a, c, g, or t
  misc_feature (1793)..(1793): n is a, c, g, or t
  misc_feature (1806)..(1806): n is a, c, g, or t
  misc_feature (1858)..(1858): n is a, c, g, or t
  misc_feature (1861)..(1861): n is a, c, g, or t
  misc_feature (1889)..(1889): n is a, c, g, or t
  misc_feature (1912)..(1912): n is a, c, g, or t
  misc_feature (1916)..(1916): n is a, c, g, or t
  Peptide Sequence Number=SeqID_8726
  Probeset Number=SeqID_14993
ttttcctttctgttttttgctgacgctcctgcctngcnctgtntcgtatgatctatgatagtcagttatctcatcancatatttttctattatgtattcatatatgtgttgtcgtacttnctcatctcacgncgcgttatgtctcagtagtcgagctgcacctatcttactctatatgatatagtagttcttctttctcgtgagttctatacgcacaggcgagcagtctttcattcagcgctccgttgtgcactctcgtgatccttactcatcctcggcgcttctgacgtatgtggtcgccgcgactcatgctcctgacgcaacctagtgttaacataatgagaatatgtgggcgttggtgacggncgccatgcactatcgcgctgcgtgtgcaagcgactgtcgtctcgacgtggagaccgacgacgtgaatagtacgcctatcttctatgcgtgtctggtgttctatctgtctcatcatcttcgcgacgtagcgacgtgcgctctgcgagaggtctcgcgtacgtctatcgtcaacncgctctagttgcgatccgcacatagtagncgacaggagatangatanctaacacataatctatctatgtcactagcgccactaaccctcgacgcattgtcatctgcggtccacaccgcgcgatcagtatagctgcttgctcgagtagctgtgtgtcattgcgtaancgccgcgtcgtctcttacagtaacnantgtcgcttctactatactctgcgcgtctcgctcgtcgtgccgctctctgntcactcatacctccncgtggtactatgtacgctcatccatcgcatgtatcgtcactatcgccancgctctctacattaccatgcacctctctcgacctgacgctgnngctgtgcgccgttgtcgtcgcgtgcacgacgaatgagncgcgacgcgcgcgncntcgtctatttatactatcatacgccgatagcnttacattatgcctcnatactaatacgactcgtacgcncctgctagtgactagactatcgggtgatncgagtggacgcggtccgcactcgcgtgtcgatgcgctcganctccacatatgtactctgctctatangcaccatctactctacgatatcgaaccgtctacatgatcgctacgatgcccgagtatcgatgatacatcgtcatctccgattcatctctcagacgacgtgtgacttgagcgtacgcatgtgccgctccattcgacgctctctntgcgtcggtcgaccgcttcaacgtggctcatgctcncgtgcagccaccggacgtgtcgcacgcgccgagtactaaagcgtcgacgctctcgccatcatctgtgncgctctaagccgtaggtcatatacgattatcgcgcgcgctagtcgcgacgccncggccgccatgtgtcatnatcagcgcgctacgcatccgtacatcatctcgcatctgctcatgcgcgctccgtagtgtcgctcgtcgctgtgtgtctgactctagcgcgtcgcgcgctcgctcgctacgnccgtgctcctcatctcggcacgctgtgatctgactcgncgtctccactctgcagcgcgacgcacgcgtactatgacgtncaacacgcaacgattcaacgagcgncgcacgntcgcgcgacacgcncacgctgcgccgctcacgagctctttcttggcgagatacgaatatcgctgtctcgctcgncatcgtatatcatccataacatcctatctttaattgagctactatgnttgcaggtcgntgctacgccctanattcgcacctgangtcgagattactatagtatctcgtacgtcgtcgactcgtagagagctcactnagncgatcgcaacgtgtgatatacatgtcgnacttcgagcctagctacgcatcntacn

SEQ ID NO: 5215 - DNA, 1764 bp, Glycine max
  misc_feature (1)..(1): n is a, c, g, or t
  misc_feature (1753)..(1764): n is a, c, g, or t
  Probeset Number=SeqID_14994
nccaggataccgcccagctcgaaattaaacttcactaaaaggggacaaaaagctggagaggctccagcgcggtgggccggctctagagaatagtgtggatccccccggtcgcttttttttttttttttttttttttttatcttgaatcaagtagcttttacatttctccataaacacacaatgatctcgcaagcatagatcaatataatatttatccaaatactgaatgtaattgaatgacttaaaatattccaacaagaaataccaacacttgatgacaacgccatctcatcccttttggcaaaagcaagctttaagtcctacagaccaaggacaccaaagaacaaaagagaattcattttagtaacacgtgtattgaaacttgtgatgtttagaaatatgaacattgagcaattccaaaattcacattatacattttattattattattattatcaattcaacccaacttaaaccaattaatgacttgtgaatcgatgtctattcacaagttcaatttaaaaatactgggcaagagaatttaagaacatacatgagaaagcaacaaaataaggtgactagaaatatcaataagttctttcttcattttacttacattaccatctcacacagcctctgctctttgtgtatatcttaaattatactagacgggtgaatatgattatttcaaaactgactacctacattgactagtgaataaagaaagccatctttacgcctatattgaatttggtttcatttgcaaaaagacttttccagctaggtttatatagcagccatatagtttcataaagctccattaaacttgcacaatagagtttgctcaaatttttacagttccctatgaccactaacctcttcaggaacagcccctacaatttttttgctaacccttgaaaggcactcagtagggcctcataaaaagaggttttttgagaaggatttatatgtgggaagaatgctgacagtatttgaacacaagcagcaaagctattgactaatctacaactcaattatgtaccaaactaccaattcaataagaaagattaattatttgatccctatagttgaacaaattttacctttaaatccttacacttaaaaatcatcattttcagttcatgtaaaagcaccttcagatttcttttggtctctatcgatacaaaatgacaaaaactaaaagataaaatttatgtaatggatcaaaagagatggtttttaagtgcgaggactaaactgataaagtaacaactaaatgagtaatttttccaattcaatatttgagtgatcctacctcttaattgttttatctttctataaactacaacgacaatagcctacatagcataaaaaaacatgtaaaagaataagtgttttctagtttctacctctcaatattttaactatattagacttttccctcaacatgaaagaaccctaatgcaagaggaacagtcgtgtcatataacaagcgtgttttccttttctactgaggtaaacagtgcccaatataactcacagcccaaattatgatatgctactttatattacgatatactacttcatcttaaataaatggggggggggggggtacgtagctgactcgatcggggggggggggccccggtacccaattcgccctaatagtgagtcaaattacaattgcacgggcccgtccgtttttacgacgtccgtaaactgggaaaaacccctgggcgtttacccaactttnnnnnnnnnnnn

SEQ ID NO: 5216 - DNA, 195 bp, Glycine max
  Peptide Sequence Number=SeqID_8727
  Probeset Number=SeqID_14995
aagaggaaggtcactctacctttcgatttgatcgtagaaattctgttgaggttgtcagtgagatctttgttgcgtttcaaatgcgtctctaagtcatggtgtgctctcatttcggatcctgaattcgccaaatcccatattgacatcactaagagtaaggctccttatcgtgagaaccttacatttggggatggg

SEQ ID NO: 5217 - DNA, 1509 bp, Glycine max
  misc_feature (95)..(95): n is a, c, g, or t
  misc_feature (107)..(107): n is a, c, g, or t
  misc_feature (109)..(109): n is a, c, g, or t
  misc_feature (115)..(115): n is a, c, g, or t
  misc_feature (169)..(169): n is a, c, g, or t
  misc_feature (213)..(213): n is a, c, g, or t
  misc_feature (437)..(437): n is a, c, g, or t
  misc_feature (905)..(905): n is a, c, g, or t
  misc_feature (1108)..(1108): n is a, c, g, or t
  misc_feature (1166)..(1166): n is a, c, g, or t
  misc_feature (1460)..(1460): n is a, c, g, or t
  misc_feature (1478)..(1478): n is a, c, g, or t
  misc_feature (1487)..(1487): n is a, c, g, or t
  Probeset Number=SeqID_14996
gcgccacggagacgcagagagatacatacgaagtcgcatcgacaagacagacagagcacacgtctgtgcatgtgtgcttcatagttgggggatgnaaagtggatcgngncacatnctagactacaatgacagtaaccagctagtacgcgacgctatcgagagatcatanttagtatatcgtagtgtgtttgcagagtcagctataacgcgcgncgagcggaatacgacagtgtcagagagagtagagatgaaatgagtgaggtcgcacattgccttcatgagtcaagtggcagacggcgagcgcgactgtctctcgtctagtacgtcgcgcacatcttcattccctcgcgtgttttcgcaacagactcaagagaatgatagaaaagactacgtaaatatatcatgtagatatcacaacaataagcgaactgtaacanatagataacagactcgagaagacgtaggcctaacagatcggcaatacgacgaacatagggagagatgagacgcgtacaggtacgaagatacataagtagacagcagaaacacagcagcaatcagtgttcgccgtcggtcgcgcgtactacgtgctgtgatctcctcagtcagatggtcctggtagcagtaacggcgagacgctagacaagagataagtacagacggataagatcaataccatacacagcacggaatacaagcatattgttcgtcacgcgcatcgcacgatgcgagtagggagtcacgagagcgacaatgcgagtgcatatagggctgtaacgcactagataaggtgaggaagtagcatgggggagcgcctaagcaggcggcgataataaccacatgtggctctcccaacaatgagggaagagagcgaggcggcgagtggcgagtcgtcgcgaaggganaagggctgcaagtatagcgtgggtcgtctgtgggaatctccgcttcatcatcacagtaggctcgtcactcaatcatactcgaccacagcctgcagagagtacgcgcgcgcgcgccgacagtaccggcgtgacggcacggcgaagcgacgagaagatagcagcgagcgattagaaaacaatataaatggtacttacggctttgntttatagagttatacggtgtgagtagttatgatgtgatgaattgtgagatagacatancgcaaatcgtgcccagagcacgagacagcagacaaaagaaggaaacacgacacaactaacttaacacatctcatagtcgaccctctctcacgcagctggcaacaggcacatcattgatattctctacgttcatatcttaccttactccactgtattactcctccactacatctatctcacactgcactccacagcgcacacgacgccgactctctttcctcttctggagtgagttcaacagtggatggtgaatatacgtggtatgttgtgtgagtagagtgtgtaatgcatgtngatatttaaatagatatnttactcctngatcgcggttctcccacctaca

SEQ ID NO: 5218 - DNA, 625 bp, Glycine max
  Peptide Sequence Number=SeqID_8728
  Probeset Number=SeqID_14997
aaaaaatagccgagtttttttaataaaaaaaaatcgattaagatagagttaaattgggaatatagacacccagtattgcaggaccatataatactttcacatatgtatagcttaatttatatctctaataatcatgaccagctagaaaagcatataaatgctaatcaaaattgccttggttttccactcttttgcaggtcaaatccttgaaatgcatatagatttgattcctgattctcggattcttcctgtgcactcactattaaatcctggaattatccttagatttgaggatgccttcaattacatttgttgttcacacagaattccttcttgagcttaccatgcgaaacaatatgaagctaataagatgatgtagcaaccagggacatccaatttgagaaaccaatctgaaacaatactaagctaatcaagcaaagtagctgcttgcatatgggatttatcctgactagaaaaagacatatctaggcttatgccgcaaagttcctttgatcccatgggatttgccatgcctatccaaccacatatctgttattatgccttgtggctttgttcccaccaattaaagcacaaaaagcggcataaaaggttgccagaatgggca

SEQ ID NO: 5219 - DNA, 1380 bp, Glycine max
  misc_feature (1)..(1): n is a, c, g, or t
  misc_feature (84)..(84): n is a, c, g, or t
  misc_feature (181)..(181): n is a, c, g, or t
  misc_feature (426)..(426): n is a, c, g, or t
  misc_feature (429)..(429): n is a, c, g, or t
  misc_feature (447)..(447): n is a, c, g, or t
  misc_feature (458)..(458): n is a, c, g, or t
  misc_feature (462)..(463): n is a, c, g, or t
  misc_feature (511)..(511): n is a, c, g, or t
  misc_feature (552)..(552): n is a, c, g, or t
  misc_feature (563)..(563): n is a, c, g, or t
  misc_feature (575)..(575): n is a, c, g, or t
  misc_feature (658)..(658): n is a, c, g, or t
  misc_feature (695)..(695): n is a, c, g, or t
  misc_feature (899)..(899): n is a, c, g, or t
  misc_feature (1331)..(1331): n is a, c, g, or t
  misc_feature (1343)..(1345): n is a, c, g, or t
  misc_feature (1347)..(1347): n is a, c, g, or t
  misc_feature (1361)..(1361): n is a, c, g, or t
  misc_feature (1366)..(1366): n is a, c, g, or t
  misc_feature (1380)..(1380): n is a, c, g, or t
  Peptide Sequence Number=SeqID_8729
  Probeset Number=SeqID_14998
nacgctatgacgttccatcgacaacagtatgtcacatcgatgatcgtgtctatgtgctcgcttcttgtctgtcctcatatcacnttcatcgcgacgccgtccctgttctccgcatcgtatcctctaattacatcgtagtgatctgctcgtgtttgtctctggcgcttctagtagctatcgngtgcacacgtcgctcgagtcgagttcgcgattctctctgatgcgtcccgcatactctccaccgatgtaaacatcgctatctctttcagtgaagtatgtagtgcgtatgtgctatgtatcactatcccgtcatactctatcatatatctgtgccagatccgcgtgagagaggcggatgggcgcggcgcgcctcccacccgctctctagcgcacgaccgtggcggaggcgtgtagtctgatgtcgtnatncgatcggatgatcagatngttgttgtttntttnntcattatacgattcgtgatgactagtattagagtcacgtactgaatcncgcacgcatcgcgagctcacagaagcgcgcacatgcccagncaggcgctggnatggcagaacgngggacgtgcagccgtaggacgtcaccgacgcccactgacaccttgttccaagatgtcgacatctgtctctcttagtagtgcgnctgaccatgtctcgagtaacgttgtgtgtctccactncctgcatacacattacatggatgcgttgtgtggctgtggaatgacggatctaatcgttgttgcaaggagggcctgccgtccacgtgcccgggctgcgacggtcgcggcttctcgtctggttctacagcgagcgctcatcaaaggatgtaatcgtccgtggagcgcaacgccacacacctctactcgaccctctgtgaactagtntcttgtgtatcagcatcgtggagagttggagggcgcgctgcgctcgacgatgagacgtgtgtcgcgataagagtggcaacgcagcagtcgcgcgcgatggtcgttactgtcgacagagactttgatccgcgagaggcataaagtagaacgagacggcgtccagtttgatcttttctcttatgagttgagtggcgtagtaggcttggttgtgcgtcgtcctcgtatccagacaatacactaacactcgagaacataacgtctcatgtgttgtgtcttccatcctctctgctctcttcttattgaggaaatacaaatgatcgttggttcatatcttacgtacgatgtcctctcctctgccctcttctcgttttcactgacttctatttgttatgtgaaagtgagttcagtgcgtcgcggcacaccgatttcagngagcaatcagannngngagggagagtgganggagnaaccccccaccccn

SEQ ID NO: 5220 - DNA, 1586 bp, Glycine max
  misc_feature (20)..(20): n is a, c, g, or t
  misc_feature (22)..(22): n is a, c, g, or t
  misc_feature (31)..(31): n is a, c, g, or t
  misc_feature (35)..(35): n is a, c, g, or t
  misc_feature (40)..(40): n is a, c, g, or t
  misc_feature (59)..(59): n is a, c, g, or t
  misc_feature (62)..(62): n is a, c, g, or t
  misc_feature (91)..(91): n is a, c, g, or t
  misc_feature (93)..(95): n is a, c, g, or t
  misc_feature (100)..(100): n is a, c, g, or t
  misc_feature (105)..(106): n is a, c, g, or t
  misc_feature (126)..(127): n is a, c, g, or t
  misc_feature (129)..(129): n is a, c, g, or t
  misc_feature (132)..(132): n is a, c, g, or t
  misc_feature (135)..(135): n is a, c, g, or t
  misc_feature (138)..(138): n is a, c, g, or t
  misc_feature (142)..(142): n is a, c, g, or t
  misc_feature (173)..(173): n is a, c, g, or t
  misc_feature (333)..(333): n is a, c, g, or t
  misc_feature (456)..(456): n is a, c, g, or t
  misc_feature (1187)..(1187): n is a, c, g, or t
  misc_feature (1280)..(1280): n is a, c, g, or t
  misc_feature (1357)..(1357): n is a, c, g, or t
  misc_feature (1467)..(1467): n is a, c, g, or t
  misc_feature (1536)..(1536): n is a, c, g, or t
  Probeset Number=SeqID_14999
ttctaatttttttactcatncntatgatctntttnattanactttacaactcactctgnctnttcactatttactctgccatacctagacnannncttcntcttnnttcttgggtgctctgctctnncnacnccnccncccncgtgcgcgtactcgtcatcttttcatcactntatcttacaacatctgtcccagtctcttcctctgtgcgtaacgtggtactgcgactgtcagcggtcgcgccactcgcgcgacacggcagaccgcaggcaagtaatgatgagtgaccgaaacagaagatgcagacacatggacgaagtagggataaacatntgagctcctacccgacgagatcgagacagatattaatggacatatcatgtgtctttgtccgctccacaatcgacgccctcgtcagcgacacgccgccatgtcctgtccacaccgtcacgcacntgcattggaccacgccgagtacacgacagacgcgtcacacacaatgcaggacaagagaagtcgcgtccgctcgcgcgccggctcgtcaatcacgagctagccaacacggtatcgcgaagacgtcgcgtctgtcagagctgtatccggaggttagactcacactactggaagacgcagaacagctccgagtccggcgtctgtatcacgagtatgcaccattgtcgcctgatcgccgcggggctgacacattggattatgcatatataatagaatggagtactcaccttgtcatttctcaagtacagtatatggtcaagtaacattactcctgacaatacgcgcgtctttcttaccatggattccgtctcatccctactatatattccatccatctgcgtctcttacggcgacattgcgtgttgcgcgacgtcggcattctacggctactccttatggtacctatagctacatgcttaccctggttacatacgcatgtgcgcctcacgctcttattatatatagtaatatttattacgcaggccgcacgtgttggacacactgtctctataagcgtccaccgtgaaatgtcgtgtcgtcggtcccttgacctgcgcgcagaatgcgctgctgatgtggatctccacactctacatcatattcagacaagccctgcgcataatcaccatgcggcgtctcaacgcaatcggtgtagacacgtaacagaatctacngagtagagtgaataggcgatctggcactcttctgttataatatgattgaaaggacggacatcatcagtccctctgacaccactactacgatangatagtcatgaattagatgaggaaggaggcatgtgcacggtcacgcatgagaacgcagcgatgactccgtctataantagtgtctattgtctcagctcggactatgtgtagatcgagagtagatgggacgactactatgacacgagtatgtgtatggagcgtcgctgatctcgacaagagacagtancggacgtgctgcgctgtgcggcgactgtgtcgtcgtcgatgttcgcgttgatgcatatcaggacctctncacgatggagtgcgcttatttgtgagaagcagtatgtgagcactgcgatg

SEQ ID NO: 5221 - DNA, 942 bp, Glycine max
  Peptide Sequence Number=SeqID_8730
  Probeset Number=SeqID_15000
atctctcagcttgcagcgtcttgatctcagcagaaatagatttgaaggaaatataccctctcaaattggaaatctctctgagttgcggcatctttatctcagttggaatactttggaaggaaatataccctctcaaattggaaatctctccaagttgcagcatctatatctcaggtacaatcatctcgacagaagtataacgtctcaacttgggaacctttctaatttgcagaagctttatcttggaggaagagtaccgtcccgacttgggaaactttcacaattgctcttgatataacttgcaatctgaaggaaggaaatataccatctgaactagggaaccatgctgaaccttcaggatctttatgatggagaatataaaggtggtgctctcaaaattgattagggaaatctgtaccttgcagatctcttatctttaacccatctctctcaaaattgacgatggagagatctggctacttcatctcatttccttcaaatgactttccttgtactaaatatctaatctcaacatttctcatagcttcctcctaatgattgccaagctacctaaacttagagaactaagtttaatttattgtagcctttccgatcattttatcctttcattgacaccctctcaactcaatttttctaagttccctttccgtccttcctcttcccttcggcagcgtcacgtcttcgctggtgctcctgtgcctctccgggtctgcctgcttcgcgctccttgtgttgtccttctgtggatagcaactcttcggcccgcgtcctgccctctcttcattttctgccttgaaaggattggatctttcaaaaaatcaattaaatggcaaaattctagagagtaccaaattgccacctctggtggagtctttgtcaatcacttcaaacattttagaaggtggaattccaaaatcattt

SEQ ID NO: 5222 - DNA, 790 bp, Glycine max
  Peptide Sequence Number=SeqID_8731
  Probeset Number=SeqID_15001
aaaccacgtctatagcacgattcataagtagaaagatatggtttcagagactgaatcaccaccgttgattggacctcgtatctctttctctgacggtggagatttcatctgcacagagctggagaaagaaatcgtcaaagggtcagtgaaagtctccgactttgagttcttgtcggagaatgcgagtccagagaggatgcacaccgccgacgaactcttctctgaaggaaagttgcttcctttatggcaagaaaagcactcagagaagcttaaaaacgttaacttgaagaccaacgaagaagaagagagtcgtaaagtggaagcagcgatgacgagtgacgatagtagtaagaacagagtgtgttggtttatagacgaagacccatctccacgtcctccgaaatgcacagttctttggaaagagcttttgcgtttgaagaaacagaggagctcttcgtcggtgaagtcctctctgtctccgtcatcgtccacgtcatcatctagctcgcttgaggataagagagaagggaagagaggtaagaaaggattagagaggacgagatcgtcgacgagtgtgaggataaggccgatgattcacgtccctgtttgcactcctccttctaaatcctctgtttcattgcctcctctgtttccgtcgcttaggcttaagaagaacagagcagagaaaagcaagctttaatctttttatttgacacagcttatttggttgattagttcggtttctcatgtgatatgtaactctaatgcatgtgattaagcatttttaaag

SEQ ID NO: 5223 - DNA, 1807 bp, Glycine max
  misc_feature (23)..(41): n is a, c, g, or t
  misc_feature (43)..(47): n is a, c, g, or t
  misc_feature (51)..(51): n is a, c, g, or t
  misc_feature (53)..(53): n is a, c, g, or t
  misc_feature (56)..(60): n is a, c, g, or t
  misc_feature (62)..(62): n is a, c, g, or t
  misc_feature (64)..(67): n is a, c, g, or t
  misc_feature (70)..(70): n is a, c, g, or t
  misc_feature (73)..(74): n is a, c, g, or t
  misc_feature (76)..(76): n is a, c, g, or t
  misc_feature (78)..(78): n is a, c, g, or t
  misc_feature (81)..(81): n is a, c, g, or t
  misc_feature (89)..(89): n is a, c, g, or t
  misc_feature (101)..(101): n is a, c, g, or t
  misc_feature (120)..(120): n is a, c, g, or t
  misc_feature (128)..(128): n is a, c, g, or t
  misc_feature (140)..(140): n is a, c, g, or t
  misc_feature (142)..(142): n is a, c, g, or t
  misc_feature (178)..(178): n is a, c, g, or t
  misc_feature (184)..(184): n is a, c, g, or t
  misc_feature (207)..(207): n is a, c, g, or t
  misc_feature (226)..(226): n is a, c, g, or t
  misc_feature (229)..(229): n is a, c, g, or t
  misc_feature (238)..(238): n is a, c, g, or t
  misc_feature (243)..(243): n is a, c, g, or t
  misc_feature (270)..(270): n is a, c, g, or t
  misc_feature (284)..(284): n is a, c, g, or t
  misc_feature (294)..(294): n is a, c, g, or t
  misc_feature (299)..(299): n is a, c, g, or t
  misc_feature (313)..(313): n is a, c, g, or t
  misc_feature (316)..(316): n is a, c, g, or t
  misc_feature (320)..(320): n is a, c, g, or t
  misc_feature (332)..(332): n is a, c, g, or t
  misc_feature (339)..(339): n is a, c, g, or t
  misc_feature (398)..(398): n is a, c, g, or t
  misc_feature (423)..(423): n is a, c, g, or t
  misc_feature (440)..(440): n is a, c, g, or t
  misc_feature (446)..(446): n is a, c, g, or t
  misc_feature (460)..(460): n is a, c, g, or t
  misc_feature (475)..(475): n is a, c, g, or t
  misc_feature (477)..(477): n is a, c, g, or t
  misc_feature (584)..(584): n is a, c, g, or t
  misc_feature (597)..(598): n is a, c, g, or t
  misc_feature (608)..(608): n is a, c, g, or t
  misc_feature (610)..(610): n is a, c, g, or t
  misc_feature (618)..(618): n is a, c, g, or t
  misc_feature (642)..(642): n is a, c, g, or t
  misc_feature (662)..(662): n is a, c, g, or t
  misc_feature (664)..(665): n is a, c, g, or t
  misc_feature (679)..(679): n is a, c, g, or t
  misc_feature (692)..(693): n is a, c, g, or t
  misc_feature (703)..(703): n is a, c, g, or t
  misc_feature (720)..(720): n is a, c, g, or t
  misc_feature (724)..(724): n is a, c, g, or t
  misc_feature (746)..(746): n is a, c, g, or t
  misc_feature (794)..(794): n is a, c, g, or t
  misc_feature (819)..(819): n is a, c, g, or t
  misc_feature (822)..(822): n is a, c, g, or t
  misc_feature (869)..(870): n is a, c, g, or t
  misc_feature (877)..(877): n is a, c, g, or t
  misc_feature (899)..(899): n is a, c, g, or t
  misc_feature (938)..(938): n is a, c, g, or t
  misc_feature (1014)..(1014): n is a, c, g, or t
  misc_feature (1058)..(1058): n is a, c, g, or t
  misc_feature (1061)..(1061): n is a, c, g, or t
  misc_feature (1071)..(1071): n is a, c, g, or t
  misc_feature (1077)..(1077): n is a, c, g, or t
  misc_feature (1105)..(1105): n is a, c, g, or t
  misc_feature (1162)..(1162): n is a, c, g, or t
  misc_feature (1302)..(1302): n is a, c, g, or t
  misc_feature (1333)..(1333): n is a, c, g, or t
  misc_feature (1582)..(1582): n is a, c, g, or t
  misc_feature (1666)..(1666): n is a, c, g, or t
  misc_feature (1807)..(1807): n is a, c, g, or t
  Peptide Sequence Number=SeqID_8732
  Probeset Number=SeqID_15002
tgtagggatagggtggattgtgnnnnnnnnnnnnnnnnnnncnnnnnatananaannnnngnannnnagnacnncnancanactgccangtgcgctcactnccacaatatctatatctanttaatatnaacattctctanangacggagagggagaagagagagagcgagacgagacntcgcgngagagtctggcgtgatgagggantgttgaggatgagtgtagnagngagtgtgangagtngtgtgtatggccacgagtgagcagagnatacacacgcgagntcgtcgcacncacangaaccgctcgcgangcnaggntgcattgcgtcntgctcgncggcgcagctgccacgcccgactgcacgtcgcggatgaacgacgcaatgatatcgctanctgtatctctgtcggacgcgacgangcatgcgttaagatgcncagtanacttgactcaatangggagcgcgaagcgnangggagtcgtctgaggcacgtcagcgcagtctgtacatcgaagtgttatgatagatcaagtcgcgatcagctgcatagtagttctgtagtataagtatatataggtancgtcctgtgtganncgcggtgcgngngcaggcgngggtgtcttgcgcctggtggttgngttgtgtgttacgtattttntnnttaattataataanagagattatgagnnaaaaacgtantataggtatagtagatnacanttacttcatataactatgatgntaacgtgtaagtggaacgtcgagagagctagacgtcagcgctctcggntcgctcctaccgtcgcgtccgactnctnctaactcaccgcacaactgatactgcactctgtacgatacatgtaannataaatnaaacaccacgagagagcagatntgcgcgttatctataactaatctaagactattgatcatngatatgtgatagttaggagcactcgtactatcgtgaagagatactcgctcactgtcactgcgagtacacaaaacanaacacggcgatatacgtagtagcatgtgatagtagtagaacaanganaatgataagnacaaanacacaaacacacacggaccgctgtacgngtatgcgttgtcgtgccgctactgtgttattgtgtataacatcatacgtacaccacncgtgcaacaaccgacctctagccacgatctttcgatgcgtatagctgatatgatcattgatatccgtgcggatggtaagaggcactagcacgtacatactactatgaagagagtagtagaacgaaacagcgcacgagcgnaggatcgcgtgcacgttcacagctcacaagnatccaatgtctgtagagaactatctgatatagagtgacattatgtagttcacaccacctcacacacacacctagctagactggtctgcgattcgtgctccagagtactctcgctggtacgtatgtcgcgcgacgtgagtctcctccgcaggacgcctataccatcgtcacaacagactagtcagtgatgctgttttatatgtgtgactgtgtctgtgttgttgctcgtcacgcgtcgcctcgtgcctgnatgccttctgcatcttgtgatcctaaacacacacgactagcttcgatcataatgcgtgcacgctctgtagcgatcgctcttcgngtgcggagtcgtggagatagagacacacgcatctcacgatctgtaatcacatccctagaccagcacacacagcaccacacgatacacaatgacactagagcagtacacgagcgagacgaatcactcatacaacaatccacn

SEQ ID NO: 5224 - DNA, 411 bp, Glycine max
  misc_feature (336)..(336): n is a, c, g, or t
  Probeset Number=SeqID_15003
ctatcgcgaggcgacggagcggcggcgcaagaaatcgagcggagccgcggtgccgccggcgacgcctccgaccacgacggtcgcctctctccgttgcagattttgtccaagatcctgctttgcacacgatgctgccttgtcaaggagtagctactgcgactgcaaattctcagctatttggattccctgctgcaaaccgctacggatatcctgcaagatcaccggttttttctaaacaagcgtttctcaagttgcgggcatcggcacttcgttgtgacaagaaaatcccccctctgagagcttgttttgatttttccgctcgtgctgtatcttcanctctcgcaaagtatgattctgtaatgggcaacaatcccttcaagccattgccatcaatccgcagctcgcacccaa

SEQ ID NO: 5225 - DNA, 754 bp, Glycine max
  misc_feature (132)..(132): n is a, c, g, or t
  misc_feature (198)..(199): n is a, c, g, or t
  misc_feature (203)..(203): n is a, c, g, or t
  misc_feature (208)..(208): n is a, c, g, or t
  misc_feature (215)..(215): n is a, c, g, or t
  misc_feature (220)..(220): n is a, c, g, or t
  misc_feature (223)..(223): n is a, c, g, or t
  misc_feature (479)..(479): n is a, c, g, or t
  misc_feature (489)..(490): n is a, c, g, or t
  misc_feature (497)..(498): n is a, c, g, or t
  misc_feature (601)..(754): n is a, c, g, or t
  Peptide Sequence Number=SeqID_8733
  Probeset Number=SeqID_15004
caaatacaaacatggcaatgaagaagttcttgtgggttgttctgtccctttctttggtccttggagtggccaatagctttgattttcacgacaaggatttggagtccgaggaaaccctgtgggacttgtacnagagatggaggagtcaccacacggtttcgcgaagccttggtgacaagcacaagcggtttaaacggnntggnttttnccaaaanaaggnccnggaaaaatggatgcatgtcatacaccacaaaggatagcttacagtgaactaacaagttgtgacatgaccacccggaagtctcaggagtacctatgctggcttcgaggtaatcatccatatgaatggttcagaagaccatgtccacgtgggtaacgtggactcttcatgtatcgtagaaggttgcgtagtgtgtccttgtcttctgtggattggggaggagagagaaggtgcttgtaaccctgtatgtaaaagaatnccaaggccannttgtggnntagttgttagggcccgttttcaacatgttagtacgcttgttcgacaggcatttacaccataatcacagaccgaataatgcttagtcttccttgtactgaacannnnnnnnnnnnnnnnnnnnnnnnnnnnnnnnnnnnnnnnnnnnnnnnnnnnnnnnnnnnnnnnnnnnnnnnnnnnnnnnnnnnnnnnnnnnnnnnnnnnnnnnnnnnnnnnnnnnnnnnnnnnnnnnnnnnnnnnnnnnnnnnnnnnnnnnnn

SEQ ID NO: 5226 - DNA, 727 bp, Glycine max
  Peptide Sequence Number=SeqID_8734
  Probeset Number=SeqID_15005
tccaagaacacgagcaaatatgctactggggaccttgaaactgcgtctgatacccatcttttcctcttaaagtggtttcagcaatttccggaattccaggctaatccattttatattgctggggagtcttatgccggagtttatgtgccctactctagcttttgaagttgctaaaggaatctggagtggtacaaagcccgtgatcaattttaagggttacctgggtgggaaaatgctgtcccggaccaaatatttggacgggaattgctcctaatccccattcgtggacgggaatggccctcatatcccgacacctatctatgaagaaaatttaacaatcttcccttgcaaaggaaaactacctacgaatgctttacttcctttcggaccaaaaaattgaagggggggtcaacaaaaaacctttgaaaaaaattctgaacaggggcccatttggatggggttttaaaccggggggaccaaaccataaattaaaaggccgatgcctacccatttttccccgtggggagatgccccccccccacaaaaaaaaagggagaactttacccaaaaagagttttcaaggcaaattgggggggtgaaactggaaaagcccctctttccagggaaagaaaaaaaaagggtttggaaaaaaaccttgtccccttttaaaacacaccaatccaaaccccgggccttgataaaattatagggccccaaatggaaaaaa

SEQ ID NO: 5227 - DNA, 1495 bp, Glycine max
  misc_feature (22)..(22): n is a, c, g, or t
  misc_feature (33)..(33): n is a, c, g, or t
  misc_feature (35)..(35): n is a, c, g, or t
  misc_feature (125)..(125): n is a, c, g, or t
  misc_feature (133)..(133): n is a, c, g, or t
  misc_feature (240)..(240): n is a, c, g, or t
  misc_feature (274)..(274): n is a, c, g, or t
  misc_feature (299)..(299): n is a, c, g, or t
  misc_feature (360)..(360): n is a, c, g, or t
  misc_feature (421)..(421): n is a, c, g, or t
  misc_feature (482)..(482): n is a, c, g, or t
  misc_feature (504)..(504): n is a, c, g, or t
  misc_feature (532)..(532): n is a, c, g, or t
  misc_feature (793)..(793): n is a, c, g, or t
  misc_feature (880)..(880): n is a, c, g, or t
  misc_feature (946)..(948): n is a, c, g, or t
  misc_feature (951)..(951): n is a, c, g, or t
  misc_feature (953)..(953): n is a, c, g, or t
  misc_feature (971)..(971): n is a, c, g, or t
  misc_feature (976)..(976): n is a, c, g, or t
  misc_feature (1080)..(1080): n is a, c, g, or t
  misc_feature (1118)..(1118): n is a, c, g, or t
  misc_feature (1133)..(1133): n is a, c, g, or t
  misc_feature (1142)..(1142): n is a, c, g, or t
  misc_feature (1151)..(1151): n is a, c, g, or t
  misc_feature (1210)..(1210): n is a, c, g, or t
  misc_feature (1212)..(1212): n is a, c, g, or t
  misc_feature (1225)..(1225): n is a, c, g, or t
  misc_feature (1242)..(1242): n is a, c, g, or t
  misc_feature (1246)..(1246): n is a, c, g, or t
  misc_feature (1251)..(1251): n is a, c, g, or t
  misc_feature (1265)..(1265): n is a, c, g, or t
  misc_feature (1289)..(1289): n is a, c, g, or t
  misc_feature (1337)..(1337): n is a, c, g, or t
  misc_feature (1354)..(1354): n is a, c, g, or t
  misc_feature (1388)..(1388): n is a, c, g, or t
  misc_feature (1396)..(1396): n is a, c, g, or t
  misc_feature (1410)..(1410): n is a, c, g, or t
  misc_feature (1442)..(1442): n is a, c, g, or t
  misc_feature (1445)..(1445): n is a, c, g, or t
  misc_feature (1489)..(1489): n is a, c, g, or t
  misc_feature (1493)..(1493): n is a, c, g, or t
  misc_feature (1495)..(1495): n is a, c, g, or t
  Peptide Sequence Number=SeqID_8735
  Probeset Number=SeqID_15006
aattttttttttctttgtcccntccctcccccncnctctcgccgcctacccccctcacctcctctacactatatattcacctccacacactacagcacccacacaacccacaccactgcagtaancatcactncctcacctctaccactctcctctctctctatcttctctttagcaatcgactctctatatgcgatgcagtgtatgtgttgtgtctctgtgacggatgtgtgtacgtcncgactctcggtcactattagtaatgcacattatnaattgatcatattatatattgtggngcacacgtagttgatgattgttcgccgtcgccacaccctactatgctcttctatctcacantcgcgcgtcaccggcagacacccttatctcagatacttcgacactagtatcatatcgatantcacacctcactcgcgctctgtatcaccttctacacgaatgctatactagtagatgttaanataatacacgatgacgatctanacagacatatacaccacacaagtagacntaatactctcgcacacacttacttcatgtatcaatcttatcatatcgcaatgatcgtgtgctgtggcatgtggtgagaagttctggtagccgattaggatacatattagatattcgaatggaatctacgactagcgtgagcacgtctgagacacatctgcgtactgctgacgacgcgtgtaactcatctgatatgatgatgtgtgtgttcatatattcagatatacacgtcacgatgactactatctgctcgtcgtggttngtcatcagctacctacacgactccctgctcatcaccatacatcgctcaagtgtcgatacagtgtgagtaattatcgatcgtacatgnttctgacatatagtcgctcacatcatcatctagtctacgacatctatgatgaaaggaagcgttctnnnacncncacacaatatgcacatantaccncacctacacctctgcatctgatatgtgcgctggtaaccacagcgagtgtgcgctcttgcggcgacacgatctgagtatgctccaattggactcctcgaccactnatcttcaccaccctacgtactactcatgaccacagacnatgctacgatccacngtgatgatnatatatacntcgctcgacatcacgcacgacattctgtgctgctatagtcgtcatgatgcaaacacatncnatcgatgtatgcngtcgtgtagctcgtagnagcnagtantactgtactgactnacgctatatgcgcgcaccgtgtcngcgcgacagtctaacgcagctacgtctcgtgtgtcggccgcactgcanagctgacggcatgatcntgtcgagtgatgagtgcgctatgcgatcactgcntctgacancgaccatgtgacgntcgctgcacactactgcgcatcacgtgtcggntanctaccttgcgccaatctctactgatcatgtcgaatgtactatgncgcngn

SEQ ID NO: 5228 - DNA, 796 bp, Glycine max
  misc_feature (1)..(1): n is a, c, g, or t
  misc_feature (288)..(288): n is a, c, g, or t
  Probeset Number=SeqID_15007
ngggagcaattttggtggtagaatatagaacggcgtgcaagttgcaaggaaaaattgtgtggggcggccccaaagtaaatttcccggggccttgttaaattgcgtttggggggaacatggaccagggtggttttaaaaggttgggacggaaatgtttgggatgggggcaacaatccatgtttggccaagtttgttcagaaataccctgggagggcccttgaatgagcaatctcccatttttaaagcctgggattaaactctaggatcactagaacaggagttagtgangcagtgtcgcccaaaggtttccaaaaacggacaggcacctttggccattttgggtctacagttatcaaagctttctataaaaaagaccagctacttcagtgacaagacagagattcaaaagtctgctactcttcttggatatgtttcacatgcggtctcccttattgcatcatatctcgatgttcctcttcgatatccactacggttgggaggttcacattcgtatattgttgatcatgcaccttcagttgacccatctatagccccaggagtaagttcttctaccccttcgagcacgagcatgaggacaatggaatttcctctgttttttgaaggccaagaaacaacaagatcggcatatgctgtattcttgttaaacaaggatgtcgaacaacttctgaaccacattggcgctgaaagtcttggcccaagacatgtactagctaacctgaagcagctaacaaccattgtccagtcacaacaatacatttctgattgatttaaccca

SEQ ID NO: 5229 - DNA, 1441 bp, Glycine max
  misc_feature (22)..(22): n is a, c, g, or t
  misc_feature (26)..(27): n is a, c, g, or t
  misc_feature (30)..(31): n is a, c, g, or t
  misc_feature (57)..(58): n is a, c, g, or t
  misc_feature (181)..(181): n is a, c, g, or t
  misc_feature (642)..(642): n is a, c, g, or t
  misc_feature (734)..(734): n is a, c, g, or t
  misc_feature (741)..(741): n is a, c, g, or t
  misc_feature (1204)..(1204): n is a, c, g, or t
  misc_feature (1227)..(1227): n is a, c, g, or t
  misc_feature (1372)..(1372): n is a, c, g, or t
  Peptide Sequence Number=SeqID_8736
  Probeset Number=SeqID_15008
ggtgggtgtgtggtggtatttncttnnttnnccataatcagtctacgccttcaccgnncgcgcgcaacacccacacatgacaaccactcgtaagggaagcagtccagagggagagttgtgggtaaccacacactctatcacaactgtagaaccccaccccacgtccagcaacacgccagcnctaccatctcttttccccctcattattattattttatatgggatattgacgtttctaatatttctcaccctctcatccacgctcttctcgcatcgcggagtcgcaatactgcggggttcacgccttcgacgtctacatgatagtaagataatacatatatttaggtgaatagtatatctatctccgtgccctcgaaaccacaccgggccgaccctcaaataatgggaggttgagaaagagggagactaaggccaggagattagacccaggagatggggggtggtctcagaataataaatatgatacagccgcgcgggcgacacatgaaagtcttatctcgtcagctcgcgcctcggcttcctcgagcggaacgacctcgtcgcgcgtgtatgcctcttctacctcgactaccaatgaaaagatagaaaaacaaactgcggagaaacgaacagcgaaataanaatgtgatctagtgtcttagtatgtgtttgtatgtagtgcgtaggaaaagtacggattaaagaaaaaagaagatgagagaagcagtcagatnacacggnaaacacaactaaactgccaatctttgtcggataggccgagccctgacaccctccggctcgcccgtgtgtcgatagtggttgaatttctgcgtccctctacaaacgctgatcgcaaacttgggagaggtgtggagcgtgcgaaccgcccacccacacgagatcgttctgctaagtgtatcaaaccagacgctacagccctaccacccctacactacactcactgaacacgtctcaccacgcttcgtctgtagtactctgtatactgatcgcttgcgcgagcctctcgcgttgcgctcgcgtgcgcttgtgcagcctcggtctcgtacgtctgtccctcgtttactacgtaggcggccgctcgactgaattcgaggggggtcagataggtctgtcgtctataccgtcgaggtatgttgcgtcgatgacactgcacatactctgtgtctagtatataaatctcacnacgagcccactcgaaacacctcnacctaaacatatcatcattatctcatctacgctcatattactgtcctattcacgccatcagccacactacaccgcgcgcgtggtcgtcatatcactcaggagtatctgcgcacgcgtttccgcgcgatcacgccaggaatcgcanagcgactatgatctgggtggagtccttgttctcgcattcaccctatatattatctattcactcgcactt

SEQ ID NO: 5230 - DNA, 1487 bp, Glycine max
  misc_feature (36)..(36): n is a, c, g, or t
  misc_feature (400)..(400): n is a, c, g, or t
  misc_feature (601)..(601): n is a, c, g, or t
  misc_feature (1163)..(1165): n is a, c, g, or t
  misc_feature (1176)..(1177): n is a, c, g, or t
  misc_feature (1211)..(1211): n is a, c, g, or t
  misc_feature (1286)..(1286): n is a, c, g, or t
  misc_feature (1387)..(1387): n is a, c, g, or t
  misc_feature (1443)..(1443): n is a, c, g, or t
  misc_feature (1463)..(1465): n is a, c, g, or t
  misc_feature (1469)..(1469): n is a, c, g, or t
  Probeset Number=SeqID_15009
acgaggctaagaacgaatgatcgagaacgacacacnaaagagatgacacatatcatcacgcgacgagggagatacgccgtcgcaggcggtttgggcggtttgcgatgaggttatctatcactaggttctgtgagtgaagggttgtcgagttcatgtcgagatcgagcgagctgaggtcgacacgcgtgtagggcagcggagaggagtatcggcgagcggacatcacgcgaaatcacacaattgtagaagagagtagtgagacactgacagaggcagacgagagagagtgtgtatacgagtacgaggagagttgtgtagtgaacagagcatatatcaccacgtagccggatggatatggatagagtgtgatgcgggaggcgggaggcggggagaggggcangagatgggtagcagacagaagagagaattgatcgagttagcaacgtaaagacgagcgcggagtgacagagcaggaggcgctccaccaacgaacagaagaccagaggtagagagaggtaggaataggacagcgagatagcagggcacgtgctagtgtgggcggtggtgacgcatgccggagatcgaggcacgggcgcgtagnggtggtggtcgacgggagagggcggagtacggtagtatagggatatggatgggaggcgagagacgaggtgatttatgagaggtaggcggcagaggcgggagagcagataacaagcgcacggtgcacgcggctcgtccctgtttgcctacttgtatacatcgtagctgtcctgctctcttatcggtggcacacgaccacgcaacagtcgctcaaccaggagcacagagcgatcgcggtaggggtagaataattacgtggggttgagaagacggtgtagagcatgtgaactcgccctgcgcaggtcgcaccggcccactgccttgtacacgacggacggaaggaatatcgaacaggcacccggccgcgccgcgaccgcccgcacgccgaccacgccccgagacaccagagtaggggcagaagcggcgcatcagcgtacgcgcgcgccggcgcggtcggtcgcatgtaggtaagattcggtggggagggggcggtgccaacgcgggcagcggccccaacgagcgggaatagaaatattaaatatacgaaacaaagaaactcacannncaaacaacgannaagaacgtaaactgcgaccagccacccggcacangggcagataggagggagatataggcgagaggtgagaggacgaggaggagcggagaggagaagtgatgatagggcnaaatatatgaattcaccgttacatgataagcaagggagaggaggagatggagtggtgggagataattacattgcatctcactaaacacgacgatggatatnataatagaggataacacccacccacaccccaacactcggtggcggggcagagcaanaaacagaggcgaggggagannnccgnggaaggggccacaacaac

SEQ ID NO: 5231 - DNA, 551 bp, Glycine max
  Peptide Sequence Number=SeqID_8737
  Probeset Number=SeqID_15010
tcaatagatcgctatatacgtaaaaaggacaaacagacagattagacatagatagagagagagagagagagaaattaaggcccagccctcgctactatggtccgataaaccttcaaaatatataggtgacccagcagtttaatcactgtctactgaaggtgccgctgtcaagtccatgcccatgcccatgttctctcctcttataagccatcttgcttcatctcgccctcgtagagcgcacgccctcaccatgagcattgtccttacatttgtctacgaagcccctctttgtgatgtggcctgcgctcgccatggcactgcacagagcagtgtccccccataaggtctcctatgtactcgcaaccgtgttccccatggtgatacagtttgtacttcttcacgcatggtgctcagccgtatgctcctcctctatcaagagccctcccacacagagggtctccccaatctagtgaattatcacctcacaataccctcgttgcaatcaagttttacacacgttctcaggcatggtctgtatcaagattcccccc

SEQ ID NO: 5232 - DNA, 1469 bp, Glycine max
  misc_feature (94)..(94): n is a, c, g, or t
  misc_feature (909)..(909): n is a, c, g, or t
  misc_feature (1049)..(1049): n is a, c, g, or t
  misc_feature (1097)..(1097): n is a, c, g, or t
  misc_feature (1164)..(1164): n is a, c, g, or t
  misc_feature (1219)..(1219): n is a, c, g, or t
  misc_feature (1235)..(1235): n is a, c, g, or t
  misc_feature (1277)..(1277): n is a, c, g, or t
  misc_feature (1380)..(1380): n is a, c, g, or t
  misc_feature (1446)..(1446): n is a, c, g, or t
  misc_feature (1469)..(1469): n is a, c, g, or t
  Probeset Number=SeqID_15011
gtgtgcgcccacccattccacattgattaatcaagaatagagggcgtataaaacgctcatatccgctcgccgcgaccacaccatattaccctcnacccgcacacagacgcgccagataaactatatattactaaatatccgcacgacccatacgtaaatcactaaccgattacgcacgcctgtgcgcgccgcgggtatggccagaatgagccctccggcgcacgcgatgctcgccggctcccgcgatatattattttaattattactagacggtgggactggattactcaaccgcgcctttcgcagcgaccggtggtcgacacggggggcgcgagcgaatacaaagcggcgtggatcgtgcgcctgctccacccggaccggtcatatcacgcaccaccgaccccaacgtatgacgtatgttgcgctacagagacgtgaggaccaagaagagcgaccggtctctggagcacgagacgctataattgagcggatataggtacggagagcaacgccgcgcgcgaccccagcgtatcatgatggtggcgggggcggagggtcgcatatcgcctggccggcccgcgcagaaacgagttattccttaaataccaccatctccccacgtattctacggatgtgagtgtccgttagtgaacgcccatctaaaacgtaaaccgtgcagacacgtctctcgcacgctaatctcgcgtcccgaagtagcatcggtgtgcgcgatagcgtacggatatggcgcgttagcggcgatcgcgctctgctacatatataacgagtagaggcgtgtaatattgtacgggtagcgggcaacgtaaacacaccgaccgcggaccgcgcgcgacaacatcgatatctaccgcgatactgatatgcgtaccgtacggcgcgtgaaacacncccgcgacgccgaccccgacccgtattctcaatatatatgtgcgtggatagagcactggacacagagactatatattcaccgcgcgcccacgctgacataggatgcgcaagtattctccgcgtcggctacccaccccacngcgactatggcgtagaattcgacagtcgtgtgcggatcgtgtacacgntagatcgtgacgcgcgcgcgcgatcgcaggcgcgcagtatgtgtgagataatcgagtcgacccgtantagcagacgacacgcgcgtgcctcaacgcggctgccgcgccgcgtgatatatttnaatatgcatacacggngcgcgcgagtccgcgcacacgatacataacagaatgagcganatgcatgcgagactcactacgcacggcgcgccatgaagtgcgatgcgcggacgatatatatactgattcgtgtcgcccttggcgtgtgcgcgcggtgatgggntatacagccacgagcattagatcatgaatagacacagagcggtcgtactcgtcttcacgtctatcncgcggagtagctggaggaaatan

SEQ ID NO: 5233 - DNA, 559 bp, Glycine max
  Peptide Sequence Number=SeqID_8738
  Probeset Number=SeqID_15012
ttgggacccaaagagggttccctttgaaaccaagtataactgggttttagggcggcgggccccccgggggggtgcccgagggccctacaaaaggagtttggtccctttccccatcggtggaaatttccttcaggtaaggccccccttaccaggaaggggatctgggggccctcagttccgtcaatgccaatgccagaggagcagtttcgccctcaaggtcaccgataactggaacatacatgcttatcgcaaatctacgtgtgccatggatgcgagtccgctcatctcaggtcacattttcgatgtagggcgtgcacgggcagtgtagtcctgttcggtttggtcatcctcactacttagcacatcatcaggagcatcatcattgttatcaggatcttgttcagcaacttcagcaatatcacattctggaggctcatcctcatcgcccatgtcaccttcatagtaatcgtcgttctacatggctgccgccgccgagcgctccggtcagtagggtttcgtcgcgggaggaagcctcgggcgtggggattatggtgagttt

SEQ ID NO: 5234 - DNA, 520 bp, Glycine max
  misc_feature (489)..(489): n is a, c, g, or t
  Probeset Number=SeqID_15013
cttccattttttgctcaacctttggtcgatggtttttttctctctttccattccatgtctgtctatctctggttcaaatgacttagagacccttaagcactttagaatatatgggaatctagccatcttcttcacctctgggtatctttctctctttttttttgcagcgttttgaagcctcttccgagtgtttcttactcgagatttccctctggttcattctctcaagctgcggttgattccatcttccctcttaactcaaaggttaatataacaccctttagtttatatttattcgacttttgctcttcacgtctttcccattttagttaagtgctaaaagttcaaacttttttgttctcatgcctcagtttatttgatgggccatccccagatgaaaaatcatctcagtttttgcttctgggaatctgagatttgttgctcgacttgcaagtgactatggtcttgtgggtggggaaacagtgaccntttctcaattttgcttatttaatttgggctt

SEQ ID NO: 5235 - DNA, 1740 bp, Glycine max
  misc_feature (13)..(13): n is a, c, g, or t
  misc_feature (181)..(181): n is a, c, g, or t
  misc_feature (227)..(227): n is a, c, g, or t
  misc_feature (449)..(449): n is a, c, g, or t
  misc_feature (488)..(488): n is a, c, g, or t
  misc_feature (496)..(496): n is a, c, g, or t
  misc_feature (597)..(597): n is a, c, g, or t
  misc_feature (747)..(747): n is a, c, g, or t
  misc_feature (750)..(750): n is a, c, g, or t
  misc_feature (810)..(810): n is a, c, g, or t
  misc_feature (820)..(820): n is a, c, g, or t
  misc_feature (822)..(822): n is a, c, g, or t
  misc_feature (827)..(827): n is a, c, g, or t
  misc_feature (840)..(840): n is a, c, g, or t
  misc_feature (844)..(844): n is a, c, g, or t
  misc_feature (855)..(855): n is a, c, g, or t
  misc_feature (872)..(872): n is a, c, g, or t
  misc_feature (898)..(898): n is a, c, g, or t
  misc_feature (922)..(922): n is a, c, g, or t
  misc_feature (930)..(930): n is a, c, g, or t
  misc_feature (948)..(948): n is a, c, g, or t
  misc_feature (956)..(956): n is a, c, g, or t
  misc_feature (970)..(970): n is a, c, g, or t
  misc_feature (972)..(972): n is a, c, g, or t
  misc_feature (988)..(988): n is a, c, g, or t
  misc_feature (994)..(994): n is a, c, g, or t
  misc_feature (1018)..(1018): n is a, c, g, or t
  misc_feature (1021)..(1021): n is a, c, g, or t
  misc_feature (1023)..(1023): n is a, c, g, or t
  misc_feature (1079)..(1079): n is a, c, g, or t
  misc_feature (1089)..(1089): n is a, c, g, or t
  misc_feature (1140)..(1140): n is a, c, g, or t
  misc_feature (1144)..(1144): n is a, c, g, or t
  misc_feature (1150)..(1150): n is a, c, g, or t
  misc_feature (1160)..(1160): n is a, c, g, or t
  misc_feature (1176)..(1176): n is a, c, g, or t
  misc_feature (1186)..(1186): n is a, c, g, or t
  misc_feature (1190)..(1190): n is a, c, g, or t
  misc_feature (1207)..(1207): n is a, c, g, or t
  misc_feature (1242)..(1242): n is a, c, g, or t
  misc_feature (1247)..(1247): n is a, c, g, or t
  misc_feature (1296)..(1296): n is a, c, g, or t
  misc_feature (1302)..(1302): n is a, c, g, or t
  misc_feature (1333)..(1333): n is a, c, g, or t
  misc_feature (1347)..(1347): n is a, c, g, or t
  misc_feature (1360)..(1360): n is a, c, g, or t
  misc_feature (1391)..(1391): n is a, c, g, or t
  misc_feature (1407)..(1407): n is a, c, g, or t
  misc_feature (1434)..(1434): n is a, c, g, or t
  misc_feature (1467)..(1467): n is a, c, g, or t
  misc_feature (1539)..(1539): n is a, c, g, or t
  misc_feature (1559)..(1559): n is a, c, g, or t
  misc_feature (1593)..(1593): n is a, c, g, or t
  misc_feature (1623)..(1624): n is a, c, g, or t
  misc_feature (1638)..(1638): n is a, c, g, or t
  misc_feature (1647)..(1647): n is a, c, g, or t
  misc_feature (1650)..(1650): n is a, c, g, or t
  misc_feature (1654)..(1654): n is a, c, g, or t
  misc_feature (1686)..(1686): n is a, c, g, or t
  misc_feature (1711)..(1711): n is a, c, g, or t
  misc_feature (1740)..(1740): n is a, c, g, or t
  Peptide Sequence Number=SeqID_8739
  Probeset Number=SeqID_15014
attagcacccatncgtgtgttatcaatacaagtgatgtatgcgtagtgagcgcgccagcaccgcgttgcgcgtcggcgcgcgtgaggaacggatgtattttactatatatggcgggtaggatgcgtgtccgacgctcgctcgcgtgcggcggcgggcgtgtttatatcaacatgatcactnccatcacgcatctatcgattctctgcgagttatatattttctttancaagcaaccgacgttgactagaacgcaccaaataacatgaactatacaccatatcaagttgcaccacgcaaagattatctggcgttactcgctctctatcgtgactacatagcgcgcatgtatgtacatgttaccgaccgccgtatgtatgtattattataagcgcgatggtgacacgcgagactccgttcgtgatatgacctacgtcggtgtcttactatngcatgtattaaatatattcgagtggatatgaggttactngatgcganaaatacgcgcacacgtctgcacatccaatattcctatattgcgtgctgtcgcacggactgcgtttgctgcgtacatccggtgcgacgccgccggcgcgcgngcgcgagtggacggcgccgcaatatgacacacactgtacgggtcgcgtccgtactacgctatccgatatactcgtggtatactatgacccgccctattcaataacgtttgtacgcaatctattcgcgttcgcgatcgctgcgctgaatancgnctgcgcgcggctgttgtgacggtagcgtgtgtctgcgacggatagcctactagctgtttntgtcgccgtntncgtcngcgctgcgcgatntgcncgcctacatgngtgattcgaagcatcgntccgtgtcgataatcgatgtgtctgntgcgccgctgcacctcttaactcntacacgcncgaacaactgccgcgcgncacattantcgataatagagtncngacattcgtgggattngtctantgctatcctgtgccgactctatantcncnccgagctctcgctactgccgcggcgcgtatctagtctcaataaattatcgtcacgncgtactctcncgtaggatagcgtcgcgatctctctatatatagtacgtcttcagcacgcancatntatagncagctagtgnctcgtagtgatatagntactgtatcntcgntctccaccttgcacgcnctcattgtctgatttctatactcgacgctcgcagngtcancttatcatcgctgttactatttgcttttgtcagtctaccgcgacgcgcntgactncgcagctcgacgtctagtacatgctcttatntcacgctcacttangcttagtatcgtncgctgctggccgtagacacgctcaacgcgcncgcacggtgtactgcngtatatatatgattgtatgctcatacnatgctgcccgcggctgacgcgcacactcactantcatcatcgaatcgcccacgcttcgtagtctgaatgctgtacgatgtcatgacgcatcgaactgcaggccanaccgagagatactatctatnatcacccgtcatcgctaatcacacatatgacgtnggtcgacagcgcgacgtgagcgtacaagtnnaccgtagtactgtnacgagtttntgntgtnttcatgtcttcgtacgtctgcgcgtggtgtcngccgacttgactgcgatgtatatancagactgatcatacgactatcatatctan

SEQ ID NO: 5236 - DNA, 556 bp, Glycine max
  Probeset Number=SeqID_15015
tttctgactcctgcttttttgcttttcaataattcaagcatgtaagttattgatttctttttatttttccccctttttttaagttaaggttttcgatgcttttaattactgtttgtatttgggctgttcaatactttaattgattaaattctattttctggcttcaaaaattctgcattgctctgctttctaaatttgatatattgttttttcctccaagaaactggggggaatggggaactgggggaaacacaaactgccttttgtttttttgcactggatctgttttctgttgcacctttcaggagttagctttctattggttgctatatatattatgttattaatctctataattattcttaagaaaaactattgtattcaagaatttattttccacacatgttgaactctgggatttgtgttgctatatctagaaattaccatgatgtctgttatttttaaaatgcattgcggcaacaaagatttgtdcgagaagtcacaatacagtacaatctctgcaatgagccatggataaaatatagtataagcactg

SEQ ID NO: 5237 - DNA, 472 bp, Glycine max
  misc_feature (266)..(266): n is a, c, g, or t
  Peptide Sequence Number=SeqID_8740
  Probeset Number=SeqID_15016
atggtaggaaagtcccccctggtccaccaacggaggtacctatagccctccctcccccccaggatcccagtggccctgccactgagggccattggatagctaaactagttgcttgtgggggccggcatcccctgccaatagtagaatggaaatccaatgaatcttccaattgactcaaattttaaataaccccgaccctgcaaagtggatgaggccaatgtctgatttggaactccattcaggggcgggaatttcactcgttctgncatgatatgatcccccaccacggcatccatccgtattaggttttacaccccgatcatcacaggggtctaggggtctgggtccgcgatcgtgtccggtgtcggtacccggcccttcatagattacattatatcttcagatattttggccccattaggatcgatctgttttatatttttctaaggtgcatgaaatacaaaatttcgaa

SEQ ID NO: 5238 - DNA, 1424 bp, Glycine max
  misc_feature (1)..(2): n is a, c, g, or t
  misc_feature (6)..(6): n is a, c, g, or t
  misc_feature (54)..(54): n is a, c, g, or t
  misc_feature (56)..(56): n is a, c, g, or t
  misc_feature (66)..(66): n is a, c, g, or t
  misc_feature (107)..(108): n is a, c, g, or t
  misc_feature (161)..(161): n is a, c, g, or t
  misc_feature (178)..(179): n is a, c, g, or t
  misc_feature (185)..(185): n is a, c, g, or t
  misc_feature (232)..(232): n is a, c, g, or t
  misc_feature (280)..(280): n is a, c, g, or t
  misc_feature (354)..(354): n is a, c, g, or t
  misc_feature (366)..(366): n is a, c, g, or t
  misc_feature (381)..(382): n is a, c, g, or t
  misc_feature (444)..(444): n is a, c, g, or t
  misc_feature (455)..(455): n is a, c, g, or t
  misc_feature (505)..(505): n is a, c, g, or t
  misc_feature (508)..(510): n is a, c, g, or t
  misc_feature (513)..(513): n is a, c, g, or t
  misc_feature (552)..(552): n is a, c, g, or t
  misc_feature (756)..(756): n is a, c, g, or t
  misc_feature (768)..(768): n is a, c, g, or t
  misc_feature (773)..(773): n is a, c, g, or t
  misc_feature (784)..(784): n is a, c, g, or t
  misc_feature (835)..(835): n is a, c, g, or t
  misc_feature (840)..(840): n is a, c, g, or t
  misc_feature (1042)..(1042): n is a, c, g, or t
  misc_feature (1234)..(1234): n is a, c, g, or t
  misc_feature (1355)..(1355): n is a, c, g, or t
  misc_feature (1373)..(1373): n is a, c, g, or t
  misc_feature (1385)..(1385): n is a, c, g, or t
  misc_feature (1394)..(1394): n is a, c, g, or t
  Peptide Sequence Number=SeqID_8741
  Probeset Number=SeqID_15017
nncgcncgcatgcgtgcgatccgcactacgtgtcatgattaaatcacaatcgantnacacatgtangattgtcggttgtatcactcagtcgtctcagacgtgcgctnngagtgatatggtgtctgtgtgagtgccacttgtagagatgattgcgtctacangtagaccgaagatcgtnnaaagangatcgtgccgcgtcacagctacgcgcatcacgcagtatactatactnatttgccgtgagtgttagtcagcgtacatactcagaagacagaatagnagtaagcgtacacagagtgatttcgatctgcacagagtgatgcaaccacgccggaggcgcgctggataaagagnccatatctcgtntttgtgtgtatgtgnngttgaattatatacaacgtgtcgcctagtcagtgtgctgatatgtgttgacagtagagaatnttgagataganacccatccagtgaagtgccggagtgtggtaggagtggtatgttgtgctcncgnnngcngcgaggtgcgacggtggtccaagtggtagggactgcgtnggcttgcacgtgaggtaactgatatctacgccacgggagatggagatagagagtgtgtatgaatcatactatcacataatctaaccatatcaccacacaccacagaggtagtgagacatatgtgagcgttcacgtactgattgatatctctcttaaaccacccactctccgtcgggtgtaggacctcgtgggtacgtattgttnaataatatgatntcaantactatttatntatacccaccattactactacatctcctcttaataatgatttcattctatntcacntctgctttatttgctgtgtttttttatagttgtagcatggtctatcagtgtgatagagatgagtagacgtgatacacagtcaattataaacgtgctgcatgataggtagcgaggagctcttatggaaagcgcacatagcgatatagatgcattatcgcattgtatattcttcgacttgagtaggagcctactcttatccatnctagaattctctttagtgtaatatagaagtagtaatagaacgtatatcagcatattaagtaagagagcgtgagtgctctcactattgaactttaatccagttctatctaagtctgggaatgaaccctagtgataaaaacacatgcgcgggctccatgcccacccagatatcaacggcataggaataggatgnagaacgatcctcctcccacaagacgatgaaaatcttctggcggggtggagggtggttatcttgatcgtatgtctccggagtggtggggccgtcgtttccctccttgctgttttgttcttcntctctatgggtggggttnagtagctctaanagcacaaanccacaaacaacaccaacaaaccacacaaca

SEQ ID NO: 5239 - DNA, 1515 bp, Glycine max
  misc_feature (12)..(12): n is a, c, g, or t
  misc_feature (34)..(34): n is a, c, g, or t
  misc_feature (44)..(44): n is a, c, g, or t
  misc_feature (61)..(61): n is a, c, g, or t
  misc_feature (104)..(104): n is a, c, g, or t
  misc_feature (153)..(153): n is a, c, g, or t
  misc_feature (162)..(162): n is a, c, g, or t
  misc_feature (371)..(371): n is a, c, g, or t
  misc_feature (419)..(419): n is a, c, g, or t
  misc_feature (472)..(472): n is a, c, g, or t
  misc_feature (556)..(556): n is a, c, g, or t
  misc_feature (653)..(653): n is a, c, g, or t
  misc_feature (781)..(781): n is a, c, g, or t
  misc_feature (1331)..(1331): n is a, c, g, or t
  misc_feature (1477)..(1477): n is a, c, g, or t
  misc_feature (1488)..(1488): n is a, c, g, or t
  Probeset Number=SeqID_15018
cacataagtatngacctccactactagtcgtatnggctcatcanatggacataacagcatnttacctgcggcgcgccgcacacgactccacgaagccagacatncgagcatgaccacctcgcccgatccacgtcatttgcgacaagcttatantagtgaacngccgcactcgctcttcgaacatacatccgtcagcgcagacagctatagcgggatcggcactctcctggtgcacgtagacacgctaaactgttcactcactagcagtggtacctcacacgaaatgcgatgcgagactatcatatgcatcgactgcgacacgcgagccgcgctcagatagctattcacacgctagcggcgccattatatanagcttcctcgtgcctgcgcatggtactcaccgcgcactctaccgcggncatcatacatctacagactaacagtactggcgcggtagccgcgcgtttcgcgnactcacgacacactgtctacaatcacaatggtgcagaatatattatcgtggatagaagtattcgcagatcattattacatgcgngcacgcgtcagtgtccggcagaggttacgttgctgctccgccggcgaacacacctacacgtcgtaccacatgtagcgcacgaggcgttgacgcgtgnttactcatactccaagcggcgcaggttcgcgcctcgcaacacgaatagcgcaacactaccacagagctcagcgcgcgcgaagagtgcagtagctcgagcaatgcaccaaatgactgctcccgtgcgtngacgccgcgttcaacactttcatcatatacactttagataatctacgtcctcgctctgtgtgtgagagaagcggataaggcgctacacaacgcgcccgacaagctccgcgtggttgtacgacacggatctgagaagaacaatgagcagaggatcgcacaggaataacacacggcgggccagacgcaaggctaaaaccgtgggcacagataccccacgcgatatgaacaatcacaactgtgcgagtagccgtcagactcgggacgacgacggccgcgaggtgagacgtacagtagtggtatactatcggtatcgcgcgtcatacagcgaggataggtcgacacatgtgcgtctacacaatgcgcgaggggcgtaccagaagctactaaataatgcaaggtcgaaatagtcactactcgcacaatccataaccaccaccaagcttccattatttgatcgtttatacattctccgccgcatgcccatatccctcttatttatcggcatgactgtgacagagcaacgctcgtgtagggtaattatttcgtatgnctttactctatcaggaggggagagggtcgttctcatctttccttcataaaaaaaagaaaaagagaacgacgctagataagaacaccgacacctcctacgggcggggaaccacgcactaccacattttcgccccgagcgtctaagtngtggtgtcggngtataaagccgcggggaattaggggga

SEQ ID NO: 5240 - DNA, 328 bp, Glycine max
  misc_feature (71)..(75): n is a, c, g, or t
  misc_feature (86)..(90): n is a, c, g, or t
  misc_feature (101)..(105): n is a, c, g, or t
  misc_feature (211)..(215): n is a, c, g, or t
  misc_feature (259)..(264): n is a, c, g, or t
  misc_feature (287)..(291): n is a, c, g, or t
  Peptide Sequence Number=SeqID_8742
  Probeset Number=SeqID_15019
gaaactattactcctttaatgttgagggaaatggagctgggagttaaacaagttcttgtgaaacttggggnnnnnggatccgcgcnnnnngtagaaggagnnnnnccaattcagcagcctgccatacttgctaaaacagttgtcgatacaactggtgctggtgatacttttactgctgcttttgctgtggccttggttgagggaaagtccnnnnnggaatgcctcagatttgctggtgtgtatggtggaatgcaactcnnnnnnctttctagaattttctctttggnnnnntgttcctaactacgttgttctgcaacagctgctgcag

SEQ ID NO: 5241 - DNA, 494 bp, Glycine max
  misc_feature (45)..(45): n is a, c, g, or t
  misc_feature (261)..(261): n is a, c, g, or t
  misc_feature (266)..(266): n is a, c, g, or t
  misc_feature (272)..(272): n is a, c, g, or t
  misc_feature (278)..(278): n is a, c, g, or t
  misc_feature (333)..(333): n is a, c, g, or t
  misc_feature (431)..(431): n is a, c, g, or t
  Peptide Sequence Number=SeqID_8743
  Probeset Number=SeqID_15020
ccccccccccaaaacgtgtaaatccaacttcccaaacataaaaanaaatgatgtaccctaagaagacccctaagcaagctaaagcagatcaagaagctaagaagcttatcagccaacaacaaagagaacaactcaaggaaatggtcgctggaaagttccaagccaaatatcctaataaagatcctcaagctctccaagaaaaagtcgataacttctttgaaaataatggccaccaaacactcacctcagaagcccttaganaactngacaanaatatngcctatagcgaaaaggataaaagaagtgctataggccaagatagagatgatattncagttaagtcaggagtttcaaaaatgtcaggtgcgactgacttcgctcctctcgataagactgaaagatcaggatctaagaagggcaccacagttatngatctcaatatgagaacaagaaaagagcctagcgagaaggcctatagaaacgatgaagaagaa

SEQ ID NO: 5242 - DNA, 1499 bp, Glycine max
  misc_feature (19)..(19): n is a, c, g, or t
  misc_feature (26)..(26): n is a, c, g, or t
  misc_feature (42)..(42): n is a, c, g, or t
  misc_feature (131)..(131): n is a, c, g, or t
  misc_feature (543)..(543): n is a, c, g, or t
  misc_feature (606)..(606): n is a, c, g, or t
  misc_feature (727)..(727): n is a, c, g, or t
  misc_feature (741)..(741): n is a, c, g, or t
  misc_feature (768)..(768): n is a, c, g, or t
  misc_feature (770)..(771): n is a, c, g, or t
  misc_feature (786)..(786): n is a, c, g, or t
  misc_feature (880)..(880): n is a, c, g, or t
  misc_feature (899)..(899): n is a, c, g, or t
  misc_feature (912)..(912): n is a, c, g, or t
  misc_feature (992)..(992): n is a, c, g, or t
  misc_feature (1207)..(1207): n is a, c, g, or t
  misc_feature (1276)..(1276): n is a, c, g, or t
  misc_feature (1278)..(1278): n is a, c, g, or t
  misc_feature (1369)..(1369): n is a, c, g, or t
  misc_feature (1374)..(1374): n is a, c, g, or t
  misc_feature (1403)..(1403): n is a, c, g, or t
  Peptide Sequence Number=SeqID_8744
  Probeset Number=SeqID_15021
ataattgagaagggggggngccaccncggcgcgcctatgatngcgcgcgggtgcgcaccttctcttactccgtgttgtgttgtctcagttttgtggtctgtccgcgctttattaatccttcggagttctgnctttcacctccccgctctccaccgccgccccacctccggaggcaggggcggttaggggatgaaatatcaatacgtacacaaaaatagtctctcctattctatcatcgatcgttctatacctcacacaaacacatttccacaggttacatatagcgctcacgctacatggggcaacacatcgtgtttctcactcctgtctcatcctctgggggactgatacaacgtgtgtgtcaactagcactgggtaaacacactttggcggctcgacaattctggtggggtacacaaacaatacacggtggttactaacatgtggctacacatacatggtgtgacaaaacgaagcggggactaacaaaaggtggatggtgatacacattggaggtctgcaacgcagagcgcggagcacatncggtggcgccacacaacagggtgagggcgcgcactgtcggagggtggtcatttcgttggtatntggtgcacatatctgtggagatagtggttcatacgataagcgcttctggcatcttatactgcattctggcttctgctccgtgtcctcttcgttgggtatatcgcataactgtgtgtttctnaaaacactcgacantataactgttttgtgtgtgattgatanannaataaacatggcganaaactccctctgacgcaccacaccaccacatctcctccctgtatatatgcataggtgttgtttgttatatgtgttgtgattgatagtgtatatnactggcgtgcggctcccanactcttgaccaangtgtcgatatataaatcctgccttcacactacgatccgcgtgctgcgcgtattcatcatctacattgcccttccgctctnaccatgaagtctcctcttctctgccctcgtcttgattcctcacacatcgcgtccactctaacctgatactactcctcctcttccgcctcaattctccgcctctctgggcgtatatgtgttctactactgcgcgtgcctgtcgcgcgcggtcatagtgctatactctctctgtgctatcatattcctctctgtgtgtctctcggactctaccacanacatcaacgctgtctgtggagatgatagcttcctctgctttcgatctccgtgctgcgagccatacacgntntgtgcgtcctatctctctcttgctctgtttgctctgttataccgctgtgctgtgtctatcttatcatccatcattggacgtgttctatgtngatgntgtggttggtagagaaaagaaaagtatgngtcgtcctgtacagctcgctgcgctagctctctactcgccagcctgcgtcgctctcatgcgctacacgtcgtctgctcctcgtcctagacttgatg

SEQ ID NO: 5243 - DNA, 739 bp, Glycine max
  Probeset Number=SeqID_15022
atctcatcccaagtgttggttcatctcatctcagcgttatctccaccctttcaatcactacccaaccgagtactgaacatggcgatgagaggcggtaacagcaacgccatgtccttggcgttcatactcctagttgtgggtcttgtagccctagagcaaacccagcaagcacaggcatcccactgttgttgccatctagactcggtccctacctattttcagtgccgcgaaaaatctgacagcaccgtctctgagtgttgcggtgcttctgctggctatatatcaaacgacgctggatttgagtgcaagtctggttatattgatatagagactgcactgcaagccaccaactactgcaagattgggtgcacggcttccttgtgcaacaaattaactccatctgggaaaggtgccatggaacactgcaccagtggatgccmcgatytgtgcaccaagaacaacgcggaaattgcacaagtcatcmcggcttaactagttatgccaaggagctgcatytaacaagcccgccaaggagtgtttatgttgccttcaataatttgtgccaagtccaataaggatcatgagctgtatgatgcatcttcctgcaaggatgtatagtgctcgatcatcgtttcttgttaaaaaatttatgttgtatccttggtatatggcatgatgacgccacgcttttagtgaatcttgtttagtttgcaaattactattgtacttcgttctcgcg

SEQ ID NO: 5244 - DNA, 478 bp, Glycine max
  Peptide Sequence Number=SeqID_8745
  Probeset Number=SeqID_15023
gacgagaaggaagacgaacaaggaggaggagggaggaggaggaagaagaagatcgattcgcgattccgtaaccatgagctccttcaatggaagcagcaatatcgacaaccttctactccaaaccctacttggacgcctccagattcgtccccctaactctcctcctcttctctcacaatccctagaggacctcctcttcaaacccgacgacagcgacggagatgatcggagcagtctcgatggggaagaagctaggctggagaaggagctaatcagcgtcatcgtctcgggtcgaatcgatcctctgaagccgaattcagggcaggcggtgacggttaacgagcaccacatctgcgttgggtttcatgaagatgaggaatcggattatcgtgtgtgggagtggcacggacatatcatgctttttgatgaagagaatgggtacacgcctgagtatatctatgggaattacttcgagagg

SEQ ID NO: 5245 - DNA, 880 bp, Glycine max
  misc_feature (1)..(50): n is a, c, g, or t
  misc_feature (72)..(72): n is a, c, g, or t
  misc_feature (93)..(93): n is a, c, g, or t
  misc_feature (116)..(116): n is a, c, g, or t
  misc_feature (582)..(582): n is a, c, g, or t
  misc_feature (651)..(880): n is a, c, g, or t
  Peptide Sequence Number=SeqID_8746
  Probeset Number=SeqID_15024
nnnnnnnnnnnnnnnnnnnnnnnnnnnnnnnnnnnnnnnnnnnnnnnnnnaggggagagcacatcgcagcangggcgggcggccgcaaaggtngggggggccgccgggcggcgggncgcgccgcgctcccgggggagcgcccgggctgcccccaccaccggctccgggacggaacgggccgaccaccgcgcggcgtcggtcaggccggaggcaggggtgcgtggcaggtgtttgtttggttcacgccctcagagcgcgagcgcagctggtggttgtcccgcgcacactcggttcccccccattcgacaattttttagttgaggggcggcgccatcaccattctcagttcttttgggacttccctgtcggggcccgagtatgatccgtcattcaagtctttcaaagggggtctttgggccccttccatctgatgttgcaatggagctcagtaatgtccttaacaatctgaatggtacaaaagaatccatcaaaggtgcaaaactttggttcatgcagagatctccatttgcaccagccctagcagaggctcttagagatagggtcctttgcattggatgaagntgagagacaattacccataatataccttggccatgacataatttttgacagattaaatcgcagaacaannnnnnnnnnnnnnnnnnnnnnnnnnnnnnnnnnnnnnnnnnnnnnnnnnnnnnnnnnnnnnnnnnnnnnnnnnnnnnnnnnnnnnnnnnnnnnnnnnnnnnnnnnnnnnnnnnnnnnnnnnnnnnnnnnnnnnnnnnnnnnnnnnnnnnnnnnnnnnnnnnnnnnnnnnnnnnnnnnnnnnnnnnnnnnnnnnnnnnnnnnnnnnnnnnnnnnnnnnnnnnnnnnnnnn

SEQ ID NO: 5246 - DNA, 692 bp, Glycine max
  misc_feature (692)..(692): n is a, c, g, or t
  Peptide Sequence Number=SeqID_8747
  Probeset Number=SeqID_15025
agggatagggatagggatggagaaagtgaaggtgcttcggcgactcctcgagacaccaggggttcaccaggggccagcctgtttcgacgctctgggtgcgaagctcatagaatccgctggcttcccctactgcatcaccagtggcttctccatcgccgcttccaggttggctctgcccgacaccggcttcatctcctacggcgaaatgctggagcagggccaactcatcacccaagccgtttccattcccgtcattggcgacgccgacaacggctacggcaatgccatgaacctcaagcgaaccgtcaagggtttcattgccgccggtttcgcaggaatcattctggaagaccaggtaagttttgtttaatctccgatgatcatggtttttccataattaattaattggatcgattagattgcgccgaaagcgtgtgggcacacgcgcgggaggaaaagcgttgacgaggtgcaaggcttatggggatgctggggccgatgttctttttatagacgcactcgcttccgttcaaagaatgaaagctctttgtggcctttttcccatctttcgcaacttcgcaatatgcttgaagggaggaggcaaacggctatactttagtcttcagaacttcgagaagtgggttataaactgcttatgatcccatttccctggatgggggggtgcttacgan

SEQ ID NO: 5247 - DNA, 2319 bp, Glycine max
  misc_feature (8)..(8): n is a, c, g, or t
  misc_feature (67)..(67): n is a, c, g, or t
  misc_feature (107)..(107): n is a, c, g, or t
  misc_feature (172)..(172): n is a, c, g, or t
  misc_feature (199)..(200): n is a, c, g, or t
  misc_feature (302)..(302): n is a, c, g, or t
  misc_feature (380)..(380): n is a, c, g, or t
  misc_feature (391)..(392): n is a, c, g, or t
  misc_feature (540)..(540): n is a, c, g, or t
  misc_feature (656)..(656): n is a, c, g, or t
  misc_feature (731)..(731): n is a, c, g, or t
  misc_feature (787)..(787): n is a, c, g, or t
  misc_feature (820)..(820): n is a, c, g, or t
  misc_feature (837)..(837): n is a, c, g, or t
  misc_feature (847)..(847): n is a, c, g, or t
  misc_feature (864)..(864): n is a, c, g, or t
  misc_feature (954)..(954): n is a, c, g, or t
  misc_feature (956)..(956): n is a, c, g, or t
  misc_feature (1010)..(1010): n is a, c, g, or t
  misc_feature (1035)..(1035): n is a, c, g, or t
  misc_feature (1048)..(1048): n is a, c, g, or t
  misc_feature (1131)..(1131): n is a, c, g, or t
  misc_feature (1159)..(1159): n is a, c, g, or t
  misc_feature (1195)..(1195): n is a, c, g, or t
  misc_feature (1209)..(1209): n is a, c, g, or t
  misc_feature (1230)..(1230): n is a, c, g, or t
  misc_feature (1237)..(1237): n is a, c, g, or t
  misc_feature (1244)..(1244): n is a, c, g, or t
  misc_feature (1246)..(1246): n is a, c, g, or t
  misc_feature (1295)..(1296): n is a, c, g, or t
  misc_feature (1331)..(1331): n is a, c, g, or t
  misc_feature (1343)..(1345): n is a, c, g, or t
  misc_feature (1347)..(1354): n is a, c, g, or t
  misc_feature (1362)..(1363): n is a, c, g, or t
  misc_feature (1366)..(1370): n is a, c, g, or t
  misc_feature (1372)..(1376): n is a, c, g, or t
  misc_feature (1378)..(1401): n is a, c, g, or t
  misc_feature (1414)..(1414): n is a, c, g, or t
  misc_feature (1433)..(1433): n is a, c, g, or t
  misc_feature (1448)..(1448): n is a, c, g, or t
  misc_feature (1455)..(1455): n is a, c, g, or t
  misc_feature (1457)..(1457): n is a, c, g, or t
  misc_feature (1483)..(1483): n is a, c, g, or t
  misc_feature (1488)..(1489): n is a, c, g, or t
  misc_feature (1506)..(1507): n is a, c, g, or t
  misc_feature (1510)..(1510): n is a, c, g, or t
  misc_feature (1529)..(1529): n is a, c, g, or t
  misc_feature (1540)..(1540): n is a, c, g, or t
  misc_feature (1542)..(1542): n is a, c, g, or t
  misc_feature (1547)..(1547): n is a, c, g, or t
  misc_feature (1583)..(1584): n is a, c, g, or t
  misc_feature (1599)..(1599): n is a, c, g, or t
  misc_feature (1604)..(1604): n is a, c, g, or t
  misc_feature (1609)..(1609): n is a, c, g, or t
  misc_feature (1623)..(1623): n is a, c, g, or t
  misc_feature (1627)..(1627): n is a, c, g, or t
  misc_feature (1637)..(1637): n is a, c, g, or t
  misc_feature (1650)..(1650): n is a, c, g, or t
  misc_feature (1659)..(1659): n is a, c, g, or t
  misc_feature (1677)..(1677): n is a, c, g, or t
  misc_feature (1681)..(1681): n is a, c, g, or t
  misc_feature (1687)..(1687): n is a, c, g, or t
  misc_feature (1700)..(1700): n is a, c, g, or t
  misc_feature (1718)..(1718): n is a, c, g, or t
  misc_feature (1753)..(1753): n is a, c, g, or t
  misc_feature (1780)..(1780): n is a, c, g, or t
  misc_feature (1808)..(1809): n is a, c, g, or t
  misc_feature (1815)..(1815): n is a, c, g, or t
  misc_feature (1835)..(1836): n is a, c, g, or t
  misc_feature (1851)..(1851): n is a, c, g, or t
  misc_feature (1889)..(1889): n is a, c, g, or t
  misc_feature (1896)..(1896): n is a, c, g, or t
  misc_feature (1900)..(1900): n is a, c, g, or t
  misc_feature (1934)..(1934): n is a, c, g, or t
  misc_feature (1949)..(1949): n is a, c, g, or t
  misc_feature (1979)..(1980): n is a, c, g, or t
  misc_feature (1983)..(1983): n is a, c, g, or t
  misc_feature (1994)..(1994): n is a, c, g, or t
  misc_feature (2007)..(2007): n is a, c, g, or t
  misc_feature (2054)..(2054): n is a, c, g, or t
  misc_feature (2057)..(2057): n is a, c, g, or t
  misc_feature (2060)..(2060): n is a, c, g, or t
  misc_feature (2065)..(2065): n is a, c, g, or t
  misc_feature (2070)..(2070): n is a, c, g, or t
  misc_feature (2082)..(2082): n is a, c, g, or t
  misc_feature (2085)..(2085): n is a, c, g, or t
  misc_feature (2087)..(2088): n is a, c, g, or t
  misc_feature (2100)..(2100): n is a, c, g, or t
  misc_feature (2106)..(2106): n is a, c, g, or t
  misc_feature (2126)..(2126): n is a, c, g, or t
  misc_feature (2137)..(2137): n is a, c, g, or t
  misc_feature (2139)..(2139): n is a, c, g, or t
  misc_feature (2176)..(2176): n is a, c, g, or t
  misc_feature (2185)..(2185): n is a, c, g, or t
  misc_feature (2207)..(2207): n is a, c, g, or t
  misc_feature (2221)..(2222): n is a, c, g, or t
  misc_feature (2236)..(2236): n is a, c, g, or t
  misc_feature (2271)..(2271): n is a, c, g, or t
  misc_feature (2286)..(2286): n is a, c, g, or t
  misc_feature (2294)..(2294): n is a, c, g, or t
  misc_feature (2297)..(2297): n is a, c, g, or t
  misc_feature (2304)..(2304): n is a, c, g, or t
  misc_feature (2313)..(2313): n is a, c, g, or t
  Peptide Sequence Number=SeqID_8748
  Probeset Number=SeqID_15026
aagattgnatttgtttgttacatcagagaataacacaaacttcctctatacgctgcgcagccccggnagcacgcggggctgcgcccgcacgtgaacggtatgtaaantatacatgctgtcgagctctagaagtgtacgtatctatgtacatctactcgccagacatgcgacnatgcaccgacagttatcgacgacatanntacatattgatcatagcaatacaataccaattattactactctatatactacaacacagtataagatttagatacatactcttcgtcgaagacacgacgcgncgtatcgcgctatcacacagactcatgtatgacacgctgcccagaataatatatattatatatctatcgacagtactnatcatatgctnngcccctccgttgagctcaacgccactgtgtcattatgatgataagtactcaccgccgtgcgatccgcatactatacgctgccacatctaatgctacgtactatatgagcctcactattgtctaccgcctactacacgcacccaccgcncgtctacctcactatacgcaatattcttcctactcgacatcatagcaggctcacagagcaatatacagctctcacgtggtcagcgaacacaataggtaacgcatgccaactgctgncactgtcactcgatctgtgctctgtacaccactcgcacctagccccagcgcacgagctcacagtgataccgcgtncatctcatctattgtagtgtctcagcggtgaggctctgtgcttatatatctgaatntaatgatgctcccgtatacacgacacacgcagnatcatattacaatatcnagctgcgagnagacacatgttatactnagcaccagagactgagtcatcgaccgctatgacgccgctcgtagtctatgttagtattaagacctgtgtgatgacgagagacgcgcagcngnagtgctgtagagcagacactcgtcacagacagctagcacacgaggacacgcagnaccagatagcgtagtcagctgatgnatatagtcgtccncagagccacgctctgttatgttcacgtcatgtgctcgtagcgcagtgcgcggtgcttcgatgtcgtgagtgtgtgcgcgctcntgtgtcagtcttgtgtgtgttcaggtgnaatgcgtgcgcgcgcaggtctaccaggtgcatgtanagcgactggagcgngagatgcgaccgggcgtctgntatatantcatcananccccccacccgcacccatcgactcgccagacgatctccaacgcagactnntctgtccccagcagtcgtgtagcagacgagacggnagagcagacccnnnannnnnnnngatgagannacnnnnncnnnnncnnnnnnnnnnnnnnnnnnnnnnnngtgggtgtgtatntttacaactacccgcagantgagactgatgctgncactttntnttacctgcacgacacgacatctgtgnctccnnatgcaacgtgctcgtgnncgntgttggtgtctctttgagntctcctacatncncactnctcgctcggactatacggtgctgctgtctctctgtnnactgtgcttcgatcncacanacctntcgtcacatcctanaatnctgtacaccntcgtcgcacctgntctatctgnagtacatacgtctgcaancagnatcggncgagaaacgcatncaacctagtctcgtatgncatcactgatcatgctatgctttctcatagcaagntttactcgatctcgcgcatcgtctcgntcgaatcatcaatggtccgcgtacgggnncatcancatctgagacgcagacgacnnagacttctccccgcntacgtgtatattcatcacattcgacatcatacgagcangtattanctanaaagacgcccgaaatgaaccaactatactattcnatatgatgccgtgcncacttcaactcctcagtgcacatgcgcatnnacnacgcatgatgncgatacaaacgtntgagtgtgtatcgctactaagctcaagtcctgcatcgcaatgatcgnacnatncatcnccgtnacgagtgagcgncgncnncaactaaatgcngctctnctgctgtttactactgcagncgctgtcgatnantcatgatgacgtccacgtatgatctgtactacaactncagcctgcngacgtcgatgatgcacatcgantcatccacgtattnntcatatcatcactngatagagtcgctgccggtaactgaccacccatctncatacacgatgtacngactgcgntgnctgacanatacgcgcnctaccg

SEQ ID NO: 5248 - DNA, 1783 bp, Glycine max
  misc_feature (11)..(11): n is a, c, g, or t
  misc_feature (15)..(15): n is a, c, g, or t
  misc_feature (36)..(36): n is a, c, g, or t
  misc_feature (38)..(38): n is a, c, g, or t
  misc_feature (42)..(42): n is a, c, g, or t
  misc_feature (45)..(45): n is a, c, g, or t
  misc_feature (53)..(53): n is a, c, g, or t
  misc_feature (91)..(91): n is a, c, g, or t
  misc_feature (98)..(98): n is a, c, g, or t
  misc_feature (114)..(114): n is a, c, g, or t
  misc_feature (158)..(158): n is a, c, g, or t
  misc_feature (173)..(173): n is a, c, g, or t
  misc_feature (175)..(175): n is a, c, g, or t
  misc_feature (184)..(184): n is a, c, g, or t
  misc_feature (209)..(209): n is a, c, g, or t
  misc_feature (230)..(230): n is a, c, g, or t
  misc_feature (333)..(333): n is a, c, g, or t
  misc_feature (349)..(349): n is a, c, g, or t
  misc_feature (400)..(400): n is a, c, g, or t
  misc_feature (422)..(422): n is a, c, g, or t
  misc_feature (433)..(433): n is a, c, g, or t
  misc_feature (599)..(599): n is a, c, g, or t
  misc_feature (635)..(635): n is a, c, g, or t
  misc_feature (659)..(659): n is a, c, g, or t
  misc_feature (668)..(668): n is a, c, g, or t
  misc_feature (827)..(827): n is a, c, g, or t
  misc_feature (902)..(902): n is a, c, g, or t
  misc_feature (1132)..(1132): n is a, c, g, or t
  misc_feature (1188)..(1188): n is a, c, g, or t
  misc_feature (1285)..(1285): n is a, c, g, or t
  misc_feature (1289)..(1289): n is a, c, g, or t
  misc_feature (1511)..(1511): n is a, c, g, or t
  misc_feature (1540)..(1540): n is a, c, g, or t
  misc_feature (1599)..(1599): n is a, c, g, or t
  misc_feature (1618)..(1618): n is a, c, g, or t
  misc_feature (1746)..(1746): n is a, c, g, or t
  Probeset Number=SeqID_15027
ttattttaaanttanggttaagacgtggggttcgantntttnatnacaagaanaaccaacgaacgcagatgcgcgacggagactacacganatagacnacacgcaggaatatcntgagggaagaacactagagcgacatagagaaaagagagaagaanaagaagaacacaatntnccctcatantactcgcatccccgccgaccgcacnagactctacaccacgcacaanagcaggatagatgagtagcaagccacggcagcaccgcagagagggtagaagatgataagtgccgacgagagcgcaaaagacaaacctacagagtagctggtcnggatgatgcgaagggntcgaacgccagtatgtatcttctccccgtctctcagcaggagtaagagagnacccacactcgcccacctgtgncgagaggagangcgtgcgagcgagagatagagagacgaccacaactataggcgcgcatgacgatggacggtaaatcagcccgccccaccaacaggagaacacggatgtcgtgctgcgtgaagacaagcgagaccccaccacgagagtgaacagtgagctcgcgggcggcgcgggcgntgcagcatgccagcggtgcatagccagcgctcaccngcgcgtgcagtgcatgtgcgtgcncgcgcgcgngacgcatggcagcaccgccgtgggaggagcacagcgccaagcgacgacaaggacgctggccaccacctcgtcacacgcgacgagagtcgtccgagcgtatgagtgtgcagtaggcaccgacaactcgcacatagcgcatgaagagacgagcgagcaacngcgaaacaatcaacagacacctgcgccgagacatagtccagcgacctagatactcacgcgcaggcgcacacaganagacagagcgaacacactgcagcgtagagtgggatgtagaagagggatgtagatcgacatgacaacaccataaatatagaagagacagaggtgagctgcagagggtgcgggcgactgcgaagcggagacgcagtcgccaccatcgtatgaccaacaaccgcaacagagagaagatgtggggtgacgcgtcgccgcgtgaggaggcgcagtgacagcgcacgacaagggcncatcgccactcgcacgacaccacagagagcacgcgcaagtgagtcgtacacatacngaggagtgacgcacagagagacgagagaacatacgcatccgcatcgaggatagagtgaccagacgtgaaagagagaggcgagagcactacgcacgancatnacgaagagacatgcaacgacgacacacacgcaccacggccgacgcgtgagagatggaggacgcccgacacagtgcaactgcacgcctcggtgagcacggccccacaacccacgtgttgcgccgccgccggacgacgaggtatgcaaccacagagcacgacggcacagcgagccccgactccgcgccgacgcgcaaggtgatgtagtgtacggcacaataganacgaggtgaccgctacaacgagataaatngtgaagagcagagagaagacgagtgtgtagtgacaggactgagtgacaagtgaacgcanagcaccctgacagcgagangacaggtaacacgccatcgacatgaggatgtgccactcaagagcatacagaccaacgtacacagaacgacagcacgcacaacaacacgagcgaggtcacagagcagcccgcgacgacgccgtcgtgtncgttgcgctcacgagagtcagcgcgacgcgcatcaag

SEQ ID NO: 5249 - DNA, 1900 bp, Glycine max
  misc_feature (10)..(10): n is a, c, g, or t
  misc_feature (43)..(43): n is a, c, g, or t
  misc_feature (53)..(53): n is a, c, g, or t
  misc_feature (86)..(86): n is a, c, g, or t
  misc_feature (120)..(120): n is a, c, g, or t
  misc_feature (135)..(135): n is a, c, g, or t
  misc_feature (154)..(154): n is a, c, g, or t
  misc_feature (200)..(200): n is a, c, g, or t
  misc_feature (212)..(212): n is a, c, g, or t
  misc_feature (215)..(215): n is a, c, g, or t
  misc_feature (348)..(348): n is a, c, g, or t
  misc_feature (372)..(372): n is a, c, g, or t
  misc_feature (446)..(446): n is a, c, g, or t
  misc_feature (522)..(522): n is a, c, g, or t
  misc_feature (530)..(530): n is a, c, g, or t
  misc_feature (620)..(620): n is a, c, g, or t
  misc_feature (660)..(660): n is a, c, g, or t
  misc_feature (667)..(667): n is a, c, g, or t
  misc_feature (669)..(669): n is a, c, g, or t
  misc_feature (776)..(776): n is a, c, g, or t
  misc_feature (872)..(872): n is a, c, g, or t
  misc_feature (946)..(946): n is a, c, g, or t
  misc_feature (1045)..(1045): n is a, c, g, or t
  misc_feature (1169)..(1169): n is a, c, g, or t
  misc_feature (1171)..(1171): n is a, c, g, or t
  misc_feature (1335)..(1335): n is a, c, g, or t
  misc_feature (1502)..(1502): n is a, c, g, or t
  misc_feature (1681)..(1681): n is a, c, g, or t
  misc_feature (1752)..(1752): n is a, c, g, or t
  misc_feature (1814)..(1814): n is a, c, g, or t
  misc_feature (1844)..(1844): n is a, c, g, or t
  misc_feature (1864)..(1864): n is a, c, g, or t
  misc_feature (1889)..(1889): n is a, c, g, or t
  Peptide Sequence Number=SeqID_8749
  Probeset Number=SeqID_15028
taacgcgtanatccatgtgcaaagagtgcgacttagcctacgntgtgtgccgncggtctcgctagtcgacgtacgcgcacggactngggactgtcagtagaagtatatagttactgagtntcgtagtagttggtnttactcagtatgctgtctngacgatagcacaccgcgtctgcatgtatcgatgcgtaagtacgagngagcgtcggctnganagtatagaaactcgacccatcgtacagcgtagatctgacgatcacgtgtggtggctgagtgcgctgcgtgctcacgtgctgaatacaataagcatgcacaggactggattatgtgtcgtcaagaccactgacngtctagtgctctgactggtgcacntccagtgccattcgcgtgcggcacgctcatcattacttatgtgtcacgacgtgtgtcgacatcagtctgagctncggacgcgtgcggacagcgcacgcaggaagtatgcagctaaatgcgcagacaacaatataaacgcgctcatcttantagcgtangtgcgcgcgatgcgcggagcagcatgaacacacacagaagaatatcacgacgcgctcggacgcattatgtcgtcgaacaaggtgatgacnatcaatacgatatatatagacagcggagtattactcactnagtctangncctgattgaggatattgtgagtctatagcatattatgtgatctacgagattcagtcagagggcgtgtccgatggcggcggagtatcaatgcagagtcatagctgggntggtgtatcgtgcgtcagtatactgtcctaggtgtggtcgtctgatgcctgtcagtacgtcatgttcgagcggcgatgataacgcgatagctacgngggatagtacgtggtgagatatgtgcggcccgtcgcgtcagcagtgatgcgtgagtgagcacaggtacgcacantatatagtctgtgattgatgtgagaacgtctcacgatggcttaactgctggagctgtgacagccgcgagagagtggtgagatagatatagagcgtctgntcctactctcacgtggtagcggctaccgtagcacgtcgtcgcacggatctggactcatatagtatgaatctggcacgagcgagtcaggtgagtatcatagtcggtgctggtggagagggcgcangntagcataacacgcggtcgggagcaggtagatatggcgagcgcgcgcagatggagagtacatcacgaagaagtcgatcagtaggacgaaagatgatagtgcgtcgtctcatatgctttgacatataggagctgagtctctagtacgtatattgtgcatgtgagtngagacgcggtaccgtgcatcgtatcatgagggtgctcgttgacctacgcgatcatcgcacgcagtcgtagcgtcggcgtcgacggcacggagtatctaacatctagcgctgttgcgaatctggctgatggagcgtcgcatggagagcatggcagacaagagcggcgngcgcacgtgctcacgtatagacgtcgccctgtgcatcatcggcgccgagagggcggtgcgaagcgcgctgcgagcatcgctcgcgcggaggctgaggcacgactatgcgtcgagtagtcagccgctacctactgatcctacagtctctcgagactacatgatatgacgatagagagagngtttacgacacgctatatatgctctcatgcacatagtgacaagatatcagacagtgcgatacctacgtccnctgctcacgcgctgcccgccgcctcccattccgatagcggacggcgctctcctccatcacanctctcttgcgccacgtctatgtgcgcgctngtgtaaatgatagtagtggncgataatagccagggggcgaagcgnatagggagggg

SEQ ID NO: 5250 - DNA, 529 bp, Glycine max
  Probeset Number=SeqID_15029
tcgctgttgatgttaaagctgaacacatctgcgctacctgcgactccattgtcatcaatgccaacactaacgttgaagttgaaaatctccttgccgtcaacactgatgagttctgcgacggttgcgacagcattgacttggatatcggaatcgatgataatgttgctcttaacgttgacctccatgttgatgttgccaacaactgccctgactgtgaaactcctcctcctactgaagactgtgaagaaggaaactgtggacttgatgttgtcgtcgataccgatgtcaacctttcccacaagaacaagttcagagtcaacctccacaagggttctcaaactcaatcctccactagcggtggtctcggagctgctccttcattcaccttccctaactaaggttcataaaaaatatgtactttaaccattaattatgtttatactttatcttgttccctcatgaattgtaattatcttttatattcttaaagtataatctttcatacaacaataataatcatattaaccct

SEQ ID NO: 5251 - DNA, 1691 bp, Glycine max
  misc_feature (1)..(1): n is a, c, g, or t
  misc_feature (19)..(19): n is a, c, g, or t
  misc_feature (111)..(111): n is a, c, g, or t
  misc_feature (127)..(127): n is a, c, g, or t
  misc_feature (146)..(146): n is a, c, g, or t
  misc_feature (196)..(196): n is a, c, g, or t
  misc_feature (379)..(379): n is a, c, g, or t
  misc_feature (814)..(814): n is a, c, g, or t
  misc_feature (852)..(852): n is a, c, g, or t
  misc_feature (941)..(941): n is a, c, g, or t
  misc_feature (1055)..(1055): n is a, c, g, or t
  misc_feature (1352)..(1352): n is a, c, g, or t
  misc_feature (1566)..(1569): n is a, c, g, or t
  misc_feature (1661)..(1661): n is a, c, g, or t
  misc_feature (1664)..(1664): n is a, c, g, or t
  misc_feature (1667)..(1668): n is a, c, g, or t
  misc_feature (1672)..(1673): n is a, c, g, or t
  misc_feature (1675)..(1675): n is a, c, g, or t
  Peptide Sequence Number=SeqID_8750
  Probeset Number=SeqID_15030
nggacagacggagaacgancgtgagagaagcatcttggcgagattgtacaatgacatgctaagacgcgcgagcgcgaccacgtcctaggtgcgtacgacgcgacaccatcncgcacgcacgcgactngacgctgtgagacgtaagnagcggatatagaagtagaaatgctagatgctagtaagtagaatggtctancgctatatgtgttatatatcatgtttgttatcgcactcgattctgtgcgtctcagtgcgatattgcactgtatcgccacgctatcgaccgcagctcgacataacaattagcgtctgcacgcgtcatcgtccacgctgcgtcaccgtacgcggcgcatgcgcacgagaacaggctatcactgancacaaagacgagtatccggacgcacagcgcgcgaggtgatggtcggcgtaccctccatccatatccataagtaataattacccacagctcatataagacaacacaagatttgtttacttctgatagtatagatatagatgtcagatatcgattgacgcacgtgaagtggatagagtacgaacgacgagacgagcgacagagaaacgcacatgattcgtgcgtgtgacatgatgttgttgttgtgcgtatctctctctcatctattatacacggtcttgtgttgtgtagtaacgttacatgtatatgatatgattatatacactctagttagtcactatatcatgtactgtgagctacactgcgcgacgattcagaactgagcagacagaatacgtgagtgaacgtagtaacgaatataacttccggtgcgtacgntcgagtcactcgagaacgtacgttctctctttgttcgnattcactattctacatactacatttcgaacgaaagcacggaagcaggagagccgcgagctgcaatataccgatatatagattgacgatnaagacgcaatatacatctaaaaattatgatctagcatcgtatgatcataatagaatctaatatgtacgatgtacacggacgacacactattatatatgccgcacggtcctcacntctctctcgttatatacacattagatacacaagtaatggagaggagctgataaatacatgcgaggagagtcacattcatatatatataggctatctgttatacgagagctatacgagagcagagcatgtcgcatatgaatcgctgcgtcgcaagtagaggtggagattgtgtgtggtgagctatatcgaaagtagagagccaacaaacacaaatagatccaacagagcgccgaatacgatatacaacaacacacacaaacataaacaataatagaccgcgcgcgtcgtcgagacggncggcgaacgagccacgatacgagccagatagatgtgcgagtattgacatcgactcacacactcgtgagcaacccatagaagggacggacgtttatccgagtaatagtataatatctcacactccaacaacggtgttcgcggtatattaatatatatctcgtgatagctgggtgcagcatgacgggcggtttgtgggaagggaggaaggggcttnnnncttcggtggttgttttccctacttctctttctcacttcatgctctccagctttggtgtttgcatatttacaataatccatacaaaacaaagnaanagnnccannanacacacccaaaccaca

SEQ ID NO: 5252 - DNA, 2238 bp, Glycine max
  misc_feature (1)..(1): n is a, c, g, or t
  Probeset Number=SeqID_15031
ntcaactaactaccttctaatttaaaagcttgcagttatacataaaatttaatatgtactactaaattgtttgtaattgaaataaaataaaaaaatcaatgaaaccatgtatagcgcacagagagaaaagggagagaagcagatgcaagctatgctaaaacgactacctttgcctgcaaacatttaggagcattgactggccattctaaacctactgcacactactcaacagctagggagatgatgtataagaagcatgatactcaaggtagaatttaaatgatatatatgaaatctttaacctattaaaaaggaaactaatctctcagaatttacagcaaagaaagctatccttccaccaccgtttctttcggaagtgcttcctgtcggctttcgccatcctgaccgggctgctattccattcagattgaattctgcaaaggcacaaatcacagcttattagtcatgcattactggcaaaaaggaataagtattaactcaagaagttttctggcaatttacatgggaaatgcgaaggatcgcgtgctggtagtgctgctatctgatcgaagagagatgctgccagaataaggtaccggccctgagtagcttattcgacccgacatggggccaatggaagagaaacttgcctcgcctaagctgtgatgaatgtggccagttacagcctgatcatcggacttcccttctactggcttcattgtttgttgaatttcatcacatttacaaacaccagcttggtggcattcctctttaccacaatctgaaggacgtgaaggatccaattgatgagtggagctttctttctctgaaagcatgttatcattatttgattcatcatctgccaatgccaaagaaggactttccaatattgcttcctcaactgtatttttggagccttctgattgggagtgcaattcaggctcattggagatctgttcacccttgtcatcagaagatacagaatcctcagtgagtaaatcttgcaacaaaactttgtcttctggtaaaggcttcatctctttgttgacattaccagaaattttttcagttgcgtccccatccttgtgcatcaaacccttgggttggtcatgattagcatgaacctcgtcagactcctctgttggagttaggcttagaacattgatactggtgttgtctttctgcttttctttactttcagaagggaagaaattgtgagccttttcctctgttggtgttaggcttagtacattgatactgatgttgtctttctgcttttctttattttcgtaactctcagaaaggaagaaattgtgagccttttcctctgttggtgttaggcttagtgccttgatactggtgttgtctttctgcttttctttattttcgtaactctctgaatggaagaaattgtgagccttttcatcaacagtattcacaaacatgaccttatccttgttaaggaccccttcatcaacgcagatgtccttgacaacatgataattactctctttgtaacacacttctaggtgtggttcacattctgtgacagttttgtccatgtaaccatccacagaattcctaggcaagtctcttccctctgcaggattagagattggtgaagtaagggaccttttaactgattctacatcatttggaaacttcataaatgactccatagcctgggaagaatgagaagctggctcaactatgtcctttacttctgcttactattcattattcatacaatcggtgtataccaagcatgatactcaaggtagaatttaaatgatatatatgaaatctttaacctattaaaaaggaaactaatctctcagaatttacagcaaagaaagctatccttccaccaccgttgcttccggtagtgactcctgtcggctttcgccatcaagaccgggctgctattccattcagactgaattattgggaatgcaaaggatcgtgtgctggtggagcaacagttggatcgaatatctatgctgcaataataagtattatgacaagtattgtttatcagacatgacattgactagtttgattacacaatattctgcagggagctgtgacgaacagtggcagtgacagcctgatcatccgtcatcccttcgaccggcttccttgtttgttggatttcatcacacttacacactacaaataaaaaaaacttagctgtaacccaaatctgacgctggctctgatgtacaaactgaggggtgc

SEQ ID NO: 5253 - DNA, 637 bp, Glycine max
  Peptide Sequence Number=SeqID_8751
  Probeset Number=SeqID_15032
ttttttttaaagggagaaatgggaaaattctgtattattgcttatcaattagatacatgccctgctttatatagactcgttttctgctactaacaattctaatggattcttgtggcatattgccttggagaaaaaaacaaaaacaaaaggaatatgcttcctaatggactggtgccacctcagcagacaaagggggaattgctacgttgctgcaattgctgagcaccactcttgccagctactatttttccacaaaatccttgaggtattgaggtttaacaatttccctttttggccttgaagctttttccttgctcgaccctgtttctagcttgaattctgcttcctgagtagtttctgtgtttggtcctatttcttgctcaccatgccctcgtgccgaattcgcacgagggttatgaatgttgttccctttgatgcaaaaagcaacaatcttggcattatctacgaacgaggccttataggaacttacatggattggtgtgagcccttttcgacatacccacgaacatatgacttgatacatgctagtggtgtattcagtatgtatatggacaagtgtgatattactgatattcttctggagatgcatcgcattcttcgtcccaaaggagctgtt

SEQ ID NO: 5254 - DNA, 1880 bp, Glycine max
  misc_feature (19)..(19): n is a, c, g, or t
  misc_feature (39)..(39): n is a, c, g, or t
  misc_feature (48)..(48): n is a, c, g, or t
  misc_feature (118)..(118): n is a, c, g, or t
  misc_feature (197)..(197): n is a, c, g, or t
  misc_feature (241)..(241): n is a, c, g, or t
  misc_feature (285)..(285): n is a, c, g, or t
  misc_feature (328)..(328): n is a, c, g, or t
  misc_feature (365)..(365): n is a, c, g, or t
  misc_feature (367)..(367): n is a, c, g, or t
  misc_feature (413)..(413): n is a, c, g, or t
  misc_feature (524)..(524): n is a, c, g, or t
  misc_feature (549)..(549): n is a, c, g, or t
  misc_feature (628)..(628): n is a, c, g, or t
  misc_feature (638)..(638): n is a, c, g, or t
  misc_feature (709)..(709): n is a, c, g, or t
  misc_feature (959)..(959): n is a, c, g, or t
  misc_feature (966)..(966): n is a, c, g, or t
  misc_feature (977)..(977): n is a, c, g, or t
  misc_feature (993)..(993): n is a, c, g, or t
  misc_feature (1117)..(1117): n is a, c, g, or t
  misc_feature (1322)..(1322): n is a, c, g, or t
  misc_feature (1330)..(1330): n is a, c, g, or t
  misc_feature (1345)..(1345): n is a, c, g, or t
  misc_feature (1532)..(1532): n is a, c, g, or t
  misc_feature (1535)..(1535): n is a, c, g, or t
  misc_feature (1537)..(1537): n is a, c, g, or t
  misc_feature (1542)..(1542): n is a, c, g, or t
  misc_feature (1622)..(1622): n is a, c, g, or t
  misc_feature (1683)..(1683): n is a, c, g, or t
  misc_feature (1787)..(1787): n is a, c, g, or t
  misc_feature (1791)..(1791): n is a, c, g, or t
  misc_feature (1803)..(1803): n is a, c, g, or t
  misc_feature (1819)..(1819): n is a, c, g, or t
  misc_feature (1838)..(1838): n is a, c, g, or t
  misc_feature (1844)..(1844): n is a, c, g, or t
  misc_feature (1851)..(1851): n is a, c, g, or t
  misc_feature (1862)..(1862): n is a, c, g, or t
  misc_feature (1877)..(1877): n is a, c, g, or t
  Peptide Sequence Number=SeqID_8752
  Probeset Number=SeqID_15033
cttcatgtcatatagcatntgatcattgtagttgtcatntttatgtcnatcacttgtcggtgcatggggcgtcggcgcagtcccacgatgcgtcatggctgagtacgcgagcggcgtnctctggtagggagggtgagcgaggtgagtggagggataatgggtgagggtgcggagaagacgcgatatctacaaatcangataaatcacactcaagtagaatgatgagaggaggtgatgatantcgacgcgtcacacaatgtcactaacatcatcctctatcgatanaggctgagatgtaagacgttgatctgtactatatgtgcgaganggagcgtgatgtggtgcggagatgaatatgagatctngngatcaggtagatggaggcgaagggcgcgagagcagttccgacagtngcggaggggagcgtgcgagaggcggggccgagggcgactttacacgtctacgattggatgtgatctagtggagacgtgcgtgtgctcgatatctcactcgcatctagtaanatcataactgtgtatgttcacgtgntgtgtgcagtatataagtggtgtatatgagctagtgtgtactcgtagatagtgtaagatgatgaatatagtctataatncacattgctnatacatatgattcattactttcccgagatataagaacgagatgaatgtatatcgatgagatgtagtgtcgnaacactcatatctatataacttctattagagtgcgtcatagaggctagcgagtatacatctactgaacgatgagagcagatagtcaatgcagagagagctggatgtgagcggagagcgcagaggacgtcgcgagtggcgtgaagagcttctaagcgtctagtcactcactaagtgcgaatctaatacacatagtataagatagttactattgcacgtagtacatcgtaggagtggcgatgactctatacnatctacntatgatacganagatgacaggtcgtcnctcggagctatgcggacgcgccaatcgcgtagtgagaggagttgtgagtacactattcgacttgttgtgtagttgtttgttttgtgcggtctttgcgctgtgttattcgtatgttatggtagantctgaatagacatctagcgcgatcgagatgtcggtgtagtatgaagcaggagcggagagcagcctcggacggtgctgacagaaggaaatcagacagcagaggctatacagttggcgagctaacatagttacaagtaacgcgatattgtgtgattccagacacatgagatcgacagaagacatctgtgagatagatagtagacgtntgagtganatagcgtgcagagcntaaccattagcttacacaccaattcatcatcacccacgacaataataacgcgcagcgccagacacgaagagatgacagcaaaacataagcgcgagagtgtcagtagagatagaggagaggttgagcagactatctgaagcgacagcaggatgagacttggcgcagggtgtgtgggggacggtgtggntgntntggancgatcatgcggtgagatggttttagagtgagaggtagtccagcactctcttgtgggcgtgggcgccgcggcgccgcccgncaatcgtgcgtgtgtacacctccaatccatacaataactctcgcagcggaggatgcgacgntgtaagataggtcgtaattcgagatttgctgagggagcctcgccatcttgtagtattatttataatatgtatttggagtgataggtcggtgtgttgccgctctntttntgtggctttgtnttgcactaagatactntgttttcgcgcgtatctanaaccanaacaacnatataacacanaagagcaagaagacncgc

SEQ ID NO: 5255 - DNA, 688 bp, Glycine max
  misc_feature (664)..(664): n is a, c, g, or t
  Probeset Number=SeqID_15034
ttgagtgtcagcttcctggctgatgtagccccgccctatttctctattagaattgggtatcagattaccgttcttcaatggcgttatcaagtatgtttatgtttaggagtaccttcggactcgggacaaagatgctggtcgtttctctgcatcatgtgcatctatacaaggctcaagaagatctcatataggttgcaaaaaatcttggtgttaatctcacaatgttccattggcagatgatgatctgtgtggaaaagaagatgtcccacttattttgctatagtatctcagccaccggatactattcatggcttcactttcggttaacattgcaaggtgaatttattgaacagtcatttggataggatcacttgtgctttataacacttcatcgcttcacttgctgcttcactttgagcattggaatgcacccttctgtggcaccaaaaccagattggcgtgccctcatggattatatggcttgtattgctacagatgattttcgcttcctttgttttccaggaacccatttgttgattcttcgatgtcgaacctgactggatatggaagatgaacttggcagtcgtccgtcaatactaatgccaagtggaagaattgaatcacttcgtgcaatcccttggatctttgcttggactcagactangtttcatctacctgtatggcttgg

SEQ ID NO: 5256 - DNA, 1352 bp, Glycine max
  misc_feature (1)..(1): n is a, c, g, or t
  misc_feature (3)..(3): n is a, c, g, or t
  misc_feature (66)..(66): n is a, c, g, or t
  misc_feature (400)..(400): n is a, c, g, or t
  misc_feature (402)..(402): n is a, c, g, or t
  misc_feature (410)..(410): n is a, c, g, or t
  misc_feature (714)..(714): n is a, c, g, or t
  misc_feature (836)..(836): n is a, c, g, or t
  misc_feature (919)..(919): n is a, c, g, or t
  misc_feature (1071)..(1071): n is a, c, g, or t
  misc_feature (1109)..(1109): n is a, c, g, or t
  misc_feature (1177)..(1177): n is a, c, g, or t
  misc_feature (1180)..(1180): n is a, c, g, or t
  misc_feature (1184)..(1184): n is a, c, g, or t
  misc_feature (1186)..(1186): n is a, c, g, or t
  misc_feature (1326)..(1326): n is a, c, g, or t
  misc_feature (1336)..(1336): n is a, c, g, or t
  Peptide Sequence Number=SeqID_8753
  Probeset Number=SeqID_15035
ntncgcgtatagagtaatatgatgcgcacgtagtagtacgagagattacgctctgtcgttggtcgncgtctgcggatatatactgcgtatggtgtgtctagaagctgcgctatgcgtgacgtgtctggtggtcgtgcgcgcgtcgtcacgacggtcaggtaatcgccgcagtgtcccgtatctgatgttattatatatattgagctagacgtgtatatctctacctgtctgtggtgcatgcgtgtattgtcctgactgacaggatagatatatgtacagcgctgttaatcagatttattgttagtacatagataccatcatatgatcactaaagccgtcttcgatcgcacacagtatcgacgttataaaatattctatagttgtgcagaaccacgatgcntngcaatgcnagtatgcggcgtcgtcgctatgtacgtcgtctcgatgagatgatgcatgactactagattggcactaagtacagaatctgcaatacgacgctgcctcaccctcgtgctatatctcttgtgcatatgatcagtaggccgtcgtctagacatccgctgcagaggaggtgtatatcgagaatagtgtgtggggggtgaatatatagaagacatactgatatatagtatatatatcacgatcgaacaacgaacgttcttactattagtgtagtatggtaaatagacatgttgatatatcacgtcacanctacacctacacgacagagaagaccagacgccactgcagctatagatggtcacgattctactgcttgttgatgtttcttatttcgctcgcatctattgttatattttatagattgtattaantataggcgttgtctcttaatatttatttatatagcttcatcatttatgcgagcaacgcttgtcgataatattcggagcgttgntgtgtcggggtcggggcgggtcggtggtggtggtgcgctgcagctatttctcgtcgtgtctttgtgtctggcgcgtgtattgtggagttcgatgttgcgcggcgggtcgagggcgtggtcgtcttgatctattatgactatcaagccagctnctccaggtgtctattcactgtcgtctaccattttcatnctcttgctgtgggtgtgtcggtgtcttgtatgtgatgatatttcatcgatttttgatgggtattgagnatntaananttggcgcgcctgccgcggctcaacccgccgcccgcgccgcgcccccaccccacccgagcacgccatgcccagaaatcaaaccccacacgccgaccccgtgaggaagagcggcacgacgagaggacacatcggaggagaanaaagaaaaanaagaaaagaagccaca

SEQ ID NO: 5257 - DNA, 1910 bp, Glycine max
  Peptide Sequence Number=SeqID_8754
  Probeset Number=SeqID_15036
aaaaataaagcaattcgctctaggaatggacattaaacacctgaatcctaaaacgcaaaaaatagttgttgggtcaaaatatatcctaaaagaacgactcgggggaggttcctttggccagatatattctgccacaaacaatagcgaaaatactgcttcatttgctgttaaacttgaaaagcgccttccaaataattatacaaccctaactaaagaagccaaggttatcattgatctcaaggatagtattggatttccaacattgtacgatattggaagagaagaggattataactatatggctatcaatctacttggcttcaacttggaaaaattgttcaaactttgtcgtttccggttctcattgaaaactgtgttaatgcttgcaaaccaaatgctctctaggatagaagttatgcatggcaaaaactatattcatagagacattaagccagaaaacttttgcatgggtattggacattttcgaaagaccttatatattattgattttggactcgcaaggagttataaagatgccaatgggaaacatatacctatcagggaaaacaaagggcttgttgggacagcaaggtatgcaagtattaatgcacatatcggaactgagcttagtcgaagagatgatttagaaggaataggatatacccttatttaccttcttaaaggtagtctgccctggcaaaaccttaaaggacaaaccaagagtgagaaatatcaactaatcaaagaaaagaaattatgtacttcagttgagactttatgtaaaggacttccaagcgagtttgcgacatatatgaattatgtaaaaagtctcgagtttacggatgttcctaactacagctacttaaagaaactattcaaaaatctattagttcaaagtggatttgaattagattaccagtatgattggctttgtaaactaaatactacaactctcaaaaaagaggggaattttgctccagagcctcggattaatttgaaagatctcagtgcacctgaggatagcaagaacaattccccgctaattaatgaacagagaggcaaaacaactctaaatgtgggatttcaagagctagctgagacaaacttgaagctgaagtcagcaggcgctagcttttcacacttagatgatgatgatgcaagccctaagactcggaaggtcagcaacgtggttagaattgtcggtcaaaagttcattgatcatattaaacagaaaaatgctaaaccaagatccaaaagtcataaaggacaaagtaaatatgattgcacaacctcctatcattcctcaaaagctttgaatttcactttagccaacgcagactttgatgttcctgccgaagtaacagctaataatgcaccaggagacaaaattgaacacacagcttctcttgtagctaaaagaaaggattttagccagggagctattagcaatgtttttaactctggagacagtattgaatttcaagaaagcggtttgaattttatacagaataagaaaccgtccattccatctttagagcctgtgtcaggtccgcttagagagagcaatgggtataaaaaatcaaattttcatcgaggaaggactcaagttaatgattatgaggaaaatctcagcgaaagttcaatctgtgaatggaaagacggtaagaatatatcacaaatgttaaatcaacagcatttcagcgttatgagaaaacaagatttaggcacctgaaacgttttttaagggcttttttgtaatagtttattttctatgatacataaattctctttcatcattttttaatattgtaacctcttaggtagtttattgttgcttttaatttctattcttgataggaaaaaaattgtaatatataccctctatagggctgaaatattgtttactaaag

SEQ ID NO: 5258 - DNA, 1582 bp, Glycine max
  misc_feature (1)..(1): n is a, c, g, or t
  misc_feature (36)..(36): n is a, c, g, or t
  misc_feature (164)..(164): n is a, c, g, or t
  misc_feature (270)..(270): n is a, c, g, or t
  misc_feature (296)..(296): n is a, c, g, or t
  misc_feature (298)..(298): n is a, c, g, or t
  misc_feature (360)..(360): n is a, c, g, or t
  misc_feature (527)..(527): n is a, c, g, or t
  misc_feature (538)..(538): n is a, c, g, or t
  misc_feature (554)..(554): n is a, c, g, or t
  misc_feature (824)..(824): n is a, c, g, or t
  misc_feature (829)..(829): n is a, c, g, or t
  misc_feature (856)..(856): n is a, c, g, or t
  misc_feature (903)..(903): n is a, c, g, or t
  misc_feature (906)..(906): n is a, c, g, or t
  misc_feature (1036)..(1036): n is a, c, g, or t
  misc_feature (1187)..(1187): n is a, c, g, or t
  misc_feature (1412)..(1412): n is a, c, g, or t
  misc_feature (1428)..(1428): n is a, c, g, or t
  misc_feature (1456)..(1456): n is a, c, g, or t
  misc_feature (1494)..(1494): n is a, c, g, or t
  misc_feature (1502)..(1502): n is a, c, g, or t
  misc_feature (1519)..(1519): n is a, c, g, or t
  misc_feature (1522)..(1522): n is a, c, g, or t
  misc_feature (1525)..(1525): n is a, c, g, or t
  misc_feature (1535)..(1536): n is a, c, g, or t
  misc_feature (1541)..(1542): n is a, c, g, or t
  misc_feature (1546)..(1547): n is a, c, g, or t
  misc_feature (1550)..(1550): n is a, c, g, or t
  misc_feature (1564)..(1564): n is a, c, g, or t
  Peptide Sequence Number=SeqID_8755
  Probeset Number=SeqID_15037
ngtctaccagcagagctacgccactctcgttgtagntactgcagtgatcaatatatcatcggacttctgtgttgacgtctatgaacgcagtgatgagctactacgtactgtgtgcatatgtatttttttagagtatgacgtgtatgttgatatggagtcgtctntatctgacagacgatcgaatgacagtgcccataccacgtgcagtgcaacggtctgagtgtcacagtgtgacgtgtcatacacttagccgtatgcagatatacagtntgagtcacgggttcatgcgtcgcgtntncatatggtgcgccgagcgagtgctagcatgctctcgatatgattagctattttctctcacangcgtggagtactgccgattccctagtacttatcgtgatatcttgatgtgctcgtgtgtgtggtgtgtcgtacaccagctcacacataagtatgtgggtgcgagtcacggtcgtactgctgtacacgtgtgcgtctgtatcaagtgagtagatgtctgcggatagcancactgttctcncttccctctctctatnatatatatctatctatcacatctgaatctatgcgcactccagcgttgacactctctcctactcatcgtctctcactgtggtatgtgcggtgagtcttagtgcatgctagatatgtgcgtgtgttgtgcagcggacgcgcggagcgagcgcactggagcgtgcgtgctcactcgccgtagcgacgagcatgcgtagagaacagagagtagacatgtatgatagaatgtgagtgtcgcgcagtgtcatcgacgtctgctcatgctatctacntgcgntcgagatctggccgcgtcactgtatangagagatagcgtaacagcgtccctgcgagacgcatcagagcgcatanagncctgcgtgtttgatttttattagtataatgtgttctatatcattaatattagctgtatatctgtctgcgcggtatcgcctctgcgccgactaatcggttggctgacgagatcggtagaggatgctctcantagtcacgatgtatcgagccttcgcacttgatagcatcccctcgagctacatgaaggcatggagctggggagaatcagcaaagagtgattgtgatcaagttctgtcttctatcgtagtctcgttatagcgtacgagcgagcggatagtganggcgacgcgcgacagtcggcggtagggttcctcacgctaacgggttatgtctgctctgctgtgtctttcgtatgatagtgcagtgatagaatagtcgataacatataatattacgccatcgcagacacatacaacacatagctcgttggtcatgtcgatgtgtgtggcctatattctctgattttatattatagaaatagataatcatcactactctatatattntctctacatcttaganttattcagacctatattatgatatcatnatcgtcactctatatatctaatatatggtgtcgacgtntacgccgnggtttgggggctgtggntgnctngcgcacatanncaacnnaaannaanagggagtatagccntgcacacaatcaacacca

SEQ ID NO: 5259 - DNA, 578 bp, Glycine max
  misc_feature (124)..(124): n is a, c, g, or t
  misc_feature (195)..(195): n is a, c, g, or t
  misc_feature (198)..(198): n is a, c, g, or t
  misc_feature (215)..(215): n is a, c, g, or t
  misc_feature (228)..(228): n is a, c, g, or t
  Probeset Number=SeqID_15038
tccccagcaccagcagtgtcccatcccattctccatcctcagatcagcgcagcggaagatcgaatcaatctaggtttggcgagagccgagccgaggggagggggaggagatgtgaagccatggncggatgccccgcgaagatgagttccgatgccccgcgagtgggaccgcacgagcagtgctggatgggctggncgnagcgccaaacaactggncggagcatgctgnagcagctcgaaaaacatttgagagactgcaattgccatttcaaaggttgagcctgtcacatttgcgcaagtgcaaacagtatcctcgtgtcacgagctgatggaccacaaccgacctcagggtgtcgagatgacatgatgatccctgtccgtgatactggcccacttttatacccgggaggggtctgattaggatcccaaagaaacatagggggatgactggaattacccatgggaggactcggggggtcctttataatggagcctgaacaaacttggccaaaaatagtgaatggaaggatcccagttcccccacagggtcctggggggaaccttcttgaatgaaaagtc

SEQ ID NO: 5260 - DNA, 610 bp, Glycine max
  misc_feature (610)..(610): n is a, c, g, or t
  Peptide Sequence Number=SeqID_8756
  Probeset Number=SeqID_15039
ttttttttttttttttttgtaagtacaaggtttcattaaaactttagtcggtccaacattgtgatctcgcaccacgcataccacgtagcagcgcacatcaacagatcgaaaagattgttcaagagtgctaaccagctgcttcagcagacagcaacgccgtcgctagcaagcaatttcccttcccactgattatccttttcatctcctaccaacgcctggtatgtgcgtaacctgaaagttactcgacgtggtcgaccttctgcttctcgcttgcgcccttgatcataccagacagatcaacaataggtagggagaaggggaagtcgacgctcgcaagcatgattgcaaagaagatgtaccatccaagtatgcacgtgacgaacgtgaatgcgccggctgcttcttgacacttggatgcgattcctgcgttgccctgcgcggtgtggataaacgtaccggcaaggaggccgaaagctgggacgagagtgaagaagatgaggaagaagaccaggttggttcgcatcgagcagacgaggtacacgagacagagtatgcccatgcagatcatgaaataggcaatgccgacgttgaagccaacggactccaaacn

SEQ ID NO: 5261 - DNA, 1063 bp, Glycine max
  Peptide Sequence Number=SeqID_8757
  Probeset Number=SeqID_15040
aaaattatttttttaatttgttagaataaaggaaggaacaaatggatcaaagtgacgattattgccctcgttgtaaaaaaagcactaccctagttactgattcaagtcaaggaactgttgtctgtcaacaatgtggtgttgttattgaagatagaatgatcgatcagaccaaagaatacagagaattcgcagaaggaaatagttctggagccgatcgtagaagaatcggtggtatcagaagcaactacttggaggacggtggtttggccctgtccatctccggaagtacctctggtgattccaagatcatgacaatgagcacaagactgggctcgaattctgaggatagatcattattcaagggacacactctgatcaacaagtggggaaatctcttaaatcttcaaaagtccatcttgtcaaaggctgaagagcaattttcgaaaattgaaaacagtaaaaagaccctcaaaggtcgtagtatcgaatctattgccgccgcagtcttgtatattgctagtagaatgtgctcagtgccattgagacctcacgatattgaaaacactacaggagtgcccattaaagatattaagggcgcgtataaaggagttaaaaatcatgtcaactatatcccgcctttggatcctcccagatactgttcaaatttctgtgctaaattgggtcttccaaatgaagtttcaaatgccgcttataaaatcgctgaagctattaaacaaaagagattgctcgatggtagaaaccctcgtactatcgcctctgcagccatatatattgcaatccaactctctcctgattgtaaatgctccttgaaggacatctctcagcattcaaagattgcagaaaataccatcaaaaactcttataaagatctttatgctcacagagctgatattgtccctgaatggaagggaagattagctttagatactcttcacagttaaatataattattgaaattgagaaataaattcgttaaactatttgkttatatatttccccgttttttcgaaaaaaataaaacttgccgaggactgagttcgat

SEQ ID NO: 5262 - DNA, 460 bp, Glycine max
  Peptide Sequence Number=SeqID_8758
  Probeset Number=SeqID_15041
aagatttcattttcatctggttcaacccaaacagtgagagatcaagctccttggatgacggcaacttacaaatctaagcccataatcaatcatattttccgtcagcaagataagaggccaccgaccgtcgtatctgatgcttttgctttgatagtcttagttcctgtcttgattctgttcgtgttatggattaagcttcgagtgaatctctctggtttctcatttagcctgagtggattaatctttcatcttggtttgggttcaatattcgccttatttacttatttctggcttgaactggacatgttttcaactatcaaatatttgttgggacttggtctggtcacatttttatccggtcacgtctcctgagcgactggcaataaaagactgacaatagctttgtatttaattatataatagtcttttccattaaatatatttatattaaaaaaaaaaa

SEQ ID NO: 5263 - DNA, 442 bp, Glycine max
  Peptide Sequence Number=SeqID_8759
  Probeset Number=SeqID_15042
gtttctcgagaaactaaattaccataactttgtcatgcatgaggaaactacagaccattgaatcaacgacgtttgctttaaatgaaacatcaaattatgaaaaatatacggacagaaatccataattaatattggttattcatatttatcgtacattgcaattgtattagtgtaaaggcacgaaagaatatattcctgaggaaacacatatataattcacttgctctagatattatggagctccaaaacttatattatgagctactgaatacacagttactattgatatgcgttacgtaggttgtgttttagatgaactactactaggacagccattgtttactggagagagtggggttgatcagttaaatgagatcattaaagtcttgggaacactcaccaaacaagaattaaggtgcatgagatcaaactacaatgaatt

SEQ ID NO: 5264 - DNA, 2237 bp, Glycine max
  misc_feature (19)..(19): n is a, c, g, or t
  misc_feature (26)..(26): n is a, c, g, or t
  misc_feature (35)..(36): n is a, c, g, or t
  misc_feature (71)..(71): n is a, c, g, or t
  misc_feature (126)..(126): n is a, c, g, or t
  misc_feature (141)..(141): n is a, c, g, or t
  misc_feature (231)..(231): n is a, c, g, or t
  misc_feature (325)..(325): n is a, c, g, or t
  misc_feature (385)..(385): n is a, c, g, or t
  misc_feature (474)..(474): n is a, c, g, or t
  misc_feature (506)..(506): n is a, c, g, or t
  misc_feature (708)..(708): n is a, c, g, or t
  misc_feature (885)..(885): n is a, c, g, or t
  misc_feature (1058)..(1058): n is a, c, g, or t
  misc_feature (1160)..(1160): n is a, c, g, or t
  misc_feature (1253)..(1253): n is a, c, g, or t
  misc_feature (1288)..(1288): n is a, c, g, or t
  misc_feature (1310)..(1310): n is a, c, g, or t
  misc_feature (1518)..(1518): n is a, c, g, or t
  misc_feature (1539)..(1539): n is a, c, g, or t
  misc_feature (1550)..(1550): n is a, c, g, or t
  misc_feature (1724)..(1724): n is a, c, g, or t
  misc_feature (1761)..(1761): n is a, c, g, or t
  misc_feature (1777)..(1777): n is a, c, g, or t
  misc_feature (1783)..(1783): n is a, c, g, or t
  misc_feature (1792)..(1792): n is a, c, g, or t
  misc_feature (1937)..(1937): n is a, c, g, or t
  misc_feature (2012)..(2012): n is a, c, g, or t
  misc_feature (2066)..(2066): n is a, c, g, or t
  misc_feature (2144)..(2144): n is a, c, g, or t
  misc_feature (2152)..(2152): n is a, c, g, or t
  misc_feature (2237)..(2237): n is a, c, g, or t
  Peptide Sequence Number=SeqID_8760
  Probeset Number=SeqID_15043
ctctctccttgtcaactcntctcacncttctcccnnctctcttctcatctcatctcgcgcgccgctagagncgcagcacagaccgtgagctgccatgttgattggcgatggctggtggggtgtttntactcacgtctactncagctctacgtcttctaatgatgatacatggctctctacctcactaccccctatcctacacagcacgactcgtggcactagatattgatntattagacaagtacgagacgtcattcagtaaagaaggagagagagcggatcacagagacatgaattacatccacacacgctgcgcgctcctgtncttacgaaggtacgtacctcacctgccatattactctgtcctatctatatatcgtggcanctctctcttcatcgcatggatcgtaatgtccattagcgacagctccatgatatacgaaaagactaggtagagagtcgtacgggagtagnctgtgctctctactgtcgagagtgagagacgnagtaaggtgtcgtgagatgaacctaatagctagtctgagatatgaaggcaacgacatgtatcaggtcatgcgattcttcgacactccgatgtgcgtctgtactctctatcgacatcgttacactgcatagagtgtgtatcacgccttccctgacgccaatatgagccgtctactcccgcagctcgcatcgtgcgtacatagnacgagccatatactatctatgaagctcaggtgcctcgcagcaggaagcgagagcctactagagccgactccacagaaggatgtcatactcctgtgattccgctattcgcaccccacgtcgcgacgagcgcgactcgacgtactcaacgacccctgatcatactactcatctcacttngtcaacctgcgatgatcctatggtcactgtattccatgcatctcctggagacgaccagccggtacagatgtatatgacgtgcagctgagctacatatggactccatcacatgcagtgaccagagtgaggtggtatcgtacgcgctcgcgatatgccgtctcggcggagatcgnctgtctgagtgtgtgtgatgtatgtcgtgaggtatggtcgaccactgtctgagttatacgctgattcatcaacagtgcgcactacagtcaacgtgtgaatcnacgaggtaccatatgatgatctatcatacgcagattgcatcaggatatctcagtacacgtgtatctcgatgagtctagtcgactgactgtagnctctcctcatgacatagagaggcacgtgtgtatantgatcataagctgtgagctcgnatgacaaatagatatgcacggagtgcgtcgctgatcatctactatactggtgagacactgagacgtctgtcactgtccgtgcaccgactggagatctgtacaacaatacagacgagagtgatgttggacactcgtctcctgcactgaattatcgcacacagctacgactacacacatagctgaacacaatacataagagagagtatantgatgaaatcagtgacgtganatcaggtgatnacagagcgaaaagtaagcactcgtatgcagtacgtgtcttgtatacatctgtctgtacgagtgctcatcgacgactcgcagtacagcgacaatctatctcgcgaactattcatgattgactcgtacgtgaccttaatatactatcatcggccatgtacgatcatctggtcgatngttcgtcgcgcagctacatatctgtatgtgagtgtancgtactacgcatacgntgcttnccgtagttnatattccgacactatgaatgatgcttagactcgtgcgccatgggtgtacggggtgcgagtactgaacgaaggtgacgcactgcactgcactgtactagacgtactgacaatcgcctcacttaccgcacgctacatagcgtacacngaatgtacgcactacgacgcaactgttagcagatgtatgatgagaggatacgctcgagttgacgaggagcgcgangaagactgtgtaagagtgcacattcatgtctgcgagcgacgctgctaggcgtancgtgatgtgcgcagactcgaggcagggtcatgcttcgactgtctattgtgagagagcgtagcaggatagatgcccganagatctcntatcgctcgtcgtaactgagacatgttgaatatgacttatgcatagagagtcgcgagcacatgtgatatacagacatcacaagan

SEQ ID NO: 5265 - DNA, 611 bp, Glycine max
  misc_feature (601)..(611): n is a, c, g, or t
  Probeset Number=SeqID_15044
tcgaggtcctcatcgtcagggtctgtgaactggcttgcgtttgtgttggcgccaaggagagtcgtatccttggtagcaggtttgccatggttcgagactgttgaaatagaagctccggcaggtggtgaggctccggcgccaatgatgacaccaaatgagatcactgagccttctgatatgatgctcttcttgcccagcgcggcggcatcggcaattattgagtttgttacgctcgtgccttcgtcaatggagacgtcttcccagatgaatgcattttgaagcacaacattggagccgatggtacagttcctcccaatgatgcagttcgtaattctactgccggggccgatagaggtcttgcttccaacgatggaattcgacagactggcactagatgcctgtgaaacgtccttctcaagcacgactcctttgggatgtcgcttatatgcttgcccctttaccaagttgttctctggcaggaatgggaacgtccaccgacctaggatatcacggctgatcgagtcgtacatttggaggttgctggccctcgcagcatatccgtcctccagcacgtctgcgtagatcatctttccgttgagcnnnnnnnnnnn

SEQ ID NO: 5266 - DNA, 1577 bp, Glycine max
  misc_feature (91)..(91): n is a, c, g, or t
  misc_feature (197)..(197): n is a, c, g, or t
  misc_feature (544)..(544): n is a, c, g, or t
  misc_feature (610)..(610): n is a, c, g, or t
  misc_feature (841)..(841): n is a, c, g, or t
  misc_feature (971)..(971): n is a, c, g, or t
  misc_feature (1393)..(1393): n is a, c, g, or t
  misc_feature (1435)..(1435): n is a, c, g, or t
  misc_feature (1485)..(1485): n is a, c, g, or t
  misc_feature (1503)..(1503): n is a, c, g, or t
  misc_feature (1507)..(1507): n is a, c, g, or t
  misc_feature (1577)..(1577): n is a, c, g, or t
  Peptide Sequence Number=SeqID_8761
  Probeset Number=SeqID_15045
tgttttgggttgtgtcttgttgtgcttgttgttgtttcgacgcgctgtcgtgtggtgttgctacagacgctggcgcggtgcgtgcggagcncccacagacgtacacgtcgtgcggtatttatccaccgatatgaaatgagtatgatgatattgtgctcagtgtttatatttatacgtcttgtgctactgggcgagtntacggttgtgttgtgtggtgcagcaggcgtgtccttgcctctttgtccactggctgctgacgtggtgaagctcatcttgaatggccggtcacagctgagcatgtattctaacacattaactccttagtatccgccgtgtgtgctagagtcgtattatgtagttcgtatgagccgtgcggtgtttagtgtcttctaggcccaatcacgtatactaggatgaccaaactaactcacaagcagcatacacgcgctcctctcactatcattctactcaccccacgaatctctgatcactcactacgacgtctcgcccctcgcgctcgcgcgcatgtactgacaggcgagcnaaaccaccacgactctcgccgcctgtgtggcgtattagtagtgtggacgtgatcatcgcgagctcngtacatgcgcatctcgctcctccacaatgctttgacccttacgtggcggttccagtcgccgatcattggctgaacgagctgtatgtcattgtcagagtgatcgtgaacgtaaatagataatgcgatcagaagtagctacgtgtgatgaccattcccgcctgcggtatagatctctatgatcgaatggttcactctgtacccacgcatagcaaagaccagactagcacttcnatatctaccctcatctcttattcattccttgtctatcctttataagcaccatcgctgttcatggactcacctgatagtacgtatgtgcgtatggtagagtggtgcagactagtcgtttctcggcccagcncgcacctccgtcgtgtcgcctgcgtaggtgagtgtgtggcgcgcgacatcgttctttgactgtctctgcctctgtgttgttggtcgatcgcttgtctgtatgagcgtgtctttgctcttgacgtgtcctaaatcggcgcgtgttcatggtctattatcgtagacggagtgtagatatatcgcatctcatcctctcgactctatatatagattatcattcgtaacatcggtaatacgttcagctaaatactctgtgtattcaccatcgtacgtctgcccgcgcgtgcgctctccgctctttctactcgcgctatctctctcttcctctctcttcgacccccgtctacctcgcgcgtcgtctgctctcgtcagacgttatctctctcgaactccgctgcacctcgcactcgtcactctctgctnacctccacgatatcgtcactctgtactgtgacttacgatgtntgtcatctcctgtgtctatcctcgctcacgtcgcgacgtagagtctgagnaacgtcgcgcgacggagnatcngagtatgacttctgctcacacatgactgtatctactcgtactgaatgtcatcgacacgacctgtcgcgcn

SEQ ID NO: 5267 - DNA, 1599 bp, Glycine max
  misc_feature (1)..(1): n is a, c, g, or t
  misc_feature (22)..(22): n is a, c, g, or t
  misc_feature (48)..(48): n is a, c, g, or t
  misc_feature (52)..(52): n is a, c, g, or t
  misc_feature (139)..(139): n is a, c, g, or t
  misc_feature (150)..(150): n is a, c, g, or t
  misc_feature (353)..(353): n is a, c, g, or t
  misc_feature (413)..(413): n is a, c, g, or t
  misc_feature (627)..(627): n is a, c, g, or t
  misc_feature (705)..(705): n is a, c, g, or t
  misc_feature (748)..(748): n is a, c, g, or t
  misc_feature (922)..(922): n is a, c, g, or t
  misc_feature (924)..(924): n is a, c, g, or t
  misc_feature (929)..(929): n is a, c, g, or t
  misc_feature (957)..(957): n is a, c, g, or t
  misc_feature (978)..(978): n is a, c, g, or t
  misc_feature (1062)..(1062): n is a, c, g, or t
  misc_feature (1083)..(1083): n is a, c, g, or t
  misc_feature (1085)..(1085): n is a, c, g, or t
  misc_feature (1142)..(1142): n is a, c, g, or t
  misc_feature (1178)..(1178): n is a, c, g, or t
  misc_feature (1195)..(1195): n is a, c, g, or t
  misc_feature (1236)..(1236): n is a, c, g, or t
  misc_feature (1245)..(1245): n is a, c, g, or t
  misc_feature (1285)..(1285): n is a, c, g, or t
  misc_feature (1288)..(1288): n is a, c, g, or t
  misc_feature (1335)..(1335): n is a, c, g, or t
  misc_feature (1339)..(1339): n is a, c, g, or t
  misc_feature (1341)..(1341): n is a, c, g, or t
  misc_feature (1382)..(1382): n is a, c, g, or t
  misc_feature (1405)..(1405): n is a, c, g, or t
  misc_feature (1439)..(1439): n is a, c, g, or t
  misc_feature (1443)..(1443): n is a, c, g, or t
  misc_feature (1460)..(1460): n is a, c, g, or t
  misc_feature (1463)..(1463): n is a, c, g, or t
  misc_feature (1490)..(1490): n is a, c, g, or t
  misc_feature (1515)..(1515): n is a, c, g, or t
  misc_feature (1551)..(1551): n is a, c, g, or t
  misc_feature (1575)..(1575): n is a, c, g, or t
  misc_feature (1577)..(1577): n is a, c, g, or t
  Probeset Number=SeqID_15046
nttttttttgttttgtgctttntttgttttttgtgctgtactagagcnctancaccaccaagctcaccgactcatcctccttttgtggtgcggaggggccgcgcccccacgagggtgaggcgtaggggtagtagggacncactccctatnccatctaatatgagtgtataatgcggcaccggtgctttgtgggtgcgcactgactatgtgtagagtagcgaaatgtgggtgacatctcacataatgagtcttcatcatggtcgtactctagcgtctgggtgatgatgatagtctcggtctcgtgggcacgcgagtggtaggttgggcactgacatcggtgttcgaattcactntgctgtgtttactcttgtctgtcattttactttactgtagtactcttcatgaatcgcatnaaatttataaccacgataataaaaccagatatcattacaatcaacccaccacatgcgtaccgcgcggcggcaccacgcgcacacaattatctctgcctatcgcactatgacgattccttctctgtgcacgttatatgtggacgcgacgtgcaatgtctactcaaattcacattcttccatcattctctactcaccacctcatatcacatcaganacaccgctcgccaagtcctctacctcgatatctaaatataaagatagcaggtgatgatcgccatgtatatagttattntattaagatattgtgaatacgagattgtatatacatgataatnattactaccatacccacccacactcaaagaaatactatatcacacatcagacaatatatacagatagtgttggagtaggatgtatgagatggactaccctgaattgtgttgtattgtcgtgttgtatgtctgtacgtactcgcaccatcttattgttcacaccctcctctctcncntcgantctgcacacacacttcatcatcattcgncactcactaacatcagtgtcntctcgcgagtgctcacactcgcgatagtatatatacattacatgatatacatgaaacagtaactcgtatctacgcgagatacanatttatattagagctcctgtnancattatccctgtgtcgtcggtccgtgtggagtctttgatctcattatctactagctntgccgcaatatctacatatagtttatacatgtgatntctttcattctatgcgntgatcttcgattatgatatggactctatgtaagtcaccaanatggatctnatgcgtcacgacgctccttatcatcctcgagactgtgacncanatgcaacatcagccagaccgtgctcgcggacacatctatacttgatnatgntnactacatttcatgtatattggctctcacacacatcagtacncactgtcgttacgtacgacgtcnactcgacgtactcactatactatcatagactgcntcancatacactcactgtgcncgncctttcgcacaccactacgtctcgcgngttgactctcaatctagccagacgntatgctagctgcacactgtgatatctgtcgtcgcgncgtcgctcatactccacagtagtncnagttctacgtgagatacatacg

SEQ ID NO: 5268 - DNA, 1543 bp, Glycine max
  misc_feature (17)..(18): n is a, c, g, or t
  misc_feature (23)..(23): n is a, c, g, or t
  misc_feature (27)..(27): n is a, c, g, or t
  misc_feature (40)..(40): n is a, c, g, or t
  misc_feature (42)..(42): n is a, c, g, or t
  misc_feature (45)..(45): n is a, c, g, or t
  misc_feature (52)..(52): n is a, c, g, or t
  misc_feature (55)..(55): n is a, c, g, or t
  misc_feature (58)..(59): n is a, c, g, or t
  misc_feature (64)..(64): n is a, c, g, or t
  misc_feature (107)..(107): n is a, c, g, or t
  misc_feature (229)..(229): n is a, c, g, or t
  misc_feature (808)..(808): n is a, c, g, or t
  misc_feature (816)..(816): n is a, c, g, or t
  misc_feature (1151)..(1151): n is a, c, g, or t
  misc_feature (1215)..(1215): n is a, c, g, or t
  misc_feature (1309)..(1309): n is a, c, g, or t
  misc_feature (1349)..(1349): n is a, c, g, or t
  misc_feature (1419)..(1419): n is a, c, g, or t
  misc_feature (1439)..(1439): n is a, c, g, or t
  misc_feature (1470)..(1470): n is a, c, g, or t
  misc_feature (1507)..(1507): n is a, c, g, or t
  misc_feature (1509)..(1509): n is a, c, g, or t
  Peptide Sequence Number=SeqID_8762
  Probeset Number=SeqID_15047
ttttttttttttttttnntttantttnaaacaacggaagnancanacaaacncangcnncaagnaaacaaattatagagtagggaagatttagagtagaataataantagcaagataaaatctattattagaataagtagatatctaaataaaaaaatgtgataagcaagatgatgtatatactgtcttatgctcgcgcgccgtgcccccgaagccgtctcgtgccggncccggccaggctccccgtggagcgctgcgtgcgcgccgacgcgccgcggctaccactggtcggtttcattctttcgctttactgctgttcttcttagtgtttcgatctcccctgcttctatgtggcagcggccgcatcacggacggccgaggcgctcgcgcgccgcccgtggcccccccaccccgcacggcgcgcggcccgcgcggcgccggtcggagagcgaaggcatgcgggagacaacaacaagcatgacaacgcgatagaacagcaagctggaagagatggtgagcgcggtggacgggcctcggtcgcgcgcgatgctgtgagtgctgcgatgggactaagaccagacaatagcgataactaatcttagtcatacataaagcaacataagccaaagaggaacagcgaggaatagccgatgtatgctatgtgacgaggatggagaggagagaaaccgactagactggcgacacggaaggagcgtggggagcgggggagagccgtagctaaggagaagtgcacagaatgtcacagatgacacccacaccgtgtcagacattaacacatatctcaggnctagcacncgcgtctctggacgtgagttcgtagaggaaggaggatgtcgcggcaggatcatgttggataaatacactgtgagcgagagacatcagataagagtcgtaacacgtaggccctcgtgcgtagaggagaggtacgcgccgctagattgctgcgcacgtacatactgttccatttcgcctaacgtgagaatcctacggtgtacaatacacaggtccagcacgccatcacacggttatttttcgacgtctgtatactatgctcagtatctgtgtgattgcactactctcctgtcaccgcctcggcctgctcatcctccctctccaccctcctccccagncgacgccgcaccaccctcactcactctgaggcgtgcaggactcttgagagcggaacatggtganagagagagtgtgatgcatcgagaacggacgtatattatatatgtgaactaataacggcagagagtagcagcacgagagagagcgctctcagtgncaccgaggatgtagaggaacgtataccgatcacgtcgcangccagccttgtaggtacagcatatgacgaacaggcaggagcaccgcacgaaagagaacgacagcggagcngagacctcgtcacgtcttcnctgctctcctatcctactctctaccatgcanactatacgccgatacacgatcatatatacatcaaaancnccacacataagagcgagacgtgagagtgcttgcg

SEQ ID NO: 5269 - DNA, 589 bp, Glycine max
  Peptide Sequence Number=SeqID_8763
  Probeset Number=SeqID_15048
ccaaaagctccttggatgaggaacattttcgttcaaggcatctttttcataaaaaagaaagctcctcctcggaggaggagcaccctttttccaaacaaggacatagggatgatattttgtcggcccatgagcatagcctttttccccattttaatgaagattatagttcttttgatgatgaccataggcttcgaaccagaagcagaagtttaaggcttaaggccaattttcttgttgaaagagaaacagagctgggggagggggggataattttgaatttggaaaattcattattaagtggggaatttggccgttttattagggaggtttttgggggtttttttaatccaagggcccattttcaaccccctgaaataactgtttttttttttgggcttagagccaaaattcgacccctgttgagggctaacttgtaaaagctatagggggcggccaaaaattccattgctttaacttttttggaaaaatcaaagtcccttgctcccaaaaaaaaaaaaaaaaaaaaaaaaaaaaaaaaaaaaaaaaaaaaaaaaaaaaaaaaaaaaaaaagaaaaaaaaaaaaaaaaaa

SEQ ID NO: 5270 - DNA, 448 bp, Glycine max
  Probeset Number=SeqID_15049
ttgcgaacgctgattgtatcaagccacagctctctatttctacaaagcttctgctctttcatgtgctgcatgtgtgtatggctctatggcactacacataaatgggggacaccttgcagctggagtggattctctctgcaaaaatggaccaggttgtggtgcctgctttcagataatatgtcaagatccctaactctatgtagcaaagaacgtaccagaggtgcgatttgacttgacttagatacaacaatcaaactgatctcgctgctaaagcaggggaatcttttgggggcgatggttcacaaaggaaatggccaacaaaccttgaatcttggctggcttgaacttgataaaagatagcacgtgtgggattccagaatcacaatgcggtcgaatggaagtgaaaataagggctggaaccagatcaccgggaaaattagtagggaag

SEQ ID NO: 5271 - DNA, 1422 bp, Glycine max
  misc_feature (435)..(435): n is a, c, g, or t
  misc_feature (1307)..(1307): n is a, c, g, or t
  misc_feature (1311)..(1311): n is a, c, g, or t
  misc_feature (1319)..(1319): n is a, c, g, or t
  Peptide Sequence Number=SeqID_8764
  Probeset Number=SeqID_15050
cctctcgccgagcacacttcgtacgctcataccatgacgacacatccagcgttacatactccctcgtaccctaacacgcatcacagcacacaaatagatgtccgcacgcgcgtggcggccgctataatcacatcactattacgtctctgcgctgagtgctgtagattagaaataggtctccgcgacttctcacacctcaacacgtgttctcatacacgcgcacccgctcgcatccagataagcagcatacacagatacaaacaacaccacttatcctggcaccaccacacacctcgtctgtcagaagaacacactcactcatattcgtgtgagttctgttacttactcatgccatcagtctataactacctgctgtattctcctctgtccacgcatgttggtggataagatgttagaagccgcgacggcgcgatnttcgctccagtatcttaccgaatgctgtcatcttcgtgccgcgcgccatacacacctgcgtatcattaacgcccaggataacatataccgctacacatctcgcacgctgatgagaccatctgtcgcaccagatacacatagtgagtgctctccgcaacatacatacagtactctcttcatcccaatgatctgtctttagagtcatcactagccgaatctcgctcaatcatcctatctacgtcctaccgctactcctccctctctactccactctactcacgcaactgcgaacccacactcccaccctctacctcttgagacgcattcactgtggccactctctcgcgcatcctatcattcgcagcacgcctacaacgggacttcttactccacgatgagaaaaaccctacccctcccacacccgcaggactcgcccgcgaagcgtccactcccttctagtgtatgtcacgtcttagcaacccatcactatccctctgtgaacaacaaccctaacgtgtcattaatctaggttcttactagtgttatatctctattctactaattctatgacttagtgtctagaggaatacccttctcttcttccccctatcctactacctgcatctagtatctcgtatcttattagcacctccacctctccacaatctcgccggcctctgcatcccaagctatctcgtatgtctacttatgtgcatgtacaccccaaacttcattcctcacacataaattagaggactgtcttgcagtacagataatctcatatacacccggactgggtggggggcgcctccccctccctctcacctccccacggagggagccccccctctcccccacctctttgcagtctncctnttttttgntttattgtccctcccccccacccccctatgccactctccacccttccccgcgtcgccactgcctcacccataacacacgaaagaacaaagaaaaagaaaaaaa

SEQ ID NO: 5272 - DNA, 592 bp, Glycine max
  Probeset Number=SeqID_15051
ttttttttttttttttttccatttaaatccaattttattcgtatttgtcaattgttcttagaggggtaaattattaacaaaaatttaaacgaaactataaaatacgaagcaaaaaaattgaaatgtttcggtgtacattgctttttttatgaaatatttaagaagaatatatatgaatttatagttcaagtataaaaaagatgaaacaatggaaaatatcatgtgtctaacattacaagcgaagcaattctttgttgttgttgttgttttttgttttataaaaggttttattgtagtgtgaatgggtagaaattattgaattttcaatgattcaattggctaaaccattggcagtgttgttgattgattgtggttctggtccaattccaccagctagtcgatataccaactgtgacacttccgcagccaaatgatcaacatcctccttggaagcagcttcagcatagactcgaacaatatcttcagtgcctgatggcctcacaaacgatcttccgcgtggatatttttcaaccaattcatcgataccatcttgtaatccttctggtgttacgactttacgttcagcatcagt

SEQ ID NO: 5273 - DNA, 1685 bp, Glycine max
  misc_feature (27)..(27): n is a, c, g, or t
  misc_feature (37)..(38): n is a, c, g, or t
  misc_feature (43)..(43): n is a, c, g, or t
  misc_feature (49)..(49): n is a, c, g, or t
  misc_feature (51)..(51): n is a, c, g, or t
  misc_feature (53)..(57): n is a, c, g, or t
  misc_feature (61)..(61): n is a, c, g, or t
  misc_feature (64)..(65): n is a, c, g, or t
  misc_feature (68)..(70): n is a, c, g, or t
  misc_feature (73)..(76): n is a, c, g, or t
  misc_feature (78)..(80): n is a, c, g, or t
  misc_feature (82)..(82): n is a, c, g, or t
  misc_feature (88)..(88): n is a, c, g, or t
  misc_feature (97)..(97): n is a, c, g, or t
  misc_feature (101)..(101): n is a, c, g, or t
  misc_feature (143)..(143): n is a, c, g, or t
  misc_feature (160)..(160): n is a, c, g, or t
  misc_feature (170)..(170): n is a, c, g, or t
  misc_feature (202)..(202): n is a, c, g, or t
  misc_feature (209)..(209): n is a, c, g, or t
  misc_feature (242)..(242): n is a, c, g, or t
  misc_feature (256)..(256): n is a, c, g, or t
  misc_feature (258)..(259): n is a, c, g, or t
  misc_feature (266)..(266): n is a, c, g, or t
  misc_feature (268)..(268): n is a, c, g, or t
  misc_feature (271)..(271): n is a, c, g, or t
  misc_feature (280)..(280): n is a, c, g, or t
  misc_feature (343)..(343): n is a, c, g, or t
  misc_feature (347)..(347): n is a, c, g, or t
  misc_feature (409)..(409): n is a, c, g, or t
  misc_feature (412)..(412): n is a, c, g, or t
  misc_feature (444)..(444): n is a, c, g, or t
  misc_feature (452)..(452): n is a, c, g, or t
  misc_feature (518)..(518): n is a, c, g, or t
  misc_feature (547)..(547): n is a, c, g, or t
  misc_feature (588)..(588): n is a, c, g, or t
  misc_feature (590)..(590): n is a, c, g, or t
  misc_feature (593)..(593): n is a, c, g, or t
  misc_feature (640)..(640): n is a, c, g, or t
  misc_feature (658)..(658): n is a, c, g, or t
  misc_feature (835)..(835): n is a, c, g, or t
  misc_feature (935)..(936): n is a, c, g, or t
  misc_feature (939)..(939): n is a, c, g, or t
  misc_feature (958)..(958): n is a, c, g, or t
  misc_feature (960)..(961): n is a, c, g, or t
  misc_feature (963)..(964): n is a, c, g, or t
  misc_feature (979)..(979): n is a, c, g, or t
  misc_feature (1004)..(1005): n is a, c, g, or t
  misc_feature (1055)..(1055): n is a, c, g, or t
  misc_feature (1140)..(1140): n is a, c, g, or t
  misc_feature (1142)..(1142): n is a, c, g, or t
  misc_feature (1158)..(1158): n is a, c, g, or t
  misc_feature (1191)..(1191): n is a, c, g, or t
  misc_feature (1201)..(1201): n is a, c, g, or t
  misc_feature (1211)..(1212): n is a, c, g, or t
  misc_feature (1214)..(1214): n is a, c, g, or t
  misc_feature (1218)..(1218): n is a, c, g, or t
  misc_feature (1221)..(1223): n is a, c, g, or t
  misc_feature (1233)..(1235): n is a, c, g, or t
  misc_feature (1392)..(1392): n is a, c, g, or t
  misc_feature (1413)..(1413): n is a, c, g, or t
  misc_feature (1463)..(1463): n is a, c, g, or t
  misc_feature (1498)..(1498): n is a, c, g, or t
  misc_feature (1507)..(1507): n is a, c, g, or t
  misc_feature (1584)..(1584): n is a, c, g, or t
  misc_feature (1608)..(1608): n is a, c, g, or t
  misc_feature (1646)..(1646): n is a, c, g, or t
  Peptide Sequence Number=SeqID_8765
  Probeset Number=SeqID_15052
gtgtgggtgtgtggtggctgcgttgcncgcgtctctnntttantttttngntnnnnnagangcnntgnnnccnnnntnnngnggaacnactcgctcntgcntttatatatcttcctcaaaggaaaggaggagaggaggggagngaccgacgggcgtgagnggtagaaaanttttacatgcgagagtggcttacctctctctnctttatncaacaaaatattggggatgagtatgtcgttggncgtgcgccgtgtgngnngagagananatnatccttacntatccttacacaatacatactacaaccgcctgcactccattactcatcagcgatgcctgcgcntgcnctgtgctcgcacacatatcatagaacactccgctcacacctctcgtccgactcttctctaanganatatatagtacaactgtaacgatcacagcacnaggcacanataatcaatgattcacatgatgatacgtatacagactattacatggtgtgtctattcggtctcacnacccttcagcgccccttctctcgtcgccnccactctgagctaggagtgtgcgcattgagcgtgctgttanancanacaacagcacgcaggagagtagtgaagaaagtactgactggagattngatgcgtgactgactcgntcgtcgcttgatcggttcgtatatgatttgcgtctttgttgcgtgtctcgatggctcactactgatctgcatctgctctctgcatacgctatatagtgtatagtaatcgcagagacattatatatgtatgtacggatagacgccagtgaggtgcttaacacaacgaagcactataanagtcctaccttgcctcgagactgtcgtcttcggtgctcgtgcgtggatggaatgatgagagtgagtgcatatggtggtgatggtcttgtggtttgtgtannaanacacaataccaccaacaanannannaaaatataaagaacnatatctaatgaactgacatgcccannaccacagcactcatcaccaccaccatccttgattggtgttggttgtatanctcttgcttgtgatgctaactatgatgtatcatgctatcgtagatggttgtgtgctgcggtccgatctatatgcctatcacactncntctgcatacacacccnacacgaccataacctataccatagaccactaanccacacccgncacggtgccnncnaccnatnnnacttacatannncggaggtccgcggcgcgtgtcttgggcatgagcctgcgatacatgtagtcatatcctcggctctgttccgtgtatagatgtcagcggtgctatgatgcgtgtgccgtttggcatgtgtcttgctgccggcagtgttagtctctcgtgtctgtgctcnctagattatattaacaggagngtgtgggactgtgatgtgcgtgtcgatgtgatatgtgacaagataaaganggtacatccgtccaccagtccatagtctcactcgncctgcatcncttcgcgcacgcggcgcagagagcgcgtcgtgcacggaggagtatatgagctgattcgacccacggcctgtcgtggnactgtgcgctggctgtctagtctngcacggccctcgacgagctcgtgtgtctctctgttacntggagtgctcggaatgcccgctctctcatcgtcatactg

SEQ ID NO: 5274 - DNA, 1830 bp, Glycine max
  misc_feature (1)..(1): n is a, c, g, or t
  misc_feature (10)..(10): n is a, c, g, or t
  misc_feature (73)..(73): n is a, c, g, or t
  misc_feature (102)..(102): n is a, c, g, or t
  misc_feature (104)..(104): n is a, c, g, or t
  misc_feature (106)..(106): n is a, c, g, or t
  misc_feature (110)..(110): n is a, c, g, or t
  misc_feature (131)..(131): n is a, c, g, or t
  misc_feature (135)..(135): n is a, c, g, or t
  misc_feature (190)..(190): n is a, c, g, or t
  misc_feature (261)..(261): n is a, c, g, or t
  misc_feature (263)..(263): n is a, c, g, or t
  misc_feature (284)..(284): n is a, c, g, or t
  misc_feature (295)..(295): n is a, c, g, or t
  misc_feature (311)..(311): n is a, c, g, or t
  misc_feature (355)..(355): n is a, c, g, or t
  misc_feature (376)..(376): n is a, c, g, or t
  misc_feature (403)..(403): n is a, c, g, or t
  misc_feature (410)..(410): n is a, c, g, or t
  misc_feature (412)..(412): n is a, c, g, or t
  misc_feature (420)..(420): n is a, c, g, or t
  misc_feature (425)..(425): n is a, c, g, or t
  misc_feature (431)..(431): n is a, c, g, or t
  misc_feature (442)..(442): n is a, c, g, or t
  misc_feature (473)..(473): n is a, c, g, or t
  misc_feature (643)..(643): n is a, c, g, or t
  misc_feature (648)..(648): n is a, c, g, or t
  misc_feature (726)..(726): n is a, c, g, or t
  misc_feature (767)..(767): n is a, c, g, or t
  misc_feature (781)..(781): n is a, c, g, or t
  misc_feature (878)..(878): n is a, c, g, or t
  misc_feature (880)..(881): n is a, c, g, or t
  misc_feature (896)..(896): n is a, c, g, or t
  misc_feature (898)..(898): n is a, c, g, or t
  misc_feature (964)..(964): n is a, c, g, or t
  misc_feature (1057)..(1057): n is a, c, g, or t
  misc_feature (1077)..(1077): n is a, c, g, or t
  misc_feature (1182)..(1182): n is a, c, g, or t
  misc_feature (1218)..(1218): n is a, c, g, or t
  misc_feature (1234)..(1234): n is a, c, g, or t
  misc_feature (1287)..(1287): n is a, c, g, or t
  misc_feature (1302)..(1302): n is a, c, g, or t
  misc_feature (1305)..(1305): n is a, c, g, or t
  misc_feature (1424)..(1424): n is a, c, g, or t
  misc_feature (1478)..(1478): n is a, c, g, or t
  misc_feature (1515)..(1515): n is a, c, g, or t
  misc_feature (1524)..(1524): n is a, c, g, or t
  misc_feature (1540)..(1540): n is a, c, g, or t
  misc_feature (1560)..(1560): n is a, c, g, or t
  misc_feature (1584)..(1584): n is a, c, g, or t
  misc_feature (1613)..(1613): n is a, c, g, or t
  misc_feature (1621)..(1621): n is a, c, g, or t
  misc_feature (1695)..(1695): n is a, c, g, or t
  misc_feature (1720)..(1720): n is a, c, g, or t
  misc_feature (1727)..(1727): n is a, c, g, or t
  misc_feature (1729)..(1729): n is a, c, g, or t
  misc_feature (1731)..(1731): n is a, c, g, or t
  misc_feature (1743)..(1743): n is a, c, g, or t
  misc_feature (1752)..(1753): n is a, c, g, or t
  misc_feature (1756)..(1759): n is a, c, g, or t
  misc_feature (1761)..(1761): n is a, c, g, or t
  misc_feature (1763)..(1764): n is a, c, g, or t
  misc_feature (1766)..(1766): n is a, c, g, or t
  misc_feature (1768)..(1768): n is a, c, g, or t
  misc_feature (1772)..(1772): n is a, c, g, or t
  misc_feature (1776)..(1776): n is a, c, g, or t
  misc_feature (1779)..(1779): n is a, c, g, or t
  misc_feature (1785)..(1786): n is a, c, g, or t
  misc_feature (1788)..(1788): n is a, c, g, or t
  misc_feature (1790)..(1790): n is a, c, g, or t
  misc_feature (1793)..(1795): n is a, c, g, or t
  misc_feature (1797)..(1798): n is a, c, g, or t
  misc_feature (1800)..(1811): n is a, c, g, or t
  Probeset Number=SeqID_15053
nagatcacantcaccgcgcaatctcgcacgtcccgacgctatagtcgatgtgcagatgagcgatcacataatncagtacatgtgcagatcagtatgtcgtgntntnatgntgttgtacgcagtgtcagcancgtngcagtgtggactagcacagatcactgtagtatactctaagtcatgcagtagacantatgtactactacgagtgactcgtcgtctgactagctctgcgtctggcgcacgggccatagtcagtgctgngntctgatcgtgggctttccgantatgagattgncatagtgggaactatngctcacaggagcatatgagaatcatatgcatatatacgatagantagtcacaggatagagtgtgnacagcgcacggtcgtactatgctgatntcatganangcgaggtncgtgntgttgngtgtgtatgtngagatagcagtatagtgtctgcagcagatgntgatcgggtactgtgtcatctgtcgtctgtcgagcacagctgagacacgcggagcgcgaccgcattgatgcgtgggtgctatgatatgaggactgagtgtattggttcgcatggtatctgctgtctatcaacgtatacatgacgtacgttgcagcagtctgtatgtgggntgagntgtgagatatagctgatcataatggcgatgtgtatcgatgcagcacgcagtgtgcgataagcacgtgtgtgttggctntttgcgctgtgagctgtattagcatctcagcacatcaacantcgtgatgaggctngtggtagcggcgctgggggtcacgcaccatcacgtcacagagagtcgtgactgtcgacatgcacacgctcactatactgggtgtgtgtgtggtgtgntnntgggtgtgtgttttntntccacaacacactacttatttatctcttacagttctgtgcatctactcaacatctataattagatnaataatagagatagatgtatacattatacatgtacatatcgtgttctcatggtgacttgaagaatatagatttgtagatgttgtagtatatantcgcttactttctacgagcncctcacgcccctacactcctcctcatttaatatatagcatagcgtatcttagagaggttagcgaagcatagtgaatgtattacattacaagaatatctatctctnaccgtcatggtctgtgctctcttcgttaactgtcantgtgaaagttactccnatatcatccaccgcgacgcagtatgacgaatgtcatattttgagtaggcgtgnatagtaaaaccacanacnggagagtggataatcacttagtatcttgaatgcgtattatatttctagatctctctctttctacggcttactgttctatcgaatttgtgtatcagagagtgatgtcatgtgtttatatnttctgttgtcgtgtcttgagtttgtggtagtgcaggaggagtgggagggtgttntgaccactgtcaccacgtagtggggaagtgtattagngtggggggnagtgattagatgtagngtgtgtagatgtgtttgttntaggtgatgagatatatacagctngccattgttagatctatacatatacaggnttgtgtgngtgggttgggcggcgagcccctctcctctacatcttaatgtcgttgatctggaggaggggggagggtgttcacncgtataatccctcattgttctggcnttcgttntntntgatcaccaaangaatacccnnccnnnntntnncntncggngcgngtngggcannananggnnnannannnnnnnnnnnnacaaaccaacacaccccaa

SEQ ID NO: 5275 - DNA, 667 bp, Glycine max
  misc_feature (1)..(18): n is a, c, g, or t
  misc_feature (619)..(667): n is a, c, g, or t
  Peptide Sequence Number=SeqID_8766
  Probeset Number=SeqID_15054
nnnnnnnnnnnnnnnnnnacaaatatgcttctttgagaaacaatttacatcgaatcgttccttacaaattggatattctcccactagtttccttacttgcttctgtacgggatgtgacaatgcggcccctcaagctggccattggtgctacatgcttcctactagcttcatgttcgttcactttcgtgaacatttacaagcaggcatgtcatttcctgtttccaagcaaaaaatacctactacttgctacatgtttgctccgtgaagcttaacgaagcagccgtgttgcttgctaggaagcaagcaggcccattgtcttgagctaggttctcattgcaccagtagtcttcatcaccaatggacgttttgccactagtttccattgctgattcgcctgcttgccgccgtgactcatttgcatgttgtgcccccttatctttgaactcctcggtcccactgattaggatgtcagccaggcggcgtcgatgacctttgagcacctccaaagcataaaatttgtaggtatgatgcagaagaatagaagataggaagcaacaactagtaccggaaagaagcttcaaaatacacgtataaaagcattggatactttagaacgaannnnnnnnnnnnnnnnnnnnnnnnnnnnnnnnnnnnnnnnnnnnnnnnn

SEQ ID NO: 5276 - DNA, 1703 bp, Glycine max
  misc_feature (1)..(1): n is a, c, g, or t
  misc_feature (16)..(16): n is a, c, g, or t
  misc_feature (18)..(18): n is a, c, g, or t
  misc_feature (25)..(25): n is a, c, g, or t
  misc_feature (44)..(44): n is a, c, g, or t
  misc_feature (47)..(47): n is a, c, g, or t
  misc_feature (50)..(50): n is a, c, g, or t
  misc_feature (94)..(94): n is a, c, g, or t
  misc_feature (96)..(96): n is a, c, g, or t
  misc_feature (149)..(149): n is a, c, g, or t
  misc_feature (156)..(156): n is a, c, g, or t
  misc_feature (214)..(214): n is a, c, g, or t
  misc_feature (245)..(245): n is a, c, g, or t
  misc_feature (261)..(261): n is a, c, g, or t
  misc_feature (270)..(270): n is a, c, g, or t
  misc_feature (306)..(306): n is a, c, g, or t
  misc_feature (313)..(313): n is a, c, g, or t
  misc_feature (315)..(315): n is a, c, g, or t
  misc_feature (332)..(332): n is a, c, g, or t
  misc_feature (360)..(362): n is a, c, g, or t
  misc_feature (378)..(378): n is a, c, g, or t
  misc_feature (427)..(427): n is a, c, g, or t
  misc_feature (431)..(431): n is a, c, g, or t
  misc_feature (440)..(440): n is a, c, g, or t
  misc_feature (444)..(444): n is a, c, g, or t
  misc_feature (458)..(458): n is a, c, g, or t
  misc_feature (461)..(461): n is a, c, g, or t
  misc_feature (477)..(477): n is a, c, g, or t
  misc_feature (509)..(509): n is a, c, g, or t
  misc_feature (559)..(559): n is a, c, g, or t
  misc_feature (569)..(569): n is a, c, g, or t
  misc_feature (629)..(629): n is a, c, g, or t
  misc_feature (631)..(631): n is a, c, g, or t
  misc_feature (648)..(648): n is a, c, g, or t
  misc_feature (674)..(674): n is a, c, g, or t
  misc_feature (681)..(681): n is a, c, g, or t
  misc_feature (690)..(690): n is a, c, g, or t
  misc_feature (694)..(694): n is a, c, g, or t
  misc_feature (730)..(730): n is a, c, g, or t
  misc_feature (734)..(734): n is a, c, g, or t
  misc_feature (738)..(738): n is a, c, g, or t
  misc_feature (819)..(819): n is a, c, g, or t
  misc_feature (844)..(844): n is a, c, g, or t
  misc_feature (846)..(846): n is a, c, g, or t
  misc_feature (861)..(862): n is a, c, g, or t
  misc_feature (879)..(879): n is a, c, g, or t
  misc_feature (883)..(883): n is a, c, g, or t
  misc_feature (891)..(891): n is a, c, g, or t
  misc_feature (943)..(943): n is a, c, g, or t
  misc_feature (947)..(947): n is a, c, g, or t
  misc_feature (1029)..(1029): n is a, c, g, or t
  misc_feature (1038)..(1038): n is a, c, g, or t
  misc_feature (1181)..(1181): n is a, c, g, or t
  misc_feature (1187)..(1187): n is a, c, g, or t
  misc_feature (1193)..(1193): n is a, c, g, or t
  misc_feature (1209)..(1209): n is a, c, g, or t
  misc_feature (1215)..(1215): n is a, c, g, or t
  misc_feature (1220)..(1220): n is a, c, g, or t
  misc_feature (1222)..(1222): n is a, c, g, or t
  misc_feature (1362)..(1362): n is a, c, g, or t
  misc_feature (1410)..(1410): n is a, c, g, or t
  misc_feature (1417)..(1417): n is a, c, g, or t
  misc_feature (1456)..(1456): n is a, c, g, or t
  misc_feature (1489)..(1489): n is a, c, g, or t
  misc_feature (1493)..(1493): n is a, c, g, or t
  misc_feature (1550)..(1550): n is a, c, g, or t
  misc_feature (1614)..(1614): n is a, c, g, or t
  misc_feature (1658)..(1658): n is a, c, g, or t
  misc_feature (1670)..(1670): n is a, c, g, or t
  misc_feature (1672)..(1674): n is a, c, g, or t
  misc_feature (1676)..(1676): n is a, c, g, or t
  misc_feature (1682)..(1684): n is a, c, g, or t
  misc_feature (1687)..(1687): n is a, c, g, or t
  Probeset Number=SeqID_15055
ncgcagcagtatccgngntgagagntgatcgtctcagctcccgntcnccntctgcatcagcgtagagcgagacagcgttgtgttagtaatgcantntatagagtaggcgtaggtgcgatcaatatgatgtagttaatgtactatagagngcagtgngagtgatcgtaggtggactatcgcgtatgagtgccgagtcgtgtgctctatagcgtcnctctggtagatagctctgatgcaggcgcggngagtggagacgagcanacacgagcngcaacatctgatagctctcctctcgttgcccacgtncacgcgntnccgccccagtcatcacncgagacgcgcactcacttctatacagcnnntcatacatcacgcacntccggctcgggagtgatcttcccacgacgcgcgtgagactggagtctgngagntctgctctntctntttcacactctccngcncgtcgagggcgagganatgaggacgagggtgagtgtctgatcctgtcntgccgtgactcgcggctactctacacgcgttacgtcgcagtggcgtcatntgggtctatnatgagatatgcgttatctatacacatccggtcaactatactacgtagagcgcacgactcngnccgctagaatacacacncagacgcctgctagttatagtattgntcactgnagactcgcngcgnccccctcgtgcatagctgcactcatcgcagttatgncgcngctngttgcagtgtaggagggtaagcgaacgaccgcaactctatcactcgactggtgagagagtgaggtcgactgagaggcggcnaggcgatgcggcctgatgccgtgtngncccatatacgacatnnatacctcaccacaacangcgngcaacganacatatccctatagtgtgttagttgtagacggccatatatttactatgatanagtngcgtgagagtggtggtcacgagcgaatgtatcgtctgtcactaggctaagtggacttctcgtctatctctatgcacattagncagctgcanacacactactaacagcatgcgaccactagtcccagagacgacagagaccgctcactctgacgacgagaacttattacgagtcttgcccttctctctgagctatgtcatctctgttgtatgacgtctataggtactccaacagngagtcnattctnctcttcgtgtagttgntgctgncgctncntgctctctcgctcgtctggtggcacacgtgtgtcacccgatactagacacacggggacgtacgcactccccgccctagtccagctgcacacgacagagtatctctggctcttttgctcttagtcacgcgaggggctctancagtaagggtgtggtatatctcacgcctaatctctattcattatctanctctgangcggtagggctcatgtaatggtatgactctgcagctgcnagagagcgacgtgaatacagagtgagagagaangggngaattcactaggtctcaacccacacacagaggagcggcggactctgcactacagaantacatacgaagatcacacacacacacctccgagacggagagcactccccctctgttgttacttncccacaccttggtagggagaggtggatatactttaattgttgtnttgtagaaggangnnngntgttgnnnggnggggggggcacacaca

SEQ ID NO: 5277 - DNA, 535 bp, Glycine max
  misc_feature (42)..(42): n is a, c, g, or t
  misc_feature (72)..(72): n is a, c, g, or t
  misc_feature (169)..(169): n is a, c, g, or t
  misc_feature (337)..(337): n is a, c, g, or t
  misc_feature (531)..(531): n is a, c, g, or t
  Peptide Sequence Number=SeqID_8767
  Probeset Number=SeqID_15056
ttttttttttttttttttgaaaggattaaataaatatccaanaatggaaatctatgcaaataaataaataanacttttttcttaaaaaaatcatcacgaaataaaatcaactttagcactcaattgtttatatattaatctttttccaaattcatatttttgtttttgngatccacttctgcgtggattttatctccaattttatattttccttggtttaagcgtagtttgattatgtctctctgctctcaaagaaagacataattatttatattgattcaactaaaacaggaaaagtgcaccaaccatggtgacaatatatattgtcccatcacanataaagtgcatctgagcttcacgcaaacggaaatctgtgaaatcgtaggtcctgaccagcgactccaaaaagataagactgaacatcaaaaggaatgggaaaatatttcttctcttgatcacttggcaatggttttttgacaacggaacgctttccttctgatcattttggacaagctcatcctctcctttganatca

SEQ ID NO: 5278 - DNA, 1360 bp, Glycine max
  misc_feature (38)..(38): n is a, c, g, or t
  misc_feature (48)..(49): n is a, c, g, or t
  misc_feature (51)..(51): n is a, c, g, or t
  misc_feature (54)..(54): n is a, c, g, or t
  misc_feature (67)..(67): n is a, c, g, or t
  misc_feature (72)..(75): n is a, c, g, or t
  misc_feature (99)..(99): n is a, c, g, or t
  misc_feature (106)..(106): n is a, c, g, or t
  misc_feature (120)..(120): n is a, c, g, or t
  misc_feature (140)..(140): n is a, c, g, or t
  misc_feature (143)..(143): n is a, c, g, or t
  misc_feature (149)..(149): n is a, c, g, or t
  misc_feature (247)..(247): n is a, c, g, or t
  misc_feature (317)..(317): n is a, c, g, or t
  misc_feature (382)..(382): n is a, c, g, or t
  misc_feature (700)..(700): n is a, c, g, or t
  misc_feature (1030)..(1030): n is a, c, g, or t
  misc_feature (1221)..(1221): n is a, c, g, or t
  misc_feature (1281)..(1281): n is a, c, g, or t
  misc_feature (1360)..(1360): n is a, c, g, or t
  Probeset Number=SeqID_15057
gggggcccttttctgtgttcctctcccctctccccgcncccccccccnnanatnctgcgtgccgcgnccccnnnncgaacgcacaccacaatatactcncaaaaancagcgtgtgatacntgtgctaagaaaagaccctnaanaaacanacccagctctcccgcgccagaggcgccgccggcgttgtgctgcgttctataattgcctttgcacgtgctcggccacctcatctctcctctatattctnacgaagtcatcccggggtgctagccgagtatgtgtgtgcgtttatcaacagtgcgtccataaattcttcnctgcggtggggtagttgattgtggtgttatacacataaacactgtggctggcacagccaaacaantttccttgctctcactctataactccatactaattattcaattagtcttatttcttttggttactctcttcgtcgcaccatggcgacactcgcgtcacgcggccgtactacgtcgacctcagcttccgccgcctacttatcatccttgtgtgtcgtcgcccctctctctagactccttcgctgctcctctccaccgcactcctccgcgctctcccgtccacaacacacgcatcgttgggcggggacgacggtagatgagagagatagtggaggagggagatagaaagaagaggagtgtgagaagtgagagtacgcccncacgcggcacaacaatatttcatgtcgtgtagccggccgtcggagaagtcacctccaccctctttatgaccttgtgtggagtttgtgtaatatgctgccttctttggtggcgctgtctacgctgtcattacggcggtgatatgcacatccccctcccactccgtgcaccgtcgccgtgccgcgcgctgctctactcttccggtcttcctctcctcttacctgccctcactgctccgagagcgacgcctctcttgtccatgtgttgcttatcatgttcgttgccttctagtcctcagctcttctcgcgtcttaggagctcccgccgcctcnctaccgccgcactccggcatcgatgcttactccttctctctgcatgccacgacccctcatataatcttcgcatgaacgatatattctcatatattaccacaccttctactactatcactcgaatactccggtgcccttatattatgcgttatgtatcttatcctctctctctatgtctcttcctgctgctnttctattgcgtcctgcactgactcttcgcgcctcatcacccacatcctcactctctctcngtgcgtctgttgttcttgctgcattctcctctattgtactatatctctactatacatatatactactactacatgcctn

SEQ ID NO: 5279 - DNA, 828 bp, Glycine max
  misc_feature (1)..(198): n is a, c, g, or t
  misc_feature (799)..(828): n is a, c, g, or t
  Peptide Sequence Number=SeqID_8768
  Probeset Number=SeqID_15058
nnnnnnnnnnnnnnnnnnnnnnnnnnnnnnnnnnnnnnnnnnnnnnnnnnnnnnnnnnnnnnnnnnnnnnnnnnnnnnnnnnnnnnnnnnnnnnnnnnnnnnnnnnnnnnnnnnnnnnnnnnnnnnnnnnnnnnnnnnnnnnnnnnnnnnnnnnnnnnnnnnnnnnnnnnnnnnnnnnnnnnnnnnnnnnnnnnnnnnggtgatgacattgaccaagaaaccgaccaggactggaagggcctccgtgataccgtcaagctcaccggtcacaattgccaggcgaaggatacggtggtccccttcgccagagcccttgttatcaaaggacttaaggagcccgatcgcgacctgaagaagaccataatcatcttgcgcaccgggcacatctcgctcgacgacgtcatcgagatcgctagggttatgaggccgaggtcaatggcgaaggacctcagcggcagcattaaggagattctcgggacgtgcgtctccgtcggatgcaccgttgatggaaaggatcccaaggacttgcagcaggagattaccgatggtgatgttgaggtccctctcgattaaggaggaaggctttgttactctctttctctctttttcttttgtctttcttcagatcgtttcgtgttctttttaatatcaatttgggggaaccatcgaacgttttgtttaaggttattttaccgctttggataatttagatgatggtttcgagagatattattattatgggctgattagtttctttctctgctcacattatgatattttttcgatataattttgttannnnnnnnnnnnnnnnnnnnnnnnnnnnnn

SEQ ID NO: 5280 - DNA, 360 bp, Glycine max
  Peptide Sequence Number=SeqID_8769
  Probeset Number=SeqID_15059
tctaacaacatcgttgcccagatgcttaaaaagcacccggttcagagtattttgattgggaaagaccctttcatggtcacggtttatcccaacattgattatgcgttcatagtggcgctaatcgtgattcttgacgagattaaccccgattagaaggaagattagagggaagctattcattcagcgaatctttttgtttgtaataggtgctttgcctttgaaaatggtcagtgcataaatggttttaaattcaagctgcacaaacttgaaaaaatacccaaaaaaaaagggcgccccccagaaaggtacgcgtggacccaagaataaataccgggccggagcacgcacacggggccagct

SEQ ID NO: 5281 - DNA, 724 bp, Glycine max
  misc_feature (1)..(1): n is a, c, g, or t
  Peptide Sequence Number=SeqID_8770
  Probeset Number=SeqID_15060
ngggtggggcgtgtacgggtgtggtgcgtcggggagttgggcgcgtgtcttgctttgttcttttggttcgggcgggccctccccccgcgcggtggccgcttcggcggggtgtttgatcgcgcgggtggtcgaagtcccgaaccaccttttgtttggggtgggagggggggaaaagtggagtgaggggatgtggggtgtggccgatgtccaggtgttctttttgggcccgtggggccggggggggcgggggtgggaagcccacccactggcgtggggtttcggacgcccatgcggagggtgtgttggttttgcggtcccaacccatggggtagggggggggggcacatttgcgttgcaagttctttgttgccagggcctggggggggcgttcccgtgtgtccggcggggagccagtcagcggcgtcggggggttgttgttagggtcttgtttgcacaccggcggcagtttctggcagccgttccgtcacttgggggccggcgtcatggcgaggccccggccccccgagaagaatctgcagttgtcgcatcacttgggggactgggcgttcgccctgtgagaggattcccatggccaggacggcctgaaggatcaggatgaccaggagtgtgctactcttcatcgttgctcgtaagcttctctgggaagctctgcactgtcccgcgtctgctcgtggaatgatggtttttgctgtggttgtgcttc

SEQ ID NO: 5282 - DNA, 1506 bp, Glycine max
  misc_feature (15)..(15): n is a, c, g, or t
  misc_feature (85)..(85): n is a, c, g, or t
  misc_feature (205)..(205): n is a, c, g, or t
  misc_feature (268)..(268): n is a, c, g, or t
  misc_feature (660)..(660): n is a, c, g, or t
  misc_feature (708)..(708): n is a, c, g, or t
  misc_feature (722)..(722): n is a, c, g, or t
  misc_feature (802)..(802): n is a, c, g, or t
  misc_feature (1007)..(1007): n is a, c, g, or t
  misc_feature (1245)..(1245): n is a, c, g, or t
  misc_feature (1383)..(1383): n is a, c, g, or t
  misc_feature (1386)..(1386): n is a, c, g, or t
  misc_feature (1389)..(1389): n is a, c, g, or t
  misc_feature (1429)..(1429): n is a, c, g, or t
  misc_feature (1470)..(1470): n is a, c, g, or t
  Probeset Number=SeqID_15061
cggatacggcatcgnttgtctcgcctgttagagagtggcgcgccgcgttcgttctgtgtcatgtgtgtagtgtatgcgagctggngagaggtgaatgggaactgatacatgaggcgaagagacagacacgcacgagaagtatgttagtgatcgcatgtgtattactagaggtagtgttgagagtgcatatgatgtagtcatcgtnttggcctcacgtgacagttgtatatatctactatactcgagcatatgctcgagtgctatgatntccgcgcgagtcggtctagtcccattccttgcggtcgtggtaacggtgcgtgaatcgcgcgtcgatattcgtgggtgcgacgcgcgcgcggtgttccgacgtcgcgcgagtgggtgtgagacgtgaagtaggtgtggtgagagtttatctttgctatcgatgcgatagttaagcggctcctgtacgcgcatgatgaggagcggatgtggtgtgcttctatgactactattatagtcgtcgttgtggtcggtgtggcgtcgtttatgtttcctatatcgatcagtgtccgtatacagcggttcgaggggtgaggtcttggccgacgtatgtatagatgcgcagttccacacgtattcctacatcaatattatcgatgatattattattaatanatcgttatatagacagagactcatgtatatagtatactattgcactgnttcgtctatcagtnatatgagtgctagtgtctttctctcattccatctccgttactagttttatttgttgtgttggttgttattgtattgttgnttgggtgtagaatggtctgttcgctattttgtataactatttctatcgagttatgattacttttatgtgattaatatttgtatagcagtgtatacacacaacttatgggacgagtcatgacggagctaagagtggccgagagtagcagatgtggtggctgttggcgggtagacacagagtgggtttagctatcttatcgtaatanatagaagagtcattggagagatagtgaaagcgcgaggagagagacaagcaggaccgccatatgcggtgcgtcgactgggtcctcatatattgtgttatttgttgtgttgttggtgctcgggagtactattgtgtagagggacattgggtaatgaacagtagaagattcaaatacagaattatattattattagttcgttgtcgcgtggtcgcgcgcgcgtggctaggcggctatcgtnctctctcctctctctcgaagtgcgcgaggattctgctactctctgtcatccaagcatgtgtatgtttggtggttggtgtgtgtgttcctatcgttgctgtgcgtcggtgtggtggggtggggggtagggagtcctcgnttnctntcgggggggtgttgtacgtgtgtttaggatttgcagtcanaggctgtttatatttatgtttttaatatttattcgcttgtntccccgcccgacacaccccccgcgcactggaacccc

SEQ ID NO: 5283 - DNA, 1053 bp, Glycine max
  misc_feature (1)..(1): n is a, c, g, or t
  misc_feature (781)..(1053): n is a, c, g, or t
  Peptide Sequence Number=SeqID_8771
  Probeset Number=SeqID_15062
natttaacttttctgcattttttaaacctctaataaaccacccgcccccaccccaaacctccttttttttttttttccttgccaaaattgtataatttatattatcgtatatttacatgtgaatttcttggcagagtacaagtaacagagcctcattatcatcatgtacaaaaaattaatacttactagttacaacaaaccaatatgaattttatcacatcttttacctcgcaatctttgagcattttaaacaagtaaaatttctaacttcatggatggccagcttctaaatccctgcaatattaattctgcagttgaatttttgcaaaattcattcagcagccacttttctagctgcatccctccaattttaagcatgatgacatacttcagaagttcgtgatcattctcatgacggaggaaatgtttttggaatttgcaacagacatgcaattgagggtaccagattccaatggagattgaagaattttcacttctggaaacccgaccagtggcccctcatccgggacacattggactaacactccccttaacccgacccccgcacccgaaagaaaccccttgccccaattactaaacccaaccccacaacaaaggcaaacttaaaattcctacccccccaaccacttccaatctttatttggaaactccaccccccgggcgagcacttctgcccaagaaatacttacagcgcgaacccactcctcagccaaacactgggctatacaaaaatacccccccgccgcacacggacacgccnnnnnnnnnnnnnnnnnnnnnnnnnnnnnnnnnnnnnnnnnnnnnnnnnnnnnnnnnnnnnnnnnnnnnnnnnnnnnnnnnnnnnnnnnnnnnnnnnnnnnnnnnnnnnnnnnnnnnnnnnnnnnnnnnnnnnnnnnnnnnnnnnnnnnnnnnnnnnnnnnnnnnnnnnnnnnnnnnnnnnnnnnnnnnnnnnnnnnnnnnnnnnnnnnnnnnnnnnnnnnnnnnnnnnnnnnnnnnnnnnnnnnnnnnnnnnnnnnnnnnnnnnnnnnnnnn

SEQ ID NO: 5284 - DNA, 420 bp, Glycine max
  misc_feature (95)..(96): n is a, c, g, or t
  misc_feature (124)..(124): n is a, c, g, or t
  misc_feature (139)..(139): n is a, c, g, or t
  misc_feature (366)..(366): n is a, c, g, or t
  misc_feature (402)..(403): n is a, c, g, or t
  Probeset Number=SeqID_15063
atcaagacacagaccagagtccacagcacagcagagcaccaccactactaccacccccagtggcaaccctgacaaggctctagcagcttagctgnngatggccgggctactctctgtcaaggcngtcgcgctcgccgcngtgcttgctgccgcgtatgcctcttgcgccgccgccgagcagccgggggcggcggacctcgacgcctccgccgtgtcttacagctccgcgtggcttccggccagagcgacctggtacggagcgcccaacggcgccgggcccgacgacaacggtacgtgcctgcccatcgagccgtgtgggtgcttttgatgcagcgattgctctctgttctaatgccgttgctcaanttggttcaccggcgtggtgtacatgcaggcggcgcnngcggcttcaagcacgtg

SEQ ID NO: 5285 - DNA, 1520 bp, Glycine max
  misc_feature (1)..(1): n is a, c, g, or t
  misc_feature (55)..(55): n is a, c, g, or t
  misc_feature (57)..(57): n is a, c, g, or t
  misc_feature (60)..(60): n is a, c, g, or t
  misc_feature (86)..(86): n is a, c, g, or t
  misc_feature (148)..(148): n is a, c, g, or t
  misc_feature (167)..(167): n is a, c, g, or t
  misc_feature (169)..(170): n is a, c, g, or t
  misc_feature (182)..(182): n is a, c, g, or t
  misc_feature (231)..(232): n is a, c, g, or t
  misc_feature (234)..(234): n is a, c, g, or t
  misc_feature (236)..(236): n is a, c, g, or t
  misc_feature (238)..(238): n is a, c, g, or t
  misc_feature (324)..(324): n is a, c, g, or t
  misc_feature (338)..(338): n is a, c, g, or t
  misc_feature (372)..(372): n is a, c, g, or t
  misc_feature (398)..(398): n is a, c, g, or t
  misc_feature (409)..(409): n is a, c, g, or t
  misc_feature (462)..(462): n is a, c, g, or t
  misc_feature (516)..(517): n is a, c, g, or t
  misc_feature (617)..(618): n is a, c, g, or t
  misc_feature (704)..(704): n is a, c, g, or t
  misc_feature (780)..(780): n is a, c, g, or t
  misc_feature (918)..(918): n is a, c, g, or t
  misc_feature (976)..(976): n is a, c, g, or t
  misc_feature (979)..(979): n is a, c, g, or t
  misc_feature (1020)..(1020): n is a, c, g, or t
  misc_feature (1112)..(1112): n is a, c, g, or t
  misc_feature (1121)..(1121): n is a, c, g, or t
  misc_feature (1254)..(1256): n is a, c, g, or t
  misc_feature (1321)..(1321): n is a, c, g, or t
  misc_feature (1496)..(1496): n is a, c, g, or t
  Peptide Sequence Number=SeqID_8772
  Probeset Number=SeqID_15064
nggatatgacatattgtgcgtgcgaatgagatgagtgttgggtcgtagtggtatntngcngtgggagaggagtagatatctccgtntaatgtactgctaggtgagtgtgccgtgagtcggcagctgcgcacatggtgcagtgatcgancgtgcacgagatgatatangnntcgctgagttgntggtgtgtattgctagaatgcatagtctagtggtgcaagtatgtgagannangnanttgtagaatggtgagtcgtgactcagcgcaataggtcatgtatagtaaggccgcgagacgagagtggcgagatgtggtggacgtgnatggtcgtgtgtantgcaggtaggcgcgaggtgtgatgactggctgtnataggatggtagtggaaaaacatctncacaagtgtgnggtggtggtgttgtagtgtagcggaggagagtgtgtgagcgacgagtataatncagacagtgtcatcgctggggctgtgcgacgatgaatgatgcgtatgatacaannggttgtgggcgcgaggagtagatacgacgtaagagagggatgcagttaaggcgacgcgacgtggatagataggaaagtagcgcgcaggggtacactgggnngatgagagagattagtcagaagagtggcatcatggagcgagcgagcacgcgaagagtaagaaagtggcggtgggtaggtaacatgnagagagacgcgtacagggcatggcgatgggtcgtgatatatgtggtggcacgatataacgtatgacataggtgganaagtcgatgttcagtacgaatagtatgggtatgggggtggtcggtgatagagggtcgtacggaataggtaggtctagcgagactacacggttgggtagtagcatagtagcgtgggagaggatggtggggtataagtgnagaataagacagatctagattggaagagatagaatagttggttagatatttagagctnttntagtacgacggccgtcggacggcgcggcagtgcgggcgganaagggggaggaggcacctgctatacgtattctggagttgcgatagtgtgtgtgcggggcggagaataggtagaatatcgtgtgtatggtaanagagacgcngtgagcgcagtatatcagcttattgacaaggtagttgagatattgcactctttcgagcacacgagaggtgcgttgtgtagtcgaacgatgggcgggagttaggagcgcggttgagattgttagtacgtgtgtnnntgtatgttgtatatatgtgtagtggtcgacatgccgtgtgtgtgacttgcaaaaagatatgaggnggtgagaataagagatgcagcaaactgcgctggcagggcacgcgtggtgtgatacacaacataggttgcgatgagggcggggcgcgcggcggcgcgagaggagggagagcgcgagagagtaagtacaaagggagaaaggatgagaagcgttgttggggtggagggggcgatggtnggtgggcacagagttagtgtgacg

SEQ ID NO: 5286 - DNA, 1398 bp, Glycine max
  misc_feature (79)..(80): n is a, c, g, or t
  misc_feature (99)..(99): n is a, c, g, or t
  misc_feature (399)..(399): n is a, c, g, or t
  misc_feature (404)..(404): n is a, c, g, or t
  misc_feature (593)..(593): n is a, c, g, or t
  misc_feature (692)..(692): n is a, c, g, or t
  misc_feature (717)..(717): n is a, c, g, or t
  misc_feature (1036)..(1036): n is a, c, g, or t
  misc_feature (1251)..(1251): n is a, c, g, or t
  misc_feature (1257)..(1257): n is a, c, g, or t
  misc_feature (1260)..(1260): n is a, c, g, or t
  misc_feature (1262)..(1262): n is a, c, g, or t
  misc_feature (1387)..(1387): n is a, c, g, or t
  misc_feature (1398)..(1398): n is a, c, g, or t
  Probeset Number=SeqID_15065
ggccccccggccgcgccggcccccccccccctcggcggccgccacggctccgcggggtgtgtggaccctcctccctcanncggcggggggcggtgcgantgtcggcgggcgccgcgcgtggccggcgtcgcgagtagtgggggggagctgcgccgggggctgcgccggcggcacctccgcgagcttaggaaactattaaactcataccaccgatcctctctcctcgcgcatgcgactggtgggggtccgtcgccgccggcggccgccccggtcgggcgtagtgctgtccgctacccggcattaccacaaacgccagcacgcaatcagatagcaactatgggtagtgagcgagtcaagacttacagaggaaagaatcaaaacaactggataacgcatagngcttnctgtgtgtagagacatttgataacgtcgtgccgcgtaggtgcatcagcatccacgagcgtaggtcgacctgtgccgggcggccgcgtgcggactgtgggggcgaggagtacgtctgtgcgagacgtgggctactgtgggacgtgagcagaacgcgcaagagcgggccagaacgcgcacacagcgagtanaagaagcggctaggagcagagaagaaggaagagaggaggtgtagggggcagacagcgcgacgggaggtggtaggggggaacgcgacaataaagagcggnttacgatctgtgagccacggcgggncgggggcatgcattggggtcgtggatggcgcgcaggtgaggaagagacgataacaatcgtacattgcgtgggtagagatgcgtgtgtggcgggtgttgagtttgagttaccaccacagggggatatctagttgcgagtgcggcgccgcacgcggcgcacggtgagtggaggcggacgaacgattgtcgatgtacgcgagactgaggagtatgggagcaacaatatcgcgcggcagtgtggaagagagagagatgtacgggggaggggcgatcgggcagcgcggagaagcggacgtgtcgacgcctcgcgcgcgcgcgcnccacgccgcgatcctcacaagggcagccggcgtcacgtgagcgcgcgtccacgctgaacacaacaactatcactacgagctcacatgcaccgatgcgcgactcgtaccatgatcatcgcgacggtggagcggcgtgcactgtctcgaacagatatagtgatcgctacttccacatctgcagctgcgagcctcaccacactcactcgacgacccanagacgnggntngaacggagtgcgcgtcttatgaatgcgagtgggctccgcgccgcgcgctggtatcgatgcaacgacgatctcacgcgctctgtgcctacgcgaccagatccgccgtcacgacgagacacgcgagnacagcacatan

SEQ ID NO: 5287 - DNA, 556 bp, Glycine max
  misc_feature (121)..(121): n is a, c, g, or t
  Peptide Sequence Number=SeqID_8773
  Probeset Number=SeqID_15066
aacatccatacacttcaccagagaggcagtgaaagatacaagaaccggcaaagcaaaacatggcgacccttaaggtttcatctcatgttccttctccatctgaagatgctgagcaactganaagcgcctttgacggatggggtaggaagaggacttgatcatatcaattttggctcacagaagcgctgaacagaggaagctgatcaggcaagcataccatgaagcctgtggagaagaccttctcaagactcttgacaaggaactcactagcgacttcgagagagccatcttgctctggactcttgaacctggtgagcgtgatgccttgttggccaatgaagctaccaaaagatggacttcaagcaaccaagtgcttatggaagtagcctgcacaaggacctcaacgcagctgtttccgctaggcaagttacatgctcgttacaagaggcctatggaaaggagggctccccaccccacggggacttcaaaggtttgggcctccttgttacctcaacggtttaagggaaacggggaacttgacttggcaagccaaaag

SEQ ID NO: 5288 - DNA, 1374 bp, Glycine max
  misc_feature (21)..(21): n is a, c, g, or t
  misc_feature (30)..(30): n is a, c, g, or t
  misc_feature (32)..(32): n is a, c, g, or t
  misc_feature (34)..(34): n is a, c, g, or t
  misc_feature (229)..(229): n is a, c, g, or t
  misc_feature (296)..(296): n is a, c, g, or t
  misc_feature (740)..(740): n is a, c, g, or t
  misc_feature (862)..(862): n is a, c, g, or t
  misc_feature (1167)..(1167): n is a, c, g, or t
  misc_feature (1177)..(1177): n is a, c, g, or t
  misc_feature (1196)..(1196): n is a, c, g, or t
  misc_feature (1275)..(1275): n is a, c, g, or t
  misc_feature (1297)..(1297): n is a, c, g, or t
  misc_feature (1311)..(1311): n is a, c, g, or t
  misc_feature (1323)..(1323): n is a, c, g, or t
  misc_feature (1343)..(1346): n is a, c, g, or t
  misc_feature (1365)..(1366): n is a, c, g, or t
  Peptide Sequence Number=SeqID_8774
  Probeset Number=SeqID_15067
cgcgggggagggttgacggtnttctgttgntnanatctatcaatctctgtatatctctgctagggcagcgggtgagttgggtgagagagatagaatggtattgtaagatagtgtgacggagagggtgaacggtacacatcacaacagaagacactcacacaatgaaagagctatgattcttaaaatattattcatcgtatatctgtggtgtgttggtgtgtggggtganatatattagtctttctgttacgagcatattagtatcgtcagcttagtcgtcttacctggtgtacgcnttgtgttgactaggcgcagagagagtatcaataaacagtaacctcacattcttctgtgcagtgtatgtgtaggtgagtgggtgggttggaagttattattaatacttcatgtctgccacccattctttgctcggccaatgatgtgtgtaatagttatcgtgtcttttaagagacggcaatggtgtgttcgagacggagatgagtacgtaagatgtttataatttgctatagacactcatcaatgggatcgggaccgtaaagaccatacaccatattatattcaatactcagtagtggtataggtgtagtattatcggtagagtattggttggaagttatgtgagtcatgtcggtgtcatgaaatagtagtggtggacgaccaatccaaatattcgaccatcacaagtacctctttaacctttcgtcgcctggtcatctttgtcntccgctctattttattataataagtagaattgagataaggttcgttgtgtcgctcttctaatgtgtgatgagtggttgtatgacactaattgatgttgattcagggtttgtcagttggccgnggggggtatgattggggttacccgatcacctcgtcctagagacctgcgacacgcccccggcggcgctggatggacgctcgagagagacaggtggaagacatatagagccggtccccatctatgttcgggctgtgtgttcttcgctttcgtgttgtgcggtaatggagaataaaggatttaggtagggagaagtaagaagcggaagagagagcgcgacggatgatgagaattcgctgcaggggtggtgtggggaggaaatagatattcatctctactctcttactctttatctctccccgcggggnggtgaatggnggagagagacatgagaagntagtaataataacatccatagcccgcctgccggctaggtgactctcctgtctctgtagcactaagggcggagcgcggantatataatgtggtggggctgcngtgcgcggcgggcnacgggatagagnaatgcacaaatccagcaatnnnncacacccaaccacacacanncccccaca

SEQ ID NO: 5289 - DNA, 2031 bp, Glycine max
  misc_feature (1889)..(2031): n is a, c, g, or t
  Probeset Number=SeqID_15068
cgtaatttgtgtccttctctctaatcccccttcaacattttcgcttcttctctttctcaaatcccgggcttcaaaatttcaagattatcactttaaagacagattttttttttttgacaaaaaatctgctcctacatagcatggtatacccttgctagcttcacagagatgtaatgtaaattctccaccaaacgcgtcgctgtttttgttgttgtccaaatgtataaaagatataatgagtggatgtcaggacactgagataaagaaaccaatgcattcttctatcttcattccttccctattactctttctctgctaaattatttaaattttctctctttctctaattaattccctttgttatcaaaatggctgtggctattcattctttattactcacttttcagttctcaacttctctaacaatggcttatccatttttttgttttcttctcacatcacaacaatgtctccattttctctcttttctcttcaccacattgctatcgttttctcggcgccgccgacgtgcgactcaccttcaaattctacaagaacacgtgtccacagttcagccagatcataacggcccccgtcacacgccagtcgaccgccacccccaccaccgcctcctccacgctccccctcttcccccactcctgcttcctcccccacggctctgacgtctccatctccctcccctccacacccttccccagcccggcgcctaacgccaacccgtccttcgccctcctcctcgacgccattactcacgccctcagtctctctcccgctcttgccctcgcttacccaaatggctccgcctctcgctgcttgccgtcttggacttcacttgagtgctgacaacaccttgagacctttatgaaaaaaccactatcttgaaggccctctctatctctgatgctactaaaccatgttacatttctcacaaaacaagattatcatcttcatcttcaggaataacaatgatcccacgagcaacaacaagttattggttacgtgtggaggatggaaatcaaaggagaggctgataccattccaactccggtagttattattgatcaagactctgatccagatgcaactgtggtcgagataacctttggtgatcgccttggggctcttcttgacactatgaatgcgttaaaaaacttggggctgaatgttgttaaggcaaatgtctttctaagattcttctggcaagcacaacaagttttccatacacaaaagctgattctgggaagaaaagtggaagattccggagttgttagaggcaatcctgtttgacaaatattgaataatatgattcagtatcacccggaatcaagcgcccaattagctctgggagcagcttttggacttgtgccttcaaaatgagcaggttgacgtgaagatagcaatcccaatataaactttctctgatgacggcccaaaacagttttttgttggtagagacaaatgctgatcggcctggattactggtggatcttgtaaagactattacggacattaacattggccgttgaatccgagagaatttgacactgaggggctcttggctaaggcaaagtttcatgtcaactacaaggataaagccctcatcaagcctctcgcagctggttcttgttaacagtttgtagctttttcttgaggcggcctgacactgaggaatccagttttgatgtgcaacacatcatatttgcctctggattataagcaccatggaattgtagaatgcatgtattcttttccatttggagaacaacatttgcagtacatagttaactcttaaaatttaataaacctgcatatcattgtaaagttaccattctcgatcaatttatttatttaacattgttgtttttttnnnnnnnnnnnnnnnnnnnnnnnnnnnnnnnnnnnnnnnnnnnnnnnnnnnnnnnnnnnnnnnnnnnnnnnnnnnnnnnnnnnnnnnnnnnnnnnnnnnnnnnnnnnnnnnnnnnnnnnnnnnnnnnnnnnnnnnnnnnnnnn

SEQ ID NO: 5290 - DNA, 579 bp, Glycine max
  Peptide Sequence Number=SeqID_8775
  Probeset Number=SeqID_15069
aaaaacggggattttactagctgatgtgccgacatgcagccatgcatgcatccgagacgtaaatgctgctgctgccgttgtgtgaaccggaagaccaggtttgactcaacagaccccgccgcgctcgggctgggcgccgtcaacaagacccgcgccctcggcctccccgaccagtgcggcgtcaagacgccgccgctcagcaactgcgcctctgcccccaccacgtcgccatcctccggcgcgccggcgggacagacgccaacatcctccggagtagggtccaagtcgacgccgacggcggacgtggggagcggcggcgcgtcactccacagctcggccggcatcatcgccggcttcatcgtgcccgcggtctacgccgtggccaccctgtgatctgattggcgggtcgacgcggcctcttcttcttgtcagtcagtcagtagtgatttcatttgagattatatatactggggttcggggatcgaattggcgcgcatacatgtgatatgtgaatgtgatccatggccgattccatgtgttgtaccgtgagcttatctacttgattcattgttgccttgc

SEQ ID NO: 5291 - DNA, 1476 bp, Glycine max
  misc_feature (1)..(1): n is a, c, g, or t
  misc_feature (5)..(5): n is a, c, g, or t
  misc_feature (15)..(15): n is a, c, g, or t
  misc_feature (57)..(57): n is a, c, g, or t
  misc_feature (72)..(72): n is a, c, g, or t
  misc_feature (465)..(472): n is a, c, g, or t
  misc_feature (479)..(479): n is a, c, g, or t
  misc_feature (481)..(482): n is a, c, g, or t
  misc_feature (484)..(486): n is a, c, g, or t
  misc_feature (488)..(495): n is a, c, g, or t
  misc_feature (497)..(498): n is a, c, g, or t
  misc_feature (510)..(511): n is a, c, g, or t
  misc_feature (518)..(522): n is a, c, g, or t
  misc_feature (526)..(554): n is a, c, g, or t
  misc_feature (560)..(564): n is a, c, g, or t
  misc_feature (581)..(582): n is a, c, g, or t
  misc_feature (1128)..(1128): n is a, c, g, or t
  misc_feature (1213)..(1213): n is a, c, g, or t
  misc_feature (1292)..(1292): n is a, c, g, or t
  Peptide Sequence Number=SeqID_8776
  Probeset Number=SeqID_15070
nagtntagtatctanctgctcctacctgtgtgtcggaatctaccacttgtacacacntctccgcgtagaagngaacaggctaactacataagtatgtgtacattaaggcgtacatatatgagtcgcgacaaagagaggataagtaatgtgcctacgccgattgtgcgagttcgcgttcctgtttagaaacgagactgttctatgtgtttccatgtcaggtagggcgccctgcataaattaggtttgtgcttttatgcactgtgtcgcgagtgatgtcactgaggagagctttattgcccagcatccctctgaataatctctgggcgtcaatataagttcttaaaaactaatgtactgttacaagattttttataccaatctgaactttttgtttgtcccgccaggcaatttagtataaagtgttcccaatttaaatagcccaggctctttgtagtgttgcctccnnnnnnnnaaagggngnngnnngnnnnnnnnannaaaaattcaagnnttttaannnnnccannnnnnnnnnnnnnnnnnnnnnnnnnnnngggagnnnnncctcgtctctccggttnnggtgggtatgcgctcacactgcgtctgcttgtgccgctgcgtccgtctgataggggagattattatcaacatgtattcatattactaccctcatatatctaatcactcagatctgtgcccaatttattctggccgcagcaagaagcatggatttactgagtgagttgtgaagaggagcgttatggattaggcgagtggtctagtagacaatgagttatatctgatgagagggccatattgacattcatttataaacaatgattgaaagtcttagtttgtcgtagggctgcaagaaccgtgcacgttcgatatctgtagcgcatgagtgaactattctttctgtttcatatctattgagatagagtagatcatatagatctcacgactctgacgcgtcgctgctagtgtggtatgaatgaatcacgaagatgctggctaattgttttatcccgaatgggcaatgcactgcagaccattaggatttagaggtgggttctctggcggtatttgttaaaatagaatattgttatcatgtattacttgtgncggtagacagatatatggacaagataataagaaaagtagctttaatttcatccttatggaaagtgcgtgctatgtgtcgctggtnggccaagaaatatagccaacgactagagggctgggagagtgagcaacgaggaagagagactagtgttctgccgttggtnggaacaatatacttatacaatagatgcaggctgcgcacaagaaacaatgtacacaacacagtggtttttgttagtcctgttttattattttttagtttgttaggtggtcgtatgtttggagtttatggtgttgcgcaatgtcttccgaaacgtgtctttccctcggtgttgcgatatttgtgtc

SEQ ID NO: 5292 - DNA, 1412 bp, Glycine max
  misc_feature (215)..(215): n is a, c, g, or t
  misc_feature (270)..(270): n is a, c, g, or t
  misc_feature (272)..(272): n is a, c, g, or t
  misc_feature (533)..(533): n is a, c, g, or t
  misc_feature (548)..(548): n is a, c, g, or t
  misc_feature (634)..(634): n is a, c, g, or t
  misc_feature (638)..(638): n is a, c, g, or t
  misc_feature (651)..(651): n is a, c, g, or t
  misc_feature (782)..(782): n is a, c, g, or t
  misc_feature (880)..(880): n is a, c, g, or t
  misc_feature (950)..(950): n is a, c, g, or t
  misc_feature (981)..(981): n is a, c, g, or t
  misc_feature (1042)..(1042): n is a, c, g, or t
  misc_feature (1063)..(1063): n is a, c, g, or t
  misc_feature (1080)..(1080): n is a, c, g, or t
  misc_feature (1090)..(1090): n is a, c, g, or t
  misc_feature (1231)..(1231): n is a, c, g, or t
  misc_feature (1247)..(1247): n is a, c, g, or t
  misc_feature (1258)..(1258): n is a, c, g, or t
  misc_feature (1284)..(1284): n is a, c, g, or t
  misc_feature (1286)..(1286): n is a, c, g, or t
  misc_feature (1291)..(1291): n is a, c, g, or t
  misc_feature (1346)..(1346): n is a, c, g, or t
  misc_feature (1381)..(1381): n is a, c, g, or t
  misc_feature (1412)..(1412): n is a, c, g, or t
  Probeset Number=SeqID_15071
tggtgagaaccggcacgcggcctccgcgccgtgctctgccacggcgcgcttcgacggcgcaccgtggcgcggcccccccccccctcacctaaaaggcctgccaagtcctccagtgggaggcgtcgcgcccggcctcgtctgccctcgggaactaccttcccaagtgccctccggagggcatgccccgcacaatggccttgtctagtgctcttctnctttctcatttaaatataacatatagtacgtatggagagcgtaggatatccaacncnctgaggtagctccatatcatgtcactggatgatatgctgatagtagcgcgcatctcgaaccgctcgcagtcactgtgccatgacgcaatggagtgtggctggccgacccagtgccctcgtcttagtctgctcgaatgtcagcactgtctgatgagtgtcagagtcaaagcctagcatagagcccctcgtggagtcggagtgaacatatagtttgttagtgaaccggaggcagttctctgcgcaccttgtccttctagagcnagggaagccaccccntcccgtgagcgtgttagcgagatcacgtccgtcggggagtggcgtcctttcttcctagagtggctggatgcgtggcgggactactncaangaggcggctcttntacatcgcgttgccagcacagcggccgtctcctcccctcttgaccgtgtgctttagggcgtctctagttagaccctcgcccggccggcggctaacacccctgttccggtgctaagacctatcgccacattncctcggagggagcgagctcccgcccctcgtttttatcttccgaggggcagtgcgaaaggtaagagacgcctgttagagcaaatagtggtgctgcagcnccccgctagtggtggtgtagacgcaccgcagaagccgctcccgcgttgtaaggcgcgctcgccgtatctngcttgtgtggagtaagtgttagagaagacgnagcacgggcgcgcagcacagatcactccaacacgcgaaatgagcaggataacgcgccccgngtacgcgctccgcaggagggncgagcgttccctatatncctgctcggncaacgcacgcgcgcgaatgtgccatccgccgagtgcggagtctcttagatgatatcaggccgctcctcacttctcgttggcgcgggatgagtgactgcgtgcgtgggtgcgcgaacgagaggtgctcatcccagcgagagntgtggtgagggtgttngctctcgctgncgtgtatgtgtcgtgctctcgtcagntntgtangatacgtcgcgagatgagtgtgtgtgtgagtatagaggcagacatgatcgagtgntaccgtctgcatgcgaagagcactggtagtgagcngtcactcttactcggtcgacatatacgtctn

SEQ ID NO: 5293 - DNA, 1785 bp, Glycine max
  misc_feature (1)..(1): n is a, c, g, or t
  misc_feature (42)..(42): n is a, c, g, or t
  misc_feature (56)..(56): n is a, c, g, or t
  misc_feature (116)..(116): n is a, c, g, or t
  misc_feature (215)..(215): n is a, c, g, or t
  misc_feature (217)..(217): n is a, c, g, or t
  misc_feature (224)..(224): n is a, c, g, or t
  misc_feature (268)..(268): n is a, c, g, or t
  misc_feature (354)..(354): n is a, c, g, or t
  misc_feature (356)..(356): n is a, c, g, or t
  misc_feature (383)..(383): n is a, c, g, or t
  misc_feature (449)..(449): n is a, c, g, or t
  misc_feature (466)..(466): n is a, c, g, or t
  misc_feature (481)..(481): n is a, c, g, or t
  misc_feature (527)..(527): n is a, c, g, or t
  misc_feature (629)..(629): n is a, c, g, or t
  misc_feature (771)..(771): n is a, c, g, or t
  misc_feature (773)..(773): n is a, c, g, or t
  misc_feature (796)..(796): n is a, c, g, or t
  misc_feature (803)..(803): n is a, c, g, or t
  misc_feature (970)..(970): n is a, c, g, or t
  misc_feature (1008)..(1008): n is a, c, g, or t
  misc_feature (1014)..(1014): n is a, c, g, or t
  misc_feature (1020)..(1020): n is a, c, g, or t
  misc_feature (1127)..(1127): n is a, c, g, or t
  misc_feature (1134)..(1134): n is a, c, g, or t
  misc_feature (1170)..(1170): n is a, c, g, or t
  misc_feature (1173)..(1173): n is a, c, g, or t
  misc_feature (1293)..(1293): n is a, c, g, or t
  misc_feature (1301)..(1301): n is a, c, g, or t
  misc_feature (1303)..(1303): n is a, c, g, or t
  misc_feature (1305)..(1305): n is a, c, g, or t
  misc_feature (1319)..(1319): n is a, c, g, or t
  misc_feature (1390)..(1390): n is a, c, g, or t
  misc_feature (1466)..(1466): n is a, c, g, or t
  misc_feature (1503)..(1504): n is a, c, g, or t
  misc_feature (1513)..(1513): n is a, c, g, or t
  misc_feature (1516)..(1516): n is a, c, g, or t
  misc_feature (1520)..(1520): n is a, c, g, or t
  misc_feature (1536)..(1536): n is a, c, g, or t
  misc_feature (1539)..(1539): n is a, c, g, or t
  misc_feature (1600)..(1601): n is a, c, g, or t
  misc_feature (1608)..(1608): n is a, c, g, or t
  misc_feature (1610)..(1610): n is a, c, g, or t
  misc_feature (1682)..(1682): n is a, c, g, or t
  misc_feature (1686)..(1686): n is a, c, g, or t
  misc_feature (1695)..(1695): n is a, c, g, or t
  misc_feature (1706)..(1706): n is a, c, g, or t
  misc_feature (1713)..(1714): n is a, c, g, or t
  misc_feature (1716)..(1719): n is a, c, g, or t
  misc_feature (1724)..(1724): n is a, c, g, or t
  misc_feature (1743)..(1750): n is a, c, g, or t
  misc_feature (1752)..(1752): n is a, c, g, or t
  misc_feature (1770)..(1770): n is a, c, g, or t
  Peptide Sequence Number=SeqID_8784
  Probeset Number=SeqID_15072
ntcgcagagtcctgtcgccgtgtacctctgtgcgctcgtcgntccgccagcgtcgntacatcatatatcatccgagctgtctgtcgtcacacgatcttctatacgttcgcgctgtncgccgaggtgcgcgcagcacgcgcgctgcgcgctggcgtgacgtcatcagatctatcatccgcatagagtcacgggtacctgagcgtctttccgatcgntngtggggngcggtcgcggagcgcattgtcgtaatcagcgcggcggcgccagntcttcgtgtgcggtcgtcaccgcatctttctatttctcttcgcgccacgatactttttctcttagtctccgcgtgtgtatatcatntnctaccagccgtcgcatcacgtcactanccacagcgcggcgcgcgtagtctgttatcctctcgacgtcagcgtgcggtctcatctatctcgcangtgctgcgcgtgcgctngctgtacgcagtctnggccatcgtcctatgtctcttcgcacacagtcagcgcgcgcacgcnccacatcggcactcactcacactgacctgtcagccggatcagtacgactggtagcgcgcgcgtggcagccgcactcatgtcatatcacagcgcgacacatancacctatctaggactcgcatttctatcataatctcgtcgtctcgtcagcacaccatcgttcatctctctcttacacaccatcctctctctcctcgtctttctcgtgtcaccgcgctactatatgctcatccagatctccacngncgtgccttcgtgtgtcgtacacncgtctgngtcatggtcgttcagttcgtacgattgctgtttcctaccttgatcgcgcgcggctgcgtctagcagttgtatagacggattacaggtgtctgatatatattatgtctcgccactgttctatatcattctatcacgtggcacttcttcatctcacagtcactacccgngcctctctcgccgtcacctctctgccgcctctctcatngtctcncgatcntgactttcattgtgtagatgactggtcttaataatacatgatgggttagatcggttggttactgacgtcgaggttggagatatactaagaatattctagaacaacgngcgtgcntgtgcatgagtgactcgccgcgtctgatcattgtcnctngttgctctatctctttgtagaaagtcagtttcgtctgcgctatagcatgtatgatagacatgagcgcggagcttatacatactacacctatggcctgatctcactactcactccacctantctccgcncntnccacacctattcanttcgcagattacatgctccctccctctacgactggcgaacgctacttcgcgtgagtattatcatactatanctcacatatctgtcatataccattcccatccgtataatccataccgcgttgcgtgcgcgatcatgcactagcagantgtagtgtatgtagacgggttgcagagtagaggcganncctccgacncgncatncgaatccgcgcatatntanactcctaacttattatgatgcgcgaggtgttcgacgcgcgtcacgcgtactgctcgtgtgnnttgcgcncncctgcacagcgctcgcatctagcagcaactctcgatgtagcgcatcatcagaggcgctccagaagcgacacnatantccgctcantctcgcatcantgttgtnngnnnngtgtnctcacacacccagagggtnnnnnnnngngggggggggggcggctcnctccgcgacaaaccc

SEQ ID NO: 5294 - DNA, 1904 bp, Glycine max
  misc_feature (1)..(1): n is a, c, g, or t
  misc_feature (38)..(38): n is a, c, g, or t
  misc_feature (61)..(61): n is a, c, g, or t
  misc_feature (69)..(69): n is a, c, g, or t
  misc_feature (77)..(77): n is a, c, g, or t
  misc_feature (81)..(81): n is a, c, g, or t
  misc_feature (94)..(94): n is a, c, g, or t
  misc_feature (100)..(100): n is a, c, g, or t
  misc_feature (102)..(102): n is a, c, g, or t
  misc_feature (104)..(104): n is a, c, g, or t
  misc_feature (113)..(113): n is a, c, g, or t
  misc_feature (115)..(115): n is a, c, g, or t
  misc_feature (119)..(119): n is a, c, g, or t
  misc_feature (146)..(146): n is a, c, g, or t
  misc_feature (148)..(148): n is a, c, g, or t
  misc_feature (154)..(154): n is a, c, g, or t
  misc_feature (163)..(163): n is a, c, g, or t
  misc_feature (171)..(171): n is a, c, g, or t
  misc_feature (173)..(173): n is a, c, g, or t
  misc_feature (175)..(175): n is a, c, g, or t
  misc_feature (212)..(212): n is a, c, g, or t
  misc_feature (235)..(235): n is a, c, g, or t
  misc_feature (276)..(276): n is a, c, g, or t
  misc_feature (282)..(282): n is a, c, g, or t
  misc_feature (286)..(286): n is a, c, g, or t
  misc_feature (288)..(288): n is a, c, g, or t
  misc_feature (290)..(290): n is a, c, g, or t
  misc_feature (292)..(292): n is a, c, g, or t
  misc_feature (295)..(295): n is a, c, g, or t
  misc_feature (354)..(354): n is a, c, g, or t
  misc_feature (358)..(358): n is a, c, g, or t
  misc_feature (360)..(360): n is a, c, g, or t
  misc_feature (393)..(393): n is a, c, g, or t
  misc_feature (414)..(414): n is a, c, g, or t
  misc_feature (441)..(441): n is a, c, g, or t
  misc_feature (473)..(473): n is a, c, g, or t
  misc_feature (504)..(504): n is a, c, g, or t
  misc_feature (527)..(527): n is a, c, g, or t
  misc_feature (671)..(671): n is a, c, g, or t
  misc_feature (768)..(768): n is a, c, g, or t
  misc_feature (943)..(943): n is a, c, g, or t
  misc_feature (997)..(997): n is a, c, g, or t
  misc_feature (1032)..(1032): n is a, c, g, or t
  misc_feature (1085)..(1085): n is a, c, g, or t
  misc_feature (1104)..(1104): n is a, c, g, or t
  misc_feature (1292)..(1292): n is a, c, g, or t
  misc_feature (1517)..(1517): n is a, c, g, or t
  misc_feature (1541)..(1541): n is a, c, g, or t
  misc_feature (1569)..(1569): n is a, c, g, or t
  misc_feature (1584)..(1584): n is a, c, g, or t
  misc_feature (1626)..(1626): n is a, c, g, or t
  misc_feature (1628)..(1628): n is a, c, g, or t
  misc_feature (1646)..(1646): n is a, c, g, or t
  misc_feature (1661)..(1661): n is a, c, g, or t
  misc_feature (1691)..(1691): n is a, c, g, or t
  misc_feature (1725)..(1725): n is a, c, g, or t
  misc_feature (1727)..(1727): n is a, c, g, or t
  misc_feature (1765)..(1765): n is a, c, g, or t
  misc_feature (1784)..(1784): n is a, c, g, or t
  misc_feature (1803)..(1803): n is a, c, g, or t
  misc_feature (1805)..(1805): n is a, c, g, or t
  misc_feature (1812)..(1812): n is a, c, g, or t
  misc_feature (1814)..(1815): n is a, c, g, or t
  misc_feature (1818)..(1818): n is a, c, g, or t
  misc_feature (1862)..(1862): n is a, c, g, or t
  misc_feature (1869)..(1869): n is a, c, g, or t
  misc_feature (1904)..(1904): n is a, c, g, or t
  Probeset Number=SeqID_15073
nccctgctgatgtgttactcattgtaatagttatgttntgatagagtagcatgcatacagnctggtagntgactatntgantctactatctagnagctcntnantcatgcctntntaangacataagtcactctcacattgcactntnctacanatatgcgtntctgtaanananatatatatatagagacagagatactctcaaactctgnatgtatctatatagtcatcagtntctatgtatgactgcatctatgtatgcatatatatatactntcactntctntntntngtntatatagtatatatatatgtctctgatacatatctctctatatatatctatatcgtccntctntntctctcatatatttctctctgtctctatatcanaaactcacatcctcagagctntctactatatctataactgtcactctncctcgctctcacatgtgtatcgatctaacaantgtctcatctctttccctatatcacataatnctctctcactctaaccctctcgntgtcaaactcagtgccatataactaactctacagctacacctccatgcaagtctctcactcccgcaacaatctgagagagcgaatccatcacaataagtctccatcatcccatccgcgtagctcgactcgccaaccaatcctcnacgcacgtcgcgctatatcctcgccgcactacattcgccaacaacctcccgcgcaacacacagtccctccgtcgtcgcacatactagaacttcaccnggcgctaacctatatggcacgatatagaaccgctggacgaacaaacgtcgtccgaaacaacattttcgtggcgcacacctgctgattatgtctcaatctcgctctgtcgcactaccacacatcgtgcgcccatcaccccgatcgtctccgaacacgcagcatagcgcggagcacnacatcccgcttgagcactctctcaaaacacataccacacacacaatataccgcnctcaactcgccacggatctgagacgctctggagcnctgactaccacacacactacacacagcgaaggagtgtgtggccatcacacgtngtactcatcgccgacacanacatctaccttctatctcttctacatgacgcagacgacgacacacggatacacacaagctctcacacaccatcagtctccactctcacatcacaacccgcgcgcctctcccacgcaatagcattactcactacaccacaccacacgcgctcatcatttttctactcatctacggtgatatacaaacanacacacccagcggcgcgatctcatctcagcacatcctcctcacaccactcctccacacacactctctgcgctacgtagacagacagaccgcacacacacatcatacatcccgccactattatatgatgcgtcgtatacctagtatctcagacgcactccgacagcataaataacatctcacacacagagacagcacggccccatctctctcactcacgctatcantaactactcatgacagcaatctantccgcacataacacacacactactactntcgcgcacacaactncactctactgctgacacatcgctctgcacttacgacatagantncgtcaataacatactctncactcaaccatgcgnccacagcgtacaccactaactgctgtattnctcgtcggccacacaatacaatcactcgtcgccncncgtcgacgcaataagatcatctatcttgtgctcatgtngctaaataacacacaccgncgcgcacacgacctctttncntctctcncnntantagcaacacacaacacgatgactccgcagcacctcaacgacatnagcgccngccagacatcacagccgcactactcaccatactan

SEQ ID NO: 5295 - DNA, 1644 bp, Glycine max
  misc_feature (1)..(2): n is a, c, g, or t
  misc_feature (18)..(22): n is a, c, g, or t
  misc_feature (31)..(31): n is a, c, g, or t
  misc_feature (33)..(33): n is a, c, g, or t
  misc_feature (60)..(60): n is a, c, g, or t
  misc_feature (69)..(69): n is a, c, g, or t
  misc_feature (100)..(100): n is a, c, g, or t
  misc_feature (130)..(130): n is a, c, g, or t
  misc_feature (135)..(136): n is a, c, g, or t
  misc_feature (232)..(232): n is a, c, g, or t
  misc_feature (278)..(278): n is a, c, g, or t
  misc_feature (345)..(345): n is a, c, g, or t
  misc_feature (360)..(360): n is a, c, g, or t
  misc_feature (447)..(447): n is a, c, g, or t
  misc_feature (565)..(565): n is a, c, g, or t
  misc_feature (568)..(568): n is a, c, g, or t
  misc_feature (622)..(622): n is a, c, g, or t
  misc_feature (642)..(642): n is a, c, g, or t
  misc_feature (717)..(717): n is a, c, g, or t
  misc_feature (998)..(998): n is a, c, g, or t
  misc_feature (1047)..(1047): n is a, c, g, or t
  misc_feature (1063)..(1063): n is a, c, g, or t
  misc_feature (1145)..(1145): n is a, c, g, or t
  misc_feature (1213)..(1213): n is a, c, g, or t
  misc_feature (1252)..(1252): n is a, c, g, or t
  misc_feature (1306)..(1306): n is a, c, g, or t
  misc_feature (1332)..(1332): n is a, c, g, or t
  misc_feature (1404)..(1404): n is a, c, g, or t
  misc_feature (1499)..(1499): n is a, c, g, or t
  misc_feature (1501)..(1501): n is a, c, g, or t
  misc_feature (1528)..(1528): n is a, c, g, or t
  misc_feature (1530)..(1530): n is a, c, g, or t
  misc_feature (1644)..(1644): n is a, c, g, or t
  Peptide Sequence Number=SeqID_8785
  Probeset Number=SeqID_15074
nnttttttttttttggannnnntttgttggntngccgtgctgcgtacttgcgtgctcgcngctcacatnatggatggtagtgtttcctgtacctgtaatntttggttgtatactccccccccccacggangccgnncgccccccacatggcgagcggcagatctaccgccgttgggtgagaaagggagagagagccgctccggcggagctacgagatgggagggcgcgcggnagggggttgtgtgggaggaggtgtatggttgcttactgttagtaantatagttgctgtctttcggtcttctctccctgtcgtcgttaggattatgacgtaatgaataatgagngagagacgtgcgggngatactcttcttatctccagacttctttcaatcatatgtatagcagagagagtgtgcgtcgagcgatcactactaccacatacatangagcagctgctagaactatgatatgcgcggcgtcacacatctatctcatcttcttatgtcatctcatatcatgctccgcttgctacactatcactcgtttcccttatctgttatgatnatntatgtactatgatagactatatccctttctccgctcggtcctattctcccgttncatgcttttgcgtctcaccnccgttcgtataatcgatgctgcttgctctttgtgtgatgctctcttctgctataagtagtatgggtgtgtaggtntgtattgctttcactagatgcgctctagcatgtctcgtcatacacatatatctctcgcgcacagaggcgacgagtagtactgtatatcgtgtacgacgtagtagacacgtccgaccgctcacagctcagtaaggtagatagatattcgcagtgtgtgaggcgttggtaatatatgagcatttgtcgtagcacgtgatctgcgttgtggctacatgatgtcgtcgcgtacaccgctgcgtcttgctcgcctgcgtcgtctggacgctcatcgtctagttttncggtgctactccgtatcgcttctatgttattcgtgtagtagagtgtatnagatttagtatagagngagacactactattacagtcatctcaatatccagtacgatctcgcttgtcatgcgcacgcatcgacgtcaccgcacagcatnctcagcgtgtgtagtatgtatgcgcgtatcatgtactcaatatatatgatatgtctacctcgcgccancgactcgactcgactctctgatatatgtgttgtgtgtantctacgtgcgcgctcgctgcctgcccacatgtaagtgcgctgctcctagagtgngtgatctttctctcttacgcgtctcntatgtcgcatacaatccaccacgccagtcgatgcgcgatagtggagatggctctattgtaattcatgctgangtcacgagcgcgatcgagcgtacagcagagagtctaaccacaactcattcacacatgtgtcacgtcttcgttacagtgtgctgtagaccctgtcncntgtctatgtctgctactctactatganantgtgtgactagatgactagcgtctagtgagtccgcatcgccgcgctcccactagacctctatcataggccgtcattctcactggtctcgcagatctctatcttcactcgtgctn

SEQ ID NO: 5296 - DNA, 484 bp, Glycine max
  Probeset Number=SeqID_15075
ctggttggaccaactcgcgctccatctcggaaagcccgtacatcgacacggcgcggcggagccacaggctctcgccgggctcgcggcggcggcggcggcggcgcgcggagcagctcgctggcgagcgcgcctgcgcaccacccgcatgagggggaggccacacgacggcgggatccgccgcgccgtcaagagagactgctgaaagggaacagttcgatccaaaagttttcacagatgcaaattccttgatgccatagacattggatgcaggtcaacagcaacaatagcgtcgtcgctgtctgttaaggaacaatcccaagaggcgcactgcaaacaaggatacagttcaggaaaaacatctctgcaccaaccaggagaatatcagtgggagcagtgtccagaaaggcggccgcttatggctcggcggcatataggctccagacgacgcgctctcatctcgctcactggtcgttggtcgatttat

SEQ ID NO: 5297 - DNA, 1840 bp, Glycine max
  misc_feature (13)..(13): n is a, c, g, or t
  misc_feature (31)..(31): n is a, c, g, or t
  misc_feature (51)..(51): n is a, c, g, or t
  misc_feature (777)..(777): n is a, c, g, or t
  misc_feature (844)..(844): n is a, c, g, or t
  misc_feature (887)..(887): n is a, c, g, or t
  misc_feature (919)..(919): n is a, c, g, or t
  misc_feature (1113)..(1113): n is a, c, g, or t
  misc_feature (1127)..(1127): n is a, c, g, or t
  misc_feature (1132)..(1132): n is a, c, g, or t
  misc_feature (1258)..(1258): n is a, c, g, or t
  misc_feature (1270)..(1270): n is a, c, g, or t
  misc_feature (1372)..(1372): n is a, c, g, or t
  misc_feature (1406)..(1406): n is a, c, g, or t
  misc_feature (1426)..(1426): n is a, c, g, or t
  misc_feature (1457)..(1457): n is a, c, g, or t
  misc_feature (1459)..(1459): n is a, c, g, or t
  misc_feature (1501)..(1501): n is a, c, g, or t
  misc_feature (1541)..(1541): n is a, c, g, or t
  misc_feature (1565)..(1565): n is a, c, g, or t
  misc_feature (1573)..(1573): n is a, c, g, or t
  misc_feature (1579)..(1579): n is a, c, g, or t
  misc_feature (1598)..(1598): n is a, c, g, or t
  misc_feature (1640)..(1640): n is a, c, g, or t
  misc_feature (1722)..(1722): n is a, c, g, or t
  misc_feature (1732)..(1733): n is a, c, g, or t
  misc_feature (1738)..(1738): n is a, c, g, or t
  misc_feature (1780)..(1780): n is a, c, g, or t
  misc_feature (1792)..(1792): n is a, c, g, or t
  misc_feature (1796)..(1796): n is a, c, g, or t
  misc_feature (1826)..(1826): n is a, c, g, or t
  misc_feature (1840)..(1840): n is a, c, g, or t
  Peptide Sequence Number=SeqID_8786
  Probeset Number=SeqID_15076
tcccccagattanctctcacgtctatttatnccctataacatatacagaangaacaaggcagagattagaggactaaggaggagccccgctgccgcaggaggtgcggaggttactccgacacggaggcgcttcgctctcaccctgcttcatcttacgacagaaagaaaacgagagtaacgtctcatagacgatctcagacccgtggcgcgcgcgctcgatactttaatctgatatatagagctagttgcgccgtcgcttctgtcattttgtttatgtataaggcatcctcgattttgatcatacttatgacatggtactgtacatcagcggcacgacctattgtacgcagtcacagcatatattgtccagctccttgttctatgtgctcgtgtgacaataagtacgcacggcgcttctatgaaggtgcttagaattaacgagattatgacagttatgttactgtgattgtatcgtgttcgattatattcatttataactaccactggtgtcgaggtgcatgctcgcgacatcttatatacacatttgtatctcgtcttggtagcgcgccccttaccactacctctctctcacttcatcgcctggttttcttcaccgcacatctctctgagctccatgttagggattacctcgactctgttgttctgcgtgtgtgatttgttggtgttgtcgctctcgcacgattacgctatttcgacgtgcacgttgcgatgtcttaagtggttatatatgaggtactagtgcacgatacggtcgtngcgacgtctagtcatctatgaccatattatgatctgtaacacgtatcatagagatgatctcgatctngatcgatgaccatctatgcggcttctatatcagaattatgagntatatgctctgcgcagtaagtatgcgatgtgntgtgtacgctgatctcttatgtatcagacgatatcttaggcgtagagtgtgcgtcttctaacacaaccctcgacgcctacgccgaggatagtgatgatgcgtcgatcggcgcgatatcggatcctacgatgatatctctgtgattgctacattatgatcgttgatgtactgtcttgcgcgccacgagacgcgcntatacagcatctcntgcgncgtaccacgtctcatgtattgcacatgcgacgtgacataacaatagattagtgcatgagtgaatcggacgagtagctcatgtgtgttagttaagtgcgagtcgaggtcgacacccactgcgcgcgnagctggttagtntacgacgatagtgtatgcgtgctcgcgagcgcagatatagtatcgagtggaatacatcatgatcatgactgcgtccacgcagacgagatggatcaagagaancgaatggtatcagctatgctccgatctgctcacnctatggcgcgtactgcactnatcacgctgagagacctcagatgatgaagananacgttgacacgctagagtagtcgaatcgtacattatagagtnatatgatatatcgagatacaaggatccggtctccgagtangacgcgacggagtgatgatgtganactatgancaggancagcagaacgatgagagcngtctgcatcgatacgtgctctcaactgacagatagcgtgtanctgatcgagatcaacatgtgactgctgcagctggaactcatctatgagatcagcgagtatgatcgaggctgtgagtatctantcataacganngcgancaacgttgatcgcatgactgctcgacggctatgaagtatganaggacgacgtangatnattgcgtgacgcattgacgtgggatgacgnattcgagtatgaan

SEQ ID NO: 5298 - DNA, 384 bp, Glycine max
  misc_feature (298)..(298): n is a, c, g, or t
  misc_feature (301)..(301): n is a, c, g, or t
  misc_feature (330)..(330): n is a, c, g, or t
  Probeset Number=SeqID_15077
gaccactccaaaccctcgaatccaagccgcctccgcctccgcctccccgcggatctcccatccatccatggccgccgccgccccggcccgcaggctgctcctgcgcctgcgcctccccctccccctctgcgacccgccgccggcccccgtcccgctcctcccccacctgctgacgccgcacctccacccgcagccaccgccgccggcgcctccgctcccggacccgaagctccgggacctcctcttcgccttccaccccgccgtgcacctatacccgtccctcgtcgacgtcccgagnggngggccaggcgactgcgacgcgcgcgaggncgtaggggaggccaaggagccggaggtgtgggcggacagcgtcaagaagaagcg

SEQ ID NO: 5299 - DNA, 1408 bp, Glycine max
  misc_feature (80)..(80): n is a, c, g, or t
  misc_feature (211)..(211): n is a, c, g, or t
  misc_feature (383)..(383): n is a, c, g, or t
  misc_feature (515)..(515): n is a, c, g, or t
  Peptide Sequence Number=SeqID_8787
  Probeset Number=SeqID_15078
cgcggctgattgtagccgaatggtgttcgttatatgtgtgtgagatgaggtgttgaattatctccctcatccgtgactcnctcgacactgcgagagagtgattgtatacacattgtttcgcggcgcgcgaggcgtatataattctgctcaatgtagtaattacggcgcgttgtacacaagacgcgtgagcgtatgtgttatgtgtttattngcataattttcgcgcctaccaccgtgacggtctatatatattcatctgtgtgtaacgaaccacgctcgagtcgaatgaggtgtgttaaccactcattaatgtgttttctctatatttatgacgcgagtgcggctcgaatgagagtctgataattatatacaactgtgtgcancgagctcgcctgcggcttgttttattttctgcagggtgcgcggtttattatatatttcagtcatatcaccgcatgcaccactagcttagtctgattggatgtgctattacaggtcgccgagttggtgttggnccacgcattggtgagctagtgtattgctatgggacataatattacagccgtgtgcggtattgtgggcctgttgcctccgtgagcctacgttgagttctgtcacatactggtgcctgtctaacaatagggtactgtagaagagagtgtggggcgttgtagtggttcataaatactggctgcgtggttgtacaacgttgtttattagcgtgggtggattttattaagatcgcaacgtgtggtgtgttatagggggaggaggcgtgtgtttatattagcaaattgtggtctgtattaaaagcggctctgccatttccatatcgcctcgagtgttattttatttggggggcgccggccattattgtctatatggtgctatataactgggcggggagagcatagctacgttaatttttggggccagaccttattgtagtcaggggattttatttacgttggggctggacggttgatcggagtatactattcaggctggcttggttattgatttatggtggtttttcggagggggggcgggcgagcccgcgggggtttttatgaggtggggttttcttattttatatgtagggtgtgttatcatcatatgagggggagggtttgtgtatttttatatatgcggttgtgtggagagggtggcgcaatatcacaataaatggcacaatataggggggggggcctatgtgatcatcttgcgggcttataggataatgcatcgcgcgggtgggtgggaggggaatagtagattcatttcagctccgtggggatcgcatctagttatggtatcggcgcgcctatcggtgcgaaacacccgacaagggcgggggggatacgggggggaaagcgccggggcatttgtggggggagtgggggggcat

SEQ ID NO: 5300 - DNA, 370 bp, Glycine max
  Probeset Number=SeqID_15079
ttggtcttgaggcgtaatcctctacatacttcttgctggttatttacccttccaggatcacaacctggtggccttgctcaataaaatttaccgctgcgacttcaagtgtccgccggggttctcctccgaggcgcagaggctcatcaccaagctcctctaccccatcccgatcacgcgaatctcaatttcaaaaatcatggactcgtcgatgttcataaaacccgtgccgaataacttgatgggaaagaaaatagaggaatcggatctggaggataatattgatcactatgatcatgacgtcgctactacaatgaatgcttttcacatcatttcactctcggacgggctcaatctctcatcgtgtttccag

SEQ ID NO: 5301 - DNA, 1537 bp, Glycine max
  misc_feature (35)..(38): n is a, c, g, or t
  misc_feature (43)..(43): n is a, c, g, or t
  misc_feature (48)..(48): n is a, c, g, or t
  misc_feature (167)..(167): n is a, c, g, or t
  misc_feature (185)..(185): n is a, c, g, or t
  misc_feature (510)..(510): n is a, c, g, or t
  misc_feature (654)..(654): n is a, c, g, or t
  misc_feature (709)..(709): n is a, c, g, or t
  misc_feature (751)..(751): n is a, c, g, or t
  misc_feature (759)..(761): n is a, c, g, or t
  misc_feature (775)..(776): n is a, c, g, or t
  misc_feature (902)..(903): n is a, c, g, or t
  misc_feature (915)..(915): n is a, c, g, or t
  misc_feature (950)..(950): n is a, c, g, or t
  misc_feature (973)..(973): n is a, c, g, or t
  misc_feature (979)..(979): n is a, c, g, or t
  misc_feature (1013)..(1013): n is a, c, g, or t
  misc_feature (1084)..(1084): n is a, c, g, or t
  misc_feature (1092)..(1092): n is a, c, g, or t
  misc_feature (1095)..(1095): n is a, c, g, or t
  misc_feature (1118)..(1118): n is a, c, g, or t
  misc_feature (1199)..(1199): n is a, c, g, or t
  misc_feature (1257)..(1257): n is a, c, g, or t
  misc_feature (1264)..(1264): n is a, c, g, or t
  misc_feature (1277)..(1277): n is a, c, g, or t
  misc_feature (1339)..(1339): n is a, c, g, or t
  misc_feature (1369)..(1369): n is a, c, g, or t
  misc_feature (1420)..(1420): n is a, c, g, or t
  misc_feature (1512)..(1512): n is a, c, g, or t
  Peptide Sequence Number=SeqID_8796
  Probeset Number=SeqID_15080
ttgtattgttctcctccttctggtttgtggttgannnnacacnaatanccagtcacacgatgtaattctatcgagtatgttgtgaatgtaaggatgataatagggtgagtgcgggcagttatagagagtaaacgaagatcaccgctagaccgtatgccgctgaacanctaagcgccatcccactngcgtgactgttgtggtgggtaggagtatctctatgatgagaatagagaggacatggcgcgcgtgatgctggtctggggcgctttatttaggatgatctgcctgcggatcgtatgagcttcgccgtgaggatctctatgactatctggcatagaattaacgagtataatatacgatatctaacattaagttcgctgtcaaccaaggagtgacacagactgaatcgccgtagagacagtatatatagatttgcatcatttgtcgtgttttcatcaagtaatagacaagagagatgagactgcggatgtgagtgttgtagcgtcgtgngtctgtgtgatcgtggagtgagcggtgtcttgctactgcacagtcggttgacggtggatcgtgactgtggtgttggtcatatagttcgagtgtcggcgtctatgatgacctagtgtatagactcattctgtgttgcttgcgatnaaaatgacacaatgtaagatattagtgtagtgagtatatgtgtgatgagtgtatntacgagtatatttacatatatagatattatatatagagaaangataaaannnaaaataaaaaaaannaacacaacacacccacaccacactcaccatgtacgtgagtgagatatgatatatagatattgtcagatagttattaatatataatcgtgagaagacaaccccacccactcacgcaccacaccaccnncacacacaatantgtagaagatgtagaatatatcgattgatgattgngcgtagatattgatatgatgtgnagtgtngagtgtgtttgtctgctgtagaactccggtcacnactatcgtatccaccatgtatcacgaacgacacagttcgtgatactatgtagcttctcactgagatgtgtnctgagcgncangtgagatcatgctgtcgatccgncgcgcatcgctctgacgaggtaatctattgtacagtgaatgtggatgtatagattgagtatattgacgtagcgaatgcatnatgaggactattgcgtatagttagctctcgatcgcgtatgatgacgctctaagagctnagtacgntgtgatcgagagncgcactgaggttcgagaatactgtcatcgacgtgcgacacagttatgagacaatacgtatangtatatgatctgacaagctcgatgtcgtgngtcacatgctgtaagaaactgtatcgcgtgctcatgtgtgtcttgtaagtnatcatgacgtatatagactgacgtatgctagcggctattcaaagaatgcgatgagttcatactcaccacgatgtgcacgctcctgagtcctngatcgatactatcggctacccacgg

SEQ ID NO: 5302 - DNA, 474 bp, Glycine max
  Probeset Number=SeqID_15081
tgcacgggtgaaggtcagaaaatcatatttaacacatttgttcttttggtgacaccggtaatggaacccaaaggcttgaagcttcaacaagccgtggattttgtgatcaagccccgtctcgattcagggatggctggtctcattgctgtgtccaacgttcgggaagtggcttatggtttcaattccaatggcatgtttaggggctgtgccgctgaaaatggcttcatggaggtcggaatctgggaatagcttcattattttccttcatggttgtttcgacgcagctttggcacttctgagccatgttcccctgtagtgcagggtctttctgctggggccccgtttagataacatatggtattccttgtttctaggtatcacatacccctgtgaaaccatactatggtaactttgttgtctatctcttaaataaatttcgtcaaaaaaaaaatctcaaagggcgtccgcagatta

SEQ ID NO: 5303 - DNA, 2236 bp, Glycine max
  misc_feature (15)..(15): n is a, c, g, or t
  misc_feature (45)..(45): n is a, c, g, or t
  misc_feature (50)..(50): n is a, c, g, or t
  misc_feature (52)..(52): n is a, c, g, or t
  misc_feature (68)..(68): n is a, c, g, or t
  misc_feature (73)..(73): n is a, c, g, or t
  misc_feature (76)..(76): n is a, c, g, or t
  misc_feature (87)..(89): n is a, c, g, or t
  misc_feature (99)..(99): n is a, c, g, or t
  misc_feature (153)..(153): n is a, c, g, or t
  misc_feature (232)..(232): n is a, c, g, or t
  misc_feature (234)..(234): n is a, c, g, or t
  misc_feature (255)..(255): n is a, c, g, or t
  misc_feature (260)..(260): n is a, c, g, or t
  misc_feature (272)..(272): n is a, c, g, or t
  misc_feature (277)..(277): n is a, c, g, or t
  misc_feature (289)..(289): n is a, c, g, or t
  misc_feature (294)..(294): n is a, c, g, or t
  misc_feature (301)..(301): n is a, c, g, or t
  misc_feature (304)..(304): n is a, c, g, or t
  misc_feature (329)..(329): n is a, c, g, or t
  misc_feature (334)..(334): n is a, c, g, or t
  misc_feature (339)..(339): n is a, c, g, or t
  misc_feature (344)..(345): n is a, c, g, or t
  misc_feature (361)..(361): n is a, c, g, or t
  misc_feature (366)..(366): n is a, c, g, or t
  misc_feature (374)..(374): n is a, c, g, or t
  misc_feature (377)..(377): n is a, c, g, or t
  misc_feature (381)..(381): n is a, c, g, or t
  misc_feature (396)..(396): n is a, c, g, or t
  misc_feature (425)..(425): n is a, c, g, or t
  misc_feature (432)..(432): n is a, c, g, or t
  misc_feature (462)..(462): n is a, c, g, or t
  misc_feature (490)..(490): n is a, c, g, or t
  misc_feature (559)..(559): n is a, c, g, or t
  misc_feature (607)..(607): n is a, c, g, or t
  misc_feature (616)..(616): n is a, c, g, or t
  misc_feature (682)..(682): n is a, c, g, or t
  misc_feature (693)..(693): n is a, c, g, or t
  misc_feature (696)..(697): n is a, c, g, or t
  misc_feature (750)..(750): n is a, c, g, or t
  misc_feature (753)..(753): n is a, c, g, or t
  misc_feature (781)..(781): n is a, c, g, or t
  misc_feature (811)..(811): n is a, c, g, or t
  misc_feature (852)..(852): n is a, c, g, or t
  misc_feature (881)..(881): n is a, c, g, or t
  misc_feature (909)..(909): n is a, c, g, or t
  misc_feature (924)..(924): n is a, c, g, or t
  misc_feature (939)..(939): n is a, c, g, or t
  misc_feature (943)..(943): n is a, c, g, or t
  misc_feature (1014)..(1014): n is a, c, g, or t
  misc_feature (1021)..(1021): n is a, c, g, or t
  misc_feature (1034)..(1034): n is a, c, g, or t
  misc_feature (1071)..(1071): n is a, c, g, or t
  misc_feature (1074)..(1074): n is a, c, g, or t
  misc_feature (1083)..(1083): n is a, c, g, or t
  misc_feature (1114)..(1114): n is a, c, g, or t
  misc_feature (1118)..(1118): n is a, c, g, or t
  misc_feature (1136)..(1136): n is a, c, g, or t
  misc_feature (1153)..(1153): n is a, c, g, or t
  misc_feature (1172)..(1172): n is a, c, g, or t
  misc_feature (1202)..(1202): n is a, c, g, or t
  misc_feature (1207)..(1207): n is a, c, g, or t
  misc_feature (1214)..(1214): n is a, c, g, or t
  misc_feature (1265)..(1265): n is a, c, g, or t
  misc_feature (1313)..(1313): n is a, c, g, or t
  misc_feature (1331)..(1331): n is a, c, g, or t
  misc_feature (1335)..(1335): n is a, c, g, or t
  misc_feature (1345)..(1345): n is a, c, g, or t
  misc_feature (1367)..(1367): n is a, c, g, or t
  misc_feature (1386)..(1386): n is a, c, g, or t
  misc_feature (1394)..(1394): n is a, c, g, or t
  misc_feature (1406)..(1406): n is a, c, g, or t
  misc_feature (1425)..(1425): n is a, c, g, or t
  misc_feature (1436)..(1436): n is a, c, g, or t
  misc_feature (1459)..(1459): n is a, c, g, or t
  misc_feature (1461)..(1461): n is a, c, g, or t
  misc_feature (1475)..(1475): n is a, c, g, or t
  misc_feature (1495)..(1495): n is a, c, g, or t
  misc_feature (1525)..(1525): n is a, c, g, or t
  misc_feature (1592)..(1592): n is a, c, g, or t
  misc_feature (1610)..(1610): n is a, c, g, or t
  misc_feature (1613)..(1613): n is a, c, g, or t
  misc_feature (1622)..(1622): n is a, c, g, or t
  misc_feature (1641)..(1641): n is a, c, g, or t
  misc_feature (1664)..(1664): n is a, c, g, or t
  misc_feature (1666)..(1666): n is a, c, g, or t
  misc_feature (1670)..(1670): n is a, c, g, or t
  misc_feature (1686)..(1686): n is a, c, g, or t
  misc_feature (1695)..(1695): n is a, c, g, or t
  misc_feature (1697)..(1697): n is a, c, g, or t
  misc_feature (1699)..(1699): n is a, c, g, or t
  misc_feature (1708)..(1708): n is a, c, g, or t
  misc_feature (1765)..(1765): n is a, c, g, or t
  misc_feature (1772)..(1772): n is a, c, g, or t
  misc_feature (1780)..(1780): n is a, c, g, or t
  misc_feature (1785)..(1785): n is a, c, g, or t
  misc_feature (1787)..(1787): n is a, c, g, or t
  misc_feature (1789)..(1789): n is a, c, g, or t
  misc_feature (1792)..(1792): n is a, c, g, or t
  misc_feature (1812)..(1812): n is a, c, g, or t
  misc_feature (1833)..(1833): n is a, c, g, or t
  misc_feature (1846)..(1846): n is a, c, g, or t
  misc_feature (1852)..(1852): n is a, c, g, or t
  misc_feature (1872)..(1872): n is a, c, g, or t
  misc_feature (1874)..(1874): n is a, c, g, or t
  misc_feature (1884)..(1884): n is a, c, g, or t
  misc_feature (1887)..(1887): n is a, c, g, or t
  misc_feature (1891)..(1891): n is a, c, g, or t
  misc_feature (1960)..(1960): n is a, c, g, or t
  misc_feature (1982)..(1983): n is a, c, g, or t
  misc_feature (1997)..(1997): n is a, c, g, or t
  misc_feature (2036)..(2036): n is a, c, g, or t
  misc_feature (2051)..(2051): n is a, c, g, or t
  misc_feature (2055)..(2055): n is a, c, g, or t
  misc_feature (2068)..(2068): n is a, c, g, or t
  misc_feature (2080)..(2080): n is a, c, g, or t
  misc_feature (2086)..(2086): n is a, c, g, or t
  misc_feature (2139)..(2139): n is a, c, g, or t
  misc_feature (2157)..(2157): n is a, c, g, or t
  misc_feature (2167)..(2167): n is a, c, g, or t
  misc_feature (2181)..(2181): n is a, c, g, or t
  misc_feature (2186)..(2186): n is a, c, g, or t
  misc_feature (2191)..(2191): n is a, c, g, or t
  misc_feature (2197)..(2197): n is a, c, g, or t
  misc_feature (2201)..(2201): n is a, c, g, or t
  misc_feature (2211)..(2211): n is a, c, g, or t
  misc_feature (2216)..(2216): n is a, c, g, or t
  misc_feature (2236)..(2236): n is a, c, g, or t
  Peptide Sequence Number=SeqID_8797
  Probeset Number=SeqID_15082
ggggggggtgcgccngctccgtctgccgggtgtgcgcctcgctcncttcncncccgcccctccccccnccccntcnccccccccccnnnccccccgacncgccgcgctgcgaatgaaccagcggcgcgcggcgctcccagccacagccgcggncaggggagctgctcgcgcagacgatagattacgtgtagcactaaagaaaggagagcatgacgcgcgcgccagcagctgncntcggtcgatgcggctagtatntcgcngtacgagcaggnaaggnaaacacaactcnctaanctctatnaancgcaacaacgtaatgccacataacnactcnccgcntagannagaaagtatggagagntggangatgtggncantagnaggtttttcgtttgngtgtgtcgcgctacgatcagcagtcgcantctggtnatgcgtcctcggcgaagtcggcgcggcgcncgagagcaggcgcagaacgtcagggaantacgcaaggagtgaacgaaagacgaagacaggaaaaagatgacgatagcggtatatcacttgcgtgtgngagtacgtctcactccgtatcactatcctctctctcgcgctgatgggntgggagtgncacgcggacgccgtactgatgcgtcgggatcgcgtgcggtgcgctgtggcgatggcacgctgcgtntcgagcgaccngannccctgaacatatacaccacgacaagcatactaacatagcgagtcgactgaganctnctacgtcgctagtacacaggacgacgcncgatcgtctgtcgcgcagccgatctagctngtgcgtcgcgctagtcgcgtactgacgctggcgcgtgacgngacgcgatgatacaacggatctgatgctngtgtggacgacgtcaggagctactcatncgcatgtctagtctntgtgacgtgtagctngatncggctaggcgttatgacgcagcgctcacgcatacgcacagtctacgtcgcgcgtctctagccaggtatganaagcccnagacgcgcagcanactgtcgtcccccgacgaacgcggctgacggagtagngangttagacgncagagtgacggctacgcgtgcagcgcagtancgangcggtacgcgtgacgcgncactgcagcagactgangcggggggcaggctgatcntcgtacgcgcgacgcacagcccagcgatgntcgancataaancgactgatatacatcatcatgtgccggacgtgtagctgacgtagcacgtgntgtctgctactgtactgaatgtcaaggatatgctgacgagcctacganacccacaccgtgcagccngtcnagtgactgtngctgactacacggatcacatcntcgtgcggcatcgcactancgcgtgancacagcagaagntgagcagtggtgagagcgntgctgcgtgtngcaggactagagatcatcaggangncagtgtggtgcacntcgtacgtagtgagatgcgntacactacgtggtgtcgatcagctgaggancggcgtagtggactgggtactgtacagcgtaacatacgagtcactgcggtcggactcggtcagtacngacatagcgtactactcngcntctcgaccngtcgcgtcgtcgtcggcancgtgctaagtgcatcgtctaatnanccanactagcgtgacacgcngcgtgcgcngntngccgtgacntacagcgaccagctcatcataactacctgcatgccgcgctgcctagatcgcagaggntcacgancgatgcgnctggntncntcnctgatactcacctcattatntcgtccggcggcacgtgcagnacggagcgcagcntgcagnagtactttctatatgagttntnttaatcatanaanctantactatatcgcctgacatcataaactgcatgtcgtgcgtcacagcaacggctcgaggatgacagactanacgacagctcgtcgtacagttnntacagtgcaggacncgtcagcgtgctcagtgcttggcccggtactacgcggancagtcgcgtcgacgnctcntgcacgcaatctnattacgtatcancgcctngcatctgccgcgtacgagagtcacgtcgcacaatctcgtgcacactgtacggngtctagcgactagtttgnactgccacgnacgcactgcccganccatncaacnactccntcancgtacgcgtngtcantctgcacatgcgcacgatgn

SEQ ID NO: 5304 - DNA, 1492 bp, Glycine max
  misc_feature (168)..(168): n is a, c, g, or t
  misc_feature (296)..(296): n is a, c, g, or t
  misc_feature (432)..(432): n is a, c, g, or t
  Probeset Number=SeqID_15083
tatttcttctatgtgagcataagcgcgaatcgtgcatggcgtataatatacactaattattgcggtgggcgttatactaatgcggcggcactcgatcgcaagttaagtatattattgtctgtcgactgtgtgttgccatgctattagtgtagagcaaatatagcgtantgtattatttctatccgtggtgtggtggtgcggtctaggaatatatacatcgcgtggcagtagcgacgtccgtagggggaggggtgacaatatagctgcgtcgctagacgcgttatagaagagatcgnatatggtcgggggtgatatacgaatacgtaaataggaacgcaactccgtatcttctgttgcccagtggcgagtggtaggtacacgaacgccacaattatctagagtatcgcatcatcgctcgtggtgagtgcaccnttatattgtgcatacgcttatttgggttatcgtaccgtgacgcgatattttgtcgaagttatcggtgtgctagtggcacgcgcgggcgatatctcgcgcggccgtaacgttacccatacgacgactaggacgatatcgatgtagtgggagtgaggtgagtggtttggtgttttattcgggcgtgcgcaacacgaccgaatacttaggttgaacagcgtagcaataagttgtggcatacgaaagctgactcaccccgacttatggctatcggtgtatttgtatatacgtatgatagaaacgcgtacgcgactattatggctgacgacacgcgatcattatcgggttgtttttagtagcggagtatgattacgcgcgtaaagggttcggatttagaagatgggggtatagcgagctatattgatgcaatgaataagtctctctgacggagcggacgacggagataactgtatcacaggctcgtgcggcgaccatctacgagataccgaggggctgtggctggcgtatatttccggcgctatccttattctcgcgaaaatttaaggtgacagttgcacggcgcgatctggacttatatatacggtcatacagatatagtctactgtaatatggtcacaatgaattaggcgatgaatataagaattaaatataaggatcttttcggtgctttgtcatctttatatatatagtatgtattagggtgcgttctatggatgttgtttacttggatccagtgatagggctgtggtggtgtttcagattatgttcgtatgataaagagaatagtatatttaggtagaggaagatcttcgtacgtgttttaggtaggagtataataacaataatacccgcccttcgctccgggtcgcggagcgggattttttatcttgtaatggggattgtgcatatatagggccctatagagaatactgtacaacaagcttaccacaggctaatgatattgtggggagtgggcgtgcctcttcggggcctatcactgacgaaggtgcgcgcgtaagaggaggagaggcggcgaccccat

SEQ ID NO: 5305 - DNA, 804 bp, Glycine max
  misc_feature (1)..(1): n is a, c, g, or t
  misc_feature (36)..(36): n is a, c, g, or t
  misc_feature (42)..(42): n is a, c, g, or t
  misc_feature (84)..(84): n is a, c, g, or t
  misc_feature (86)..(86): n is a, c, g, or t
  misc_feature (121)..(121): n is a, c, g, or t
  misc_feature (144)..(144): n is a, c, g, or t
  misc_feature (153)..(153): n is a, c, g, or t
  misc_feature (195)..(195): n is a, c, g, or t
  Peptide Sequence Number=SeqID_8798
  Probeset Number=SeqID_15084
nggtgatgccaaagatgtttcactgaaagcgccgancggtancgaaggtgtggtgatcgataaaaagctgttccagcgtgcgangnaagacaagaatggcaagatccgtgagaaagcacanctggagaaagtagaaaaagtacnccagcagancgaagagagcatcaaagaattgctgctcgataaattacaaancctgtgaaaagacaaagcttctacaggcgtgagcaacaatttcggcgaaatgctcattggtaaaggcgctaagttcaaccaaaagaacctggcagccatcgactaccagaacgtgaatccgctgggctggactggtgacgctaaaacagacgaccagatcaatacactgttgcacaactacagcatccgtttcaacgaagaactcggacgttacaagcgtgagaaattcaacatctctattggtgatgaattacccgcaggtgtattgaaactggctaaagtttacctggctgtgaagcgtaagctgaaagtgggagataagatggcgggccgtcacggtaacaaaggtatcgttgccaagatcgttcgtgcagaagatatgccgttcatggaagacggtacaccggtggatattgtactgaacccgctgggggtaccttcccgtatgaacctcggacagatttatgaaaccattctgggctggacaggcaagcgcctgggcgtgaaattcgctacgccgatcttcgatggcgcttctacagatgaaatcgaagaatactgcaaacaagcaagtatacccaggaacggacacacttacctgtacgatgg

SEQ ID NO: 5306 - DNA, 297 bp, Glycine max
  Peptide Sequence Number=SeqID_8799
  Probeset Number=SeqID_15085
gctgagtctcatcatttgtctcttccaacaatccacccaattgcaccaaacaaatgacgtgactcaacacccatgtagttcttggcctgctccactagtgcctcgccaatcttcgcaacaggtggccggcagtttgcgtcggcttcaccgcacccggccatgtcagccaccgccagcgctgcagaaggcagcacccaatgggtgctgctgccacaaacgcctcccttcttcgcggccgtggcatcgtgtcatcgtcacctggggattcctcctccgccggccgggctcttggcaaca

SEQ ID NO: 5307 - DNA, 1487 bp, Glycine max
  misc_feature (57)..(58): n is a, c, g, or t
  misc_feature (78)..(79): n is a, c, g, or t
  misc_feature (84)..(84): n is a, c, g, or t
  misc_feature (199)..(199): n is a, c, g, or t
  misc_feature (601)..(601): n is a, c, g, or t
  misc_feature (606)..(606): n is a, c, g, or t
  misc_feature (630)..(630): n is a, c, g, or t
  misc_feature (835)..(835): n is a, c, g, or t
  misc_feature (960)..(960): n is a, c, g, or t
  misc_feature (996)..(996): n is a, c, g, or t
  misc_feature (1096)..(1096): n is a, c, g, or t
  misc_feature (1134)..(1134): n is a, c, g, or t
  misc_feature (1152)..(1152): n is a, c, g, or t
  misc_feature (1207)..(1207): n is a, c, g, or t
  misc_feature (1224)..(1224): n is a, c, g, or t
  misc_feature (1263)..(1263): n is a, c, g, or t
  misc_feature (1298)..(1298): n is a, c, g, or t
  misc_feature (1339)..(1339): n is a, c, g, or t
  misc_feature (1380)..(1380): n is a, c, g, or t
  misc_feature (1446)..(1446): n is a, c, g, or t
  misc_feature (1456)..(1456): n is a, c, g, or t
  misc_feature (1473)..(1473): n is a, c, g, or t
  misc_feature (1487)..(1487): n is a, c, g, or t
  Probeset Number=SeqID_15086
gttttgtgtgttgtttttttttgttgttttgtgggtggagagggaggggaggagggnngacacgcatgtttctactanntaaantaaaaattttattaagagttccttgatagatgatagtaacatttgttaactccgatgaacatccgcagtcatacgcccccgcgctaacttgctcgcccagggcataacacactanacacgccgcccttatcccaaagaagacgcgtgagaggggtgtagcgagagcaagatgtgcgttgcgtgttgtctattctaaaactatccatatgaaaagatcaataaggacaataataattaacatttttcaattatttctcttatctgttcccatgttgtattttcgcttcttgtcctatcactgaagtattgcgaagtagatgtagtgttatttcctatggatgttgtgtcttacgtttcgctttatatcgacttgtgttgttttgcgtcaataggttttaccagtctggtgctcttttctttgttgttggcgttagaggcctgacgggacggcttacgggggcaacaaggagtccgacacgacactaaaccacatcggagatcgatatgggagagaatngatangagaaattgcaccgagtggagtgngagttaataagatctcctttccctcttcagggtgcactctttacgcaccctctctcctcccacacaacacaacacagggatcgtatgtaaggagttatctattgagtggtgcgtgcattgctctccctgttcgctcgcctacttacatccctcactatatataccatccacacaccccactctctctacacaacacgtactgagntcgtatatacatcgataacataatcactacaccacgaacatcactaacacacgcgtcagtgtcactatcctatatgtcatatcttatgcattattatctattatgtctctcgtcgtcacacgcangtgagagcgaatgcgcacgctgactatgcacgtcancataacaacacgccacacgtctcgacaattcttccgtgctgattgcgcgccctcttcatcctattctgatatgtcccctcactcttccatctcttctcgntctctagtcgacgcgacactgtagctggcgtatgttgntgtgctgttctttgtganctccgcgctcgttttgttctactgtctccgtcgtcgtagatgctctgtgcattgnagtatgtgtagctgacnctatcatctgtgagtatgatgtatacgatcacgcgcccncacacgacacctcactctctctctctacactactnacatcaccgcgcatacacatccacccacacaatacatccanctctacactctcacttaacgcgactcacacatgatataacnacaagcactctgcacctaccatctacgtaataacgagcgcgatcggtgtgtacttactgcattgtnacacaatacngatatattactgagacntactatatactcgn

SEQ ID NO: 5308 - DNA, 648 bp, Glycine max
  Peptide Sequence Number=SeqID_8800
  Probeset Number=SeqID_15087
atcacaaattagttgaaccccagtcctatggaagtctatagctaaaccagctttgaggatatcacaagctgaagaaccattgaattttaactaaccaaactaataagcaaaaatgttggcggtgtttgcaaagccattggaaaaccaccggaggactgaggcttccggcaatggggtccaataatcaaagaccccagaagaaaatgtacagaaatttcaatctttgtggccagattctgcagtttacacccttcacatgggatttttatggctccggctcatgaagatgaaagcccatacaccccaggggaattggtggctttggatgatatccttctgcatttttatggggagctctaacaaaaaatagctgagcttaaaactcatttatgggctcccaagaacaacaaacaaaagccctggattgggattggaacctaataagccccaaaaaaaatccccctccctaccccccgtgaccaagttgtataaacctcttgaggggaaaatttcgcattcctcctcctttggaggccaaaaaaaatatacctctttttaaaaaccccgggtaccttgaaagaaaaaggagaaaaattcccaagggggaaaaggcccaaagaaaagggcacccctaaagctctggttccg

SEQ ID NO: 5309 - DNA, 449 bp, Glycine max
  Probeset Number=SeqID_15088
acttctcaagtgattttgtaactcgcatccgctgcaatgacgaagggaacggggagtttcggaaagaggaggaacaagagtcacactctctgcgtgagatgtggccgtcgcagtttccacatccagaagagccgttgctccgcctgtgcttaccccgccgctcgcaagaggacctataactggagtgtgaaggcaatccgtaggaagaccaccggaactggaaggatgaggtatcttcgcaatgtgcctcgcaggttcaagactggcttcagagaaggtaccgaagccaagccaaggaacaaggcagcagcttcatcatcttaaacactagatttatggcgtctgagtttgttggcatgaatactctgttttattattcagcatctgattactatttatctttttggtgtgttttgtactctttttataaagttttggacttgaatgag

SEQ ID NO: 5310 - DNA, 593 bp, Glycine max
  Peptide Sequence Number=SeqID_8801
  Probeset Number=SeqID_15089
aaactcctttcccccctccagttccaacttcattgtgtttaaacatcgataaacggtttcccatagagggtgccctgagtgatgcgacaaacactgatcgacaaaacctatcccataaccttttacgtctcctaaaagcgaatttgggatatttcagaaacagcctaacatatgatgccaccaagctgaggatcatctctcagttcgtgaggacccggctcaactgacgtgactcccttactggccagcaaacacgattcacccaaaagcgagcgaaattaaaattactggtgctgcaaaatacctgcgaccggatgaaaaacatgagtggtcatccaatttagtgttcttgaaagacagccccctttcaacacatggcccagtaccaataaggtccgcatctatggcccttgccaacaaataggcaatgagaaggcagaatgctgaattgtaggcgacaatattttgataaaattagcgttaaaattctgatatatcctttcatttcttatccaacaggccaacttcgacgatatcccttataaagcaaaagaaagaccgatagtagggttgagtgtagctcaagacgggaa

SEQ ID NO: 5311 - DNA, 1341 bp, Glycine max
  misc_feature (22)..(22): n is a, c, g, or t
  misc_feature (78)..(78): n is a, c, g, or t
  misc_feature (81)..(81): n is a, c, g, or t
  misc_feature (102)..(102): n is a, c, g, or t
  misc_feature (689)..(690): n is a, c, g, or t
  misc_feature (703)..(703): n is a, c, g, or t
  misc_feature (891)..(891): n is a, c, g, or t
  misc_feature (1195)..(1195): n is a, c, g, or t
  Probeset Number=SeqID_15090
aatttcgaaacacgaggggtgntgtgcagttacttgataaaaggaagaggggaatgaatcttcatttagatgatctcncanactcaaacctttgcttactanaccttagagacggaggcggtgtattgggtgccaaatgtcagacatcaagaacccgccataataacgtggagtgtatgaatcacacgagggaaatgcgacgaacgacttcttaactatttccagacctagctactcgcgccattgctatcaccacatacgccctaccccgcagttgcaaaattctgacttttttcttctttggccgcctaggtcttcttaattcctaggaacatagatgtggaggcatgaagtacatacgctaatatcaatcaagacatattatacaccctacacaaatctgatatgtaaatacacagatatgctggctctctctatactatcctgtgtcagcttcttctgaatacaaataccgagcgtcaacatctatcccgaataccattcttataatataatttatatcgagactggaacgtcaaggtattataagtgacttgcgaagcatacttttgttgtacaattaaatccactataacactataactactcggttttcgctgccatgctaggggatggacgtgtgagcgttctcttgtgggtggtgcaggagggagagtggaaataaaaannaaaaaaatatatnacaaaaaaaagaaagaacacaacaaaaaacacaacataacaaccagctaacccacctcgtctcactaccgccaccacactcacatagcatagattatgtaagtagaaccataaagtaagtttccacaactatccacaaaccctcctcacacaccccaccctcgccccgcccacatggtgtggtggtgngcgttcgctgtcaatatgcgcaagagagccgagcacgctacgcctcacaccccaatgacccacatccaccctaaggatttaatacaccatctaaacagcaccaattaacgcgtagtcgccattattcgatttgcagtcaggtattgtcggctccacacccggtgaatagcacgtacaatgtcggtgtatactggtcgtcagaaagtggacgcaacataccaaaattactcctccctcagaacgctgtctactctattattcatctacaccactacatacgctactaggtagtatctgtcttccnacgcctgggagttaatggtgagttatgatgcgtgtatgtcgcgtgagttgactttattatatgatgagacatagtaaactgacgagatatatcgagtgagagagagactggtatgaacgagcagagtcaaagactatagtacacac

SEQ ID NO: 5312 - DNA, 202 bp, Glycine max
  Peptide Sequence Number=SeqID_8802
  Probeset Number=SeqID_15091
tgcagctagaattgtggactgcaatggtgtctgttctacaccaaagggtaaaaggttcagaataccagaagtgctaacatgtccaccagctcctaagaagagaagagtaacatcatgctcatcatccaagaacaagagatccccgatagcattttttgcttcaccagatatagagctctttttcttttctgcaattaaaagt

SEQ ID NO: 5313 - DNA, 738 bp, Glycine max
  misc_feature (725)..(725): n is a, c, g, or t
  Peptide Sequence Number=SeqID_8803
  Probeset Number=SeqID_15092
ctgcccttatttggtggttggttcttggaggaggagagggaggcgcgggccgaccgacggatggcgggcttatggcgtggtggaaggtggaacttgtttttgcctgaccagcccctttggaatcccccccccaaggaggagggcctcatgcgctgatgctgtcaccgctgcagccgctcggaatggcagcagcagcagccctcgccatgtggcttcaccgtcccttttcgcacccgcgtcttccaccaccctcgacctgcccccctacagctcctctgctttctttcaggtgcccaggttttctcctgggcatgaagccattgggctgtgatgtgtgaggtgcacggagcaaaaaaagagggaggggacctccattcctctaatctgggagatggcccctaaagttatggagcaaaaggattacgatttcaaggcagatatttggttgtttggcattactgcacttgaacttgctattggccatgcaccattttctatccaacctccagcaaaggtttttctcatgacgttgcaacatgcccctccataacttcataacacaaaggagaagaagttttcagacgtatggtttcaaaaatattttctaagaaattaattgtgtgtgactattgaatcatttcttgtcttgttttgtagtcttttaagagtctgattgccacttgcaaaaaaaaaaaaaaaagctgggttgggatcgtggaaaaaanaaacaaaaaaaac

SEQ ID NO: 5314 - DNA, 478 bp, Glycine max
  misc_feature (182)..(182): n is a, c, g, or t
  Peptide Sequence Number=SeqID_8804
  Probeset Number=SeqID_15093
acaccaaacctctctctctccctctcttatttcagagaaaaaaataaacaagaaaatggaggtgtcgacaagaaagccttatttcatagaagaagaagacgacggattggtttctctagctgagatggaagctggagtttcttctccttcttcttgttacacaaacatgaaccagtaccatngtcgtagttattacaataattaccatcagtactctgtttcatcacccagatctgttgtcgtctctgaaaaattccatgacttcagattcgacaacagctgtttcggacaacaatcagttcctcatttcttggactcttgtttcctctgtaagaagcgtcttggtcataacaaagacatcttcatgtacagaggagacacaccgttctgtagcgaggagtgtagagaagaacagataaagagagacgagtcgaaagagaagaaaaagatctgtcttcatctgtgaaagctatgagaa

SEQ ID NO: 5315 - DNA, 1568 bp, Glycine max
  misc_feature (10)..(10): n is a, c, g, or t
  misc_feature (18)..(18): n is a, c, g, or t
  misc_feature (61)..(61): n is a, c, g, or t
  misc_feature (1029)..(1029): n is a, c, g, or t
  misc_feature (1070)..(1070): n is a, c, g, or t
  misc_feature (1177)..(1177): n is a, c, g, or t
  misc_feature (1473)..(1473): n is a, c, g, or t
  misc_feature (1568)..(1568): n is a, c, g, or t
  Peptide Sequence Number=SeqID_8805
  Probeset Number=SeqID_15094
ccacacctanacaacatncctcaccgattagaatgcgtgcgtaccgtgtactgtggtgcanccttatagcagagttgggggtagcgcggtctccctccctcgaagggtcgttcgggtatgcgcacccacgctcttccttatttcttccttcagttcgccccgcgcactcggaactctccccgtcccctagatatgcttctactctgcatcgcattctctttgtttcgcctgctgacttatgtacactcgtgcggcaagcgagtaatctacttttcttttatatcaccttctccctctatggctctttccattcgctcgcgtgtcgcctttgcgctttcgcgttacgccctctcctgtactatgttgggctgtatagataggagagctggagatgtctctgctctttgggagtgcggcgacgacctcgtactgtagcaacgcctcctcaaagcgtcttcttggcggacttttacggcaggcttagatcatatcgaaccaccagaggacgtccagttgttgggtcggtctattggtctcgagctcgacctcatctctagtagacattttcgaacatgaactctacaacacatatcgcggactccacgttctcacgctctcgaccgaccccccccactggagggacgtattgtgtgctcgcctaacgaccaggcgaaccgcctcgcaggtgtagagtcttagtaccagcgtgcccacgacggcggcgtgtctggctccgcgctgcgtgtactcgacgcgtcttgtgtgggcgcttgacgcattcacgcgattagtctgctccgacgtacggcgtgctctcacatacccgtgtgttccgcgtcggacgcgctatccctatctatggcgttatgtgggatgcctcttgcgtcgtctattattctttgtgagatgtccgtgtgcccctcctgtttagagatggttaattaatcgtcgacgttatgtaattcagccgaacttccgaatatgacacttgtcgcagagttggcaccttaggctcatggagcgaaactntgtctacacgctctgtgtcccgccgtccggaattcctcctntgagtagggtgtgttgtcggacactatggttcagtttattatgcacgtagttcatgagcactcaactgacagacaagtgcatcgcggtcaggatctttctcgctgcntcagcacattcatttcgctagatattacatgacacgcgccgtccaagaacagactctgcgcgaacgtactcgttttgtagctgtgtcatagagactcatggataccagcacgacgcgcgctgcacaaggtcggttacgagcagcagtacgtcatccacactcactacgcgagtggtcctccatactcctcgtcggacattgaacatgcgttgctctgcgctaattctagctaagagctcattatgaggctactgatgtgtggtcactcggccacactgcgcgatggtctgcatttnatactatgtataacgcgcgtaccacctgtcagaagatatgcggagtcgttcagtctctcatgtgcataatgcatgacgtggcgtctagtatatan

SEQ ID NO: 5316 - DNA, 1562 bp, Glycine max
  misc_feature (1)..(2): n is a, c, g, or t
  misc_feature (23)..(25): n is a, c, g, or t
  misc_feature (29)..(30): n is a, c, g, or t
  misc_feature (40)..(40): n is a, c, g, or t
  misc_feature (42)..(42): n is a, c, g, or t
  misc_feature (49)..(49): n is a, c, g, or t
  misc_feature (56)..(56): n is a, c, g, or t
  misc_feature (58)..(59): n is a, c, g, or t
  misc_feature (63)..(64): n is a, c, g, or t
  misc_feature (75)..(75): n is a, c, g, or t
  misc_feature (79)..(79): n is a, c, g, or t
  misc_feature (81)..(81): n is a, c, g, or t
  misc_feature (92)..(92): n is a, c, g, or t
  misc_feature (220)..(220): n is a, c, g, or t
  misc_feature (244)..(244): n is a, c, g, or t
  misc_feature (297)..(297): n is a, c, g, or t
  misc_feature (307)..(307): n is a, c, g, or t
  misc_feature (360)..(360): n is a, c, g, or t
  misc_feature (395)..(395): n is a, c, g, or t
  misc_feature (455)..(455): n is a, c, g, or t
  misc_feature (575)..(575): n is a, c, g, or t
  misc_feature (578)..(578): n is a, c, g, or t
  misc_feature (672)..(672): n is a, c, g, or t
  misc_feature (902)..(902): n is a, c, g, or t
  misc_feature (945)..(945): n is a, c, g, or t
  misc_feature (990)..(990): n is a, c, g, or t
  misc_feature (1233)..(1233): n is a, c, g, or t
  misc_feature (1240)..(1240): n is a, c, g, or t
  misc_feature (1271)..(1271): n is a, c, g, or t
  misc_feature (1346)..(1346): n is a, c, g, or t
  misc_feature (1519)..(1519): n is a, c, g, or t
  misc_feature (1528)..(1528): n is a, c, g, or t
  misc_feature (1562)..(1562): n is a, c, g, or t
  Probeset Number=SeqID_15095
nncccccccccctccccaccccnnnaccnncccccccccnanttcttantaaagantnntaannttacataaaanccananaaactaaaatnattacggagaagatgtgtgaagtgaggaacgcgtgggacgcacgcgctacgatgtcacgcataacaggcctgatgcccctgcgtggcgcggtgcgcggaggcgctgtctgcccccgggtcggagccanttgaagtgctgaaggagcggtctncttttactctatcgcagaatctccacagcttcggtataaacatgctctcgctngtgtgctgtnatcaccttctcgcaccacgatatgacttacgatcgatatgtatgtgatattgntcggtggagtatagtagtatacgaaatgagcaagncactatgaacgacaaaccgcgactgagaggaggcccgggcgaactgcctggcatgaaatntgaccagcaacaccaccattcgcgcgctccgctccttatcacgacgcgcctacacaatagacttattatcgcataatgtggagctctaccacttcgtgttcgtgtatgttgttgtgctcncgntggctggcatgtgtcatgtgtgtggtgcgcgcgcgcgtggctggttctctcttggtctcggtgtgctctgtcgtttgttgtgtgtgtgttgttntgtttcttatttgtttgtgtggggaaggtggtatggtccgtggatagtataagcacgcgaatgaaggtagtgcgttagcccgcactagctcagcaatgatagtagcgaaatagagcgagagagtaattctcctgttacactgacgactggacagagtagcacagcatgaatacgacacccgcagatcgacaacatcacaataggcggcaaagccacgccaccgtctcttngcttgcatgtgatataacaagcacaccaatagcatccgcagcngcgcaacaccaacacaacgcgacactgccgtggtatgttatgaanatagcagatgaatagtacacgtgaaatgcgccgactgtacgacgtagtctctatactagttgtcgactggttgatatagatagataatgagagtacaatataatattatatatgtatttgatgtatagcgagtgcagcgagacgaagtagcgcgccgcacgcgtctcggcgcagccgacaggcgtggagagcggctgtgcttattactgtcgtgttatgtacctgactgccgaccgcaccgcncgcacgnatcgcgcgcagcacgcctcagctggacggcnctagcgatacattggatcgtagataaatggcggacagacaagtcgactccacttagatcatagtatacatgactncgctcgtatacgttcgccgctttgcctctcgtcctgtgcacttgatagaccagactctgcacatactgcgtcacgagcgtgaagcgcgacgtggaggcgagacatacacatgcccccactagctccgaacctcgcacgctacgcgatcgcctcgagcgcgcgcataggatcanagagagagnatccacgcgtgattgtgatggggtgtgatgcgcn

SEQ ID NO: 5317 - DNA, 553 bp, Glycine max
  misc_feature (318)..(318): n is a, c, g, or t
  misc_feature (383)..(383): n is a, c, g, or t
  Peptide Sequence Number=SeqID_8806
  Probeset Number=SeqID_15096
cccccaggtttgttggaccgaatacccctctggggggcgggaattttttctctcaaatggcccccccggggggggttcgccccccccggaaaaaacccccccagcctcggtttttttgggttcccgcccccccctccccgggggtcccttcccgcgggggttttgccgcccaggaaccccccggaggaaattcaccccccctccaaaaaaacccattcgtaaaaagttaaaggcaaaatggacccccggcggcccccccccgaaattttgtacaaaagggccccccttttcccgcccttccccggaacagagcctcgncttgggggcaggtggtttttttaaaacccccacggcacagttgcgcgcggctgttgattcgcaanttgcaggccacaacaggggcggtgaacagccacggccaggcacccgccaggctgctgctgctgctgctcgccatggccaccgtacgctgtagctagctagcttagctggtactgttgctcaccctcgcaaggacggtacagtgagcgtcgactgcacaacgataatgggt

SEQ ID NO: 5318 - DNA, 304 bp, Glycine max
  Probeset Number=SeqID_15097
tgatgctgctgctggaactgttgtacaaactgttgcttaccctcttgacgttatccgtctaagaatgcagatggtcggatggaaccatgctgtttttgttctaactggctatggaagaggcatagttccactggattacactgctatggtcgttgcttttataaaaactggtttgccttatggatttggtgcattatacaagggtcttgtgcccaactttgtaaaggcggtcctatcaatagcaattgcattcgtaacatttgaagtggtgaaggacattctatgagttgagatcagtatatcg

SEQ ID NO: 5319 - DNA, 1429 bp, Glycine max
  misc_feature (1)..(2): n is a, c, g, or t
  misc_feature (7)..(10): n is a, c, g, or t
  misc_feature (20)..(20): n is a, c, g, or t
  misc_feature (23)..(24): n is a, c, g, or t
  misc_feature (134)..(134): n is a, c, g, or t
  misc_feature (138)..(138): n is a, c, g, or t
  misc_feature (706)..(706): n is a, c, g, or t
  misc_feature (792)..(792): n is a, c, g, or t
  misc_feature (940)..(940): n is a, c, g, or t
  misc_feature (1000)..(1000): n is a, c, g, or t
  misc_feature (1169)..(1169): n is a, c, g, or t
  misc_feature (1180)..(1180): n is a, c, g, or t
  misc_feature (1234)..(1234): n is a, c, g, or t
  misc_feature (1354)..(1354): n is a, c, g, or t
  misc_feature (1380)..(1380): n is a, c, g, or t
  misc_feature (1392)..(1392): n is a, c, g, or t
  Peptide Sequence Number=SeqID_8807
  Probeset Number=SeqID_15098
nnccccnnnntttctttttnttnntttttttctttgtacttgtacccagccctctctctgcgacattcctcctaccacatacactcacctccaccgcgtcgacaaactcgcccacgccgccatccctccctctntacngttatcatcgtgccgcgatcgtgaccacactagtaatactgcaccgtgtcatcctcacacatctataatttaacacacaccagctcaccggtacgtgctcatgcagcatgtgcgagcattaaacgcagtccatacgatagatatgtttcttgtgcatctatgcctcatatcgtcatacatgtatctgacgcacgcaagaacaaacgataggacgtctgtcatttgctccgtactgaacaacccacaacaatattaaaatattgtgacatatatcattcaccctacctcatctaattcacactaataaaaagcacacacacgcgcgcgtccggcagcagacccacacgcccgcgccccgcgcgcaatcgtcacctgctgcgtctgcacgacgcttcctccgcgctgtccgtcttgtctggatcagtattgtgaataggtactaccataacgtgctcacagcaaccgcaacagcagcactctcgctgctcactaccagttccggctctacgtgtatgctctcattatccgctactccgccgtcttgatctgctcatattggctcgctgtncatacgcttcgctcgacgtcgagaagctcgacactcgaatctcacattacatagtcacttacgcgacgcgtcagtgtcccttgcantacacatcttccggcacgccgctacatcaattcagcatatgcatctcctctccacgagcacccactcacctacactcgcagatgttgcgacgaacacctcatctgctcgtcgatcacacgacacatctctatagcctgacgtctcaanctgcgcacatacaggattacgactacgtcgtcgcgactaatacagtcatctacagccatnatgctcacgaactcaactacacaatggtacggtaacacacgcactctacttctacatcatgtatatagacgccgtacatgattatgtcaaatctgtgagaacaccatctactaactcctcaatgcataacatctcacactatataacttcatctcgcatcgtcacactnctctcgtatanaacgtactacttacaacacgatatcgacatttacgataagatcactcacaacancagtcactcatacatgtgcacgcatgaacggacgcccacatacatgcacctcagtccacgagttcattaatatatgcttctgtgctaccgcttcgtaaatgaacggcagcgcggcgtgtnctatctctctctactcactctcgatntaccttgcgctnctgatgcacgcttctatcatctcactgagtactcccg

SEQ ID NO: 5320 - DNA, 1972 bp, Glycine max
  Probeset Number=SeqID_15099
gcccaaaccagaaggaggccagtacttgcatggctgaagtctgcgatctgaactttgctctcggcagagagttcacacgcgccatcaaagcgtccggagttgatctcagccaaatcgaccttatcgctagccatggccagacactatggcaccaaccccttggggatcacaggtcaacactccagatggctgagccggcggttattgccaatgctttcaataagtaagactttacatgctgtgatgcatcttctattggaccttgaccttgacgctttgatgttgactacgggttgcaggacagtcgtcagcggctttcgagtagctgagctggctgctggccgtcaaggagctcctctcgcggggttcttcgaaaacgccctcttgactgacgagaagaagacaagggtcagccagaatattggcgggattggaaatgccactgtcttacctgcttcaagcacttcgagtaattcacctacatctcgctctacatacatggcattcgacactggcccaggcaatgtcttcatggatgccgccatgcgtatcttgacagacggccaagagcactttgaccgcgatggcaagatgggtgccaagggtgaggccgagattgacgagaagctcgtcgaggagtacctgaccactgagccgtacttccagatgacgcctcctaagacgacaggtcgtgagctgttctctgacgacgttgccagccgtctggttgaaaatctcaaagccgccaaactgtcacctgaagggattattgcgacccttactcgtatcacagcagagtctattgcccaggcctacgagaaatttgtcatccctggtttgaacggagggaagctcgacgagatttacatctgcggcggtggagcatataatcccaatatcctgaagcatctacgggccaggttccccaagagtcaggttatgacttttgatcaaagccccgccaagatcctgcctggcgcaaaggaagctgttttgttcgccttattgggattcctctcgattttgggtcgcagaatccccctcccctcggatgcagagtcgttggagcctgccatacttggtgttatcacgcctggggacaattatcatgaggtcatgaagaaaagtgtccttcatgaagactttgggaaagatatcatcttaggacgaatcatatcatagagagttattgaagtctgggtactctgtcaaatgtctttctgaatgatacaaatcttgataatgttcttttctgtaagagatgaagcctaaatgcaaaggaattaccgcacgagccgtgtgactttccttaagagaaggctcccagattctcgctctctctgttgtgaccggcggacagctagcttcatagacggcatcgaagggtcttatgctcgtaaagccaactaatacgaacgcattcagatttggagcataatgctggttgttatctagagcatgattggtcttgctatgtatcgtgaggaataatgtgaaaattactaggcggacgagactccgcagatcaaaacgcgtgttcaattcgagctcgattcgctttcgatgtctacgtctaatgccctcttgagagcgccttcagaggctcgcaagatattttcggcactctggggcgagcaccccaatgtggcaactataatggctagcttaacactgccctcacattctgcgagaacttgatcaagaacctcgtcatcttcgactcttatagcactaggtgacttgacggcggcgcggacaactcggcgtgctctgtctcgtagcttctcgtttgacatcttgaggtcaaccatcttctcacagttagctgtcctgcaagcacttcacaagctcgaagaccacttaccaagttcccataggttttgccggcgcggacctgcgagcccgtcgagatcatgttcaagatctatccagttcatcagctttcggttgcattctcaatcaattttcgctc

SEQ ID NO: 5321 - DNA, 1424 bp, Glycine max
  misc_feature (38)..(38): n is a, c, g, or t
  misc_feature (235)..(235): n is a, c, g, or t
  misc_feature (279)..(279): n is a, c, g, or t
  misc_feature (805)..(805): n is a, c, g, or t
  misc_feature (811)..(811): n is a, c, g, or t
  misc_feature (857)..(857): n is a, c, g, or t
  misc_feature (1092)..(1092): n is a, c, g, or t
  misc_feature (1133)..(1133): n is a, c, g, or t
  misc_feature (1143)..(1144): n is a, c, g, or t
  misc_feature (1193)..(1193): n is a, c, g, or t
  misc_feature (1198)..(1198): n is a, c, g, or t
  misc_feature (1253)..(1253): n is a, c, g, or t
  misc_feature (1331)..(1332): n is a, c, g, or t
  misc_feature (1334)..(1336): n is a, c, g, or t
  misc_feature (1338)..(1339): n is a, c, g, or t
  misc_feature (1343)..(1343): n is a, c, g, or t
  misc_feature (1345)..(1348): n is a, c, g, or t
  misc_feature (1350)..(1350): n is a, c, g, or t
  misc_feature (1354)..(1359): n is a, c, g, or t
  misc_feature (1361)..(1370): n is a, c, g, or t
  misc_feature (1372)..(1373): n is a, c, g, or t
  misc_feature (1376)..(1377): n is a, c, g, or t
  misc_feature (1382)..(1382): n is a, c, g, or t
  misc_feature (1384)..(1398): n is a, c, g, or t
  misc_feature (1405)..(1407): n is a, c, g, or t
  Peptide Sequence Number=SeqID_8808
  Probeset Number=SeqID_15100
tgtttctgtatctctctccgcacgcgtgcccgaccgtntgcgtctctgcatttctcgtgtgtcactccatcttctgtgtttttattccggctcgacccgcctcacactctattaataattcccgcgactcgccgccacgtatcacggtaacagagtgttgttacaagtatatatcaccaggcccgccacctgcatccatgcgtcccgcccacacacgtgtgtcaataattgatanccatacagcctgtcgtccttgtcagcgccagagccgaccacganttcaccatattgaacggagtagtattgcgatgttcgtacgcttttcacctgattgtcctttccgtgtttatgtgcgttgtacacgacgtgcgagtgtatgacgacgtgcgcctttgtacctagttttcgccggttcgcgcaggccgaagatgcgcgcgcagactcggcggtgtcgcttcggcacccattaagcctgcggggtgtccgtggtgcggcgcgccgaacgccctcatatcccacaccatcctcgcatatgccaccgcgggtgtcccacataccatgcttatccccagcgggccacaaccacctactaccagtaacagcataaggtccacacagcgagataaaaggagacaccgcgccggagatgactcccctagtatataatataaagtaaacactgtgtatcttagtaatacttactccccctcttgacccgtgttctggtttgccgcccggtgcgccccttatatatatcaccgatggcactcgtaggccttacgcttcgttgagcctcggcgttgtncccacncatcatatcctctagacccaccccatatctacagacatttcacgancaggcgcacatttgtactccgcattagggattgtacgagggcgtgtggaggtagtgtcgcccccgtatgtctgcgtggaagcgcgcccggctgttcaggcggcctccgtcacacggcgcgtctcagtaacataataaatatttaacggacgaaagaatggtcacgaccaatatttatatatctccacttgttttagtatactctccggttggtgtgacgacactcgggtgcgggnttctcgtggtgatgctgggtgtttgtgtgatctgtgtatcntttatctacnnccctcattttgtatcctgatacgtgattataaacaagtcatacccacancatgncgattcacagtatggagagcacataatatgtatcttagatagagaggggggggcngcatagcctagaaccaagaagttctctagcagtatggaggggtgcgcttcctcacatacactatctatggacggcgcnntnnncnnagtntnnnntnccgnnnnnngnnnnnnnnnngnnccnnccacngnnnnnnnnnnnnnnnggggggnnnggggggggcccgccccc

SEQ ID NO: 5322 - DNA, 1058 bp, Glycine max
  Probeset Number=SeqID_15101
taaaattaattttttttatttccaacagattcaacattcacgcccagaatggaagacaggcttgctgagcttagaattggagcacgaactcccgcaactgccgaggctgagcctgaagaactcatgccagctttcaataagaaaatcaatgcagttcaatactatattaaaactgtgaaagaaaacaatgccaaaattgctcgtttaaaggagagacatattagcgcaaccttaacagaacaggaaaaatcaatcagcgaagaacttgatggtctcattgcagaaaataataaatactgcgcaacagtaaagtcagaacttgagtatatcgaaaacgatgtcagaaaatctcaggaaaaagaaaaggaggagccagaaacaagaattaaagacattacttttagagctttgaaagcaaaattcgttgaagtcttgaaagaaactcaaaatacgcaaattgagtataaaacagcagttaaaggcaaaatttcaagacaagccaaaattattgaccccaccttaacaaatgagcaagttgaagaagtttgcaacgatccagagggcgcaggaagactcttggcaaacaagatgcttggtacaggacatgtcagactcaagaatgctgttgctgacatccaagataaatacaaagacattagaaaattagaaaagagtgttgaaacaattcatcaaatgtttattgatatgcaratgcttgtgcaggctcaaggcgaaatgcttgataatattgaattaaatattcaagaagcccatgactacacaaagaaggccaacgttcagctcgccaaagccaaaaagagccatttgatttacaaaaagtataaatgctgcatcttgatcacactgctcatcgttattgttattataattgtcgtccctattgtcactcggtaattggctcctgattcattcaatttgttgtgaaaactggaaaacattttttttatcatgtatgttttttatatgtcattattctcgattttcctctttagaattttttgtaacaagaaaattttatatcaccaatcttaaatttc

SEQ ID NO: 5323 - DNA, 706 bp, Glycine max
  misc_feature (189)..(189): n is a, c, g, or t
  misc_feature (527)..(527): n is a, c, g, or t
  Peptide Sequence Number=SeqID_8809
  Probeset Number=SeqID_15102
aactcgatcgtccctgtgagcatttgctcttgcgcttcttgacactccaatttgccagaaagaagcaaacatccatatttggtagcaatggcagcgtccgagtgcagcaccgccttcgtcttgctcgtcctggtcacggtgccggcggcggcggcggcggccctgttgcacccgggggaggggggaagnggggaacgccgcgccgaccccccacgggctctggtaccccggaaaacaggaaggggacccccaagggcttccaggggttttccctccctcccgggttgtccccccccggcccgcggggaagagttaaccccccccgtcccccccgggggaaaggccaaaaaacccccccccccccccccccaagggcaaaaggccccccccggggccccatttcccccccccggggcacccgcccccgaaacccccagaaccccgcggttttccccgtgaaatagcccgggggggggcgccacccggggttttccggagggggccccccccccctccccccccccccncgcgcccaacaaaatcttggaaaccccccctgggaggggtataaaaaaaacgcgccttctttctcccccgggggagggaggggggaaacccccccccccccaaaaaagagtggtcccccgccttaaaaatttcccccaaaaacgcgggggggaatagcaccccttcttttttctcccca

SEQ ID NO: 5324 - DNA, 1606 bp, Glycine max
  misc_feature (1)..(15): n is a, c, g, or t
  misc_feature (20)..(28): n is a, c, g, or t
  misc_feature (33)..(41): n is a, c, g, or t
  misc_feature (58)..(58): n is a, c, g, or t
  misc_feature (72)..(72): n is a, c, g, or t
  misc_feature (75)..(75): n is a, c, g, or t
  misc_feature (77)..(78): n is a, c, g, or t
  misc_feature (82)..(84): n is a, c, g, or t
  misc_feature (102)..(102): n is a, c, g, or t
  misc_feature (106)..(110): n is a, c, g, or t
  misc_feature (115)..(115): n is a, c, g, or t
  misc_feature (124)..(126): n is a, c, g, or t
  misc_feature (143)..(143): n is a, c, g, or t
  misc_feature (162)..(162): n is a, c, g, or t
  misc_feature (164)..(166): n is a, c, g, or t
  misc_feature (168)..(168): n is a, c, g, or t
  misc_feature (174)..(174): n is a, c, g, or t
  misc_feature (182)..(182): n is a, c, g, or t
  misc_feature (185)..(185): n is a, c, g, or t
  misc_feature (204)..(204): n is a, c, g, or t
  misc_feature (326)..(326): n is a, c, g, or t
  misc_feature (381)..(381): n is a, c, g, or t
  misc_feature (625)..(625): n is a, c, g, or t
  misc_feature (798)..(798): n is a, c, g, or t
  misc_feature (915)..(915): n is a, c, g, or t
  misc_feature (925)..(925): n is a, c, g, or t
  misc_feature (1099)..(1099): n is a, c, g, or t
  misc_feature (1131)..(1131): n is a, c, g, or t
  misc_feature (1153)..(1154): n is a, c, g, or t
  misc_feature (1158)..(1158): n is a, c, g, or t
  misc_feature (1169)..(1169): n is a, c, g, or t
  misc_feature (1376)..(1376): n is a, c, g, or t
  misc_feature (1412)..(1412): n is a, c, g, or t
  misc_feature (1561)..(1561): n is a, c, g, or t
  misc_feature (1571)..(1571): n is a, c, g, or t
  Probeset Number=SeqID_15103
nnnnnnnnnnnnnnnttttnnnnnnnnnggggnnnnnnnnnggttgttataatatatngttgttgttgattntanannttannntttttgtatatatatatngctnnnnnaatgnttagttgannntgtttgtttgttcctgntgacattataagtgaaaangnnnangacaanacaaaaanaanctgctgacatatcatattnataaacagcgcttccgcgccggccgcgacactccgtaaaagaaggaggggaggggagagtactcaataataaataaatataatgtgatggtaatagataaatcttctgtagacaaatattgnggtaaagagatgtatcgtggagcaatctctatacgtacgcctaggccagataccncccgcagtggcgcgctcaccgaccacaaacacgcccgcccgccacgcccgtgggctgcgtgggagagtcatacatattatttcttggggcgggctttctacgcgttctccgtgctcgatggtcggcactcaattaggcatatacactgactgaaaaagaaaaaatatacacgcagatcgaggtagtggtgctctttgctgttcttgcttcgcggagatgctacaagatctggtgtacgtagtgnttgtagttaaaatagtgaacgtgatagattgtggcgcggtgagatgagagaatacgtgcgagcatactccacccacacaccaatcaaataggggcgcgggtgtagatagaataatatggtgcgcgttaaatattaagattccttataatactagcttgcgggtttggtgtatnatataataggggagagaaaataataaacgagcgtgccgggcgggggcataatcaatacatgataggcgcggggcggctgctcatacaaccatcatacactcacctgctcgcttcgcngcccgtcccncatttaagatctttaatagcgggtgttgtggatggtactgccttatccaaacacaccgaaccaccaccggcgcgcgtggcagtgtgtactatagagaacacacgacgccgccgcgcagaacgacgtctcgccgtttcggctatatcatacctgtagctgtgtcagcgtcagctnatattatggtgcgagttcatgtgctactacanatcaaatcgcgcactatcgcgnntgtnctgctacgaanctagacatcaccagctctccatctctccgccaccacagtgtatacttatctacgcatcaccagagtcctatgcagcacacaaatagaaaatacgggaagtcgtaggagtcgatgtaatacatacacaactcacgaatacatcctgccggcgtggggtgctcgttcttattcttcattatatatactatatctcgtccgggaccacgnatatcactctactcctaccgccctctcacaccgacntctctactatctctatcttacaccgtgacggccgatcaatagtctacataaactaaaacgctgcgtgtgggtcgccatacggtcgctacagtatacaactgatatgctctctggtccgccgcgcgcgtgtggtgcgctggcgcacatcncacaacctcnacgagtcgcagctcctgctgactactaccagcgca

SEQ ID NO: 5325 - DNA, 1353 bp, Glycine max
  misc_feature (298)..(298): n is a, c, g, or t
  misc_feature (328)..(328): n is a, c, g, or t
  misc_feature (407)..(407): n is a, c, g, or t
  misc_feature (857)..(857): n is a, c, g, or t
  misc_feature (1290)..(1290): n is a, c, g, or t
  Peptide Sequence Number=SeqID_8810
  Probeset Number=SeqID_15104
ccgcgccacgcacctgcctggatcagtgaagggaaaggccacagcacaccgccgacatgagcataacaaaagtaatgtgaggatacagaattgataatgaggatgagaataacaaccacacaacacgcacaagaagaatacacccacccacataacaccggcgcataatgatgtgggtgggccacaaaacggaccaaaccacgacaagcacatacactcaactcaacatagcataaaataagcaaagaacatgacatgcacaagacaagagataatatcgatgatgaactcgtcttgnaccttcacaccctcatccatggcgcggcanaacacacagactcaccgctatacaacccacaacccaccacccccccacccggtgtgggtctggaagaggagagacgagntggtgcatctaaacacataaacaataataccatcagccgctgagtggtagggacatttcacgagaagcctgggtgggggtgttgcgatccccacactcaccacaacaggcgccgcggcagaacataatgaagacgccccgagaggaccgtcccacctataatcgaggcacacgtgtgaaaacaaataattcacaccctaatattaatacacactcacacactaagaggaataactcacgtattggtgggagtagcagatgagcgagaacagaccgacacgaaacacaggacagaggcacaaatatgaaacagagttgtgcgcatgttccctcagctatactctcacctagtcattacaaagtaatatcaccaaaatccaacgtccacacccaagatagagaggaaaacccacaccaaaaaagaaagccggtaggccacatgtaagaatcnctctttaaactaactaatttctttctttcatatttatttgattatataccaccaacctccacaatctacacaacaggtatacaccatcaacgaggagagcaaaccacacacaccaacacggggcacccagctcgtagccagcactaacccccaaggttcttgtatccaaaaataacactatcaaccaaccaccaccataaagaagaaaaaacagaaatgagtgcacccattctctaaagtagcggtgggatgtgatggacgcgaaggtagttttggttgtgtttctaccactacccatcacctttctttgcgtctcttttatggggggggggtggcgcggggtcccaactaccattccctatatccaaaaataaaaggaggaacctcacaaaataacacccctcgagagaggtggagctttgttgctaggtgnggggggggccacccccaaaacccaacacaaaaccaagggggcgggggggggcaaaaaataata

SEQ ID NO: 5326 - DNA, 811 bp, Glycine max
  misc_feature (674)..(811): n is a, c, g, or t
  Probeset Number=SeqID_15105
agtcttccatcgaagtgtattgcattggattattgacttttgacttgggtgttgtcacacggccacaccggagtatcgcgtgtccttcgtcagcctgtcctgtcagtcctttgtgcatctttgcctgccccagccccccgcgggggcggccgcgttttcgtctgtcaaacagagcatcgccgacaagggcagcgccaagatggccgactggaagagcgcttcgtctgtgtacgacttcagcgtcaaggacatcactggcgccgacgtcagcctagacaagtacaagggccacgttctgctgatcgtcaacatcgcctcgctgtgcgggctgacggccaccaactacaaggagctcgtcgagctggacgagaagtaccgcgagcgcgggctgcgcatcctcgccttcccctgcaaccagttcaacggccaggagcccggcacggccgacgacatcgtgtgcttcgccaagaagcagaacgccaactttgacctgttcgagaaggtgaacgtcaacggcgacgacgccagccccctctggaagtacctgaagaacaagcagggcggcaccttcggagacttcatcaagtggaacttcaccaagttcatcgtccgacaaggagggccagccccgtggagcgacacagccccactacggagccacacaaactgatctnnnnnnnnnnnnnnnnnnnnnnnnnnnnnnnnnnnnnnnnnnnnnnnnnnnnnnnnnnnnnnnnnnnnnnnnnnnnnnnnnnnnnnnnnnnnnnnnnnnnnnnnnnnnnnnnnnnnnnnnnnnnnnnnnnnnnnnnnn

SEQ ID NO: 5327 - DNA, 441 bp, Glycine max
  misc_feature (94)..(94): n is a, c, g, or t
  Peptide Sequence Number=SeqID_8811
  Probeset Number=SeqID_15106
aagatcggtcagtcagtaccacgcgcgccgccggcgacgaccaatttctccgcgcgcggggatggcggccgcggcgggccccacgaggctggcngtacttcgatgacatgtgggccctccgcgcccccgccaccgtcctctccatccatcatcaggaggagggcggccggcgagcggtggtgctggacgctaccgtcttccacccgcagggcggcgggcagccggccgacacgggcgccatcgtctccgcgtccggcgccggcgccaggttcctcgtcaaggacggggtggtcttccactatggcagatttgaggacgctgccggagaggaggagctcagccaagggcagagcgtcagcttggaagtcgacgcggaacggcgcaagctcaactccaggcttcactccgcgcggcatttgctggacagttgcatgaccaacc

SEQ ID NO: 5328 - DNA, 559 bp, Glycine max
  misc_feature (63)..(63): n is a, c, g, or t
  Peptide Sequence Number=SeqID_8812
  Probeset Number=SeqID_15107
gtagccagtgcagagataaaattcaggcatggtctccccctggagatggagttctatactatnctggtgaggtgttctcaacttctcatcagccagtggcttctcttagactagagcgcatacttaatggcttgcaggacattgagtacctgagactatatgcttcaagatacggtagggacgagagtattgcacttttagaaagaatgggagtgtactctggtcctgagcgttacacatttgagcacatgcccattgatgcaatgagagggccaatatttaatgcccgccgttcttgaattgatatgttatagatgctgtgcattttggtcgagtggttcatttgttggcagctaaaaaaattcaggcttcagccgctaactttcaaagatgcgccttttggccgtaatcgagtgagtttcgtggaatatccccccaatgctgcccaatttgcactgtgtagccaccgaatgtgacagtgtatatatatatatacacagttcctgacacggactttggtgagaattaacaaaccccaaaaaaaaaaaaaacttacctt

SEQ ID NO: 5329 - DNA, 1773 bp, Glycine max
  misc_feature (9)..(9): n is a, c, g, or t
  misc_feature (77)..(77): n is a, c, g, or t
  misc_feature (81)..(81): n is a, c, g, or t
  misc_feature (87)..(87): n is a, c, g, or t
  misc_feature (89)..(89): n is a, c, g, or t
  misc_feature (93)..(93): n is a, c, g, or t
  misc_feature (137)..(137): n is a, c, g, or t
  misc_feature (145)..(145): n is a, c, g, or t
  misc_feature (148)..(148): n is a, c, g, or t
  misc_feature (151)..(151): n is a, c, g, or t
  misc_feature (212)..(212): n is a, c, g, or t
  misc_feature (234)..(234): n is a, c, g, or t
  misc_feature (236)..(237): n is a, c, g, or t
  misc_feature (239)..(239): n is a, c, g, or t
  misc_feature (245)..(247): n is a, c, g, or t
  misc_feature (249)..(250): n is a, c, g, or t
  misc_feature (254)..(255): n is a, c, g, or t
  misc_feature (257)..(261): n is a, c, g, or t
  misc_feature (263)..(263): n is a, c, g, or t
  misc_feature (266)..(269): n is a, c, g, or t
  misc_feature (271)..(271): n is a, c, g, or t
  misc_feature (273)..(273): n is a, c, g, or t
  misc_feature (275)..(275): n is a, c, g, or t
  misc_feature (280)..(284): n is a, c, g, or t
  misc_feature (287)..(289): n is a, c, g, or t
  misc_feature (292)..(292): n is a, c, g, or t
  misc_feature (294)..(297): n is a, c, g, or t
  misc_feature (300)..(300): n is a, c, g, or t
  misc_feature (302)..(304): n is a, c, g, or t
  misc_feature (306)..(306): n is a, c, g, or t
  misc_feature (308)..(309): n is a, c, g, or t
  misc_feature (317)..(317): n is a, c, g, or t
  misc_feature (319)..(319): n is a, c, g, or t
  misc_feature (321)..(325): n is a, c, g, or t
  misc_feature (327)..(330): n is a, c, g, or t
  misc_feature (332)..(332): n is a, c, g, or t
  misc_feature (334)..(334): n is a, c, g, or t
  misc_feature (336)..(340): n is a, c, g, or t
  misc_feature (343)..(344): n is a, c, g, or t
  misc_feature (346)..(347): n is a, c, g, or t
  misc_feature (353)..(353): n is a, c, g, or t
  misc_feature (362)..(362): n is a, c, g, or t
  misc_feature (369)..(369): n is a, c, g, or t
  misc_feature (373)..(373): n is a, c, g, or t
  misc_feature (378)..(387): n is a, c, g, or t
  misc_feature (390)..(391): n is a, c, g, or t
  misc_feature (402)..(402): n is a, c, g, or t
  misc_feature (405)..(405): n is a, c, g, or t
  misc_feature (410)..(410): n is a, c, g, or t
  misc_feature (420)..(420): n is a, c, g, or t
  misc_feature (422)..(422): n is a, c, g, or t
  misc_feature (426)..(426): n is a, c, g, or t
  misc_feature (452)..(452): n is a, c, g, or t
  misc_feature (456)..(457): n is a, c, g, or t
  misc_feature (460)..(461): n is a, c, g, or t
  misc_feature (465)..(465): n is a, c, g, or t
  misc_feature (472)..(472): n is a, c, g, or t
  misc_feature (477)..(478): n is a, c, g, or t
  misc_feature (480)..(480): n is a, c, g, or t
  misc_feature (486)..(486): n is a, c, g, or t
  misc_feature (489)..(489): n is a, c, g, or t
  misc_feature (491)..(491): n is a, c, g, or t
  misc_feature (493)..(493): n is a, c, g, or t
  misc_feature (496)..(496): n is a, c, g, or t
  misc_feature (502)..(502): n is a, c, g, or t
  misc_feature (505)..(506): n is a, c, g, or t
  misc_feature (514)..(514): n is a, c, g, or t
  misc_feature (522)..(523): n is a, c, g, or t
  misc_feature (528)..(531): n is a, c, g, or t
  misc_feature (541)..(541): n is a, c, g, or t
  misc_feature (545)..(546): n is a, c, g, or t
  misc_feature (548)..(548): n is a, c, g, or t
  misc_feature (556)..(557): n is a, c, g, or t
  misc_feature (559)..(559): n is a, c, g, or t
  misc_feature (575)..(575): n is a, c, g, or t
  misc_feature (584)..(584): n is a, c, g, or t
  misc_feature (601)..(601): n is a, c, g, or t
  misc_feature (605)..(605): n is a, c, g, or t
  misc_feature (610)..(610): n is a, c, g, or t
  misc_feature (622)..(622): n is a, c, g, or t
  misc_feature (686)..(686): n is a, c, g, or t
  misc_feature (693)..(693): n is a, c, g, or t
  misc_feature (715)..(715): n is a, c, g, or t
  misc_feature (749)..(749): n is a, c, g, or t
  misc_feature (753)..(753): n is a, c, g, or t
  misc_feature (811)..(811): n is a, c, g, or t
  misc_feature (824)..(824): n is a, c, g, or t
  misc_feature (872)..(872): n is a, c, g, or t
  misc_feature (923)..(923): n is a, c, g, or t
  misc_feature (925)..(925): n is a, c, g, or t
  misc_feature (1019)..(1019): n is a, c, g, or t
  misc_feature (1078)..(1078): n is a, c, g, or t
  misc_feature (1139)..(1139): n is a, c, g, or t
  misc_feature (1151)..(1151): n is a, c, g, or t
  misc_feature (1166)..(1166): n is a, c, g, or t
  misc_feature (1178)..(1179): n is a, c, g, or t
  misc_feature (1181)..(1181): n is a, c, g, or t
  misc_feature (1184)..(1184): n is a, c, g, or t
  misc_feature (1186)..(1186): n is a, c, g, or t
  misc_feature (1217)..(1217): n is a, c, g, or t
  misc_feature (1247)..(1247): n is a, c, g, or t
  misc_feature (1251)..(1251): n is a, c, g, or t
  misc_feature (1266)..(1266): n is a, c, g, or t
  misc_feature (1284)..(1284): n is a, c, g, or t
  misc_feature (1308)..(1308): n is a, c, g, or t
  misc_feature (1316)..(1316): n is a, c, g, or t
  misc_feature (1319)..(1319): n is a, c, g, or t
  misc_feature (1328)..(1328): n is a, c, g, or t
  misc_feature (1334)..(1334): n is a, c, g, or t
  misc_feature (1343)..(1343): n is a, c, g, or t
  misc_feature (1363)..(1363): n is a, c, g, or t
  misc_feature (1365)..(1365): n is a, c, g, or t
  misc_feature (1383)..(1383): n is a, c, g, or t
  misc_feature (1398)..(1398): n is a, c, g, or t
  misc_feature (1417)..(1417): n is a, c, g, or t
  misc_feature (1448)..(1448): n is a, c, g, or t
  misc_feature (1459)..(1459): n is a, c, g, or t
  misc_feature (1499)..(1499): n is a, c, g, or t
  misc_feature (1509)..(1509): n is a, c, g, or t
  misc_feature (1515)..(1515): n is a, c, g, or t
  misc_feature (1519)..(1519): n is a, c, g, or t
  misc_feature (1549)..(1549): n is a, c, g, or t
  misc_feature (1576)..(1576): n is a, c, g, or t
  misc_feature (1617)..(1617): n is a, c, g, or t
  misc_feature (1625)..(1625): n is a, c, g, or t
  misc_feature (1630)..(1630): n is a, c, g, or t
  misc_feature (1641)..(1641): n is a, c, g, or t
  misc_feature (1643)..(1643): n is a, c, g, or t
  misc_feature (1671)..(1671): n is a, c, g, or t
  misc_feature (1673)..(1676): n is a, c, g, or t
  misc_feature (1679)..(1680): n is a, c, g, or t
  misc_feature (1697)..(1697): n is a, c, g, or t
  misc_feature (1700)..(1700): n is a, c, g, or t
  misc_feature (1704)..(1704): n is a, c, g, or t
  misc_feature (1707)..(1707): n is a, c, g, or t
  misc_feature (1709)..(1710): n is a, c, g, or t
  misc_feature (1713)..(1714): n is a, c, g, or t
  misc_feature (1716)..(1719): n is a, c, g, or t
  misc_feature (1733)..(1733): n is a, c, g, or t
  misc_feature (1736)..(1736): n is a, c, g, or t
  misc_feature (1738)..(1739): n is a, c, g, or t
  misc_feature (1741)..(1741): n is a, c, g, or t
  misc_feature (1743)..(1743): n is a, c, g, or t
  misc_feature (1748)..(1748): n is a, c, g, or t
  misc_feature (1752)..(1753): n is a, c, g, or t
  Peptide Sequence Number=SeqID_8813
  Probeset Number=SeqID_15108
caactacanaccacttaaggctgcacaactatactatgactcgcgtctcgctagcagcttagcaaagatgagcaccnttgntgtcanancacntcacaggatcgctaagcagagatgatactctatgcgtatagtangatacatnatnttnatatcacactcatcgcgttatgcactctacaactatccacacacccacacacacactagtnttattcctattttcattatttntnntntttttnnncnntttnntnnnnntnttnnnntntntnttttnnnnnttnnnttntnnnnttntnnntntnntatttttntntnnnnntnnnntntntnnnnnttnntnnccccgngccccgggnccctcancacntcggnnnnnnnnnnctnntgacttttccnggnttttntatattatantnacantcctacatctatacttctctcctctntatnntgnnggtngaaacantggtnntncaatgngtntntnttntccatnttnntgtgtggngcagccannggggnnnntgggtggggntttnntntctttttnntnatatctatatcttatntattttatntcaattccatcacaatngtancgtcnactcacatgccnctacactcatcagacacactcacacaactaagctcacgctacatctcagacgccacgcatacantctgcanagctccgcgctctgttagacgntcatgatatcgtctgtcgcgctgctcgtcacgtnccgngcgcgctgacagcccgctcgcgcgcgaacgtcggtatccgcagcacgcaccggcgagnacgcgcacgcagnacgcacgcccgagacggcatcgtgagatgcgcagcgccgtgtcaggantacaatgcgcgcacacgccgacgccacgactagtgtcgcgagcatcggttncncgcggtgcccgcgagacagggaggcgctacgcgtacgctagcacgcgctcgatggcgaagatgcgagctgtcgcatgcgcacgcgcggtgctcncattacgcgatccagtcgcatgacgtgcgctgctgtcgctccgaggacaggatgcgcgntccgcgcggctaccgcacgcgcatcgtcacgatcagacgcgtttcgcccgatacgtgcgcncctctaatgagntgcgtatcacctcgntcgagcgcgcgnnanggngncgtgtagacgacgacgccgctcgcttgcatnagacgcgtcgtgcgtactcgcatcgtcgtngcantctcggtagtacgtncttaatgatagactactngcgacaggtgtgatagttgtgtgncgaccctnctntctagcatnattctntacgtgcgnattagtgagtttatgagatngngatgtatgtcttctggtnttcatgagtcgctgnatgcactcgcacccagtanagaaacgtcactcgcgttgattgtttttagngtgagagacangcgcgtgttctctggtgcgtcgatcgacgcgtaggcctgnctcagagagnagaganaaanagatacagcatagaatgatagtagcatctncctctctcctacgtcctctctgcgtgngtgaattgttcgtgggtgagttctgtgtatggtatggggtngtctctgnctctntctcgtccgcngngtgaggactgctctcctccttatttttntnnnnggnngttctccggtttgaggntgntgtntgngnnggnngnnnngtttggggagtggngtntnnantntcttntttnntttttacttatctccccttt

SEQ ID NO: 5330 - DNA, 1529 bp, Glycine max
  misc_feature (18)..(18): n is a, c, g, or t
  misc_feature (23)..(23): n is a, c, g, or t
  misc_feature (25)..(28): n is a, c, g, or t
  misc_feature (169)..(169): n is a, c, g, or t
  misc_feature (314)..(314): n is a, c, g, or t
  misc_feature (533)..(533): n is a, c, g, or t
  misc_feature (539)..(540): n is a, c, g, or t
  misc_feature (824)..(824): n is a, c, g, or t
  misc_feature (885)..(885): n is a, c, g, or t
  misc_feature (895)..(895): n is a, c, g, or t
  misc_feature (1029)..(1029): n is a, c, g, or t
  misc_feature (1105)..(1105): n is a, c, g, or t
  misc_feature (1125)..(1125): n is a, c, g, or t
  misc_feature (1127)..(1127): n is a, c, g, or t
  misc_feature (1180)..(1180): n is a, c, g, or t
  misc_feature (1193)..(1193): n is a, c, g, or t
  misc_feature (1200)..(1200): n is a, c, g, or t
  misc_feature (1237)..(1237): n is a, c, g, or t
  misc_feature (1279)..(1279): n is a, c, g, or t
  misc_feature (1357)..(1357): n is a, c, g, or t
  misc_feature (1492)..(1492): n is a, c, g, or t
  Probeset Number=SeqID_15109
ggggtggtggtgtggggnttggntnnnnctttttttttgtggcggccggctcgctgtggtccggttccccgcgcgcgggttggggtatggtgaccacggctatctgttgaagcagctcatcactacgccgtgtatcgttcgaggagagggatttggagtgatgacaggnttagtaaattgatgtagtttgaggcggctgccatgggtgtgcgctgctgagggggaggcgatggtgtagtctgcatgtcagtcggtccacccacacgccacgccacacactagcgcgcggttctactgtcatgtctgcactgagnaagacaggggagcaggtagtacacaaataagagagagaaacatacatacaaagagagagactagatttactctatgtattccaccacagagataccacttgtcattcacgcccagcgaaaatgtataacatatatagaagcaacagagcggagccgtgagtggtagaatattgtgtatagtgagatggagaaatctagcgggtgagtgggggcagaganatagannatctatatagtgcgctatgccgaggggagagcgaggggcgtcgagtgtgtcggctggatgccggcgcgcgcagccgtcgtgtctgctgcgatagcgtgtgtatatgtgtatatcttaatgcttgagtgtatatattgactatagatcgagtgtaaagacgagtgcgggcgaagcacagcgcggatatcaacgataggcgcgacggagcaagcgcatacgacagaagcggaagagcgtgggaaacacactgctctgtctgctgtggagttaacacctgaactagnacgcgctacgaaaatatcagaacatcattcctgtgcaccactcactgatcgtttcgcgtcnctgccatctntctctacatgctccagtacagctcataattagttatattatgcatggtacgcgcgcgcaagacagcgcaccacgtatgatgacagagtaatgggaatatgtagcgacagaagcgcacatagacgagacactcgngcgtcgagacacgtgagatcgcgattgcggcccgcgcctcctcacttgcgcagtctgtgtggtcgcgaccacgccncgtagcactgacgtcgagcncncaagtagctgtgattgtgcacgtgaggtgtgcgtggcgtctacgtgaagatgngagcgagcagagncaccagncgaagagcgacgatgcgatagtacgtcagtatacagnaatgtgccagaagggcgtgagcgcgatgcatgatctcgtaanacactctcagtaacaagtgactactcgtatgtcatcgctctactgcatgatagttgtatcgtgtgctgcaacgacggngatgagatacaatgtacatgtacaggccgtgcgacgcggcgctacaggcacacgactaatagcgacgtgtcacacgtagcgcacagaatacgattatcaataactagactgacacgcactctagtataacgactnatgtcagttgtagacaccacgtgagcactctctctct

SEQ ID NO: 5331 - DNA, 434 bp, Glycine max
  Peptide Sequence Number=SeqID_8814
  Probeset Number=SeqID_15110
cacgagctaataggtgcttcgaatacaatggtgtggatccaattcgaatactatgtggtggttttgccggaaaaccatgctggaatagaacactacagtacgtgtccgtgttggaggcgggctcaagtgcctctacatgatcgcgttaacagacaagtagcgatctatatgttacgttcagcacacttgacaccgtcattgaattagtttatgtctactgccatgcctatatatggcatcgcggatcggaggccattctcacatggcgagtgtaaggttcaccgagtcagagaccgtgtacagggatagcggtaatttgatatggatctattgctagaggtggaggatgtgtagcaggtgatcacaagctatatttatagaagcgatgagcatgggagctactgtaatgggatctatataagtaaacataatca

SEQ ID NO: 5332 - DNA, 1458 bp, Glycine max
  misc_feature (932)..(932): n is a, c, g, or t
  misc_feature (1410)..(1458): n is a, c, g, or t
  Probeset Number=SeqID_15111
aaaattctgagataagtgattctctgccttttcaattttcattttaaaaaaaagaaagaaaaaaaaaagaaagaagaaaattgtgcatgctggttcttgaatgatcttcgtcctggattcagaattttcggtgacagatctctgctcggacttccataaatgcatatctgtggatgtgttccaccttggctctgtcagattctcgcttgcatgggaggttgtctgggatgcttcccaaatcctaaaggccaatcaacaaacaaagacaacagatcagaagatttttggagcagcagtgcatttgaaatagatcagggtgcacttcagtcccagaaaagcatctcatcaattggcataccttctgatcctcaaagtagtgctgacattcagattgattctcctgaatatgtcaatcatggtcttcttctctggaaccagatgaggcgacagtgggttggaaatagaaggcgtgagaataagaaacaagttggagaacctataataagttggaatgccacctatgagagtctaatggggaccaacaagccttttcaccggccaattcctcttggagaaatggttgactttcttgttgatatttgggagatggaaggcctatatgactaagcagacaaatcaggttttttttttccttagagattttcttaggagagggaaagggaggtagaatttgttcatcctactataaccccactggattgttgtacatacatgggctaattttttttttcttaggctaaatggggaaactcttaactaattggttttgctttttcttccgggggcgtcatttctacgtgaagtatatttacaccaaattgtgttttgataaaaaaatatattacatcatttgtataattctctgactagggtaatttccatttatggactgaaaagttaaaaactacttnccagtattttcttgatctgcatctattctagaatattcttccattctgccatttttacattttcttgcatatctccagctgattattattgcaatgtatgcaggtcttcttctctggaaccagatgagacgacagtgggttggaaacagaaggcatgagaataagaaacaagttggagaacctataataagttggaatgccacctatgagagtctaatggggaccaacaagccttttccccggccaattcctcttggagaaatggttgattttcttgttgatatttgggagatggaaggcctatatgactaagcagacaaatcaggtttttttcttcttagatttcttaggggagagggagagggaggtagaatttgttcttcctactatatccccactggatagttgtacatacatggggaaactttattttatttttaaagctaaatggggaaactcttaactaatttgttttatnnnnnnnnnnnnnnnnnnnnnnnnnnnnnnnnnnnnnnnnnnnnnnnnn

SEQ ID NO: 5333 - DNA, 334 bp, Glycine max
  Peptide Sequence Number=SeqID_8815
  Probeset Number=SeqID_15112
atgagccggccaatgtaggaagatccagcaggtaagaatcagcaagagaagttcatcaccggacctctatctgtactcatgatgagtgttgcaaataatactcaggtactgatacactgtcggtacaacacaaagcttctgggtcgtgtaagggcttttgacaggcactgcaacatggttcttgaaaatgtcagggagatgtggtctgagggtaccaaagactaggtaaaccaaagcatgaagtacccaagccagtctaaccagcgataaatgtcaccagcgagagatgtttcgccagtgaaggtttctgtcatcattgttctgaggaatccca

SEQ ID NO: 5334 - DNA, 245 bp, Glycine max
  misc_feature (211)..(211): n is a, c, g, or t
  Peptide Sequence Number=SeqID_8816
  Probeset Number=SeqID_15113
agctacgtaggcccccccccgtccctctcgtgcagtccttcatcgatggtgaaggaagaagttcattcacgcgtcagggttccatggtgtacacaaagaggccttcaagaaagtctcggttgaaaagaaggtttgacacgagaaaaggacagaaagatgagtctgtcatattgaaggagcaggtggaggagctgcaaatgaaaatattggngaaagatgaacttatagagtcatcagaaaacaca

SEQ ID NO: 5335 - DNA, 585 bp, Glycine max
  Probeset Number=SeqID_15114
taattcggcaccaggcttcgaaaagcttagctgcttaaaagggccaatgacgtatgaaaaactcgcgaaggcccacctggagaggatcatgtccactaatggactatcggagactggggatgagaatagcttcgaaaagccttagctgctttataagtgccaatgacccatgaaaaactgccatgatgtgtgagtggcgaaacattcgcagcaacgatccgaataaaaagcgatccactggatctcatgctaactcaaaaatgatccatcggataaccgttacctataccgttttttattgctggatcttaacgatatttctgattaggtaccgatccaagaacagatcaccagcctattaaagaagctgctcttgggaatattcccaccattgctttctgtgacaccgattcacctatgaggtacgtggacattggaattcctgccaacaacaagggcaaacacagcattggttggctcttctggctccttgcaaggatggtgttgcagatgatgggtaccattcgccctggcctcaaatgggatgtcatggctgatctgttcttctatagagaacccgaagag

SEQ ID NO: 5336 - DNA, 1267 bp, Glycine max
  misc_feature (1241)..(1241): n is a, c, g, or t
  misc_feature (1259)..(1259): n is a, c, g, or t
  misc_feature (1262)..(1267): n is a, c, g, or t
  Peptide Sequence Number=SeqID_8817
  Probeset Number=SeqID_15115
gtaccgggccccccctcgagtcagctacgtagcccccccccctttattattttaagctaacgtaataaaccatctttcagataagatgttcaagtggtttaaacaacctgatataccttcatcatctcccgatatgctcactttcccctttgagtataatatcttcggcttcactatggacaactacgtcaagtcctatactcgtaatcgtgtcaccaaagaaaatctgaaagaaatcattgaagaagtcaactctgctttaaaatctgattctgatagcttcaaagcttgggatttctttgctattttcatcatccttgctctcaacggtggtatcattgcctgtattgctacaattgaaatgaaagcttttgtcgtttttgcaattaagctcggttatatctgtattgctcttatcatgaactttgttatctatggatgctgccttgactctactgtcaatagattaagagataagatacaaagtattcttgatcagaaggatgagtattttgattctaaaggtatgaaatggaccgtttgtaacggagcagattttccatactgggttgaacttcatattcaatctcagtttgaaatgaagttggagagagagattgagaaggccacaggacaaaagaaaaacaagaaaactgatagagacaatgaaaataaaggcattttggatagcactggtaacatcaaataccaaaagaaaggtggtttattcggaaataaaaagaagaatgaacagcatcttattggattcgaagttgatgaagaagctgaagaaaatgaagaagatacctctcacgttcaacctcaaagaggtcaaagacaaaacaactttggaaattactttgctcaacaacaacctagagatgaagttgaaatcgaagtcaaggatagaaagtttgatagactttatgctcctttagaagaagactatgaagaaaactacgaagatgaagatatagtcagcccttaagcaatatgctatgatgatgattattaatttcaattttgctcttttctgaagaacaatctcaaggatcatttttttaagaaagaaggctctatttgatatgtaattttaactgtgaaaaagaaagagagttatttgatattgataaatcatttgatacctgataagtaattatatttgaaacatttttatgacaaactgaatatgatctataattctagttattccaacatttttaaaaaaaaaaaaaaagaanaaaaaaaaaaaaaaagcngcnnnnnn

SEQ ID NO: 5337 - DNA, 1991 bp, Glycine max
  misc_feature (16)..(16): n is a, c, g, or t
  misc_feature (56)..(56): n is a, c, g, or t
  misc_feature (58)..(58): n is a, c, g, or t
  misc_feature (70)..(70): n is a, c, g, or t
  misc_feature (103)..(103): n is a, c, g, or t
  misc_feature (121)..(121): n is a, c, g, or t
  misc_feature (135)..(135): n is a, c, g, or t
  misc_feature (137)..(137): n is a, c, g, or t
  misc_feature (176)..(176): n is a, c, g, or t
  misc_feature (178)..(178): n is a, c, g, or t
  misc_feature (231)..(231): n is a, c, g, or t
  misc_feature (281)..(281): n is a, c, g, or t
  misc_feature (301)..(301): n is a, c, g, or t
  misc_feature (313)..(313): n is a, c, g, or t
  misc_feature (342)..(342): n is a, c, g, or t
  misc_feature (379)..(379): n is a, c, g, or t
  misc_feature (418)..(418): n is a, c, g, or t
  misc_feature (430)..(430): n is a, c, g, or t
  misc_feature (455)..(455): n is a, c, g, or t
  misc_feature (556)..(556): n is a, c, g, or t
  misc_feature (606)..(606): n is a, c, g, or t
  misc_feature (616)..(616): n is a, c, g, or t
  misc_feature (736)..(736): n is a, c, g, or t
  misc_feature (851)..(851): n is a, c, g, or t
  misc_feature (859)..(859): n is a, c, g, or t
  misc_feature (935)..(935): n is a, c, g, or t
  misc_feature (951)..(951): n is a, c, g, or t
  misc_feature (966)..(966): n is a, c, g, or t
  misc_feature (972)..(972): n is a, c, g, or t
  misc_feature (1004)..(1004): n is a, c, g, or t
  misc_feature (1173)..(1173): n is a, c, g, or t
  misc_feature (1193)..(1193): n is a, c, g, or t
  misc_feature (1197)..(1197): n is a, c, g, or t
  misc_feature (1202)..(1202): n is a, c, g, or t
  misc_feature (1230)..(1230): n is a, c, g, or t
  misc_feature (1240)..(1240): n is a, c, g, or t
  misc_feature (1327)..(1327): n is a, c, g, or t
  misc_feature (1331)..(1331): n is a, c, g, or t
  misc_feature (1354)..(1354): n is a, c, g, or t
  misc_feature (1357)..(1357): n is a, c, g, or t
  misc_feature (1527)..(1527): n is a, c, g, or t
  misc_feature (1656)..(1656): n is a, c, g, or t
  misc_feature (1680)..(1680): n is a, c, g, or t
  misc_feature (1718)..(1718): n is a, c, g, or t
  misc_feature (1720)..(1720): n is a, c, g, or t
  misc_feature (1775)..(1775): n is a, c, g, or t
  misc_feature (1909)..(1909): n is a, c, g, or t
  misc_feature (1954)..(1954): n is a, c, g, or t
  Probeset Number=SeqID_15116
cgatcatcactacgancgtcagtgacgcgtacacactcgagagtaagcaataggtntngcagacgtcgtngcgcgtgcgactcgcagatacatagtcgacgantcgtctctacatcccgtncgacgctgatgctncnagtcgtctcactgtaccgttcagcagcagacagtatgcnanccgtcaacagagatccagcgtgcactgacgagacgagcatgacacgctctatntatcagacgacgtatgagtgcgccgctgtgcgagaacactgaagtatcgnctgtagcgcgagtcgtatancggacgcgttgncagatacatataccatgctaatacatgcncggatcgcgcatagctcttagatagccgctaagatcnatgacgtcatcggtgttgtgatagtagagcgcgcagtantccgtcatgggncagcgcagctacgacggacacagangcgtcttagacgtcacatagtgtcgtgtgcgcattcacacatactcgtgcgtagtccgcgcgacgagacctcgcactgtcgacgatatcgacgtgtcgacncgtgccgtacgcgtgatcgatacatccatgatcgcactgtctgtgcgtgntaacagtcangataatcgtgttcgtgattcctcgtaccatcatcacgcatgcaccatgatgtcagctagacgtgcgccgtgaatgcagtacacaacacgtgtgtcaccgtgtgcgtcgcaagtaatatanagctacgctgcagtccgtgagcgtgtctactaagattatccagaccatgcgtagtcacgtcgatatgagcacatcgatggtcgtgtgatatgctgccgccgcacagcgcgtcgtntacaccancaatatcatctcatcgagctcagagctgcgccatggcgcatcacaactatcagtctctatcagcgcgcgcggtganagactagcgacgtcgncatagtcgacaagcncagtgngaggcgatacagctgcgcagcgcggtctcatnatgcagactaagtagtcatacgattgcgcatcgtgatgatgtatccagacgtatgtgacgccatcgtatcgtacgtgtatgtgatatatagatgctctgatcatgcatggtacacatcgattgcgctagccgtatgatctcacgttatgtgtgtggagagcgtagctgncgtgagaccgtgcgcatgantctnagtantgatgaatcgtatgacaaccgtagtgtntctagtatgntgtcactgctctgatatactatctgaagaatcgtcgctatataaatacattgtatagagctaggagtgtgcggattgatcagtaganagtnacatattagaatagtggatgatnatngtgatagtctcggttgcattgtatcgcagacggtagatgagtgcgcgtctaccacacacacaactacacgcataatgtgacgatccttgtcacgttctgcggcttatcgcgctcaacccgtgtaagaatgatagtgagatctcacgcgagagcgcgcagagagagagagncgcgtcgaggtgcacctgcaccgcgcgttcacgtcactgagctcacgaccgcgcagcttcatctctatcgccccatacctcactcgctacgcactctgccacagacttcagcgatgtgagcgagtatangagagacgagcgacgcgcagcctncaccactactaagacacgggccagcagcggcgtagctncncgctagataatcatactatagtgtgataggtctcttcatatgttatatagctagngttgtacaatgagtgacataatacagctctccagtacacatcacacacagcataccctcacactctgcagtgcgctctgctgctgtcacatatacgcactcactctcgatcctagtactcttaggtggtgtatngatgtatacatagtgatgatgctacaatatatgctgccttatatnagtgtctggtgtcttgtatgtataatgtatgtactct

SEQ ID NO: 5338 - DNA, 218 bp, Glycine max
  Peptide Sequence Number=SeqID_8818
  Probeset Number=SeqID_15117
cccctgagcatggttattatctaaaatggagtcaacagtcagcttgggaaatgaaccatataagtactggttcttcttggaaagagattgttgaaccagtgatgagattgtatactgaggcaacaaatggctcctatatagagaccaaagagagtgccttggtatggcactactatgatgctgatcctgattttggatcttggcaagccaagcagggg

SEQ ID NO: 5339 - DNA, 267 bp, Glycine max
  Peptide Sequence Number=SeqID_8819
  Probeset Number=SeqID_15118
ttcgtccgggggacggcaagcacgcagccaacccactgctcgaggaaaagaagatggcgagccaaggaccacggtcaaccccatggagcaacagacgacaatcataacagagaaatcaccgccgatgaaaagatgccggaatctaagattcatcgggacgataggtagaagtggagtgagcgcaaacgctgtagaagccacggtgacacgttcaacaggtaaaaaatgtaaggcatcgccgagggaccccaactgtcgtcgtctcgc

SEQ ID NO: 5340 - DNA, 1381 bp, Glycine max
  misc_feature (6)..(6): n is a, c, g, or t
  misc_feature (9)..(11): n is a, c, g, or t
  misc_feature (14)..(15): n is a, c, g, or t
  misc_feature (18)..(19): n is a, c, g, or t
  misc_feature (22)..(24): n is a, c, g, or t
  misc_feature (28)..(31): n is a, c, g, or t
  misc_feature (59)..(59): n is a, c, g, or t
  misc_feature (70)..(70): n is a, c, g, or t
  misc_feature (316)..(316): n is a, c, g, or t
  misc_feature (339)..(339): n is a, c, g, or t
  misc_feature (496)..(496): n is a, c, g, or t
  misc_feature (628)..(628): n is a, c, g, or t
  misc_feature (863)..(863): n is a, c, g, or t
  misc_feature (1127)..(1127): n is a, c, g, or t
  misc_feature (1232)..(1232): n is a, c, g, or t
  misc_feature (1280)..(1280): n is a, c, g, or t
  misc_feature (1336)..(1336): n is a, c, g, or t
  misc_feature (1363)..(1363): n is a, c, g, or t
  Probeset Number=SeqID_15119
tggggnccnnnccnnccnnccnnncacnnnncctccgctcctaccccaccaccacaccnacacaccaccnctaatactcgctagcctccctccctttgggatatatatgacggggtactaggaagctaggtggaggagtccccctcgggcgccaggcgagggagtgacattctgttgacgtcatgatctcactggggacgtgaggggcagtgtcagcgcgtagagagagtgtgtcttagagtggctgtgagagtagatgacaacagcatactagagaatatagtgcgttcttccgaggtcctctacagtgtgtggntaagatcttgtcttcttacacgntgcctctgtcttctagttgagtgcatttatcacttaccacctccctcattcgccgcgctgtacgcctaggatagagtcagggcttgtagttaatcatggtcttcagttcctgttatttagtattatttgttgtatcctgctctaccgatattagatngccttgtgcgagcagtagagtgagagagtggtgatcactacttgagtatccacagtgcataggcggacgcagtaagtgtgacttgcgtagatgggtcggtgaactgtgctaggaggtcgttgcttctgtgtnccgtccatagctcgcttctcctcatgcgtcccagcgcttgcgtgttctgtacttcctattgtgctaggtctaactttagtagagtagtgtgataagacacatattaatagctaatatatcacatgtaaatttctccgacctctctattatctcatatattaaaccaacaacacatatccctctctcattcattatacttgaatttgatgataatctacacaaccacatcctctcncaagagcaggcctgggatatacacaaatatgatgccatctcatctgatcatgcatattctatcgttagacacgcagaagaaaacatcctcgacgcagcacgcacagacgatggttagatacatatctctagatcaatgtcgagagcccgctacaccacccatcttaatcattagacctgtccttctccacatgaacgagctatcactatttatatatgaatataacataaacttagtgtatcataacatactataatattatanttactatactctgccgctagtattatattagttcttactatatacaagttccatccctcgcctgtctctatcgtgttatctacttgtatgatggaacgtctgtgntccctgtcgttcctctcgcatgcgaaccatgacccgcctaccgacgcngtacgtgcgtaccttgccgctgcagatctctctatatatataaattgtcatgcgtntaggattacaaagtaactttatttctnatcatcctcttgattgcg

SEQ ID NO: 5341 - DNA, 691 bp, Glycine max
  misc_feature (601)..(691): n is a, c, g, or t
  Peptide Sequence Number=SeqID_8820
  Probeset Number=SeqID_15120
ccacaatcgccaagtcatagttcgtgcccaaggttgggacccaaactccatttacaacattcaaattcacgacttcaatgttcctccttttgtttcccctgcccccaacccacatgctgaaacaaggttcccctcacatcttttaccctccttcggggcctccacgagtctccctgagcccgtgtattcacttttgccatccctttcaacttggggccaaaagggccgtggtattttttaattccttaatggctctgggggggccaggatcctattcatgtgcccaaattgtgagagttacactttccacagtgtttctgccttcaccatgttcctgtacttttgggatgcaatggggaggcccccagtagaaaaggggtccaacttattccttgaggttctttccttggagggtgctttacaacccaatttattaatattataactttacacagttaatttcacaagtgtcccaaagggactatatacaacaccacaagggtaattgagagtccttacttggagttaataaagaggatcattattagcaagactcattgggccttggggcccttcaaccctttgtccattgagaagggannnnnnnnnnnnnnnnnnnnnnnnnnnnnnnnnnnnnnnnnnnnnnnnnnnnnnnnnnnnnnnnnnnnnnnnnnnnnnnnnnnnnnnnnnn

SEQ ID NO: 5342 - DNA, 532 bp, Glycine max
  Peptide Sequence Number=SeqID_8821
  Probeset Number=SeqID_15121
tcagctacgtaggccccccccccccccccaaagatcatatttcgtacatcaatagtcaacagggtccttataaaggtcccattgacatcaaagtctttagcgagctagacaatgtcagagatgcaaagatgtattttagcaaaaaagacatgatgtcaatagagaatttaaagcttggcatcacaggttatgaaaaagaaagcaagaagcaatctgctgcacagaaggctcaaaatcaattaaaaatgtcagagagtatgtctaagttcaattttagcagacaagaaactgaagaagccgaatcaagagactcaagaggctcaactgactccttaccaagtcctattaaggcaagatctgatttacctcccttgaagaaactacctgagaagctaaagtctgaggtaagctcaactcttcaggatttcccaaatactggtgaatcacctttattaatgaaggatataaaggctaatgcctcaatgggcccaagttcgaatttctttaaaggagttagtaactctgcaactaa

SEQ ID NO: 5343 - DNA, 618 bp, Glycine max
  misc_feature (1)..(4): n is a, c, g, or t
  misc_feature (605)..(618): n is a, c, g, or t
  Probeset Number=SeqID_15122
nnnnactctcacgcacaacgctctctctccttctcagcatactagctctctccgtcactctctctccctctcagccactctcacgcaccacacgtagcgatctctcataattattgtagatccacggaaacaataagtaagcaaatcaagaatgtcctgcgagctataatgaaagtaagcaaagaatatttgaagttccatgactataatctagagggctcggtggaaatcaaatggagatggtttaagaattcgattggagcacttgatgggatacatattccggtaacagttactgcagaagataggcctagatatcataatagaaaaggtgatatctttacaaatgttttaggagcttgcggtccaaatttaaggtttatatatgtgttgcctgggtgggaagggtcagcaggagattctcgagtattgtgagatgctttgcatcgtcaaaattgtctccatattccaaatggtaaatattttcttgtggatgcggggtatacaaatggccctggatttttaacaccttattgaaggactagatatcatcgtaatgagtggatcggaaacacccctcaaaactacaaggagttatttaatcnnnnnnnnnnnnnn

SEQ ID NO: 5344 - DNA, 1699 bp, Glycine max
  misc_feature (11)..(11): n is a, c, g, or t
  misc_feature (19)..(19): n is a, c, g, or t
  misc_feature (46)..(46): n is a, c, g, or t
  misc_feature (55)..(55): n is a, c, g, or t
  misc_feature (63)..(63): n is a, c, g, or t
  misc_feature (69)..(69): n is a, c, g, or t
  misc_feature (104)..(104): n is a, c, g, or t
  misc_feature (174)..(174): n is a, c, g, or t
  misc_feature (245)..(245): n is a, c, g, or t
  misc_feature (341)..(341): n is a, c, g, or t
  misc_feature (409)..(409): n is a, c, g, or t
  misc_feature (490)..(490): n is a, c, g, or t
  misc_feature (500)..(500): n is a, c, g, or t
  misc_feature (550)..(550): n is a, c, g, or t
  misc_feature (553)..(553): n is a, c, g, or t
  misc_feature (563)..(563): n is a, c, g, or t
  misc_feature (575)..(575): n is a, c, g, or t
  misc_feature (635)..(635): n is a, c, g, or t
  misc_feature (764)..(764): n is a, c, g, or t
  misc_feature (766)..(766): n is a, c, g, or t
  misc_feature (1218)..(1218): n is a, c, g, or t
  misc_feature (1464)..(1464): n is a, c, g, or t
  misc_feature (1510)..(1510): n is a, c, g, or t
  misc_feature (1549)..(1549): n is a, c, g, or t
  misc_feature (1613)..(1613): n is a, c, g, or t
  misc_feature (1628)..(1628): n is a, c, g, or t
  misc_feature (1670)..(1670): n is a, c, g, or t
  Peptide Sequence Number=SeqID_8822
  Probeset Number=SeqID_15123
tgattcgagtngtgatgtncagatatcatcacgtgtcacggtgtgnatcatacgntgttctcntcacanatggatcgtgatatcatgagcatatgtctgcagantcgtaagtatgcatccgatgatatgtcatgaacactggtggtatgagtagtcgtcagtgcttagtagcantactggtcattacgcatgcgtactacatatgtgaccgatacatagcctgctcgtaagcgagtgtcgaacantgcacacatctatgcgcgagcgcagacaccgagatgatacatatatcactgcaatcaacactaggtcatgtacactggactagaggttcttgtgcnctactaagttacgttcatcacgagagaggtactatcctacgttaggcacgagctagaagcgtctcaancgcacatgagatcgtgtctgtacactgcgagcgagatgtgctcactgcgcacatgactcgctatgcactctcaatactacntgctgctgcntgtgcaaagtgtagtatgcatactatgtatcgtatatccctatgaggagnatnacgcagcacntagaggtgcggncagacgagagcatcacgtcatatactgtagcggagtgtacgcacgatagctagtatgacntcgcgagccctgtctgacgtgtcagctccgtgctatcacgtgtgtcgggtagacgcaataaggtgtgtatagagttagacatatgccgagcgtacatatgtcggatatgtgcgcgacactagcgcagantnataagagcgtctcagaccgtaccatatgacatgcggcgataactcgcctataatctcgtgtcacgcggcaagatgcactactgagtcgagagagtcgagagtcgagggtgtggtactcactccttccctgagcatcacacaccgtcgcggcagatgcgtgtggaagtatctatgatcaacaggcctgatgcgcaacaacgtgttggagtaccacatcaccgcgtgcgcagtgcaatgagagacgtagcctaatgatgacgtaacactaccgcgcacattcgagcgtcgatgattgatattcccgcagagcttacttcgtggcaccgctaggatcgctacaaggaagtgacttattgcgtaggatcgcttgactgagcaggtatatagacacatcgatgtgctatcgcagccgtcctgcttgcacgacaccactcgccgcacgtgtagctaanagactttcgccgtcgattatatgatttgcgctctgcgctgacggagtgcatggagtacacggcacacatagacaatgcgcgttgcatgtaatcagcggattgactggctggctggcgacacgatagatcatgcagatcaagacacagaactgtagagagaagactgccggcacaggctgctacttcttttagctactgcagaagagtcatgagacagtcaagagagatccgtgagagaacgagganatacaatacatacagagatctcctcgctccgcgcgcgcgcgcgccncaggagcgacactccgcatcacataatcttgatgagacncggcgcgcgcccgtctactattcgtgagatggagtatattctcatgctcgtataacaggagtgngaagatatgtgtttnaacgcatcatgtcagcatatcatcatcgactcattacggacnccgcacacactacacgctactctccacat

SEQ ID NO: 5345 - DNA, 2038 bp, Glycine max
  misc_feature (1)..(1): n is a, c, g, or t
  misc_feature (14)..(14): n is a, c, g, or t
  misc_feature (21)..(21): n is a, c, g, or t
  misc_feature (35)..(35): n is a, c, g, or t
  misc_feature (48)..(48): n is a, c, g, or t
  misc_feature (81)..(81): n is a, c, g, or t
  misc_feature (86)..(86): n is a, c, g, or t
  misc_feature (97)..(97): n is a, c, g, or t
  misc_feature (100)..(100): n is a, c, g, or t
  misc_feature (103)..(103): n is a, c, g, or t
  misc_feature (121)..(121): n is a, c, g, or t
  misc_feature (124)..(124): n is a, c, g, or t
  misc_feature (132)..(132): n is a, c, g, or t
  misc_feature (140)..(140): n is a, c, g, or t
  misc_feature (153)..(154): n is a, c, g, or t
  misc_feature (162)..(162): n is a, c, g, or t
  misc_feature (168)..(168): n is a, c, g, or t
  misc_feature (170)..(170): n is a, c, g, or t
  misc_feature (189)..(189): n is a, c, g, or t
  misc_feature (192)..(192): n is a, c, g, or t
  misc_feature (197)..(197): n is a, c, g, or t
  misc_feature (216)..(216): n is a, c, g, or t
  misc_feature (227)..(227): n is a, c, g, or t
  misc_feature (237)..(237): n is a, c, g, or t
  misc_feature (247)..(247): n is a, c, g, or t
  misc_feature (255)..(255): n is a, c, g, or t
  misc_feature (261)..(261): n is a, c, g, or t
  misc_feature (300)..(300): n is a, c, g, or t
  misc_feature (303)..(303): n is a, c, g, or t
  misc_feature (308)..(308): n is a, c, g, or t
  misc_feature (312)..(313): n is a, c, g, or t
  misc_feature (319)..(319): n is a, c, g, or t
  misc_feature (348)..(348): n is a, c, g, or t
  misc_feature (357)..(357): n is a, c, g, or t
  misc_feature (362)..(362): n is a, c, g, or t
  misc_feature (383)..(383): n is a, c, g, or t
  misc_feature (389)..(389): n is a, c, g, or t
  misc_feature (393)..(393): n is a, c, g, or t
  misc_feature (398)..(398): n is a, c, g, or t
  misc_feature (403)..(403): n is a, c, g, or t
  misc_feature (411)..(411): n is a, c, g, or t
  misc_feature (434)..(434): n is a, c, g, or t
  misc_feature (437)..(437): n is a, c, g, or t
  misc_feature (460)..(460): n is a, c, g, or t
  misc_feature (462)..(462): n is a, c, g, or t
  misc_feature (531)..(531): n is a, c, g, or t
  misc_feature (533)..(534): n is a, c, g, or t
  misc_feature (581)..(581): n is a, c, g, or t
  misc_feature (611)..(611): n is a, c, g, or t
  misc_feature (613)..(613): n is a, c, g, or t
  misc_feature (639)..(639): n is a, c, g, or t
  misc_feature (659)..(659): n is a, c, g, or t
  misc_feature (667)..(667): n is a, c, g, or t
  misc_feature (670)..(670): n is a, c, g, or t
  misc_feature (674)..(674): n is a, c, g, or t
  misc_feature (696)..(696): n is a, c, g, or t
  misc_feature (725)..(725): n is a, c, g, or t
  misc_feature (743)..(743): n is a, c, g, or t
  misc_feature (760)..(760): n is a, c, g, or t
  misc_feature (762)..(762): n is a, c, g, or t
  misc_feature (781)..(781): n is a, c, g, or t
  misc_feature (847)..(847): n is a, c, g, or t
  misc_feature (900)..(900): n is a, c, g, or t
  misc_feature (957)..(957): n is a, c, g, or t
  misc_feature (959)..(959): n is a, c, g, or t
  misc_feature (1024)..(1024): n is a, c, g, or t
  misc_feature (1042)..(1042): n is a, c, g, or t
  misc_feature (1056)..(1056): n is a, c, g, or t
  misc_feature (1172)..(1172): n is a, c, g, or t
  misc_feature (1182)..(1182): n is a, c, g, or t
  misc_feature (1270)..(1270): n is a, c, g, or t
  misc_feature (1310)..(1310): n is a, c, g, or t
  misc_feature (1343)..(1343): n is a, c, g, or t
  misc_feature (1359)..(1359): n is a, c, g, or t
  misc_feature (1392)..(1392): n is a, c, g, or t
  misc_feature (1421)..(1421): n is a, c, g, or t
  misc_feature (1631)..(1631): n is a, c, g, or t
  misc_feature (1634)..(1634): n is a, c, g, or t
  misc_feature (1721)..(1721): n is a, c, g, or t
  misc_feature (1789)..(1789): n is a, c, g, or t
  misc_feature (1844)..(1844): n is a, c, g, or t
  misc_feature (1857)..(1857): n is a, c, g, or t
  misc_feature (1918)..(1918): n is a, c, g, or t
  misc_feature (1978)..(1978): n is a, c, g, or t
  misc_feature (1982)..(1982): n is a, c, g, or t
  misc_feature (2001)..(2001): n is a, c, g, or t
  misc_feature (2005)..(2007): n is a, c, g, or t
  misc_feature (2009)..(2009): n is a, c, g, or t
  misc_feature (2011)..(2011): n is a, c, g, or t
  misc_feature (2016)..(2017): n is a, c, g, or t
  misc_feature (2019)..(2021): n is a, c, g, or t
  Probeset Number=SeqID_15124
ncatgacatagtantagtatncatcagtaattctntgtcagttgatgnagcgactagttgtactgcggtttgatcatgcantagcntatggtagatnagngtngtcgatgtgaacttcatnatngtatcatncgtcgatnggtacgactttanngtcatcgnacgacngnacatccgtagtgtagtacntangtagntacacttccgctagatgtntgttgtatgantcgtagtagnctgtgcgtcntgcttgantgcacngagtattggtcgacgagtacgtcgatcagcgtcgcgtanccnacctnacgnnaagcanagcagctacgcgatgccatatgacgacgncttacgatnacagnagacgactcagtcatttagtncatgantgtnacgtncatancgacgtantgcatcgagtacgatcgtgctgncgntacgatgtagttgatcagcgtancnatactagacagtatcaacgagatcactaggatcgtaatgatttggagatcagactacatacgatcacgncnntgacatctagtatcatgatgagttgcatacagacgatgtcgaacgangcatgactgcacatgcaccgacgactacantnccgtatacatgatctgtacacgtagncatgctatgtttaatgactnctgcgtanacngatnaatcatatagcagtcacatgcntcgattatcagcagcacgagtagacgacntcatgactagtattgagngatcgctcgcagcacgncntgaagagagtatgtagtantggtacagatgtcatctatgccagcatacacagctgctatgtatgggaggggtcgatgtgcgacgnatcagtactgcgtcagtgtgtcgacatgcggatgtgatactatgagtatcgtncagactcatgtgtgtgtgatgatcaagtcatcgttgggcagcgatcaagtagtagtnantatatgaatacggacgtattggtctagcgagagtcagatctacatcacaggtcatgatgtgcgangagcgatcagtaatagantagcactatacagntgtgagtctatgacattacagagtgagaatcgtgtatcgactgatcgacatgatcggagacagttcatgatatgccagtgtgacggatgagatgcactcgtatagtagagagtagntgagatacgntacgccagcagtgcagacatactgcatcgtcgacagagtcatgctatgttgtgatcattactgtatagagcgatagtctgcagatctngtggtcgtcatacgtatccgctaggatacgagactatgtncgacgcgagctccgtctgagatgcgccagtgcntaatagtgtatgctantgatatatgtgtatatcatctacttgtctgtantgagacatacgcgcgcgcgtcatgctcgncgctaacacgtcactctgttgatgctctcctgtgcggaatatagagcgcgtagcgctcgatactgtgccgtgtgcgcgtgtgctactggctgcagaccgggtgtagcaagagtagtgcgacagcgacgacgagacaagtgacatgagtctatgcgtcgagcatccacacatagcaagctcgcgacacatcgacctgctagcgcggtctanctnacacatagctatctgacagacgtgtgcatcgagacacgctaggtctggtgctcatgtggactagtactgtcttatacacgttgatcntgttgcgtctaggtgccatagagtcatagcagcgacggcaggacgtgagcaggatctgaacgagaganagactaacaacactctactctgcaccagacgagacactcgtacaacagtatccgncgctacacacgcnagccgtcgctcggcagctgcgagcgctatcttagtctctcgtctcgctcgctatctttatnacactttagagagtatgacgcgatcagtacgatctacagcattgtatagaagatggatanaaanaatgagaagacagaggtgnacannnanangaaannannnagaaaaaaggaaagaaa

SEQ ID NO: 5346 - DNA, 1681 bp, Glycine max
  misc_feature (116)..(116): n is a, c, g, or t
  misc_feature (120)..(120): n is a, c, g, or t
  misc_feature (312)..(312): n is a, c, g, or t
  misc_feature (491)..(491): n is a, c, g, or t
  misc_feature (654)..(654): n is a, c, g, or t
  misc_feature (661)..(661): n is a, c, g, or t
  misc_feature (1226)..(1226): n is a, c, g, or t
  misc_feature (1325)..(1325): n is a, c, g, or t
  misc_feature (1332)..(1332): n is a, c, g, or t
  misc_feature (1357)..(1357): n is a, c, g, or t
  misc_feature (1379)..(1379): n is a, c, g, or t
  misc_feature (1424)..(1424): n is a, c, g, or t
  misc_feature (1467)..(1467): n is a, c, g, or t
  misc_feature (1510)..(1510): n is a, c, g, or t
  misc_feature (1565)..(1565): n is a, c, g, or t
  misc_feature (1589)..(1589): n is a, c, g, or t
  Peptide Sequence Number=SeqID_8823
  Probeset Number=SeqID_15125
atctccggtcgcttcctgcctcgcaatctattatccctccaccccgtatttcgcgccgccccactctctcgctacgtctttgcgcgttcgtgttgcgctgcacgcgacgcgccggncagntatttttctccctccatacgttacccggacgcgctagacaagtttatattcgctcctctacagcgagacgcagacgcacacacagaaatacactatcctctcatatcgcaccacaccacagtcgtatcccctattatttcaccaccacgcaagtgttgagtcagcgcccatatagatttatatattatactncgcgcttcctcctcccctgtactatcccgctctattatcttaatattatcacactatccacgcgcgctcttcatattataaatttgcactacgcgccaatgttgttctatcgtgtgtgatagtcgcgcccctctttatcaaatcgccggcggggcgcggtcgccaccccgccccggccnacccacacacaacaactgacacgatgtatagtatacgacatgtcgtgaggtatattagtacgtttcggtcgcgcgctgtaaagcccgccccgccgctcgtagatgttataaaaataatatatctcgtgcattacacgatatagacgactatcgccacctatanggttacnattactttctgtttcacccgcacgccttatattatatgtgtggcgattatatttatataagaccctccccccacacgccaccaaaatatataccgtgtggtctgagcaatgtagtagtaacactggggagttataattagccccacccaatatgtttgtactgtaaatcgtattgatgtggcgtaaaatacatcacataaagatgtcggtagggtatctatattattccctcaactatcaatcactacctgctctgtatcatgccatcccaatgatctgatttgttacctacatacccacgtcttctacgtccgtctctataccgcacagtcttatgtatatcacaccacgacgctataatattataggtctgagaggcaatatattttacatatgatctaatgcgtaagagaagaatgtgctttgtgtgatttatactgtcagatacatatatgagaggtgtacgcgacgtctggggcgatacccggcgcacctcacatacttctcactcagtcattgtacgtactgtgtcctgcgcgttatatactgtttaaatatataatantgcgcgcggcgcggtgataaaatatcacgcaccgtgcgtctgcgtactacaatatgttatatatataacactgctgctaatctacggcgcgtctccacnatatatnttatatacaatatatgatagcgttngttaaaaagaacatcgtatgtnatgacgtgtctgcgcatgcagcgtctcacataatatatacagtcngcagagatgaacgcgtgctgagaaaccgaaaaacgcgctgctntgtgtgcgcgtgactgtgtggcatgtctccgcacgacgtaaantatcacatatcagcactatctgctcacgcgccgccgcgcggcgaaacaaatatgngctatacaacgtcgtggcgcgtcngcgctcgcatacacccgatatatagtttacatctatgtcgagatctcgtcacggataccaaaatccagatattgtgtgctatatttgcttat

SEQ ID NO: 5347 - DNA, 1853 bp, Glycine max
  misc_feature (1)..(1): n is a, c, g, or t
  misc_feature (14)..(14): n is a, c, g, or t
  misc_feature (44)..(44): n is a, c, g, or t
  misc_feature (78)..(78): n is a, c, g, or t
  misc_feature (125)..(125): n is a, c, g, or t
  misc_feature (130)..(130): n is a, c, g, or t
  misc_feature (191)..(191): n is a, c, g, or t
  misc_feature (200)..(200): n is a, c, g, or t
  misc_feature (249)..(249): n is a, c, g, or t
  misc_feature (262)..(262): n is a, c, g, or t
  misc_feature (288)..(288): n is a, c, g, or t
  misc_feature (308)..(308): n is a, c, g, or t
  misc_feature (322)..(322): n is a, c, g, or t
  misc_feature (327)..(327): n is a, c, g, or t
  misc_feature (445)..(445): n is a, c, g, or t
  misc_feature (582)..(582): n is a, c, g, or t
  misc_feature (667)..(667): n is a, c, g, or t
  misc_feature (714)..(714): n is a, c, g, or t
  misc_feature (734)..(734): n is a, c, g, or t
  misc_feature (780)..(780): n is a, c, g, or t
  misc_feature (801)..(801): n is a, c, g, or t
  misc_feature (1030)..(1030): n is a, c, g, or t
  misc_feature (1056)..(1056): n is a, c, g, or t
  misc_feature (1061)..(1061): n is a, c, g, or t
  misc_feature (1239)..(1239): n is a, c, g, or t
  misc_feature (1256)..(1256): n is a, c, g, or t
  misc_feature (1440)..(1440): n is a, c, g, or t
  misc_feature (1468)..(1468): n is a, c, g, or t
  misc_feature (1488)..(1488): n is a, c, g, or t
  misc_feature (1490)..(1490): n is a, c, g, or t
  misc_feature (1506)..(1506): n is a, c, g, or t
  misc_feature (1553)..(1553): n is a, c, g, or t
  misc_feature (1601)..(1601): n is a, c, g, or t
  misc_feature (1613)..(1613): n is a, c, g, or t
  misc_feature (1615)..(1615): n is a, c, g, or t
  misc_feature (1618)..(1618): n is a, c, g, or t
  misc_feature (1723)..(1723): n is a, c, g, or t
  misc_feature (1749)..(1749): n is a, c, g, or t
  misc_feature (1756)..(1756): n is a, c, g, or t
  misc_feature (1776)..(1776): n is a, c, g, or t
  misc_feature (1792)..(1792): n is a, c, g, or t
  misc_feature (1819)..(1819): n is a, c, g, or t
  misc_feature (1827)..(1827): n is a, c, g, or t
  misc_feature (1829)..(1829): n is a, c, g, or t
  misc_feature (1840)..(1840): n is a, c, g, or t
  misc_feature (1843)..(1843): n is a, c, g, or t
  Probeset Number=SeqID_15126
ncacgccgcgtctnctaccaaaccttagcacacactcgtatcgnttagatatctgtctggcatgcgtcgtgtagcgtncgatggctcgctatacatcggctcacaagtgtacacagaggactagnaccancgtcgcgacatctgtaggatcgacgacagtcgcagtatacagtatcacgagttacgtatanttcctagantgtacagggcgtctgactctcgtgcgtagattgtgtcgtgagagatcangagtatcgacgantcagctatgattgcacgatgatcganctgttacgtagtcgctttgncgctcgagtcgtcngatantgctctctcatatcgatctgtcacgttatatttctcaggtagacgatagagccatacatgtacatgtctgagagcgatgactgtgtaactacagtagctgataaaacgtgagatccantatatcatctctgcggatatatagtgattctcacacaaacatatgatatgcttcgaggtgtcgtgctatagagagctagagtgatcttacatcatacggaacgcgctagagatacgcatatagtatggattatacantctacgtgaacgcgacaggacatcgcgagtgcaccgtcgactgatcacagaatcgctatcgacgatcagagctatatgcgtagcncacgtatataacgcgacgtgaagtagtgtgcgtgtcgatacaagtgnatagtatatcgtcgctgctnagaggcgtgcaatcctagatcgattcacgctacgcttgacgagtanatactgtcgtgatcagagtgncgtctcacagcgtgagtacgaatgatctgtaagtgagcagtcgactatgtgaacagcatcacaagaaatcggtgctgcgagacatacgaggctgatactgctagtacatgagattagtcgtactgtagtgaccttgcatcctcacatacacttatatcattcgtatactaccagagcctggcgcactctagatgtcgacgctgatagctagtgtctcagatcgatcgcnttatctgtagcatccatctacgcgcnttgtngacctacgctcttgttgcagttcgctgtgttcatgttcatgatgatatgtcggtgcatagctgtcaggcgaccatgagctgatggcgctttgagaaagcgtgcgcgatatcttgctatctatatacataagcatgtgtgatgaggtgtccatatatatgacgtctcttcatgatctangtgatatttctatctcnattagtgctggtgtacgcatgacgttcgatgactactatatgtacgtgtctctagcgccgccgtgtaggctcagagcgagcgtaatactcgctgattatagaaagacaatccgacgaaccgctaacataggatgccgttcaggagcaaggcagcggcatatccgcactgactgtggagatgtanctcattgagcgtgactactacggttcgntgtcaagattcgttgctgtngngcagacgtgttatgtngaatgtgtaatatagagataagatatgactgaacgatatgagatatnttatctatattgcttgtcgatgctgcttcgcgcgtatgcgcgatacanccactacaccgnancancgactcacccgacagagacagctgagcatatgctcagctcgtctatatctctatctgttgggtgatatcacttacgtctctggatgtgctgtggtgtgttttatnctccttattcactcctcttatatatnatcatangatatgctatacatgtattnagtatccatgtcctcncagtatcacagtcagtccacctgcccngtgcagcnancacgagaaagnaanaagtaaaaac

SEQ ID NO: 5348 - DNA, 1271 bp, Glycine max
  misc_feature (1158)..(1158): n is a, c, g, or t
  misc_feature (1182)..(1182): n is a, c, g, or t
  misc_feature (1184)..(1184): n is a, c, g, or t
  misc_feature (1234)..(1271): n is a, c, g, or t
  Peptide Sequence Number=SeqID_8824
  Probeset Number=SeqID_15127
gtacaaccccgggattttcttacttttttattttcactttgactcatgaatgaattcctttatcctcttacatcacaactgaagtgagatatcaacattcaacaccccaaattctagttatagagaaagctaagttctttgatttgccttccacccccttaatttccttaattgatcaattgggaaatttggtctttgggggattttgaggattagggttagtatttgcttgattggggaagtctttatgtaacctgagtggaatggttctgtgtctgcatgtgtgaattctggcaaggggcatttggttgctgggcactgaccaagagttgaaagattttatatttacctttaaacagctgcggctcctgctgaagatcaaggagctagggatctgaagataagatatgcaatccaaatctgaaactgcaaatcaactgaggtctgatccacgttcctttgcacctaaccaatcttattctgaaccctggtggcgaggtattcagtgcaatcctgtcccccaagcaatgttaggagtgaatgcatctaattcatcttcactggaacgccctaatggtgattcggaatccagtgaagaggatgatgatgccactaaagaatcacaacccactgctcctaatcaatcaggaaattatggacaggaccaccaagcgatgcaacattcttcatcatctgcacctttggtacgtgatgattgccttacacaggctccacaagtggaacttgttggccactcaattggatacactccttttataggaatgccccatgccagaatggctttgccccttgagatggctcaagagcctgtttatgtgaatgccaaacaataccaaggaattctgagacgaagacaggctcgtgctaaagcagagcttgaaaagaaattaataaaagtcagaaagccatatcttcatgaatcccggcatcagcatgctataagaagagcacgaggtaatggagggcgttttgcaaagaaaactgaagttgaggcttcaaaccacatgaacaaggaaaaggatatggtactgccaggtcccattgcacggcaattagttcatctggtttggatcactacccttgctctgtgaacctgaatctctatgtgcacaagatgcaaaggactcagtgctgaanattgaaacgcactttcaatgtttnantctattcttttgttgcctcggtaaaatgagaaggacgtagcacacggacnnnnnnnnnnnnnnnnnnnnnnnnnnnnnnnnnnnnnn

SEQ ID NO: 5349 - DNA, 681 bp, Glycine max
  Peptide Sequence Number=SeqID_8825
  Probeset Number=SeqID_15128
acacctctcactactcccacccctaccaccacctccaggaacagcgagatccagggctcgagatcgagatcccggccaggcatcactggcagggacggtgactgtgcccggatcgtccgtgccatcgacgccgctgctcacggacgagctggacatcgtgatcccgcccctccgggtcctcgactacctccagacgaggcgccccttctgtcagccgtaccacctattcaccgcccagcacggttacccaacctatgccataaaggtcccctgagggcgccaagctactattttttgcccccggcgaccggacttatatccggagttcctggtgccccgaagatgcgtactgacccgcgccttccttagacatccccgcggggcccgccaccccccccccctaagattggggcctcccttagcgcacctatggagcgcccccccgcccatctccccgagagggatctttcttccgcgagggcgtaggggacaacctttcgagcaccatcgtaccacaaacttctcccctttttcccccccctacaccccccgtatttcctccccaatgttagccccccaaattccgccgtttcccccctctccgcccaactccgggtttatacataccctctcgacccgaccccgccttctccccacgtcgatcaacctcaccctcccgat

SEQ ID NO: 5350 - DNA, 347 bp, Glycine max
  Peptide Sequence Number=SeqID_8826
  Probeset Number=SeqID_15129
tctgccgcgtctccgctcgcgtatccgcggcagtgcttgtgtcgcctctaccccacgccctagtcgccgagggccccttccccactctccctgccgtcgccttatgtcgtggttgctggccgcctgatctgccgtgtcttgctcttggacacacgagcctggccgccccggtgaccgtgcttgctgcttctaccccgctacctgtgccctgcgcctgctgttttccctccatctgtggatatgtcttacttattttcgaattgggtccttcatatctcaattttatcagtgcgcttgcctaataatcttccattagttaaacataaacagaagagtttgactgttcc

SEQ ID NO: 5351 - DNA, 1672 bp, Glycine max
  misc_feature (20)..(20): n is a, c, g, or t
  misc_feature (24)..(24): n is a, c, g, or t
  misc_feature (26)..(26): n is a, c, g, or t
  misc_feature (30)..(31): n is a, c, g, or t
  misc_feature (37)..(43): n is a, c, g, or t
  misc_feature (57)..(58): n is a, c, g, or t
  misc_feature (85)..(86): n is a, c, g, or t
  misc_feature (88)..(88): n is a, c, g, or t
  misc_feature (93)..(93): n is a, c, g, or t
  misc_feature (102)..(104): n is a, c, g, or t
  misc_feature (112)..(112): n is a, c, g, or t
  misc_feature (116)..(118): n is a, c, g, or t
  misc_feature (125)..(125): n is a, c, g, or t
  misc_feature (137)..(137): n is a, c, g, or t
  misc_feature (142)..(142): n is a, c, g, or t
  misc_feature (150)..(152): n is a, c, g, or t
  misc_feature (157)..(157): n is a, c, g, or t
  misc_feature (183)..(183): n is a, c, g, or t
  misc_feature (185)..(185): n is a, c, g, or t
  misc_feature (196)..(196): n is a, c, g, or t
  misc_feature (213)..(213): n is a, c, g, or t
  misc_feature (262)..(263): n is a, c, g, or t
  misc_feature (280)..(280): n is a, c, g, or t
  misc_feature (285)..(285): n is a, c, g, or t
  misc_feature (290)..(290): n is a, c, g, or t
  misc_feature (306)..(310): n is a, c, g, or t
  misc_feature (343)..(344): n is a, c, g, or t
  misc_feature (359)..(359): n is a, c, g, or t
  misc_feature (363)..(363): n is a, c, g, or t
  misc_feature (368)..(368): n is a, c, g, or t
  misc_feature (371)..(372): n is a, c, g, or t
  misc_feature (374)..(374): n is a, c, g, or t
  misc_feature (401)..(402): n is a, c, g, or t
  misc_feature (424)..(424): n is a, c, g, or t
  misc_feature (490)..(490): n is a, c, g, or t
  misc_feature (494)..(494): n is a, c, g, or t
  misc_feature (742)..(742): n is a, c, g, or t
  misc_feature (748)..(748): n is a, c, g, or t
  misc_feature (896)..(896): n is a, c, g, or t
  misc_feature (919)..(919): n is a, c, g, or t
  misc_feature (965)..(965): n is a, c, g, or t
  misc_feature (977)..(979): n is a, c, g, or t
  misc_feature (1007)..(1007): n is a, c, g, or t
  misc_feature (1012)..(1012): n is a, c, g, or t
  misc_feature (1014)..(1014): n is a, c, g, or t
  misc_feature (1180)..(1180): n is a, c, g, or t
  misc_feature (1182)..(1182): n is a, c, g, or t
  misc_feature (1213)..(1213): n is a, c, g, or t
  misc_feature (1256)..(1256): n is a, c, g, or t
  misc_feature (1263)..(1263): n is a, c, g, or t
  misc_feature (1294)..(1294): n is a, c, g, or t
  misc_feature (1310)..(1310): n is a, c, g, or t
  misc_feature (1359)..(1359): n is a, c, g, or t
  misc_feature (1410)..(1411): n is a, c, g, or t
  misc_feature (1419)..(1419): n is a, c, g, or t
  misc_feature (1474)..(1474): n is a, c, g, or t
  misc_feature (1500)..(1500): n is a, c, g, or t
  misc_feature (1518)..(1518): n is a, c, g, or t
  misc_feature (1533)..(1533): n is a, c, g, or t
  misc_feature (1601)..(1601): n is a, c, g, or t
  misc_feature (1608)..(1608): n is a, c, g, or t
  misc_feature (1618)..(1619): n is a, c, g, or t
  misc_feature (1625)..(1626): n is a, c, g, or t
  misc_feature (1638)..(1638): n is a, c, g, or t
  misc_feature (1655)..(1656): n is a, c, g, or t
  misc_feature (1658)..(1658): n is a, c, g, or t
  misc_feature (1660)..(1660): n is a, c, g, or t
  misc_feature (1669)..(1669): n is a, c, g, or t
  misc_feature (1672)..(1672): n is a, c, g, or t
  Probeset Number=SeqID_15130
gtggtgtgttttggtgtgcntttntntatnntttttnnnnnnnattcccactaccannaactatcacacacacaccacaacacannangaaancaaagaggnnngtgtgttntttnnnttatttncttcttcccaancactncctttttnnnccatnttattgaagaatcaccccgcgataananatcacagtctntacataacatgcaaacncacccggggaagctaggaagaacacagcgaatgcgtgtgtcttgatatnnctatatatttaaccacnaaccnctagncactcatacataggannnnngtatgcggagatctcacatatactggacaccanncgcgcataataccancaanccagncannanagggataatgaaacataacaataagannacatcgatcatgtcgggataanctactcaatctatcacttacctaaaatgcagcatataacgcacgagagactacaaagtcacacaancacnaacagagagcaaatgcagcggacgatgataaaatatatgtgatatatgtatcacttcacaattacaatatccttatcattataatcagcgtcgctatctggtgaatcacaagagagggtgtgtatgtcgctacaacgcacgctctagcaggacgcccagctacgcacgcagacacgcgtgacttgcaagagcaataatttgaaaagtctgatgtactcgtatgatcagtcctgtaagtgatagggagnggagtnacgttcagcatatatcagtgagtgagagatatctcaggtgttcccgtcgcgctgcggtccttagctttaccgattctggtgcgtgatatacatgtcaacaatcctcatcatctgatcttgaaggagttgatgatgtgtgggtaagagntttggaagtcaccgccccacccncgcgcgccaacagtccgcggcgcgacgccgcggcgcgcgggcgcanagcgcgcgcggnnncgagcgcgcggcgatacgggcggatcgncgaanancaaaacgcgcgataatcgtatcgatagtcagacggctaggcgataatcgcgtcgatcgacttctgtactatgacgtcacgataagcagaatatcactgcgcagagactgcggcgcgtcgtcgttgataaggcacaggcgatgatcgtcgagcgtcgagacgaatgncnactctacatcgatagagtactacgacgtatncattgcgctcgttcgaatgtagtatactcattcgctgtatgangtgcgtnatgtcgcttgcgcgcgtcgcgtcgcgcacantatgatagtcggcgcnctcgcgcgcatcgacgtcccgtgtctgctgcgcggttgcatacacgatnacataagcgtgcggcgcactgcacctctacactttcgcggctatcggcgannctctctanacgcctgtactgtgtatatcggccgtgcgcgatcgcgtcgtccggtgcatcatgntgcgttccgcgccgcgcgcgcgccgntgtgcgcgacggacgcgntgtgcccgcatgctncgtgtcgcttgtctctacatcccgaattgactgtgtccagcaggagactctgccgcaaagactcgcanacaaacnctacgaaccnnaccgcnncactatcggtanatgatcgtgtctggccnncncnatggcacanagn

SEQ ID NO: 5352 - DNA, 2187 bp, Glycine max
  misc_feature (1)..(1): n is a, c, g, or t
  misc_feature (21)..(21): n is a, c, g, or t
  misc_feature (24)..(24): n is a, c, g, or t
  misc_feature (27)..(27): n is a, c, g, or t
  misc_feature (30)..(31): n is a, c, g, or t
  misc_feature (41)..(41): n is a, c, g, or t
  misc_feature (45)..(45): n is a, c, g, or t
  misc_feature (58)..(58): n is a, c, g, or t
  misc_feature (81)..(81): n is a, c, g, or t
  misc_feature (112)..(112): n is a, c, g, or t
  misc_feature (123)..(123): n is a, c, g, or t
  misc_feature (151)..(151): n is a, c, g, or t
  misc_feature (154)..(154): n is a, c, g, or t
  misc_feature (157)..(158): n is a, c, g, or t
  misc_feature (161)..(161): n is a, c, g, or t
  misc_feature (201)..(201): n is a, c, g, or t
  misc_feature (204)..(204): n is a, c, g, or t
  misc_feature (217)..(217): n is a, c, g, or t
  misc_feature (219)..(219): n is a, c, g, or t
  misc_feature (245)..(245): n is a, c, g, or t
  misc_feature (250)..(250): n is a, c, g, or t
  misc_feature (255)..(255): n is a, c, g, or t
  misc_feature (261)..(261): n is a, c, g, or t
  misc_feature (282)..(282): n is a, c, g, or t
  misc_feature (284)..(284): n is a, c, g, or t
  misc_feature (311)..(311): n is a, c, g, or t
  misc_feature (316)..(316): n is a, c, g, or t
  misc_feature (432)..(432): n is a, c, g, or t
  misc_feature (443)..(443): n is a, c, g, or t
  misc_feature (455)..(455): n is a, c, g, or t
  misc_feature (471)..(471): n is a, c, g, or t
  misc_feature (499)..(499): n is a, c, g, or t
  misc_feature (507)..(507): n is a, c, g, or t
  misc_feature (515)..(515): n is a, c, g, or t
  misc_feature (529)..(530): n is a, c, g, or t
  misc_feature (545)..(545): n is a, c, g, or t
  misc_feature (559)..(559): n is a, c, g, or t
  misc_feature (594)..(594): n is a, c, g, or t
  misc_feature (613)..(613): n is a, c, g, or t
  misc_feature (624)..(624): n is a, c, g, or t
  misc_feature (630)..(630): n is a, c, g, or t
  misc_feature (632)..(633): n is a, c, g, or t
  misc_feature (647)..(648): n is a, c, g, or t
  misc_feature (655)..(656): n is a, c, g, or t
  misc_feature (675)..(675): n is a, c, g, or t
  misc_feature (680)..(680): n is a, c, g, or t
  misc_feature (690)..(690): n is a, c, g, or t
  misc_feature (703)..(703): n is a, c, g, or t
  misc_feature (715)..(715): n is a, c, g, or t
  misc_feature (744)..(744): n is a, c, g, or t
  misc_feature (793)..(793): n is a, c, g, or t
  misc_feature (801)..(801): n is a, c, g, or t
  misc_feature (808)..(808): n is a, c, g, or t
  misc_feature (819)..(819): n is a, c, g, or t
  misc_feature (829)..(829): n is a, c, g, or t
  misc_feature (842)..(842): n is a, c, g, or t
  misc_feature (875)..(875): n is a, c, g, or t
  misc_feature (882)..(882): n is a, c, g, or t
  misc_feature (892)..(892): n is a, c, g, or t
  misc_feature (896)..(896): n is a, c, g, or t
  misc_feature (936)..(936): n is a, c, g, or t
  misc_feature (964)..(964): n is a, c, g, or t
  misc_feature (1057)..(1057): n is a, c, g, or t
  misc_feature (1149)..(1149): n is a, c, g, or t
  misc_feature (1156)..(1156): n is a, c, g, or t
  misc_feature (1211)..(1211): n is a, c, g, or t
  misc_feature (1232)..(1232): n is a, c, g, or t
  misc_feature (1308)..(1308): n is a, c, g, or t
  misc_feature (1370)..(1370): n is a, c, g, or t
  misc_feature (1385)..(1385): n is a, c, g, or t
  misc_feature (1417)..(1417): n is a, c, g, or t
  misc_feature (1456)..(1456): n is a, c, g, or t
  misc_feature (1465)..(1465): n is a, c, g, or t
  misc_feature (1472)..(1472): n is a, c, g, or t
  misc_feature (1496)..(1496): n is a, c, g, or t
  misc_feature (1524)..(1524): n is a, c, g, or t
  misc_feature (1537)..(1537): n is a, c, g, or t
  misc_feature (1601)..(1601): n is a, c, g, or t
  misc_feature (1605)..(1606): n is a, c, g, or t
  misc_feature (1611)..(1611): n is a, c, g, or t
  misc_feature (1615)..(1615): n is a, c, g, or t
  misc_feature (1618)..(1618): n is a, c, g, or t
  misc_feature (1626)..(1626): n is a, c, g, or t
  misc_feature (1629)..(1629): n is a, c, g, or t
  misc_feature (1638)..(1638): n is a, c, g, or t
  misc_feature (1732)..(1732): n is a, c, g, or t
  misc_feature (1741)..(1741): n is a, c, g, or t
  misc_feature (1775)..(1775): n is a, c, g, or t
  misc_feature (1782)..(1782): n is a, c, g, or t
  misc_feature (1819)..(1819): n is a, c, g, or t
  misc_feature (1845)..(1845): n is a, c, g, or t
  misc_feature (1849)..(1849): n is a, c, g, or t
  misc_feature (1859)..(1859): n is a, c, g, or t
  misc_feature (1861)..(1861): n is a, c, g, or t
  misc_feature (1877)..(1877): n is a, c, g, or t
  misc_feature (1895)..(1895): n is a, c, g, or t
  misc_feature (1917)..(1918): n is a, c, g, or t
  misc_feature (1949)..(1949): n is a, c, g, or t
  misc_feature (1956)..(1957): n is a, c, g, or t
  misc_feature (1974)..(1974): n is a, c, g, or t
  misc_feature (2024)..(2024): n is a, c, g, or t
  misc_feature (2026)..(2026): n is a, c, g, or t
  misc_feature (2093)..(2093): n is a, c, g, or t
  misc_feature (2102)..(2102): n is a, c, g, or t
  misc_feature (2114)..(2114): n is a, c, g, or t
  misc_feature (2118)..(2118): n is a, c, g, or t
  misc_feature (2142)..(2142): n is a, c, g, or t
  misc_feature (2155)..(2155): n is a, c, g, or t
  misc_feature (2164)..(2164): n is a, c, g, or t
  misc_feature (2173)..(2173): n is a, c, g, or t
  misc_feature (2187)..(2187): n is a, c, g, or t
  Peptide Sequence Number=SeqID_8827
  Probeset Number=SeqID_15131
ntaaagtacgagatattacanganatnatnnttagatcacnagcncgatctacgatangatatcatcaaatcgcagcaacncagtctagaaatgcacatactaacgtgactnatgaaaagagncgacgagcagacgaaactggaaagtagnatnagnncgntcgtagatgaagggagtggtcggcagcagtcagcaggatntgngcgacgatgaagncnagcgcagagcagcgtacggagtcgtntaagnacgtnttatgntaacgcactacgtcacgtcgngnagtgtgtatcggatgtgacgacagagnatcgnaagaaagtaagtgtagttgggcgctgtcggtgtcgtggatgagggttaaggttgttcagcagtgcctgtcactcgcatcgtagtctacgcggcagctagtggtagtcgcggcacantatcgtgacgngtgatgtagtangcgatgatgtgatgtnatgcttgtccgtcgatcactgatgtacntctgtcancacgtcgntgacagacgacgcnncgtgagcagaccacngatcacgttgatgntagttgagtagcagctgagtaggacgcagcgggangcctggcgtagtagtcggngttttagtagnatgagngnntagagtagtcgctnncacgatnntgtagtaatacggccgacngcacnacgacgtccngcatgattgtagntattagacgtgntgtagtgtgtgcagctgcgatggtttgtngtatgatagtggagtagctatgtactgatgtaagtagtatctcgtagtncgacgatngtattgnatactagtagngtagtgagtnaatatatatatantatatagtagtgtgctagcgacgaacaagatangatgacnacatataatncgtntgcgacacatatattcatcagtgtatgctgacgttgtcgncacacccagcgctggtcatggtgtaggncgagctatatgtcacagtgtgtgatgtcgtatagttgatgtccatggatagtgatacgtgtagggtgatctacgcaggactcagtagcagatnagagtctggtcgcatgcagtccgacatactgagttgtgtgagttacagcgacgcgctcgctagagcagtattgtatgcagcgctttgcgctnacagcantcgattatcatatagtatatacactagacacattgtatgccagtagtgtgtggangcagcgagtaggaaccatgtnttcgtcgtatatacttcttgttgtttatgcctgcagttagcgtctatattgtcagcggtgcgctcgcgcggtgtgngtgatgctgtcgatgagtgtgatgtgcgagtgacaatgatagagtctgagagatgagagtanaggtaagattgatantggttattagtagatatatagacgtgtgacgnttgttgatgatgtgaaggcgatagcgagtgtggtgcatngttatttcncacacgnacttcgtggcgcgtgaaccatgtnaatattctcagtattacacactcatatntatatatatagtnatatcatcacggtatgagtatatgatatgcatagagtatcacgaatatagcatgtgaggcgttnagtnnttgtntttnttncggatctntcnctacttatntttatgtctcagattatattcagtaacagcactgaacagagtgcgccgagagagctctagagtgcggactgcatgtgagtgtccactgagctgnttgctacgncacataagtagacataatattaatgacatagagntgtagtnaatatgttgtgtgttggtaattgtatatgagtgcgcngaggtagatgatgtgggaatgcggtngcgngcatagtgtntngtgtgtgaggtcgttngttgtgaagtgagcgtcnatatgagaaatactatatttgnntcgcgtgcatacaagaatatgagtaagaccncagatcnntataataatatattatntaaagaaggcgagtaggagagtaggagcgaatagagtcgagtgcgtgtantnagcgaggtagcaaatgagcaagcggctgtgcgcttagtaatgtgtacagtcagctatggtgtacganggtgtggtnttgtgtgttccngtgntaagagagaagaagacggtagtanaaacccagagcgngcaagacanacaaacaanaaaaaatacaacan

SEQ ID NO: 5353 - DNA, 462 bp, Glycine max
  Peptide Sequence Number=SeqID_8828
  Probeset Number=SeqID_15132
atccaacccctcctgctgctgctgtctcgcccccggtcccgccccccccgccgcctcctccgcccccccccccgccccccgccccccgccccccccggtcccgcctcccccacgccctcccccgccccgccccccggctcctccgcctggcccgccgtcgccagcctggccccctcggtctccctctccgctccgcggccaggcaggggacccttccgtcggctgccggttccccggagagcctccgtgccctggccggccacactggagtctctggctccgcttcgtgtgctggtcttgggcccgcttccgcgggctcgcgtcactgtggcttcggcctcctcgacgcttgcggatcctgcggccaggtcccggggcgcgctggccatcgccacgggcctcgaggaggctttcgggattagcgtggaggagtcgagtgcgcagaccatcgcaacggtggaa

SEQ ID NO: 5354 - DNA, 968 bp, Glycine max
  Peptide Sequence Number=SeqID_8829
  Probeset Number=SeqID_15133
gcatatgtgcagatatagcacaatccaagcatgaacattggtcttctctagctcctcttccttttgaacttgtcatctctgctggacagaaggctaaggaggaatcttggaacaaaagtgctgatggtccagatagaagcaaacttgttcgtgatttgaatgatcttgctggggaaggaaatattgagagtatgctctcagttgagctgggtttgagggaacttgccaacttaaaggttgaggatgctgttgtgctcgcattagcccaacacagacgacttacattcagttcggcagtctgtttttctctccaaatcacatggtgatgcacaatacccagaagcatttgaattaagtgagaagcacgcagtccgtgttcttttcaaagagggatggggagcttattgctgcagcagagctttattgcagggcgtggaagaagatattgtagaaagtcgcctctcgttttgaattctccgcagtgggcattcaccatgttgacatgatgctgttgatgttgagcgaggcttgttggagttgaggaagctgagtatagaacaacaactttgggaagcatcacggaagggaatggagcagcttcaagggtcagcaaatgctaatcataagcatgccactgactctgatgcctcatcctgtttgtctgagccctttagttcttaattgattctttgtcctatatgtatatttttgtctttgttttctacacaagttttccaattctgtaaacatttcaaaacactgtattcgggaatacaaagaaacgcaagaatcttttacgttgcacgaagaccatagtgggttgtaataattaacaaactacataagactgggaatttccctatccttacctcccactggccctactgccggtcggatgagcaactctcttcggcggcctggtttgttccctattcttttaaattaaattttgtaatttgggaatctga

SEQ ID NO: 5355 - DNA, 1629 bp, Glycine max
  misc_feature (13)..(13): n is a, c, g, or t
  misc_feature (40)..(40): n is a, c, g, or t
  misc_feature (77)..(77): n is a, c, g, or t
  misc_feature (80)..(81): n is a, c, g, or t
  misc_feature (105)..(105): n is a, c, g, or t
  misc_feature (107)..(107): n is a, c, g, or t
  misc_feature (120)..(122): n is a, c, g, or t
  misc_feature (126)..(127): n is a, c, g, or t
  misc_feature (129)..(130): n is a, c, g, or t
  misc_feature (173)..(173): n is a, c, g, or t
  misc_feature (175)..(175): n is a, c, g, or t
  misc_feature (177)..(177): n is a, c, g, or t
  misc_feature (181)..(182): n is a, c, g, or t
  misc_feature (210)..(210): n is a, c, g, or t
  misc_feature (221)..(221): n is a, c, g, or t
  misc_feature (237)..(237): n is a, c, g, or t
  misc_feature (248)..(248): n is a, c, g, or t
  misc_feature (250)..(251): n is a, c, g, or t
  misc_feature (253)..(253): n is a, c, g, or t
  misc_feature (256)..(258): n is a, c, g, or t
  misc_feature (330)..(330): n is a, c, g, or t
  misc_feature (346)..(346): n is a, c, g, or t
  misc_feature (361)..(361): n is a, c, g, or t
  misc_feature (437)..(437): n is a, c, g, or t
  misc_feature (461)..(461): n is a, c, g, or t
  misc_feature (593)..(593): n is a, c, g, or t
  misc_feature (601)..(601): n is a, c, g, or t
  misc_feature (604)..(604): n is a, c, g, or t
  misc_feature (789)..(789): n is a, c, g, or t
  misc_feature (919)..(919): n is a, c, g, or t
  misc_feature (973)..(973): n is a, c, g, or t
  misc_feature (1013)..(1013): n is a, c, g, or t
  misc_feature (1015)..(1015): n is a, c, g, or t
  misc_feature (1050)..(1050): n is a, c, g, or t
  misc_feature (1062)..(1062): n is a, c, g, or t
  misc_feature (1071)..(1071): n is a, c, g, or t
  misc_feature (1078)..(1078): n is a, c, g, or t
  misc_feature (1230)..(1230): n is a, c, g, or t
  misc_feature (1241)..(1241): n is a, c, g, or t
  misc_feature (1364)..(1364): n is a, c, g, or t
  misc_feature (1388)..(1388): n is a, c, g, or t
  misc_feature (1401)..(1401): n is a, c, g, or t
  misc_feature (1501)..(1501): n is a, c, g, or t
  misc_feature (1516)..(1516): n is a, c, g, or t
  misc_feature (1557)..(1557): n is a, c, g, or t
  misc_feature (1609)..(1609): n is a, c, g, or t
  misc_feature (1629)..(1629): n is a, c, g, or t
  Peptide Sequence Number=SeqID_8830
  Probeset Number=SeqID_15134
ggggtgctcgtgngagcgccggtcgggcctggtcgtggtngccgtgcgcccttattataatatggtgtttaatgtgnatnnttataatgggattataagtactantncgttacgtgagtnnntgtnntnnttttttgcgatgtgtgcggtgttggtgcgtggcgccttagacncngngttnntgggatgttgttaacgcgcgacggcgcntcgcgtgtggncggtattcttcttctnactctcctccntnngngtnnngattcgagcgtgcgcgtgcgcggacgcgggaggtgatggtgagggtagtggtgcgagaggctgtgttcggcngaggtgtgctctctcnagcgagtgggagaantgtggctatacagctggacgcggtgccgcgaggtccacggtgtgcgtcgggccgccgtggggtgtgcgtgacggangaggtgggcgggggggcagacggngcgcggcgagtctagttggcacgaagttagacgtctcgaacagctgagtcatgattgtgcgtaggctatgtatatgtgtcatgtgcctcctcacgccgcaataatctgtacatcgcctgcggcccgcgtcgnggttggtntanattatcgcgtagtgtgggtgtgtttcgctgtggcctgtttttgcagtctttctggctgtgtggttatctgtcagtgctgattaggtatattgaatgtgacttagtaatagggtgcaccggtcggaccacactatgttgtgtgtgccagttcttactgtgtgtggtgcgtgcgtactgtgtctgcntggtcgtcttcatatatgattcctgctcgctgcctcttttatgcggactgtgctcaggactctccctcactctccgatctatccttccttcgccgcgctccctcagtccgacgcggtctcggtgctgcantctgtcttacagggtcgtgagtgtgcgtctgcaacacacacacgcgctcgcgtngagtgtctgtgtcattgcctcgtgtgatggcgtcgacganantggtggcggcagtaggacagtgtgtaggtgtcagntggctgtgtgcntacgctgcntgtcctntgtgtctcttgcattgcggttcgatgtcgtggtgtcgtcagtatcgtgcgtggctgcgcgaggcgtagcgtgcgctcgctatctcacttatcacgacgatcgtgtagtttctctgcggctatttgactcaatgaccgctttacgctcacggnactcgtcgcgnacacgtgatctctgcgtatggtctgcgacacggcgcacggtgccgtgcgcgagccggaggcgcgcgagagattccggagcgaggcgtgctatgttcgctgatgcagcaggtcgttgagttagngttcgggagtgagacgtagagctnacgtatggcgctnggcgcatcgctgccagtgttgtgtagcggcgacgaggtactggagactgtagtggagagatgatgagcgcagagacgggcgcagcattctgcacgtctcntgcaagatggcgcgnggtgcgatggtgggtgctgtagcggcgctgtagactgaganaattcggacacgacatgaagcagggactatgacctgcatactgcacgcgttntatctctatctcctcgcgcn

SEQ ID NO: 5356 - DNA, 358 bp, Glycine max
  Probeset Number=SeqID_15135
ccacgcgtccggatcacacgtatgatcacggaccaataggattttctcgagggtagtgttttttggagaggaagctgggtgtttcgctcttctcctctttgtttatgtgggcgcgggatctcgccactcgagaatgcactttgaatcgcaactcccgaaaggaagcccccccaaaaaatgggttctcccttgcccccagctcacttacgctccccgaaaatttatctagtctgaagatcttctgttctctctctctcattgctcgggaatcactctgttcccccccaattgccccttttcaccccctctcgatcctcggtcgggaccccttcttcccctttactagttctagatgcga

SEQ ID NO: 5357 - DNA, 785 bp, Glycine max
  misc_feature (332)..(332): n is a, c, g, or t
  misc_feature (445)..(446): n is a, c, g, or t
  misc_feature (482)..(482): n is a, c, g, or t
  misc_feature (721)..(721): n is a, c, g, or t
  Peptide Sequence Number=SeqID_8831
  Probeset Number=SeqID_15136
aaccgaggtgttttccgcgcattgcaaaaccttctattaatctcgggggggtttaccccttttgaggggttgtccgaattttaaggggcctttatcggggccagacgtataatcaccgagagaaagaacttgggttggggggtgggataggtttccccgttaatgggggccgcttccggcccttgagtaaaacggttgttttatgggcccgtttttacggggtgggagaggcccaccggttactatttaataaggttgggacttttttgttgtccaaaaggtgaaagaacgaaccggtccaagccacctatgctaggggtctagtttgcttngggagttaaatagagggggtgatggggcacaatttgtcggtcattagtgggatttaaaaaaagatgggaggcgtgtagtttggcctaactggtgttgaggcgccgaaagtgtnnacgagaatagttaacggcgggtacgaatgttccgantgggcaagggaagtggtgagagaggacttgattatggagcggcgttgaatagtaagctggtggtaggggagtaaatggtagtcgtgatagttaacacaggatacaaaacggggtatcgtgagctttgtccctgtgatggcgggtccctttcagggagcttggttataggtgggggggtaggggttcatctttcgagcgtagcgcaagcgtcactgttttcagagtcactggcagctatnccaacagatcagtgtactcttggaatggtgatttggagaaccgagtctccttccagaattcagg

SEQ ID NO: 5358 - DNA, 1667 bp, Glycine max
  misc_feature (86)..(86): n is a, c, g, or t
  misc_feature (143)..(143): n is a, c, g, or t
  misc_feature (183)..(183): n is a, c, g, or t
  misc_feature (202)..(202): n is a, c, g, or t
  misc_feature (212)..(212): n is a, c, g, or t
  misc_feature (214)..(214): n is a, c, g, or t
  misc_feature (218)..(218): n is a, c, g, or t
  misc_feature (255)..(255): n is a, c, g, or t
  misc_feature (275)..(275): n is a, c, g, or t
  misc_feature (301)..(301): n is a, c, g, or t
  misc_feature (425)..(425): n is a, c, g, or t
  misc_feature (427)..(427): n is a, c, g, or t
  misc_feature (535)..(535): n is a, c, g, or t
  misc_feature (850)..(850): n is a, c, g, or t
  misc_feature (1173)..(1173): n is a, c, g, or t
  misc_feature (1286)..(1286): n is a, c, g, or t
  misc_feature (1291)..(1291): n is a, c, g, or t
  misc_feature (1446)..(1446): n is a, c, g, or t
  misc_feature (1653)..(1653): n is a, c, g, or t
  Probeset Number=SeqID_15137
ctatccagcaatacagcagagtgggcggtagattagaatgatcagacagaatatcggatgtcgatgtataccagcagataccgacncgttaatctctacatctatagtctcatagatgaatatcagaacgtcgattagttatnagagattactcagagttgcagcgtcagtgcatgattagtnagtatagtcaaatcagatntatcagcgtnanaccngtggagacatctcactgcgcagacagagggctgcgantatgtggtatgtatgatcgnacatatagaataagtatatatcgacngcggtgcgttcgttgagtatgatatgtgtctgacgcgttgactcgactaggtacagtatcttagtatagtgtagtgaggcgtaagagctcgccgcggcgccaacgaacgtctgcgggctgagananatacgacgtccgcgagaagcgagaattaaaatagtcagctagacacccgcgcgcgcgatgtgtgagtgaacatatactaacacatacatagcggccgcgtgtcatatnatcgcaacaagaatggagagtggatataggctgacgtctctcctctatttatagtgacatacaggacatgtcgtacagcacataagggccggaggacagagtgtactgtggagaatgacttaataaacgtaaacagattgcgcggctcagagaaatactcatagaagataaactgacgagacataacgacagagagaatggcacagcgcttatttgctggtgtgtgagtgtgtgagaacacaataacaccagcaatagagagagtcgcagagttgcgtgacaaacagaagattgagtgtgtggacgtcgtctccncgcttccggatcataagcgacgctaatgtacaacaacagaagtagtcatatcataccttaatacatcgaccataatcttcatacatatagggtcggccagctgcggtggtgcgggcttatatatactacgcgcaaccgcgggccttgcgatcggcgtgtagtctcgccatataatcactatatatagcaagcgtccattaagtcaacaccaattgtaggttttaaccatcacacaagctatatgctcttgcacgtgatctaaaaatatcagcttgtgcgtgtaacttaagccaaacgaccacaggatcagaacaacaatctcnattcaaatgatgcaaatacaacaaaagatgtgttgtgcggcgcagtgggaatggagagatgaatatgcataggtcgatagtattgttttacttagaattcctaagaagtacgngcggnacatgcgagtagaataataatacgggtgaagagacactcactactagtggtgcgtgataatgctgaggacctattcccacgacgaatagcgcgcttctttgctcatatataattacgtccgactctaattcgcacggcgtagtggatgggtatanatagagaagagtgtgattgcagaagtgtttcacctgcctgtgtcatgcggggctgggtggtgatgaggagccccactctaccaaacatgaaatagcccgtccccgcgcggcgagaggagcgcgaaagcatattgtataatagagagaggggcgactagccctgacaactaatacccctgtataataggtaacgcgaagaaggcaacnggggcaacaaacac

SEQ ID NO: 5359 - DNA, 1670 bp, Glycine max
  misc_feature (60)..(60): n is a, c, g, or t
  misc_feature (80)..(80): n is a, c, g, or t
  misc_feature (181)..(181): n is a, c, g, or t
  misc_feature (240)..(240): n is a, c, g, or t
  misc_feature (266)..(266): n is a, c, g, or t
  misc_feature (508)..(508): n is a, c, g, or t
  misc_feature (1090)..(1090): n is a, c, g, or t
  misc_feature (1638)..(1638): n is a, c, g, or t
  misc_feature (1640)..(1646): n is a, c, g, or t
  misc_feature (1649)..(1649): n is a, c, g, or t
  misc_feature (1652)..(1657): n is a, c, g, or t
  misc_feature (1662)..(1662): n is a, c, g, or t
  Peptide Sequence Number=SeqID_8832
  Probeset Number=SeqID_15138
gaagtgttatgcgcttctttgttacgactgacgaacaaatgcgtgatgttattcaatgangatacgatcagacttattgnagtgtgatagacgtgtaccgagtatcatttgaatacgctgtgcgtctgacgtggtgtgtcatcgatcataggatgtctgacagacgacgctctagtgtgangcggtctctttaactatttcatgctcgtcgtctgtgtacgcattcagctgagatctgtnggagtgatagtgcggtctccactcangaggtgatttgcagcagcgacgtacatatatacaactctggacacgatttaccatgtaaagatcgtgacacggctcgtgtcattcaccttaagtgaagtgattgggtgtgtggcgttcacaacgtgtgtggcgctcgtgtcgctctctcggcattgtataaggcgcgttgtaagcgtagcgtgagtgacacagtcggtgcctctattgaggagattacatataggttatcgcttatcatgancgagagtgcacgaagacgagcattgccactccctggtcggatattattatcattgttgaatctgggtgacattttagttagagctcggtaatgtgctgcagtatgtgatcgcagtgattactagtatgttgtacgtgagtaatttgatgtgatggatagacgtgcgggaggatgcaatcgatgtgggattcgtagatatttataaaagagtgaacggatgttattgctttataagcatgtctgagcgctgtcactaagttattttcgtgaatttactacgcgcatcagtgggaataggtcgtgagttacgttgtagatagttaagcgcagacgcatggcgacagatattagagtcgtttagtacagatacaacattactatactattagaatctccgggcacctcctctcgtaccatactcctgtagtttgagtctccgctgtatagctgtattctacggacttcttgtctgtaagcagcggtgatatttgtgaatctcttaaattggtgggagagatacttgtgcggtgagtgacaggtggagagtgtgtaggagtagacgttagtgtgcgtatagtacgnctgacactactcattgattataaggctgcgtcggagatgaactagaagaccgcacgcgcgtgacatgtgacgcgcggagacttctactatgtttacagttatacacagggtgggcatataattgacgagggaggagaggtagattattccgggtggtgttgaatgtgagttcgaattagactagattcatgttgtgtgaattagaatattcagcaagttccggttacagaacatagcgagatgacagatagaaataagacgatggaataatagagggtaggactatctatcgttggatcgtgttctctgtctttgacaagacactgggcagaagagaggcgagggtgggcgggtccggcaggatgacaacgagcgcgagctatgggtggtgccgggtcgagcggtgtgtgcgacgacggtgtcggccaggatcatacagtcaaaagaagaatcttgatgtggagggggtgatgctcattcgtgagctgacctacgagtgaggagacaccagttatttcagttttgttggtggggaggggtccggaggncnnnnnnnccnccnnnnnnccccncgtagtcg

SEQ ID NO: 5360 - DNA, 1734 bp, Glycine max
  misc_feature (1)..(20): n is a, c, g, or t
  misc_feature (29)..(29): n is a, c, g, or t
  misc_feature (51)..(51): n is a, c, g, or t
  misc_feature (57)..(57): n is a, c, g, or t
  misc_feature (66)..(66): n is a, c, g, or t
  misc_feature (234)..(234): n is a, c, g, or t
  misc_feature (928)..(928): n is a, c, g, or t
  misc_feature (998)..(998): n is a, c, g, or t
  misc_feature (1110)..(1110): n is a, c, g, or t
  misc_feature (1147)..(1147): n is a, c, g, or t
  misc_feature (1345)..(1345): n is a, c, g, or t
  misc_feature (1368)..(1368): n is a, c, g, or t
  misc_feature (1446)..(1446): n is a, c, g, or t
  misc_feature (1559)..(1559): n is a, c, g, or t
  misc_feature (1578)..(1578): n is a, c, g, or t
  misc_feature (1608)..(1608): n is a, c, g, or t
  misc_feature (1661)..(1661): n is a, c, g, or t
  misc_feature (1683)..(1684): n is a, c, g, or t
  misc_feature (1734)..(1734): n is a, c, g, or t
  Probeset Number=SeqID_15139
nnnnnnnnnnnnnnnnnnnnccccccccnccccccccgccccgcgcgcccnccaccnccgcccctnctcgtcccagccgctgccgaacgacacacgagacagaacaggatatgacttacaagacgtggaactgagagtgacaccacaaataatccagacaatttgcgctctcccgggctgcacgcctacgcggccttacaataatgtttatgcattattaccgcacacatcagnagataaaatatgtgactaaagcatcgaccacattattcattaatttagagtagtcgatagggtagttaaacccaccctcgttatgaacatttagctattcaaatgtaaaaactctcgatgcacactctgccttgtttctgtttctctttttctttattggttatagtgtggagtaagcgcgtcgcatcgcctgaccacttagcgtgctcgccagtccggtctgcacacctgtgttgtatgcgtggaagcactacgccagtggggagcgagacttaatattgcacagccgagacaagaaggacaaactccgaaacacaatttctccataacttaagatgatatccccattgcaacaccaacacacttctctgcggataagtcactttacacacgttgagagataccacgcatagacacgtacagatgtttgtgcttacgcctctactgaccgccagcgcaccccacactgaagtgatagctcgcgcatcgacatagcacagcggggaaaggcacccacagagagcagcctggctgcactgacgtgcgcatattagatagaagatgcgcaccgagatgatgactgcagccggcattagtatatagaaaggtgagttcgcggaggccgagggaagctggcgctagatgttacacgcgccgggcacacacacctctcacgcacctgtcgcacacctgngctcagctttttattctattcgcgataccatacgtattggagagaaagttatatcgtcttggttgtgggnaggaggacgcttggcgcagcgctgcaacatgtgatggtttcgcacacatatgctaatatagaaatgatgagagacacagatatatgagcaccatatgcgactctggaacttnatgtattgagcggaggaccacattactaagctacatntatatctatatagaatactctagacgtgagtgtacgagataagcatcgactttcgatcacaggccgggacgatctatatctactccgctactactaattgctaccactacggcatatactccacggagagtagagcgactggtcggccgctctcgacagaaagcgtgatactgtggtattctagaactgagtacaaancagtagtgtactatatacatatnactaagatgtgcctatatattgacatatatctatggagaatatattggatctatatagtcttatattctttgtctatnctactttctttgttctcatttaatattccattttctattctctcctctcgacactcccctgatttatctaacagaacgacatacaatctatacagaccaataacttcgcgatntatgatgttcgccacggangcaaaaataccactctattatatctaattngatgacccctgcacagactactggttcgacaacactgacaatctagctctccntcatccatcagacgtcccaggnntaacgacagtatacaccagcacgagagcatggggtacatcaacttcacan

SEQ ID NO: 5361 - DNA, 1506 bp, Glycine max
  misc_feature (21)..(22): n is a, c, g, or t
  misc_feature (29)..(29): n is a, c, g, or t
  misc_feature (34)..(34): n is a, c, g, or t
  misc_feature (73)..(73): n is a, c, g, or t
  misc_feature (87)..(89): n is a, c, g, or t
  misc_feature (95)..(95): n is a, c, g, or t
  misc_feature (97)..(97): n is a, c, g, or t
  misc_feature (105)..(105): n is a, c, g, or t
  misc_feature (145)..(145): n is a, c, g, or t
  misc_feature (187)..(187): n is a, c, g, or t
  misc_feature (190)..(190): n is a, c, g, or t
  misc_feature (222)..(222): n is a, c, g, or t
  misc_feature (227)..(227): n is a, c, g, or t
  misc_feature (373)..(373): n is a, c, g, or t
  misc_feature (533)..(533): n is a, c, g, or t
  misc_feature (562)..(562): n is a, c, g, or t
  misc_feature (913)..(915): n is a, c, g, or t
  misc_feature (945)..(945): n is a, c, g, or t
  misc_feature (1054)..(1054): n is a, c, g, or t
  misc_feature (1234)..(1234): n is a, c, g, or t
  misc_feature (1236)..(1236): n is a, c, g, or t
  misc_feature (1261)..(1261): n is a, c, g, or t
  misc_feature (1404)..(1404): n is a, c, g, or t
  Peptide Sequence Number=SeqID_8833
  Probeset Number=SeqID_15140
tagagatttgtatgagtaaannaaaaaanaaaantacaccgctccaacaacgacaaagcacacacacacaacntcccttctcctccnnngagggngngatggtgngggggtatcggtcccccacctctccaacacgagttcttcntcgctcgactcagcgctcccacacaccatctacaaatataanccnccctctcaacgacatagttagcgccctgcatnctatnctacgcaccacccatcagcacacgcgcaacactacaactatatctctctgtgcacacgcctaagtatgtgtaatctgtatgtctacacaaccatctagtgccatgccacaataacactaacccataatcgcctcacagtcaccccnacaaaccactaacgtactaacacgtcgcaaacatcgattctcacccacacacctccacagccaatgcgttctgtacgttcctcctcctcgttggacaaccaccacctatctcccactgacgtccgcggcctgccgtctgtctctcccacactcctctctntcttcgctcgcgttccactctcctctctncatcacgctctcgctgccctccacccactcaccgcgtagctgcgcgcgcacccaccgccccacagcactcacctcccgctacttctcccaattcggtgacaagtatctctatgtgcgtcgtgctcgagttcatgatagacactgagacggacgagtgactcgcgtggaatgtatgaaggtagattgagtgatggtctatattacacatataatgaaaaatattatgagaacaaaccaccacctaccacacccacaccacacgcgacgagacaataactcagctatagtcatcgcgccgagagcgcacctatgtaattactcgtggtgaattagaggacgtactcttgaatnnnataatcatcaacaacacttcaacacgtagntaacattatgatacttatgaagaatatatataggagatatgcaaaagacgcacctcgcgaacaccacaccacatcacctaatatcgtcacacaccaaccagactgcccntcactctcgtcacacggcacatctctacttcacatcatcatcgctatactcgcctacccgcatctcagtcagccagcgtaacattatgatacattcaatatacgccattcatcatacttccacatatacgagaatattacagagacgtgcgccgtacggttgctctccgacactcactanangcatcgctatattcacacttctccntactcgtctatcttcatccacgttatacactaatctacgtctgcatgagactcgtggcgatagtattgatacgactagaatgtaatctactcagacgtatgaatacacacactcacacacttctatgtagctatgaaagtcgntgtctcataccatgcatcgcgctaagtaatatcgtactagacgctcgcgcggcgcgtctcggtactctcgcacataccatctcccactgcgctctcatcgcc

SEQ ID NO: 5362 - DNA, 1428 bp, Glycine max
  misc_feature (1)..(1): n is a, c, g, or t
  misc_feature (176)..(176): n is a, c, g, or t
  misc_feature (659)..(659): n is a, c, g, or t
  misc_feature (993)..(993): n is a, c, g, or t
  misc_feature (1016)..(1016): n is a, c, g, or t
  misc_feature (1065)..(1065): n is a, c, g, or t
  misc_feature (1191)..(1191): n is a, c, g, or t
  misc_feature (1193)..(1193): n is a, c, g, or t
  misc_feature (1237)..(1237): n is a, c, g, or t
  misc_feature (1243)..(1243): n is a, c, g, or t
  misc_feature (1257)..(1257): n is a, c, g, or t
  misc_feature (1276)..(1276): n is a, c, g, or t
  misc_feature (1300)..(1300): n is a, c, g, or t
  misc_feature (1321)..(1321): n is a, c, g, or t
  misc_feature (1334)..(1334): n is a, c, g, or t
  misc_feature (1339)..(1339): n is a, c, g, or t
  misc_feature (1349)..(1349): n is a, c, g, or t
  misc_feature (1355)..(1355): n is a, c, g, or t
  misc_feature (1372)..(1372): n is a, c, g, or t
  misc_feature (1385)..(1387): n is a, c, g, or t
  misc_feature (1393)..(1393): n is a, c, g, or t
  misc_feature (1398)..(1407): n is a, c, g, or t
  misc_feature (1414)..(1418): n is a, c, g, or t
  Probeset Number=SeqID_15141
nagtattactgtgtaatagagtgtggtggataacagacgctagtgtgctggcgggtcggcgcgctagtatagattatgatgctgggtgtactgtgcgtagagcgagagcgatcatgccggcatcgtcagcgggcgcgtggagcgagaccgcgtggtttgtgtggacatgtgtagcngcgatgcggtgccggtcgagccgcgtagttatagcgatggcgtgagtcgcattcacagtgattacttctccatcgtactgtggtgcgcttctccggataccttataaggagagacagcatgcagatacataagcgtcagcaatgtaggagacgaggataaagaactgatggtggacgggcacggtatggttcgtcaggcgttcttgttgtcgcaacgaatgagggcattaggtgagcagcgtggagtaaatagagagacgtaagaattgagaagacacgagatgcgaacgccgcacgtactcctcgcctttgaaacattgggatgagccggagccttgacgcagtcgcatagctatatggcagataataaacatcagagagagtgatgatgaaggaagacgagatgaatgaaggggaaaggcgatgcggtatatagtaagggacaatgtacaccgcaccgcgaatcacaatcagaagatgttncgtgtgatgtgcgtggcacgttgcgtcgtgcgacgtcaaccagagggtgtgggtggtcgcaataggggcgagcaggcgcgttgtggtgtgtgtcgcacggtagatgatgcatgatcagatgagatcactagatactatgggcgcgcggcggtcgcgagacggagagtgcgtgacacggagtgcatctgtgacgtaggtgcgccgagcgcaggcggtcggccgaggcggtgggcgagaggcgtgcggggtgtgcgcgggaagcgccgcggagcgtcgtgacaagagggtcatatagatctatccgacgcgccctcactctcgcgttgagcggcgnagagcgaacacacgaccaccacncaaccacccaagctcggatgcaatctcaccaccacacacaaccactccntcagaacacaatacacaccacaccacacctctacactacatctatatattaaatcttatatatcactacgcatctcaactcagtgtgatacaaccatcacagagtgattaatgctatatgtgtttntnatttattttaatggggtgagggagttggtagtggtgcgcggccnggcgtngggtatgggtaganatggggtgggtacagtgtngagagggatggtgttttgtattgntgggcggtgtgtggggagtgnggtagagttggtnttaantggatagganttggtngtagagagagtagtggnggtgagtgggtgnnnagaagngtttnnnnnnnnnnggttttnnnnnaaaaaaaaaa

SEQ ID NO: 5363 - DNA, 467 bp, Glycine max
  misc_feature (97)..(97): n is a, c, g, or t
  misc_feature (231)..(231): n is a, c, g, or t
  Peptide Sequence Number=SeqID_8834
  Probeset Number=SeqID_15142
gaattatatgcttctcatgcgtctgagtatgatatctcctttgaaaagtatgtagagatcaaagaagatgtctccaagatggtagatttctccgagngtatcccaaccgtcagagggcctaggacagccgtcttctgggacgccgtggattgccctttccctccttcttcctctcctgatgcgatctaccaatctatctcatcagctcttgctgaaaggtgttttagtganaatgttactatctgggcctatcttgatgatgctgacaagaaagggtctgccttactgggtggtgacaagacgtgggcttccagaatctactttcttcccggaggggataaagcctcgagacgtatcagaatgttaaatgacatgtttttatgggcaagggactctcctcggggcatgcgttatgaagctagtttggtcctgttcgcagatcagttcataggtgccggcggctacta

SEQ ID NO: 5364 - DNA, 1697 bp, Glycine max
  misc_feature (26)..(26): n is a, c, g, or t
  misc_feature (30)..(30): n is a, c, g, or t
  misc_feature (90)..(90): n is a, c, g, or t
  misc_feature (111)..(111): n is a, c, g, or t
  misc_feature (139)..(139): n is a, c, g, or t
  misc_feature (171)..(171): n is a, c, g, or t
  misc_feature (232)..(232): n is a, c, g, or t
  misc_feature (236)..(236): n is a, c, g, or t
  misc_feature (271)..(271): n is a, c, g, or t
  misc_feature (350)..(350): n is a, c, g, or t
  misc_feature (360)..(360): n is a, c, g, or t
  misc_feature (512)..(512): n is a, c, g, or t
  misc_feature (717)..(717): n is a, c, g, or t
  misc_feature (1154)..(1154): n is a, c, g, or t
  misc_feature (1181)..(1181): n is a, c, g, or t
  misc_feature (1223)..(1223): n is a, c, g, or t
  misc_feature (1393)..(1393): n is a, c, g, or t
  misc_feature (1623)..(1623): n is a, c, g, or t
  misc_feature (1641)..(1641): n is a, c, g, or t
  misc_feature (1643)..(1643): n is a, c, g, or t
  misc_feature (1649)..(1649): n is a, c, g, or t
  misc_feature (1651)..(1651): n is a, c, g, or t
  misc_feature (1658)..(1658): n is a, c, g, or t
  misc_feature (1670)..(1672): n is a, c, g, or t
  misc_feature (1680)..(1690): n is a, c, g, or t
  misc_feature (1695)..(1697): n is a, c, g, or t
  Peptide Sequence Number=SeqID_8835
  Probeset Number=SeqID_15143
ctaccaggatgatgcgatggggcgtnatgntgagtgaacgttagcatccgtgtaatacataatgaacgtgacgagacgcctcatagtatnagtgtaatctcgtatatctcntccgactgtaatcaatcactcgtacatnagtacatatcactgtatactataagtatgatnatctgctcgagtaacgctactagtgtgtgcatcgtaataagtcataactagagatacagantcgnagcaaatcgtagcgatacagtcttgatgagcaggnatgcgcgcaagtctagtgagtggataagtagctagtcgaacgtcttcagtagcagtagatacggcgctagtgtatatgntgtgtctgtntgatgtattgtgatgctatgtaccacgatagtattcgtatagctatctagtgtgtgatggtgtagttagtgttatattgatgctccctgtctgatgtgcgaacgtcgatcgctatatatatatatatgctctattcatgccttattctatantgtcgttgacgaatatattcatatctcgctcacatatatatacgtatatattcgatatacacatgaagagcgatatagtatatgtattagacatctacagatatatgagagttctgtacgcgagtcgcgtgtgtctggtatgatgctagagtattcgatagacaggacgtactgtgtaatcagtaatatcaatcatatcttatancaagtatgatatctcctcgtgtgtgtatatacgcctgcgctcaccatatgctgtactcgtgcgcgaacgtcatgtatagagccgtgtcaggtacgtcgatagtatcgagaacgtaggcttatagtagtaattcgtatatgatgtagtgggggcgtcgatcagcgcatgcagaatattatacttaggagatatgcggatgttgttcgcgtagccattgacttacggtaggtggtgattataacccctctcgcgtcctcgtactctgttctctcagtacgtgcatgcttaagctagctgtgcatggtagagatactgacgtaatatgattcatcacgacatgagttgcgctcgtcaataaggagatagtatatcctacgagaatatagatgactaggtgtgcaactaagtctccttacgactagtgtactcgccgcganaacgaacagaccacatgacaatgttangtatactataactatatgtactacttaatatattcactaccntcacttactgagatcatctacaaacacaagacatcatacaaggaacatatcaacacgcatataccatcttatcatccactctatcagaacaaatatgctcacatccactcacactgcgctctagtctcggcgagtgagtatctgtctgtagctaccgaactgtagtctgnttggcgacgaaggctaggcgacgcaccctacacaaacacagagcgacctgctctcgacgaacagcacacctccacaccatatgactcctccttccactcctaggtaacgcgcatatctcgctcgtgacagagagaagcagaatctacatacatcaactgcctctattatggcacacagacaaaagaagagcgacttctctcgaaatataaatcgtactcgaccgcgcggnatgtttatgtgtgtagtntnggttcngnttggggngtgtggtttggnnntttttttnnnnnnnnnnnttttnnn

SEQ ID NO: 5365 - DNA, 664 bp, Glycine max; identical to SEQ ID NO: 2376
  misc_feature (394)..(394): n is a, c, g, or t
  misc_feature (423)..(423): n is a, c, g, or t
  misc_feature (498)..(498): n is a, c, g, or t
  misc_feature (503)..(503): n is a, c, g, or t
  misc_feature (596)..(596): n is a, c, g, or t
  misc_feature (601)..(664): n is a, c, g, or t
  Peptide Sequence Number=SeqID_8836
  Peptide Sequence Number=SeqID_8836
  Probeset Number=SeqID_12155
  Probeset Number=SeqID_15144

SEQ ID NO: 5366 - DNA, 1423 bp, Glycine max
  misc_feature (51)..(51): n is a, c, g, or t
  misc_feature (71)..(71): n is a, c, g, or t
  misc_feature (89)..(89): n is a, c, g, or t
  misc_feature (94)..(94): n is a, c, g, or t
  misc_feature (205)..(205): n is a, c, g, or t
  misc_feature (793)..(793): n is a, c, g, or t
  misc_feature (875)..(875): n is a, c, g, or t
  misc_feature (1090)..(1090): n is a, c, g, or t
  misc_feature (1142)..(1142): n is a, c, g, or t
  misc_feature (1197)..(1197): n is a, c, g, or t
  misc_feature (1201)..(1201): n is a, c, g, or t
  misc_feature (1220)..(1220): n is a, c, g, or t
  misc_feature (1245)..(1245): n is a, c, g, or t
  misc_feature (1310)..(1311): n is a, c, g, or t
  misc_feature (1316)..(1316): n is a, c, g, or t
  misc_feature (1378)..(1378): n is a, c, g, or t
  misc_feature (1385)..(1386): n is a, c, g, or t
  misc_feature (1388)..(1390): n is a, c, g, or t
  misc_feature (1392)..(1393): n is a, c, g, or t
  misc_feature (1401)..(1401): n is a, c, g, or t
  misc_feature (1407)..(1408): n is a, c, g, or t
  misc_feature (1410)..(1410): n is a, c, g, or t
  misc_feature (1412)..(1412): n is a, c, g, or t
  Peptide Sequence Number=SeqID_8837
  Probeset Number=SeqID_15145
cgcaagagagatattaatcgacgagtagtgtatacctaggaatctatacanttgttcccgtctaccgccgncgccttccactcgttctnacacnttacatcgagtattccctgcacacaccaacatatactgtccgagtatgatatgcagcgacgagtctcgccgtcagctgcgtcaccatctcgtatctaccacaccgcgcacntccggacgtgctccggtccctctctgatcgatcttactgtagtcgttatgtagtatcttgtctcggtctacagccaagagttcgacgctcacggtgcgggcggccgacgactaatccccgcaccatgtcgtgcaggagagtgtggagtggtgtgggacacacagctcagcacgcgagcggcgacgcacgatctcgtatcgtgtgctctcttgttcgattgctgtcataggagccgctgtagtgtgatcccagtgcgtgagtgttagtatggtatcacacaaccaccatggcgatcgtagcgttgcatgtatcatcgttattgaacgctgacatcgaccggtttgtatatcatcatctctggtctcgcatccttcaccccattacactatctatacaccaattatgattgaacatatacactgcgcacaacatagtacgtgtaagatatgtatgcaaagttcgtgagtagtatagttaataaacaatagtgagagagtgagtgcagaatggtaggaggtaagtgcgttgacagcgctgtcatagtatgagatgggagacgacacgagcaatcaccacgtcgcggcgcangtctcggccggcacagccgtcgacgcaacgtgagggcagacgcacgactgtcgtagtgagtggcgcgcaggatgccacttancttcgccagacacaccacacgacacagctgacttccaaaactattcttgcggagtgccgtcgcgttcgtcggctcttcgtcacgccgctccgctctccgctccgacggtcagtcaggaatgtgtatgtgcctcattacatattattctgcatcttctctttctgttctcttctcgtctatctggtcgttcacgtatgtctatagcatacggccgngatctcacaacacagtcatactcacatgtctgctcagacgtggtgagctatnttctacctaccttatttatatatgatgttctaccgtagacactattggagcagtngagntgataaatccgctatacanaactcgatacaagagagagatagcnctacgcatcccacggtagatagagactgcgtaccttcagcagtgtgtggggggggcccagcctcnnacatnacctcaccacctacgctctactatcccttctaactcctgctccgcgcgctctcttcgatatnaaccttnntnnnanncccaccancccccnncncnacaccccctat

SEQ ID NO: 5367 - DNA, 1680 bp, Glycine max
  misc_feature (62)..(62): n is a, c, g, or t
  misc_feature (64)..(64): n is a, c, g, or t
  misc_feature (183)..(183): n is a, c, g, or t
  misc_feature (266)..(266): n is a, c, g, or t
  misc_feature (269)..(269): n is a, c, g, or t
  misc_feature (426)..(426): n is a, c, g, or t
  misc_feature (439)..(439): n is a, c, g, or t
  misc_feature (577)..(577): n is a, c, g, or t
  misc_feature (588)..(588): n is a, c, g, or t
  misc_feature (635)..(635): n is a, c, g, or t
  misc_feature (717)..(717): n is a, c, g, or t
  misc_feature (792)..(792): n is a, c, g, or t
  misc_feature (831)..(831): n is a, c, g, or t
  misc_feature (885)..(885): n is a, c, g, or t
  misc_feature (1065)..(1065): n is a, c, g, or t
  misc_feature (1070)..(1070): n is a, c, g, or t
  misc_feature (1099)..(1099): n is a, c, g, or t
  misc_feature (1137)..(1137): n is a, c, g, or t
  misc_feature (1144)..(1144): n is a, c, g, or t
  misc_feature (1268)..(1269): n is a, c, g, or t
  misc_feature (1300)..(1300): n is a, c, g, or t
  misc_feature (1441)..(1441): n is a, c, g, or t
  misc_feature (1443)..(1443): n is a, c, g, or t
  misc_feature (1473)..(1473): n is a, c, g, or t
  misc_feature (1499)..(1499): n is a, c, g, or t
  misc_feature (1505)..(1505): n is a, c, g, or t
  misc_feature (1552)..(1552): n is a, c, g, or t
  misc_feature (1555)..(1557): n is a, c, g, or t
  misc_feature (1561)..(1561): n is a, c, g, or t
  misc_feature (1565)..(1565): n is a, c, g, or t
  misc_feature (1567)..(1567): n is a, c, g, or t
  misc_feature (1571)..(1571): n is a, c, g, or t
  misc_feature (1574)..(1575): n is a, c, g, or t
  misc_feature (1580)..(1585): n is a, c, g, or t
  misc_feature (1587)..(1588): n is a, c, g, or t
  misc_feature (1592)..(1593): n is a, c, g, or t
  misc_feature (1595)..(1598): n is a, c, g, or t
  misc_feature (1603)..(1603): n is a, c, g, or t
  misc_feature (1605)..(1605): n is a, c, g, or t
  misc_feature (1607)..(1608): n is a, c, g, or t
  misc_feature (1610)..(1610): n is a, c, g, or t
  misc_feature (1612)..(1612): n is a, c, g, or t
  misc_feature (1618)..(1623): n is a, c, g, or t
  misc_feature (1629)..(1630): n is a, c, g, or t
  misc_feature (1632)..(1632): n is a, c, g, or t
  misc_feature (1645)..(1645): n is a, c, g, or t
  Probeset Number=SeqID_15146
cattgtggcctcgtcctcgaacacgagtttacgtgtcgttcttgagccagtatatcgatgancnttttcgcgcggtacgactagcgtcgcgtgacacagacgcacacactcgagacgcatgacagctcactgtagctagagacacgcggcaggcgctcacccgtcgcgcgttcagttgagtgntcagtctcacagcgcatatatctgtatagagcactactacactgagatcaatatatagcatcactcatgtatagtcacacgcntcngtgtgtgagagtgtacacaggctaagaagacattacacagcagaggtgcaatcggcgcttagtctcatctggtcgagccgtctagctcgcgcacctgtcgacgctgtcagcgcgctgccacctcgaaagacctgccgcatcacgctatagccgcgantcgtaggcacgantctccgcacgtgcgcagtctgcgacgaggagacggttgacggatgttccggccgtcgtgcagaagtcatcggttggtcgcacgctcgaggtcttcgtaagcggcgccaccatgttgcgattgtcgccttctgtcgctngcacgttaggntgatgggtcgagcgcgctagtgatggatcatgacattgtgatagtcnatgaacgaggcagtcggcgatagtgataaccgcgcgtccggtctcactcatcaggatctcgatgtgcgcagaacgatgcgtncgcacgcgcagcggcagcacctcagagtctgaagcgacatcgtagcaagcgtgtcgtgagagcgatcgcagatanagactggatcatagtagcgtgctacagacatcgtaagcnagcatatctgcaaccgctcatcatgaccgcaccgtggtcactcgcactcactanaatcgtcacagactgtatataggtagcaggaacgtggcgacacgtggcgacgccacgagtctgtgcgagagcgcgacgcgaggcggtcgacgcggggttcgatatgtgcgtggttgcgcgactgcgaatcgatgcgagcacgtctcgtcgcgtcttattgtgtcgttcttctcttatttntcttnttcgttccttgtgttgctgttgtgttgcntttctgctagtcgtcggaggtgctgtctgtgcccagtngccttgnggtgcgtctcagtagtgtgtgtgcgcatggagagcgaagcagagacgagacccgacacgaacacacgaccaacgaaccgacaccccagacagacgcaacccatcactacacgcgcgacagacanngagagtagagaggtagcagagaagagctcangtgttggtgcgagatcgtaagaaggtggctcctgtgagcgcgacgtctgagcgcgtgtctatccgctggagattgaagacgcagacggctcgtctaacatccatagtgcatctcatcacacagcgtcatcatattacacancnttctcccgattgctagtacatgatcgatgnttgcgtctcacaacaagtagcttatncatcgnaacaatgtatcccggcacaatatcaaccttctacgaccacatgtttnttnnnggtnggtntncctnttnncggtnnnnnnannaatnnannnnagagncngnntntntagccnnnnnnacatanncnccacacccacaanaacaccaccacacaacaaaacacacacaacacacc

SEQ ID NO: 5368 - DNA, 741 bp, Glycine max
  Peptide Sequence Number=SeqID_8838
  Probeset Number=SeqID_15147
aatcaatttaaaaactcatccagatcttatgaaaacattcattgcagtctttttcattctcattagctgtgcttttgcaggaagaagctatactcagctcagtcaaagcactattgctaacagtagtttgatccaagatctccaacagctcggagctgaatatgtccttgaacaaggtattttcagaagcaccaaagcacctctccctaatggtagttgggaagtcaacgagactgtgagcgttttcaaaaaggataattgcggaaccaccatttacaacttcacggtcatcttgagatgtatctctgagactaaacttgtcagagctcgttacctcatctcctataaccgcaaaaatttcaacgctcttgtcacttggttcatttacactgatatcactccagatggagacaatttcgctatttctgacttaccttcattcattgatgtcagagacctcaacgattctgacagtccatatcaagagtatttggaccaaggccttaactataccgttgctaatgctacctccaatggcttattgccagaaggcgactacagagttgctagagtctttagcatcaaggataccggcttctcttatccctatggttaccgatacttggtgaagttagctaatgatgataatggaaagtattaccgcgccttgatcactgtttggaacactgagaatgttgaagaagaccagcaagaatttactccagaatttgttatctaccc

SEQ ID NO: 5369 - DNA, 635 bp, Glycine max
  misc_feature (1)..(36): n is a, c, g, or t
  Probeset Number=SeqID_15148
nnnnnnnnnnnnnnnnnnnnnnnnnnnnnnnnnnnnccaaccactggaatattatgtttacgcgtctgattttattctattcctctgttcctctgacaccatatgacggccactcggcttatgtgagacaatgacttttctaacgacagaggcatttgtctaaacacaaggattggtatgcttaaaccgaatgcgtgcttcgtgtcaaactaacgttacctttacgaattaatattagcaattatagtactctaaaaaaaatgtgattccacctgaaaaaatacgaacaaccgagtgcaaaactaaaaacaacctaagtgcaaaatatgattccctcccgaagaaaaccaggcccccttgtcctcccccctagacactatgtcaccccccgaaaaaaagggcatcaggggaaaaaaaaactaatgtcaagggtaataacgatcgatcggccatgcagtaagtgttggccaccccatccaaggacgtgcttacaacctgccctgacgcttttccctctgggtgggaaccccaacaccccccctggggtaaaaaaaaaaatatcgcccccgggggaaaaaataaatttggttacctgttatttaaaaaagaaaaggggccattgtgttttgggcctt

SEQ ID NO: 5370 - DNA, 1356 bp, Glycine max
  misc_feature (125)..(125): n is a, c, g, or t
  misc_feature (181)..(181): n is a, c, g, or t
  misc_feature (259)..(259): n is a, c, g, or t
  misc_feature (267)..(267): n is a, c, g, or t
  misc_feature (431)..(431): n is a, c, g, or t
  misc_feature (523)..(523): n is a, c, g, or t
  misc_feature (996)..(996): n is a, c, g, or t
  misc_feature (1273)..(1273): n is a, c, g, or t
  misc_feature (1319)..(1319): n is a, c, g, or t
  Peptide Sequence Number=SeqID_8839
  Probeset Number=SeqID_15149
ctgatgatatctgagtatgcgccgtcagtcaacgcagtgtcgcactactgcgctgcgcgagcgagttcgcaccacgatcatagcgactgtgcagtcagcttcagcagtgagtcgtcgatgctggngatgctggtgtctcgcggctgtcagatcatatcgccatacggaagtcagatgctantgtcggagcatctgcctatgcgcccgacgacatcttcgagacacgacagagcatctgatgtcatctccatgcgtatanaaactagnagctctatagcaatgaggctaagcgcagtatcggtgtcatattgcgctatgtaccatgcgcgtgacgcgtctcgcgctcctgcagtgagacgccgagtactcgcgtctaagcgcatgaaggacgagatgttcatcgacctcctctatacgattcgcatggcctntctacacgcgtctctctcacgcattcgtacgcgcgactagacgatgttccacaatatcgctcatgtaggcgtggctcagcacagatatgtangtaacacttgtctcggactaaatcgccctgcgtctagcagatacgtactgtgagtcaccatcctgtttatagtcgtccatccacgcactgtctgctcacgcccacacctcatagctatggccaatgctgacctatacggctagcgacgcaacctcacgctctgtctcatcggcgccagcccgcccgtcgcgacacccctcatatataacaattactgtataatctcacgtgagacaacgccgccatctaatactattctcgctcgcgtccgggcccgcattcctcactcaactctctcttctttaacaccaaccagtgcctctctcgcgcttggtcgacacattcatgcgaaagcgcgctcatctgccgcgccgtgcacataacagtcctcgcaacctgcgcgccgtggtataccgaacacaaccgcgcagcaccaccgattacgtctttgcaaggattgcatatgaatgtgngagagacacctcgcccttagtgggaccaagagaaatcatatcagcctacagtaaaagtgacgtatcgcatagtgatggtggtggccgatgtcggcacgtccgtcccgcagtcacacgccgtgctcgtgcagttcgttagcgcgcggcggctgtgctgtgcgtatgtgacagtgtctgttcatatctcactatacgcactcgcctcttatgtataagagcgtggaggtgggagtctctaccacactgaattattaattatgtggtgcgtgtcgcgctntcgcttatctcgatatgtaccttacattgtagttcctattcgtcantgccgattagcactttgctctgcggctgcgtgctctc

SEQ ID NO: 5371 - DNA, 381 bp, Glycine max
  Probeset Number=SeqID_15150
tcgagattcaacagtctttggctgtctccgcttttaacaccaaacagacatccgagagctgagaaaaaacgcaaccatggagggaggggtctcctacactcgcatgcacttgtgtcaaaatccgcgagctgaaggacgactacgccaagttcgagctccgcgacaccgacgcgagtgtagccaacgcgctgcggcgcctgaagatcgcagatgtgccgacgactgactagaacctgagggtgatcgaggtaaaatgcgctgtgctcaacgacgagttcatctggcacaggctcggccatattatgctcacgagcgagcgcgccatgtccatgcgcttctcacgtgactgctatacctgccacggcgactgacagtgcgcgt

SEQ ID NO: 5372 - DNA, 522 bp, Glycine max
  misc_feature (25)..(25): n is a, c, g, or t
  misc_feature (69)..(69): n is a, c, g, or t
  misc_feature (275)..(276): n is a, c, g, or t
  misc_feature (279)..(282): n is a, c, g, or t
  misc_feature (382)..(382): n is a, c, g, or t
  misc_feature (415)..(416): n is a, c, g, or t
  misc_feature (479)..(479): n is a, c, g, or t
  misc_feature (487)..(487): n is a, c, g, or t
  Peptide Sequence Number=SeqID_8840
  Probeset Number=SeqID_15151
tcgagtcagctacgtaggccccccngattcaagacctactcaaggatacgaagctcctgaatccagcangaattacactacccaagagaagtggaatctttggtgatatgatcagcacttggcaaaacagatcagtccaaaatgaagacaatcaacatcgtcacactactgaaactcatgctgtaaacgaccatacaaacaatgatatgatgggaatgcctttcatgaacttttggaaacccaaagattcttccaaagagccgctgtcagatttnncgnnnncgtgagctatggtggaagctccacaggattcagaagaaaggaatcctttgatttattctaggtgatgtgaggaattacttctgggaagaatgaaaaaggngcccatcttaccaatagcctttattaattcacnngaagaaactcttgttactcatttatttcctgatgttttttaaacggatgaattcttgtagacntgaagtcntagaaccatgttctatcagaaactgttatttctta

SEQ ID NO: 5373 - DNA, 2166 bp, Glycine max
  misc_feature (12)..(12): n is a, c, g, or t
  misc_feature (15)..(15): n is a, c, g, or t
  misc_feature (25)..(25): n is a, c, g, or t
  misc_feature (363)..(363): n is a, c, g, or t
  misc_feature (407)..(407): n is a, c, g, or t
  misc_feature (442)..(442): n is a, c, g, or t
  misc_feature (445)..(445): n is a, c, g, or t
  misc_feature (593)..(593): n is a, c, g, or t
  misc_feature (608)..(608): n is a, c, g, or t
  misc_feature (719)..(719): n is a, c, g, or t
  misc_feature (738)..(738): n is a, c, g, or t
  misc_feature (842)..(842): n is a, c, g, or t
  misc_feature (850)..(850): n is a, c, g, or t
  misc_feature (903)..(903): n is a, c, g, or t
  misc_feature (943)..(943): n is a, c, g, or t
  misc_feature (995)..(995): n is a, c, g, or t
  misc_feature (1008)..(1008): n is a, c, g, or t
  misc_feature (1055)..(1055): n is a, c, g, or t
  misc_feature (1164)..(1164): n is a, c, g, or t
  misc_feature (1206)..(1206): n is a, c, g, or t
  misc_feature (1213)..(1213): n is a, c, g, or t
  misc_feature (1277)..(1277): n is a, c, g, or t
  misc_feature (1279)..(1280): n is a, c, g, or t
  misc_feature (1282)..(1284): n is a, c, g, or t
  misc_feature (1286)..(1286): n is a, c, g, or t
  misc_feature (1289)..(1289): n is a, c, g, or t
  misc_feature (1306)..(1306): n is a, c, g, or t
  misc_feature (1310)..(1310): n is a, c, g, or t
  misc_feature (1352)..(1352): n is a, c, g, or t
  misc_feature (1359)..(1359): n is a, c, g, or t
  misc_feature (1390)..(1390): n is a, c, g, or t
  misc_feature (1393)..(1393): n is a, c, g, or t
  misc_feature (1401)..(1401): n is a, c, g, or t
  misc_feature (1419)..(1419): n is a, c, g, or t
  misc_feature (1459)..(1459): n is a, c, g, or t
  misc_feature (1485)..(1485): n is a, c, g, or t
  misc_feature (1515)..(1515): n is a, c, g, or t
  misc_feature (1535)..(1535): n is a, c, g, or t
  misc_feature (1540)..(1541): n is a, c, g, or t
  misc_feature (1597)..(1597): n is a, c, g, or t
  misc_feature (1600)..(1600): n is a, c, g, or t
  misc_feature (1609)..(1609): n is a, c, g, or t
  misc_feature (1616)..(1616): n is a, c, g, or t
  misc_feature (1628)..(1629): n is a, c, g, or t
  misc_feature (1636)..(1637): n is a, c, g, or t
  misc_feature (1639)..(1639): n is a, c, g, or t
  misc_feature (1641)..(1641): n is a, c, g, or t
  misc_feature (1666)..(1666): n is a, c, g, or t
  misc_feature (1675)..(1675): n is a, c, g, or t
  misc_feature (1686)..(1686): n is a, c, g, or t
  misc_feature (1727)..(1727): n is a, c, g, or t
  misc_feature (1742)..(1743): n is a, c, g, or t
  misc_feature (1745)..(1745): n is a, c, g, or t
  misc_feature (1781)..(1781): n is a, c, g, or t
  misc_feature (1790)..(1790): n is a, c, g, or t
  misc_feature (1814)..(1814): n is a, c, g, or t
  misc_feature (1831)..(1831): n is a, c, g, or t
  misc_feature (1845)..(1845): n is a, c, g, or t
  misc_feature (1855)..(1855): n is a, c, g, or t
  misc_feature (1859)..(1859): n is a, c, g, or t
  misc_feature (1865)..(1865): n is a, c, g, or t
  misc_feature (1868)..(1868): n is a, c, g, or t
  misc_feature (1871)..(1871): n is a, c, g, or t
  misc_feature (1886)..(1886): n is a, c, g, or t
  misc_feature (1889)..(1889): n is a, c, g, or t
  misc_feature (1906)..(1906): n is a, c, g, or t
  misc_feature (1933)..(1933): n is a, c, g, or t
  misc_feature (1942)..(1942): n is a, c, g, or t
  misc_feature (1944)..(1944): n is a, c, g, or t
  misc_feature (1956)..(1956): n is a, c, g, or t
  misc_feature (1961)..(1961): n is a, c, g, or t
  misc_feature (1977)..(1977): n is a, c, g, or t
  misc_feature (1979)..(1979): n is a, c, g, or t
  misc_feature (2009)..(2009): n is a, c, g, or t
  misc_feature (2020)..(2020): n is a, c, g, or t
  misc_feature (2026)..(2026): n is a, c, g, or t
  misc_feature (2029)..(2030): n is a, c, g, or t
  misc_feature (2044)..(2044): n is a, c, g, or t
  misc_feature (2073)..(2073): n is a, c, g, or t
  misc_feature (2093)..(2093): n is a, c, g, or t
  misc_feature (2101)..(2101): n is a, c, g, or t
  Probeset Number=SeqID_15152
tttattccaccnccncactaccccnctccctctctcaactatctacttatccatatatatcttacttgcgtctaccgctccccacatcctccctcctcatccatattcatattcctaccccaactctctcctcttactatacttgtatcttagtacgcacaaacctagtaactgtaataaccctcttgcgatatgacctcattctcgcactcaagcacggctcatatactcacatatcatagaaatcagaccactcgtcctgctcggatgtgagctgtcgtcagcgcgctatgtagctcacgtccatgtgatgattgtgtctctcatctctatctcctgatacgtgcgtgcaagtcatgctcnacatctacaccattgatgagacaggcacgcaagatgtgctagtngtcgtacctcgtggcaacgactctctagagacagnatnataacaggagtgagacactgacttactattatctacacatctatcaccagtcatatctgatccgtaagtactactactgatgcttctgtctcatgacgtacatacagtgaagcacatagcacagtgccatacatgttgttagtaggtntcagtgctcggcttncccatcgtcagatgcgtgtcatctgtacggctatgtcctgtacgcgctcatctatctactactctgctcttcgctagggtactctcacatcattctcaactcttcactctntcaataatgactatagttnatgagtgttgtctcacgctcactcatctactagctgtacactactgtacattgatatcgtcgctctactagacattactgcaccatcttacacacacgctgaangaagactntcatcttattgccactatgcctatctgcgcatgacactctgatcttcaatatncagattcattacagctctcacgatatcagactacgtagtnctacagcgtctccgcgtactcgactcgcgcagcgcctacacctgctgcgtgngtcgactgcgcgncgaagcaacatgattatatacaccacgatgcagatctcataatcatngtcacctatcacgtacacgatattctattccatatgtgctcatgtaatattctcagcagtagtcactatcactacactactgctacgatgtacacacgtcgcatcactntacgcagtcggtcagatatcgctagacgctagtcataattantgactcngtgatctacacatcacatatcgacgagctatctagcgtgctacatgcatctgctgcgacagcgntnntnnntnttngtgcgtcagtctgcacncgcncgcactcacgatctcatcgactcattcaccgactactcaccntgttacnaccgcgtctatacgtcatatagtctgagtcngcntgacattnagtagagtctgcgtcgancaatctgtctatagctctcgtatacgacgtagtttgtacntcactgctatgtagttactgcttgtntacacctaccgcacgtctcgtatagggtangtagcgcactgtagctcgancgtcnncgatcatcgtgcagcgtatctgtttgcgatgcgcgctagttcagctggtcgacctngtncacgtacantatcgtngtcatccctacnnatatgcnnantnatactatatactaacctcacttganctgcattantcgatgatagnatgtatcatcatctacactatccctatcatgagatcatctncgtgcacatgctgcnnantacgatacgttgcataaacgtcccgctacgtgtacngtccatganatgaactactcgtattccgacganctgccagtccatgcgcnatcatcaattcgantatgatgcgncagngcattngcngtngatcctgacactgtncgncatatgatgactttcgntcgatgtcagtcgatctgctgtgccgntcgtatctncngcgtagcatcancatantacactgctgcatgtnanatgagtcactactgactacacgaagcacancagtacgactncgatcntcnntatatctaatgatngatcgaatcgacagcgtcatgatcacacnccgatatcatctggatatantccgtaantgatttatctgcgagctgacgacatcccgtcgcagtcgtgtgatcgttactctcagtaaagacgg

SEQ ID NO: 5374 - DNA, 248 bp, Glycine max
  Peptide Sequence Number=SeqID_8841
  Probeset Number=SeqID_15153
gggtttgcccaggatacatctgctaggtagaaaccccgtgtggggtggtctgttcaatctattttgttatatccgattaacgattatagatgttttttgacacccctagtacatggtttttatatgaaataatggatcgtgactagtcctaactatgagcaaagtttttgtctttctttacctcatcctttccaaatccctttccattgttttcagtaattagtcttatggcactcaggtcggctttt

SEQ ID NO: 5375 - DNA, 380 bp, Glycine max
  misc_feature (248)..(248): n is a, c, g, or t
  misc_feature (266)..(266): n is a, c, g, or t
  misc_feature (287)..(287): n is a, c, g, or t
  misc_feature (300)..(300): n is a, c, g, or t
  Probeset Number=SeqID_15154
acagacccttttccccaacccgtcgccacaactgcgcacacggcggcggcggcggcggcagcagcagcagccatgtacaccagcacctgctccgcggccgacgagcgcgtgtactgcccggagtgccgccgcgcgacggaggttgtcctggaccacggcacaggcgacaccatctgcaccgagtgcgcgctcgtcctcgacgcgcactacatcgacgagggttccgagtggcgcaacttcgccgacgncggcggcggcgaccgacngcgaccccagccgcgtcggcncctctggcgactncttcctcaacaccaagctctccaccgtcatcgactacaccaacaagaccaagaagtcctccgctaccggcgtggcgacaa

SEQ ID NO: 5376 - DNA, 1351 bp, Glycine max
  misc_feature (45)..(45): n is a, c, g, or t
  misc_feature (745)..(745): n is a, c, g, or t
  misc_feature (780)..(780): n is a, c, g, or t
  misc_feature (885)..(885): n is a, c, g, or t
  misc_feature (946)..(946): n is a, c, g, or t
  misc_feature (1023)..(1023): n is a, c, g, or t
  misc_feature (1134)..(1134): n is a, c, g, or t
  misc_feature (1224)..(1224): n is a, c, g, or t
  misc_feature (1227)..(1227): n is a, c, g, or t
  misc_feature (1311)..(1311): n is a, c, g, or t
  misc_feature (1347)..(1347): n is a, c, g, or t
  Peptide Sequence Number=SeqID_8842
  Probeset Number=SeqID_15155
gcgcacatcctaatcgccagtcgccccgctcaccgccgcatcganccgcagcacttgtccactcatcagaaggtcggatggggcgaggccccgcctatatacgcgtagaggataacatacgaattacgcacgcctgcctcatctcgcgcgccgtattccgtcgttaatatataccctcgctcactttcacacccctcgtgcatatcgcatcccttattgtgttactgtgacgtgtagtgtatatcagtagtatacatcaatgtagaatcgaatgcgaccgcaatgatctggatttctttgtcgactatcatcgtccttcgcacacagcgtgtattcaatttaattagtcgttcctccttacacaattctcccgcattagccgccaccccagcgccccgcgctgatatgctttttattatagtctaatatgcgtgccgcccactctcgtaaatcggcacccacaaagcgtgatcgtacactaatataatatagcgaccataccgcgcggtgcagaccaaccactcactatagatatcacgacgttgtcgggcccggctccgcgtgttatatttatcgttgaagattttaatatgtacccatattgacttatccgcggtctgccccctcatatcattttataatactcactccgtcgattgtatgcggccgcttattacggtagcggcaatcgcctgatgtcttgcactcgtgttttatattgttatgtgtatgccgacgggagagnatcaccccccaccctcccgtatggctgaatgatanattgtatagaacaatacagatagaacgcggtgttctggcgctatatcccgtcttaatatacccgccgacacggtgtgtattacattctaccacacgctctctgcntcgcgcgtcgccgcaggcacataacatgtatatcagcaccacgttaccgcgctgttacagnccgcagctcatcccctcatatctatcctcattatgtaaagatataacacgcgcacacaaccaaccgcgccacacgcntatacggttcctgtgtgcactgacgctgcgcacgcaagacgttattaccgttatcctcttctacgtagtaacacatgattgccctcctctactccgcccctcacttatatnacatccacaccccgcgctacacgcagctagcggcaattaacatcgacatatactcgaactagatacggcagcaggtgtgtcgactgccancgnctgctcacctgtcgcgtgctgccgacgtgacgtccgtacgtctcggagaagatgtctaattataatatgcaactctcgctatangtacatagctactcacggcgtctatacactctgacnagag

SEQ ID NO: 5377 - DNA, 1531 bp, Glycine max
  misc_feature (1)..(1): n is a, c, g, or t
  misc_feature (17)..(17): n is a, c, g, or t
  misc_feature (29)..(29): n is a, c, g, or t
  misc_feature (40)..(40): n is a, c, g, or t
  misc_feature (49)..(49): n is a, c, g, or t
  misc_feature (84)..(84): n is a, c, g, or t
  misc_feature (89)..(89): n is a, c, g, or t
  misc_feature (91)..(91): n is a, c, g, or t
  misc_feature (390)..(390): n is a, c, g, or t
  misc_feature (522)..(522): n is a, c, g, or t
  misc_feature (637)..(637): n is a, c, g, or t
  misc_feature (732)..(732): n is a, c, g, or t
  misc_feature (834)..(834): n is a, c, g, or t
  misc_feature (872)..(872): n is a, c, g, or t
  misc_feature (1134)..(1134): n is a, c, g, or t
  misc_feature (1253)..(1253): n is a, c, g, or t
  misc_feature (1433)..(1433): n is a, c, g, or t
  misc_feature (1461)..(1461): n is a, c, g, or t
  misc_feature (1471)..(1471): n is a, c, g, or t
  misc_feature (1521)..(1521): n is a, c, g, or t
  misc_feature (1529)..(1529): n is a, c, g, or t
  Peptide Sequence Number=SeqID_8843
  Probeset Number=SeqID_15156
nttttttgtctttttgnggggcggggcgnaagtgatggantttataacnctatacatactctgctgatattgtttagaatgaanaaaanancccaccaccaattgccaccacccacaacctacaccatctttctaccagaaataagaataataactcacaaccacaccatcttctgtctctcttcggcgagagtgtcgcgtggtggggagttggtgaatgtcagaaaaagagagggtaaagaagaataggaggataagagcaaaaccgcatacatcgagaagataacactgaaagtagatcattatacagggcacattgaagagactaattaagatagattacaaaacaatacacaaataataagtatacacatacatctaaagattatnatggatgcatatgattagatacgaagtagtataatgtagagatacaataattagctatagaaaacacacatatacatacgattagatcattaaggtaaacactagcacagaagtgatccgctgacgtcccangaggcgctcgaaggaagagagtatatgcgtacgctatgttctgaccgagtcaagatgttgtatcttagcggtctgtggtatgatattactgcttatctgtacacgcgtctcctcngtattcttcgctcgtcgtctcgtacaacgtacgctcagtcttcgtcagatctgcggaccgttggtgtatatgttagttgcgctaagcaagagtgnataagacgaacagagtcgttatcccagtggagccgcgctgttacgtctctgctgccaatacgtgtatagaaatactatacgctagttgattagcgtacgganacacagctcaacaattatatcagctcactgacgtaaantcgacgacgttatcgcgtctgcacctatgcctataccacttctcgactctacacatgactgcgctagtaactatctcacgcgctcactcctacaagtgatgtcacctcgatcgtccctcatactgcgtatacgtctacgacacacgatatacactcaatacaaacattcgatgtcatctagccgtagctatcatgcgtactgtctatgttgtgcaccctccactcctcacacacactcacgcatctacgtctagtggattancatgcctacctcgccgcaccgaagcgcgtagaccgcgcgataatattgacgatagtgaagaacgtaatagataatatcacacagaataaataatacatgagacgtatgagatcaaccancaacgaagaactatatagtattaatactctcatccatccgacattacacatcaatcactcgacacacacacctcatacatatcttagcgatactacatattcatctatatatctgatctatatatatcatatgatctacatatatctctatatgctggtatatacacatctatagcacanatgtaactcgatacatcaagcctcgtcntatcgcgatntatagatatacgacttctaacacacatcacgctacatgcgctatgcactncgtatcgncg

SEQ ID NO: 5378 - DNA, 738 bp, Glycine max
  Probeset Number=SeqID_15157
catcggaactctcgggaattcaaatagtcttcacttgctcctcgctgtccgctccgggcgccgatttggccgcaggctcgatcgggacgccccaagctcggcagctgttgctctcgtgtaactcttcgcgccgtagctctcctctcggtcgtccggtcctggcgtttcacactgcgggccgcttgaggtttggtatctatcgctcccctcgaattcaaactgccgtaactctccactcggtcgtccggtccgggcgtttcacacggcgggccgctccgggcgcatcatcggtcgcgcgcctcgaaaccgaacggtcagacctcttaacacgtccgtctggttccaacttttcacacggctggccgctagaaatttaaaatcgatcgctcccctcgaattcaaacgtccgtaactcttcccacgggcataagatattgacgcgtaggacatagatccactccagctgcatcaaaattcgagtggctaaaactccaacgtccgaagctctctacaagtttatacgatcccggcgacacactcaattgaacgacacaggccctccagaaagtcaaatgggaataaccttccactaggaggtacgattcaacgcccaataattttttgggacgcacggaacttgacaacggaacctttcgagaaattcaaatggtcattatcttccacaccggaggttcgatataggcgcattatattttcgtgacgcacgaaacttaaaca

SEQ ID NO: 5379 - DNA, 620 bp, Glycine max
  Peptide Sequence Number=SeqID_8844
  Probeset Number=SeqID_15158
acagggcagcagcacctcttgaagcagagacaatgaggctgcaaacgcaactactcatcttggcttccatcactgcagcgatgatcatgagccacgacgtcctcgccggcaccacccacgcgataccagtgcgcacgttaggcggcgtcgaggaggacgacgtgggcttcgcggagcgcgaggaggaggcatacccgcggaggagggtgctttacggcgaccagtacatcagctacaaaggggtgcaggcgagcaggccggcgtgccccggctcctgcgctggccgggggcagccctacaccggtagcggctgccaggccatcttcggctgccgcgggcgttaattatcttatctagcaggtactaccattcctatttgcttccctggctaagaagctgcgtggagattatgaaatgtgggttatatatgtatttgtgttgttggacgtgatgattctccggtcttaatagtaatttttyttyttggctggtgtttcattgtgctaagatagcgctytaccgtttccttagccttgtcagtgtttacgtgacttgtactataatccttatgatataaatgaaacgtgtattaccctgaaaaaaaaactyttccttgtggg

SEQ ID NO: 5380 - DNA, 734 bp, Glycine max
  misc_feature (1)..(132): n is a, c, g, or t
  misc_feature (733)..(734): n is a, c, g, or t
  Peptide Sequence Number=SeqID_8845
  Probeset Number=SeqID_15159
nnnnnnnnnnnnnnnnnnnnnnnnnnnnnnnnnnnnnnnnnnnnnnnnnnnnnnnnnnnnnnnnnnnnnnnnnnnnnnnnnnnnnnnnnnnnnnnnnnnnnnnnnnnnnnnnnnnnnnnnnnnnnnnnnnnntctgaaatcttgatcaagatcgacaggcgatctggtaaggagcttgagaaggagggcaaatttctgaagaatggtgatgcaggtatggttaagatgatttcagccaagcccatggtggtagaaacattctaatgagtatcctccccttggtcgttgagctgtgagggacatgcgtcaaacatgtggctgtaggagtcatcaagagtgttgagaagaaagagaccgccggaggcaaggtccacaaggtcgttaccaagaagaagtgatctcatatgggcaattttcatagcacatgtgatcatcatagtggttactcctgaatagtagttttatcctctcagagtattaggtgtttggaataaggtatatttctaagtttctttcgatctcacgtagccgtagctttcaaaactaggttcttgatcggcggtggtcaataatcatgactgattctttgtgatgagtactgtttctcgttttgatggtaagaagagtctgagatatttcgaatttcacaagcagctatagggttctagtccatttcctttgctgctgaggagggatgtcttaaatttgcatttaatttataaggaagttttgnn

SEQ ID NO: 5381 - DNA, 1834 bp, Glycine max
  misc_feature (21)..(21): n is a, c, g, or t
  misc_feature (26)..(27): n is a, c, g, or t
  misc_feature (29)..(29): n is a, c, g, or t
  misc_feature (43)..(43): n is a, c, g, or t
  misc_feature (45)..(45): n is a, c, g, or t
  misc_feature (54)..(54): n is a, c, g, or t
  misc_feature (144)..(145): n is a, c, g, or t
  misc_feature (147)..(148): n is a, c, g, or t
  misc_feature (151)..(152): n is a, c, g, or t
  misc_feature (154)..(154): n is a, c, g, or t
  misc_feature (179)..(180): n is a, c, g, or t
  misc_feature (183)..(183): n is a, c, g, or t
  misc_feature (191)..(191): n is a, c, g, or t
  misc_feature (201)..(201): n is a, c, g, or t
  misc_feature (207)..(207): n is a, c, g, or t
  misc_feature (215)..(215): n is a, c, g, or t
  misc_feature (236)..(236): n is a, c, g, or t
  misc_feature (240)..(240): n is a, c, g, or t
  misc_feature (279)..(279): n is a, c, g, or t
  misc_feature (300)..(300): n is a, c, g, or t
  misc_feature (305)..(305): n is a, c, g, or t
  misc_feature (331)..(331): n is a, c, g, or t
  misc_feature (351)..(351): n is a, c, g, or t
  misc_feature (356)..(356): n is a, c, g, or t
  misc_feature (365)..(365): n is a, c, g, or t
  misc_feature (378)..(378): n is a, c, g, or t
  misc_feature (389)..(389): n is a, c, g, or t
  misc_feature (396)..(396): n is a, c, g, or t
  misc_feature (409)..(409): n is a, c, g, or t
  misc_feature (422)..(422): n is a, c, g, or t
  misc_feature (431)..(431): n is a, c, g, or t
  misc_feature (516)..(516): n is a, c, g, or t
  misc_feature (535)..(535): n is a, c, g, or t
  misc_feature (569)..(570): n is a, c, g, or t
  misc_feature (679)..(679): n is a, c, g, or t
  misc_feature (726)..(726): n is a, c, g, or t
  misc_feature (791)..(791): n is a, c, g, or t
  misc_feature (793)..(793): n is a, c, g, or t
  misc_feature (808)..(808): n is a, c, g, or t
  misc_feature (938)..(938): n is a, c, g, or t
  misc_feature (966)..(966): n is a, c, g, or t
  misc_feature (968)..(968): n is a, c, g, or t
  misc_feature (1023)..(1023): n is a, c, g, or t
  misc_feature (1054)..(1054): n is a, c, g, or t
  misc_feature (1127)..(1127): n is a, c, g, or t
  misc_feature (1184)..(1184): n is a, c, g, or t
  misc_feature (1277)..(1278): n is a, c, g, or t
  misc_feature (1283)..(1283): n is a, c, g, or t
  misc_feature (1291)..(1291): n is a, c, g, or t
  misc_feature (1294)..(1294): n is a, c, g, or t
  misc_feature (1376)..(1376): n is a, c, g, or t
  misc_feature (1433)..(1433): n is a, c, g, or t
  misc_feature (1519)..(1519): n is a, c, g, or t
  Peptide Sequence Number=SeqID_8846
  Probeset Number=SeqID_15160
aaaaccaaaaataaacctacntgtgnnantttcgggtggggananacatactcnatatactaccacaacaagtactcaactctgcgacactatcatcgcgcacagtcgaggagaagaggacgtaagagagaacacccacccccnnannggnncnccgtccctgtatgtgtattgttttnnatnatcttctnacccagtganagagtntagattanatacatcagcactaataacantaanccatttatgctctcatcagctcactatgacatgtgcatngcacgccaacaccaacaccancgcangaagaatgagtgtcgctccctcctcntgtagtaattatatggaatnagggngatagttantttttatgtgttnctctgctcctngttattncagagaatagtantatatgatgtatntatagaatnatatagcatgacacatacagtcactgtctgtctgatctcacatggctgtctacaatagctgctaatctcgccctgcttgcgtgcnactgctcgcgtcgtgacgnatgctcactgcgctgtgtcgcagcctgcgctctnnctgactcacgcgctatttactgtatagcgatcagacacgacgcacactacacatatacaaccaagagcgcagaccacacaactctaacaatgtacacaattagtatatnattatgtagatactacaagaataatgagcaaataagagtgcggtagngacacacgattatcatagaccacagactactacagaatactcacagacaaatgatatatatcatncnacgatgcatactganatatatagacacgacgaacatgcaagtacagagtgaatcgagtgaaccccgtgaccgctacacacttcataaagtccaagaagtggattaagctacacttactgatactctactatcacacacaacgcgnactatagagtgcacacagagactgatcnangtgtacgctaccactaccatattgaccagaacagctcacacgactatcactcacntatcacacgtcaacgcataatgtctagacantctctctgacgcgaatacaatagtatttgaactgactatgacaaatcatctccaccgatacttatcatgcaancgaagagtcttatagtagtgacgaggaatgtgtgacctattgacgcgatctcataangatgagagatgagatgcaaatcatgtcgacatgcactgatcacacacgaacatgagctctccgagcgctcgtctgattatattattacacacnncaacnagacaacntgnacaaaagatcatatcacatatagatcgcaccgagacgcatgccatcaacttaacgtacgcatcgactgcgcgcgcagtatanagctgcactacataccctgccgatatattgtcgtattatatcgaagataagcgtatntagacacacatgcactcgctcgcatataacatcgaagtcaatccgacatacattcacgactctcgccttatattatcgcaccacgnctatatatgcatcgtactgacgatgtcctgtatcatctatcgcctgtcctacgctacacacgcacataaggacgaaaggatgtagtatagtatgagatagataacacgacacatttgaagttgcaactatgtctctgagacccgaatagacgcaatatgtgtgcgcgggtgcacaacggacatatcatcaactagaagatgacgaattgaacatacgtagatgcgcgtacgcttcgtcgacactaacacgagactccattactcacaacacgcaccattgagacacacatacgctataccaagcaccactcaccc

SEQ ID NO: 5382 - DNA, 1401 bp, Glycine max
  misc_feature (18)..(20): n is a, c, g, or t
  misc_feature (22)..(24): n is a, c, g, or t
  misc_feature (28)..(35): n is a, c, g, or t
  misc_feature (38)..(40): n is a, c, g, or t
  misc_feature (58)..(60): n is a, c, g, or t
  misc_feature (62)..(63): n is a, c, g, or t
  misc_feature (74)..(81): n is a, c, g, or t
  misc_feature (83)..(83): n is a, c, g, or t
  misc_feature (85)..(85): n is a, c, g, or t
  misc_feature (213)..(217): n is a, c, g, or t
  misc_feature (282)..(283): n is a, c, g, or t
  misc_feature (313)..(313): n is a, c, g, or t
  misc_feature (315)..(315): n is a, c, g, or t
  misc_feature (336)..(336): n is a, c, g, or t
  misc_feature (348)..(348): n is a, c, g, or t
  misc_feature (357)..(357): n is a, c, g, or t
  misc_feature (361)..(361): n is a, c, g, or t
  misc_feature (372)..(372): n is a, c, g, or t
  misc_feature (410)..(410): n is a, c, g, or t
  misc_feature (562)..(562): n is a, c, g, or t
  misc_feature (1145)..(1145): n is a, c, g, or t
  misc_feature (1196)..(1196): n is a, c, g, or t
  Probeset Number=SeqID_15161
gtgggtggtgggtgtggnnncnnncccnnnnnnnnccnnncctccccccaccagctcnnntnncacgcggaggnnnnnnnngngnctgttcgtgtgccagcctcttatcctcccttgtccgtcccctccccacctcctcttgttttgttggggttgttgctctctcccctcgcgcgcgcgaggcggagggcgacacccacgcacggctcaccnnnnntttatttgatttggtttttgcgttctatgtgtcgtctctgcacctttctcctcatatatctggannatgtgcactattctcgtctctcgttatagncncgcggcgcgacgtctgcctcnccgcgcccagtngaccacgtnaccnacgcccggccnccccacgctgcccttactcccactccccccatccctcntgttgggtgggcgttccgtcgctcgttgttaccctcccacatctagtctgtgagggtatgcaggaatgttgcgccacgttgctgaccacactgatttcaatctatctcgctcgcacgccccctgttctccttgtatcgtgtttccgccgcgngtcctggtaagagcgaggtaccagatatgtggtcatacctgcgcggttctttctctcgtttggtacggatatgaaggattcatgggaggtggtgagaggctgtcgcgcggctgctgcgtgagtggataggccactagagcacacatatcacgttccccagcccgtcgacacactctacacattctctctcagttgtgtagggagagagtgggggtttagataatctaggacgcataggtcacttaatgttctcgtatactattctatcgtatgtgacactactgtatattaattggtgtgagagttgtgttatgtatatatccgggaggtgatgaccgcgcagcgcctcgcgctgtgcgcgttcctccgcctcgtataatctagttctctgcggtcccgccactctctcgatctccaatctactatcgccactcacccgacgttgggcaatgcgtatctcacgcccacccacccaccagcacgcggggcgccgaatcgtcacgctacctcttacgaggtaactaactgagataatctattgcggtggcctcgacatggcattataacctgtggtgtggcggcntcgttactcctctcaacacacatcacacactatctctgctgagctcgcgcnctgcgagtgtgctgcgtcttgcgtgagttggtgtataattaagaattcagtctaccacactcgaccatgcgcgctcttgtgttgtgagcgccttctaatttatagatatagtatacgacctcgcgtgcatggtctacgatcgtgactcgtcgcgcggcggttcacgcgcgcaccatgtggcgtactccgctctcttccatgcgcg

SEQ ID NO: 5383 - DNA, 1175 bp, Glycine max
  Peptide Sequence Number=SeqID_8847
  Probeset Number=SeqID_15162
ataagtggtatagtctaggccaattcatttcactatcttctttttctccctcttctgtttccatttgagtctcctactagcacacagattattgagatccaaagatcttaactatatggtggcaagaagaatctaaagagaaacaaccaaagcttaagcaaacagtcttgtctactgttgaaaaacaggagaaaatgtcttgtaataatggaatgtcttttttcccttcaaatttcatgatccaaacctcttacgaagatctacctccttctctttcacctctccttccttcttgctctatacctcaagatcttcatgggtttgcttcgtttctaggtaagcgatctccagtagaagggttagaagctgggaacattatgaacggagaagaggattattcagatgatgggtctcaaatgggagagaagaagaggagattgaacatggagcaagtgaagacattagagaagaacttcgagcttggaaacaagcttgacccagagaggaaaatgcagttggctcgtgccttgggtttacagccaagacagatagcgatttggtttcagaacagaagagctcgctggaaaacaaagcagcttgagaaagattatgatacacttaaacgacagtttgattcccttaaagctgaaaacgatcatcttcaaactcacaaccagaaactccaagctgagataatgagttcaaggaacagagaacaaacagaatcaataaatctgaacaaagaaacagaaggatcttgcagtaacagaagcgacaacagttccgataatttcaggctggacatctcgacggctgtgccatcagtagacagcacaataacaggcggccatccaccagcgccacagactgttggtcgacacttctttccaccagcgaccgcgacgaccaccacaacgactatgcaattctttcaaaactcgtcttctggtcagagtatggttaaagaagaaaacagtatcagtaacatgttctgtgcaatggatgaccactcaggtttttggccatggcttgatcagcaacagtacaactgaaactggtcgacctgtttttatttctttcaaagtttttatatattttgttttgtttttttgttttgatatcagaaagaacatgcatgtttcaaaaacttggaatctatcattcacttttgagtt

SEQ ID NO: 5384 - DNA, 658 bp, Glycine max
  misc_feature (658)..(658): n is a, c, g, or t
  Peptide Sequence Number=SeqID_8848
  Probeset Number=SeqID_15163
gcccccccccctttatttttataggaaaatgcgagtttagtgatgatgaaacagtgtgtgtttgttatgggacttattatggaagtgactgtagtgttttttgtcagccttccgtaaattgttctaataatggtgattgtaaggcagatggaacttgtaattgtggagaaaattattacggagataattgtgaattcacttattgtcccggaaattgcagtggaaatggaatctgtaataattcaacgggagtgtgttcttgcagtgaaaattatttttcaccctcgtgtgaaaattattgcgttgctagtaccacttgtagtggacaaggagattgcagtaataacggaatttgcgaatgttataataattattatggaaataattgtctctctttctgtgattcccaaaccacatgcagcaatcacggaacatgtgtagagatacaaaacagagagagaaaagaaagaggagagagagaagagatagaaagtggagtagaatgccaatgtgattttaattatcataatttggattgtagtgtttattgtaatgatacaataacctgcagcggccatgggacatgcaacaacactggagtgtgcgaatgtaccggagaatatttcgactctgcgtgtgataaattaagttgtcatgn

SEQ ID NO: 5385 - DNA, 478 bp, Glycine max
  Peptide Sequence Number=SeqID_8849
  Probeset Number=SeqID_15164
cagaggccggtttggtcgctgagattcaaaacaagacaatctcggaagcaacagagattctggttaagcagctggatcagttgaaagcagaggagaagcttttgaagaaacagaggaaagaagagaaggcaaaagctaaagcgttgaagatgatgactgaaatggactctgaatcttcttcttcgtctgaatcaagtgacagtgattgtggcaaggggaaggttgttgacatgagctctttgagaaacaacgctaaaccggttcttgagcctttacaaccagaatctagcgtagcaacccttcctagaaaccaacaagattcttgcaagaacaccacgggtgaagcattgaagctcgctctgctggaatcagctgctgcaaccacagcctttccctcagttgttaatcctggattgccattgaagacggtggaagcagttcctgttgttggattgccgttgaagagagtagaagtctg

SEQ ID NO: 5386 - DNA, 1666 bp, Glycine max
  misc_feature (177)..(177): n is a, c, g, or t
  misc_feature (287)..(287): n is a, c, g, or t
  misc_feature (307)..(307): n is a, c, g, or t
  misc_feature (493)..(493): n is a, c, g, or t
  misc_feature (841)..(841): n is a, c, g, or t
  misc_feature (1027)..(1027): n is a, c, g, or t
  misc_feature (1086)..(1086): n is a, c, g, or t
  misc_feature (1169)..(1169): n is a, c, g, or t
  misc_feature (1224)..(1224): n is a, c, g, or t
  misc_feature (1507)..(1507): n is a, c, g, or t
  misc_feature (1535)..(1535): n is a, c, g, or t
  misc_feature (1564)..(1564): n is a, c, g, or t
  misc_feature (1582)..(1582): n is a, c, g, or t
  misc_feature (1623)..(1623): n is a, c, g, or t
  misc_feature (1655)..(1655): n is a, c, g, or t
  misc_feature (1666)..(1666): n is a, c, g, or t
  Peptide Sequence Number=SeqID_8850
  Probeset Number=SeqID_15165
acacccacacttcaccttatagtgccgcagataactgctgcacatctacaccgcaggcgatgttcagatcagcacgagagcggcgcgtcaccagcgcgtacattataacatgctccaaataatagagagaggacattcgcgggtggccagacatcgtgttctgtataagagataatnatacataacagagaagagcgcgactcactcgcctacaccacacaactccccgcctagagggatacaggacgtaggaccataagtatgatgacactactgcgtacgcaagnatacagattagcaacactcngtatcgtcaaatatgtgcaccaacactaaaaatatctcagtcaccacgtgccgccccgtggcgataatgtagctacatcgtatccatctgactagattgagctatgatagtctactctcatccctcgccgcagcgggtctactgcacgcgacgctgtagacgttatactgactctgtgaccgctcnatattagtatattacttttgtatttgctatatatcgacaccgtctcttatactattattctgactctgtctccttacgacgccgccgcatccgtcgctcatcctataaatgatagtttgtatgacgctattcgctgttcacccagaccgtggttatgagacgtcgcatcatatgtggtcgatcaccagcttaatgtctcttagtttgcttcgcgtgccctggggagctaacagtgtcttctcaacagaatatctaacggactcactgagtcgacgccgtggcgtccccatattattttattgtcatgggatgacgtggggtgagtgcgccttgatattgagcacccgncttattcgagcgtattattataattatattgatatggcacccacagatagctgtcacgaggccagctatacaccagagtacgtattgtgtggtacgctgtaccgctgtgtatatatatagtatctgctcaggacccctatcacgataatagtctcgtccgtcacgcagttctcggctgcggtatantttcagtgtattgtatacaagcgatggcgctgacgacgaaatcgcgtgactgtagcaanagtgtctgcagtgagtgtgctaactacgcagttaacggttgtcatctgtaatctaagccgatgtgggtgtcctcacacgcagncgcgcggcgggacatctgatagacacagcgatccataccgtcatgctgcgcgagntgtggtccgccacgcgagccatcccactatagttctgtatttatcatcaacaatatgaatacgcatacgtgtgcgatcgctgtaatataatctatgtctgatgatgtgtggaggtctagagagcgcacgtaatcctagtaataccgtattatcgtgagagataatatcatgtcacgtacatatctagcgcatccgctgcgcgcgagttataaccgattccgacatgtttcgtttactaacgcgcgacagattaggaggtgaaatgtaatgtatatcaaagtangctcgcgactctggcgtgggacgcgcgnggtcacatgctctcggtatctattctaancgacagaacaaggagacnagataagtgactacgatcatatacgtgcgctccctgtatanatgagatgtatatgcgcacgcgtcatcgtgcnactacgcacan

SEQ ID NO: 5387 - DNA, 790 bp, Glycine max
  misc_feature (32)..(32): n is a, c, g, or t
  misc_feature (225)..(225): n is a, c, g, or t
  misc_feature (311)..(311): n is a, c, g, or t
  misc_feature (329)..(329): n is a, c, g, or t
  misc_feature (339)..(339): n is a, c, g, or t
  misc_feature (471)..(471): n is a, c, g, or t
  misc_feature (773)..(773): n is a, c, g, or t
  Probeset Number=SeqID_15166
gtaccgcccctgcaggctaccccggtcccggnactttccccgggctccgacccaacgccgtccgcgagtggtttgggttttctcctcctcctctggagattaagagagccaccgctgccgacgccgttcgtgcctttttgaggtgcccgcctgtcactgtttgggcgtggtggaccaggaggaagtgacaacctccaaatattatgactattccttcgggatttnccaaaaattgcccagtgaaagactgataactcaagataggcccttctagaataaggccggcttattgaaagaaacccacttccagnactaaaggggaagggaanactcccttgnagaaaagtcttaaagagaagtttaaggctccaagccacttattgatagtttttaaagctgatcccttgagaaagaaagaaccttgtatgacccagtattggtgaaagatgcccctttaaagaagggatgggngggaaggaggcttcgtttcataatccattttgatatatttgaatcatttttttggaggagcaagctttggtggtggtgggtagttcccgaggtagaagacagaagcatggtgaagatgtggtgcattctttaaaggtttcccttgaagacgtttattatggcacaacaaagaaactatctctttctagaaacatattatgcccaaaatgtaaaggaaaaggttcaaaaagtggaactgctgtaaggttttttttgatgcaaaggcactgggtatgaaaattcaagaaagcagattggactangcatgattcaacaatgc

SEQ ID NO: 5388 - DNA, 506 bp, Glycine max
  misc_feature (170)..(170): n is a, c, g, or t
  Peptide Sequence Number=SeqID_8851
  Probeset Number=SeqID_15167
tcgtttcgacatccaccttcctgtttagtgtttactgcctcacaaatctcaaaccctacctcgctagccatccctccagatccctccgcccctccccggccgccatgcggatccgcaggtccgcctcccgcctgctgggctctaccgccgcctcctcctgcccgaagccngagccgccccgattcgagctcccccgattggagccgcccccgcccccgcccccgccgccagccccagcccacgaatccggcgccgggttcgtggggcccaagacctcctccggcggggagccctgctgcgagctcagccggtcgccatgggacctcatggcgcagctcgacctctcggatccccaggtggagaagctcttcgtggagactagtttcatgagtgtttcctggcgaggttgctggcttttcccagcaggcatcaccatgcctgccggctccatcaaggaggaggaagacttggccgtagatatggttgacggggtcatcttgaaactg

SEQ ID NO: 5389 - DNA, 469 bp, Glycine max
  Peptide Sequence Number=SeqID_8852
  Probeset Number=SeqID_15168
agcaatggcgtggagaggaaacatatcgaagtctctcaaagagctcaggatccttctctgtcaatcttccccggctagcgcttccgccaggtttctcctccacccttccctttcgctctcgtctccgatcgaatcaaactctgttaagatcggcggttcaatctccgttgtgcgtgactttgagctgtttggattcaggacgttcgtggagaagaattacagagatttgaagtctctaaaccctaagttccccttcatgatccgcgaatgcactgggatccagcctcagttgtgggcacgatatgatatgggagtggagaggtgtgtaaacttggatgggatgagcgactcacagattctcaagtctcttgaagaccttgtgaaagccggaggagctacgaaagcctaaggttatttgttttttgtttttgtttttttttttccagatgatcccgaataaagctttaac

SEQ ID NO: 5390 - DNA, 770 bp, Glycine max
  misc_feature (478)..(478): n is a, c, g, or t
  misc_feature (542)..(542): n is a, c, g, or t
  misc_feature (546)..(546): n is a, c, g, or t
  misc_feature (548)..(548): n is a, c, g, or t
  misc_feature (560)..(560): n is a, c, g, or t
  misc_feature (567)..(567): n is a, c, g, or t
  misc_feature (594)..(594): n is a, c, g, or t
  misc_feature (607)..(607): n is a, c, g, or t
  misc_feature (623)..(623): n is a, c, g, or t
  misc_feature (629)..(631): n is a, c, g, or t
  misc_feature (636)..(636): n is a, c, g, or t
  misc_feature (640)..(640): n is a, c, g, or t
  misc_feature (643)..(643): n is a, c, g, or t
  misc_feature (645)..(645): n is a, c, g, or t
  misc_feature (664)..(664): n is a, c, g, or t
  misc_feature (666)..(666): n is a, c, g, or t
  misc_feature (668)..(668): n is a, c, g, or t
  misc_feature (674)..(674): n is a, c, g, or t
  misc_feature (676)..(677): n is a, c, g, or t
  misc_feature (681)..(681): n is a, c, g, or t
  misc_feature (684)..(684): n is a, c, g, or t
  misc_feature (688)..(688): n is a, c, g, or t
  misc_feature (695)..(695): n is a, c, g, or t
  misc_feature (698)..(698): n is a, c, g, or t
  misc_feature (700)..(700): n is a, c, g, or t
  misc_feature (705)..(705): n is a, c, g, or t
  misc_feature (714)..(719): n is a, c, g, or t
  misc_feature (723)..(723): n is a, c, g, or t
  misc_feature (731)..(733): n is a, c, g, or t
  misc_feature (736)..(736): n is a, c, g, or t
  misc_feature (741)..(741): n is a, c, g, or t
  misc_feature (743)..(743): n is a, c, g, or t
  misc_feature (746)..(747): n is a, c, g, or t
  misc_feature (749)..(749): n is a, c, g, or t
  misc_feature (753)..(753): n is a, c, g, or t
  misc_feature (755)..(755): n is a, c, g, or t
  misc_feature (759)..(760): n is a, c, g, or t
  misc_feature (762)..(762): n is a, c, g, or t
  misc_feature (764)..(765): n is a, c, g, or t
  misc_feature (768)..(770): n is a, c, g, or t
  Peptide Sequence Number=SeqID_8853
  Probeset Number=SeqID_15169
aattgggtaccgggccccccctcgagagtacgatgaaggcagtcgtcgttcaaaattatacagctatcgatgatgtgcagttggcgcacgtccccatgccagaactcacacccggctcggtgcgcgtcagggtgcgagcagtgggcatcggtttcgttgatggcttgaaggtgcagggcctctaccagacgaaggacccgctgccattcattcccgggacggaattcgcaggcgaagtcgatggcgtggcagacggggtgagcgagtattccgcgggaatgcaggtgatgggaatggtccggtcgggcgcactcgcgtagtacgtcgtagttccgatggaagcgttgcgtatcctcccggacggcatttcgccggaggcaggcgcctcgtttcgggtcaattatctgacggctcattatgcgctgacggagcgtgccaagctgcaatcaggcgaacagatgctcgtcttgggcgcagncgaggagttgggacggccgctatacagctgggcaagatattcggcgcccgcgtcattgccgcgnctcnancgaagagaaacntgatttnccctcgggcttggaccatgccgcgacnattcaccgcctanttgcgcgaggactgangatttnnnaaatncggntgnanttattttttccgttgcggncnanttcttnanntttntgntttnttatttnggntnctgtntgtttgggnnnnnnatcngtttcttnnnttnttttngncgnnantttngngttnntntnnttnnn

SEQ ID NO: 5391 - DNA, 1683 bp, Glycine max
  misc_feature (24)..(25): n is a, c, g, or t
  misc_feature (136)..(136): n is a, c, g, or t
  misc_feature (193)..(193): n is a, c, g, or t
  misc_feature (437)..(437): n is a, c, g, or t
  misc_feature (639)..(639): n is a, c, g, or t
  misc_feature (655)..(655): n is a, c, g, or t
  misc_feature (677)..(677): n is a, c, g, or t
  misc_feature (687)..(687): n is a, c, g, or t
  misc_feature (722)..(722): n is a, c, g, or t
  misc_feature (751)..(751): n is a, c, g, or t
  misc_feature (771)..(771): n is a, c, g, or t
  misc_feature (779)..(779): n is a, c, g, or t
  misc_feature (782)..(782): n is a, c, g, or t
  misc_feature (800)..(801): n is a, c, g, or t
  misc_feature (826)..(826): n is a, c, g, or t
  misc_feature (876)..(876): n is a, c, g, or t
  misc_feature (882)..(882): n is a, c, g, or t
  misc_feature (884)..(884): n is a, c, g, or t
  misc_feature (937)..(937): n is a, c, g, or t
  misc_feature (953)..(953): n is a, c, g, or t
  misc_feature (959)..(959): n is a, c, g, or t
  misc_feature (978)..(978): n is a, c, g, or t
  misc_feature (1197)..(1197): n is a, c, g, or t
  misc_feature (1284)..(1284): n is a, c, g, or t
  misc_feature (1365)..(1365): n is a, c, g, or t
  misc_feature (1370)..(1370): n is a, c, g, or t
  misc_feature (1373)..(1373): n is a, c, g, or t
  misc_feature (1398)..(1398): n is a, c, g, or t
  misc_feature (1402)..(1402): n is a, c, g, or t
  misc_feature (1430)..(1430): n is a, c, g, or t
  misc_feature (1480)..(1480): n is a, c, g, or t
  misc_feature (1507)..(1507): n is a, c, g, or t
  misc_feature (1518)..(1518): n is a, c, g, or t
  misc_feature (1574)..(1574): n is a, c, g, or t
  misc_feature (1649)..(1649): n is a, c, g, or t
  misc_feature (1656)..(1656): n is a, c, g, or t
  Peptide Sequence Number=SeqID_8854
  Probeset Number=SeqID_15170
ttttgtcgtcgcccttccccccannccgggcgactacgccgagacccgccgggcactcacacaccttcctccatcccatatcggcaaaccgggggaccaccccgctcccaaataccgcgtctcataaacaaacacnagcaccgcccgtgctattatatacgggtgtgggggccggtactcctcgatcaccacntgcatgtggaaacatcacgtgttgtcttggatataattgagtggtgattaacttctggagggccaatagaatcggacggacacaaaaacactccggctgaatgcttcgaggccgtgagagacattctccgcagcagagcgactaaatctactggcgggtgcggattcaccggcccaacaactcttctttcataattatattgtagtgcgtggtgagaagactataccggtggagaggtgtatangtagatagtcgctgatgctcgagtagcgccagttatatatcggtgcttacacactattcgctatgtcgctcttcgtctcttacctccgtcgtccggcggcaaacaccacgcagcaccacatacaacacacacctccgtcacgcagaactgacactcactggtgcagggctgtatgatcgtagctcgctgctccattactcantctatacgtcggtatntctataatctattatcagactncactctacanaatcgtgcgcatatacggctcgtgacacagacttntagatagtcgcggtgtgtcttatgtgttntgggtttatctgagtgagancgaagcgnggngaagagggtgaggacatnncaccacgcacagtccctctcggagntagtcagtgctacgcgtgcgtcggcgtatcaatacaagagtgtgcgcagnaaccgnancccacgtagatatacgccgtgtcggctcatcatcctgtggattgtgtgatatnattagtgacattatantctccncggcacgcccccgcgaccncatactctatacaaatcgcgccgtctactcacgctgtcacaacgctgtgtgactcatcattctatcctagttcttcgtgactacatataacaatattctgcgctgtcgtgtgtataatcttatcgcgtcttcaatctgctgcgactctcatacacctctcatatgcagctcgtcggtgagaagaacatagctactaaggtgcatatagaggtggtgagngatagttaatgatgtgacacaccaacagccacgccaccgctgctctacatctactgtgggcgctgcacaatcacgacgtacacacancagcgactcatctcacgcaggatctgacgtactatagtgatgcatcatgatgagatacgtgtatatatatcgtctatcacncatantgntctgtgtccttattacagctaatgntgcntgtcatcatattatgtgactgtatagtnatacttctgcgcgtcgatacatacactgctacacagacacatacgatagnggagcgacacacataacacattcacanaccgtacgtgngtgcacacgaacacacatacactaatactgacgagacggtgtgccaaattatacgncacatcacactgtctggcgggcgcgaagcaaaccaactaatatacaagacagcgggtggtagtggttctctctanctcagcntcactcactatccatgtattatccgtt

SEQ ID NO: 5392 - DNA, 484 bp, Glycine max
  Probeset Number=SeqID_15171
aggtctacttccacactttacttttctttcttacgactctcgccggcgccgtgccctccccccgctgtcgcctccgccgccgccgccagccatgcttctcctcaagaaacacgtcctcctcctctctctccgtccccgcgccacaagtgccatactcgcgttccgccaccgatgcctcttctccaacacccgattcgccgccaccgccgccgtggcagcgtcggctagccctgctccgttcgccatggaggactacctcgtcacgtcttgccacctcaccctggcgcaggccgtcaaggcctccaaggtcctctcccgcctcaagtccccctccaagcccgaggccgtcctcgccttcctctccgacctcggcctctccgacgccgacgtcgccgccgtcgtcgtgtacgaccctctcctcctctgctccgaggtcgacaagaccctggccccgcgcctcgccgagctccgggacctcgggctc

SEQ ID NO: 5393 - DNA, 1441 bp, Glycine max
  misc_feature (35)..(35): n is a, c, g, or t
  misc_feature (277)..(277): n is a, c, g, or t
  misc_feature (573)..(573): n is a, c, g, or t
  misc_feature (1225)..(1225): n is a, c, g, or t
  misc_feature (1248)..(1248): n is a, c, g, or t
  misc_feature (1322)..(1322): n is a, c, g, or t
  misc_feature (1329)..(1329): n is a, c, g, or t
  misc_feature (1336)..(1339): n is a, c, g, or t
  misc_feature (1397)..(1397): n is a, c, g, or t
  misc_feature (1426)..(1426): n is a, c, g, or t
  Peptide Sequence Number=SeqID_8855
  Probeset Number=SeqID_15172
cgtgcggtgtgtatctatttgctatgagaagagtnaagaggcatgtctgtcgcggtgatgatgagtatcgtccatctgacgttgtcgtctggtatcgatagcacgttatacgtcgtcgatggcgtgtttatgtgaggagattgtcacgatacttatcatagtgagtgtgtgttcttgagatatgacgacaacgagcgcgcgatagagttataatcaacttcatcgagacgaaggatagtctctatgtatttcagagcgaggtgtaggtatagttatncgtaggacagttacggacacatgagaatagcgcgaggtgtcggactggagtggcgtctgagagctactgattgtatggagtatgatcattccactacgtgtggatgtgtgcgtggtgttgttgtggtgcgataagtcgttagccggggaggagtgacggcggaaggtataagcagatgtacggtagtgcgaatcgtagtgtgtagacatcagtagatgagataagagtgagggaagtagtagtagtatgggggtacatattattaatggatataattgtaagagtagatactatantagtaacacgcattatacggaggtggcacgaggcaacgagtgcagagacgggatgactagtgccgagattgacgtgatggtcggccgttggtgagaggcgatttaggtatagtggggacatacgaccggcggtagtgatctaggttctgccaggacagattctcactaatagacatactcgtgcgcggtctactactgcggtcgacagtgtgtggctacaggatcagcgcggtgacacgcaccacacccgtctacgcccacaggcatcaccactccaaacccctacgctctaccgcgcggtccacacatccccagtccacctcacatcccaccacaaacacaacaccacagccacacacccagcatcacggcgggcacactattggctcacccagacagtacacctttgcagcaatcatcttcagggctgcaactcatcaacttttccccatcatgtcacgagtgccgcgccgctgtggtggtggaggtgcaggtggaggagtgatatggtgagtacagtcgggaggcttgtgtgtggcgtctgttcgcgtcagcccggatggtcatatttaatactaatgtgatattggatgtatggtgagctatttatctaaatggatgggtcttctatagtggctatatgttagaatgnaaaagagtacgctataccacatnatatggtagagagactcctgggcgctgggagtggggcggtcggaccccttatcctttaattaagatcaacaacncgagagnaaagggnnnnaataaatacaaatctgaagaagatgatagaagattttgttagtgtagttgattgtgtntctgtgtgtgtgatgaactccatcattgntcatacacacaacta

SEQ ID NO: 5394 - DNA, 481 bp, Glycine max
  misc_feature (435)..(435): n is a, c, g, or t
  misc_feature (439)..(439): n is a, c, g, or t
  misc_feature (443)..(443): n is a, c, g, or t
  misc_feature (454)..(454): n is a, c, g, or t
  misc_feature (458)..(458): n is a, c, g, or t
  Probeset Number=SeqID_15173
caaccgtactcgagtcctgcccccgaccagatcatcgccgccaacatgagatcggtcctgatggtcttcgccgtgctggcggtggtcgcagcgcgcccccagcagcagcagcagctccagcagaggccatcgccatcctctcgcaggacgccgtggtcaactcggacggctcgttccactccaggttcgagacggaggacggcgtcaggcgccaggaggtcggccagctccgccagctcggcggaaaggacgtcgccgaggtggtccagggacaggtgcagtactcggaccgcgagggtaaccagtacgacctgaggttcaccgctgacgagaacggctaccaccccgagggcgcccacctcccccagccaccacccatccccgccgagattcagcgctccatcgagtacaacctcgctcaccccgaggaggacnagtntcanaagtacacctngtanactcgacacgcacatacacacac

SEQ ID NO: 5395 - DNA, 1399 bp, Glycine max
  misc_feature (4)..(4): n is a, c, g, or t
  misc_feature (40)..(40): n is a, c, g, or t
  misc_feature (42)..(42): n is a, c, g, or t
  misc_feature (110)..(110): n is a, c, g, or t
  misc_feature (132)..(132): n is a, c, g, or t
  misc_feature (168)..(168): n is a, c, g, or t
  misc_feature (174)..(174): n is a, c, g, or t
  misc_feature (190)..(190): n is a, c, g, or t
  misc_feature (195)..(195): n is a, c, g, or t
  misc_feature (203)..(203): n is a, c, g, or t
  misc_feature (256)..(256): n is a, c, g, or t
  misc_feature (260)..(260): n is a, c, g, or t
  misc_feature (338)..(338): n is a, c, g, or t
  misc_feature (367)..(367): n is a, c, g, or t
  misc_feature (376)..(376): n is a, c, g, or t
  misc_feature (387)..(387): n is a, c, g, or t
  misc_feature (450)..(450): n is a, c, g, or t
  misc_feature (525)..(525): n is a, c, g, or t
  misc_feature (635)..(635): n is a, c, g, or t
  misc_feature (748)..(748): n is a, c, g, or t
  misc_feature (817)..(817): n is a, c, g, or t
  Peptide Sequence Number=SeqID_8856
  Probeset Number=SeqID_15174
acanttgcgtaagatccgccgtacatacgtgaatgcgacnanccggagtgactatatatcgccgtgtaatcgtgtcggtgtttaggcgcaccgccgtgcagcagatactngtagtgctctggttattatctnctccgtcaatcgtgagtacgaggttgtcgatacacnttctcnaaaagatcgcgtatgntggtntgtcgtcngcgcggtccgtgacacgctgagtaaatcaacatatacagagtgcggcgtcagngctnacgtatgtcgtgtgcgtatatatcatgtacagacatgaatacacattattattgacagacagccacgccgggcggtgntcattcttacatagatatgaataggatangtgtggctnactcgcagtcngcggcgggtgatgtatgtgtaggagcggacctcgcgtctgtcatcatacaggtggagagtatnaatattactattagagtgtgtttgatcgcgtagataaatattcgtacaggcggtgatatgtggcgtgtggattantgagcagggcgagacgctacgatattcgattgatatcttacggtgctgctgctgggcgtatgggatttaacggcacgcgcgcagtcaagaaattaacgtcttttccgttnaaaccgcacacagacggtgtggcgcgtaggcgtgaatgggatggtggatgcggagcacgatcaacatacgtgcgggcgaatatgcgtggagtgcagggcaacgtccgttcagnataaatgggggataacatatcccgataacgcttcggttcacagatggggagcggaggacaaacgctganttgatggtgataccgcagcctgtatatgtgaaatgatagatagcaagaccggtcccctatacgtattagtcgcgtgtgtgcgggcagttcgcacagttaactaattcccacttattatcgcgatagttctcctaagccagggtcacgttacggtcgggtggtgttgtgggcaggaacatcatcttctatcttgcgcggcgatttatgcatatatggacggaacgagagagcagacgcacactaatcacgagatggtttcgcgtcccactactttggtctggtgatcgatgatgagttgtggggcgctgagattcacgtcggtaacgctgcatacacaacaatgttaacggcgggtatcgcgtggatcgcggagcagcatgagatatatccatctattcgtgcgccatccgcgcgcagcctaaatgtttcagcaataacgttacacatacgggaaaataaggaattataggggtaaggatcgacacccgccgcgcggcgtggttatgggagcggcgagggccgaaatctctgttttatatgtacattatgtgcgagcaacaggcgggggcggtggccctacac

SEQ ID NO: 5396 - DNA, 473 bp, Glycine max
  misc_feature (136)..(136): n is a, c, g, or t
  misc_feature (143)..(143): n is a, c, g, or t
  Probeset Number=SeqID_15175
acgagccggaaggtgagcttcaagtctgatgtgtacagcttcggagtgttgctgctggagcttctaacaggaaaagcaccaaaccaagcctctctcggggaagagggcattgatcttccgaggtgggtccagtcanttgttcncgaagaatggaccgcggaggttttcaatacagaactcataaagttccacaacatcgaagaggagatagttcaactgttgcaaatcacaataacttatatttcccttatacctaatcagagacccaacatacgaaacataatacatataattaaaaacattaaccaggactataccaataataacttcatacaatcctccgatgacccttccaaaagatcctgaaatcatacaccacccccagagtcaaatactccacctatctctctcacaccatatcaaattactaaaaacctttcttcttcttcttcttcttcttcttcatcattcaa

SEQ ID NO: 5397 - DNA, 595 bp, Glycine max
  misc_feature (43)..(43): n is a, c, g, or t
  misc_feature (45)..(45): n is a, c, g, or t
  misc_feature (64)..(64): n is a, c, g, or t
  misc_feature (499)..(499): n is a, c, g, or t
  Peptide Sequence Number=SeqID_8857
  Probeset Number=SeqID_15176
tcagctacgtaggccccccccccaactcaaagaaaagcaaaangnttttgtacaatttcatcgngcaggaagtgaagataaaacaaagacaaaaacagcatcaggactacaaccaacttttttagagtcttggacaaaggattggaaatgtaatcccaatatgatcagtttagagtttgaaatatacaaacacaagttcttatcaaacgatttattgggtagagcagtattagacttacaaaattacacattcgtgacaaaaaaaccaaaaatcatcatacttccagttcaattagtcaaacaaaaggtaaaatcaactctcacagatcaaccatctatcgtcattcaaatcacaccagaagattttggttaccatccatcaccatacgtatggacatggtcatatgaacaacaagaacccactttgattatggatcttgccgatgtagtacaagtttcttgctctgaaactgcaacctattttgtaacagagaaaggntcactatacaaattagcaattggagaacatgtaccaataaaaattgaaacattaacacctgttctaaaagtagcagcaggattcgatcatgtgctt

SEQ ID NO: 5398 - DNA, 802 bp, Glycine max
  misc_feature (601)..(802): n is a, c, g, or t
  Probeset Number=SeqID_15177
ggggtttttatggctgcgaaagaataataatcattccctatataaactattgcttcgcatgcacatgtatgattttgttcttcatgtgacatgttatcaatgtatatattttatggtattgtgtatgggcaaatatattattatttttattatttaaaatattaaaatttgattagctaatatttttttaaaactttatatttaaaataacattacttacactttttccttttttcttacggaacttacacttttttcctaaaaatgttagaaaagaaaattttccttttgtaataatgcttctctctctctctctctagtttcttctaaatttaatggtgtcatgatgatggtaatatttactatatttttgctttgatgggttgcttgcagataacgtttgagttgacagtgaagcagctgatgagctttgatccaggtgaatggactgagacactaaggaaagagtacgtgcttgtgattgaaggatttttctcagttcccttgcctctcttctcaagtacctaccgtagagccatcaaggtgtgcatgctctttaattaatttctcttttatttgacttattgttatattcgtctgnnnnnnnnnnnnnnnnnnnnnnnnnnnnnnnnnnnnnnnnnnnnnnnnnnnnnnnnnnnnnnnnnnnnnnnnnnnnnnnnnnnnnnnnnnnnnnnnnnnnnnnnnnnnnnnnnnnnnnnnnnnnnnnnnnnnnnnnnnnnnnnnnnnnnnnnnnnnnnnnnnnnnnnnnnnnnnnnnnnnnnnnnnnnnnnnnnnnnnnnnn

SEQ ID NO: 5399 - DNA, 1434 bp, Glycine max
  misc_feature (7)..(7): n is a, c, g, or t
  misc_feature (16)..(24): n is a, c, g, or t
  misc_feature (26)..(28): n is a, c, g, or t
  misc_feature (30)..(30): n is a, c, g, or t
  misc_feature (32)..(34): n is a, c, g, or t
  misc_feature (63)..(63): n is a, c, g, or t
  misc_feature (75)..(76): n is a, c, g, or t
  misc_feature (109)..(109): n is a, c, g, or t
  misc_feature (249)..(249): n is a, c, g, or t
  misc_feature (251)..(251): n is a, c, g, or t
  misc_feature (301)..(301): n is a, c, g, or t
  misc_feature (470)..(470): n is a, c, g, or t
  misc_feature (692)..(692): n is a, c, g, or t
  misc_feature (745)..(745): n is a, c, g, or t
  misc_feature (748)..(748): n is a, c, g, or t
  misc_feature (769)..(769): n is a, c, g, or t
  misc_feature (781)..(781): n is a, c, g, or t
  misc_feature (854)..(854): n is a, c, g, or t
  misc_feature (917)..(917): n is a, c, g, or t
  misc_feature (993)..(993): n is a, c, g, or t
  misc_feature (1079)..(1079): n is a, c, g, or t
  misc_feature (1081)..(1081): n is a, c, g, or t
  misc_feature (1084)..(1084): n is a, c, g, or t
  misc_feature (1177)..(1177): n is a, c, g, or t
  misc_feature (1180)..(1180): n is a, c, g, or t
  misc_feature (1215)..(1215): n is a, c, g, or t
  misc_feature (1219)..(1219): n is a, c, g, or t
  misc_feature (1221)..(1221): n is a, c, g, or t
  misc_feature (1269)..(1270): n is a, c, g, or t
  misc_feature (1304)..(1304): n is a, c, g, or t
  misc_feature (1320)..(1320): n is a, c, g, or t
  misc_feature (1341)..(1341): n is a, c, g, or t
  misc_feature (1359)..(1359): n is a, c, g, or t
  misc_feature (1394)..(1394): n is a, c, g, or t
  misc_feature (1434)..(1434): n is a, c, g, or t
  Peptide Sequence Number=SeqID_8858
  Probeset Number=SeqID_15178
ggggggnggggggggnnnnnnnnntnnntntnnnctgtattctttattgtgtttgtttttgtncccggagcgcgnnccttaacaaccttgggatgttttttctcgcttntttgaggcgggcggtgattactttaaaatattaggtagagtatagcccgccggggaggctcgggagtggagaatggcgtgtttgttgtatttttttgttggtggttcggggtggcgcacttgtctttttgcgtgagtgtntnttcagcgtcgctgttttttctcttctatcactttatctctgtgtttaaancatgaagatgcatggggggtggtgtgcggtgggcggtgtctatatattgcgtgcctctgtctgcatcctacggtgtcgtgtgttgtttatatatttttgccacaaaagggtgtgaggtgaaaaggggttggattgttgtttgggggaaagctgcagaaagtgggttgancggcgccaaccttgtctggcgcggattgatgatgttgctctgggtaggaacggcgatgaggtctctggacgcgtgggaggggtggtgtgaggggttgttaacttgttgtagtatgaattgttgagggggttatagtttatgagctgtgtgagagagttttatgtataatagatgttcgggagctacggtaaattaacattctcgcgggtgcacaggtggaantaactgactataacaactaatctatatgtgtgtgtgttgttcacccccactanaantggtgtgtttccacacccgcnctccccacaaanatggatgtagagggaaaccagacaactactatactaaaaatagtatatcactgcttacccctcacactatccntattgtgaaggtacgagataaaataggtgtgatgtgtttgtgttgatctacaccctaacatgntggtaggatggtcgaagagtattatagaatacaatattaaatcgggtgctgtcggcgggcgtgggtgagagaacantagagaggataggagagctagcagacaaaaaataatgagagtctgatgcgaataacatataacattattatactagtcgtgtgtgngngantcgaacaacatactcaacaccccggtggcaatcagagtaacatacctaggtggcggttgtgattatacataggatgtagtctaatacaacgancangacacaataaacaaacacaacacgacaatagaggntgtnanttcgactactgcgcgtcgtctcgaggagcgaactgactcacatagccnnctgcgtgatcgctcgcgtttgtgtgtggtgtggnttggtgtgtgtgatgntcattctactaaacacacgcnagagcgaacaacaggggngcgttggcatgcagtacagaatcataatacacatnatagtgcacgagttcgttctacctcaacgactcaccgatn

SEQ ID NO: 5400 - DNA, 1851 bp, Glycine max
  misc_feature (1)..(1): n is a, c, g, or t
  misc_feature (50)..(52): n is a, c, g, or t
  misc_feature (54)..(54): n is a, c, g, or t
  misc_feature (56)..(56): n is a, c, g, or t
  misc_feature (122)..(122): n is a, c, g, or t
  misc_feature (344)..(344): n is a, c, g, or t
  misc_feature (453)..(453): n is a, c, g, or t
  misc_feature (633)..(633): n is a, c, g, or t
  misc_feature (646)..(646): n is a, c, g, or t
  misc_feature (650)..(650): n is a, c, g, or t
  misc_feature (677)..(677): n is a, c, g, or t
  misc_feature (928)..(928): n is a, c, g, or t
  misc_feature (950)..(950): n is a, c, g, or t
  misc_feature (1134)..(1134): n is a, c, g, or t
  misc_feature (1176)..(1176): n is a, c, g, or t
  misc_feature (1336)..(1336): n is a, c, g, or t
  misc_feature (1358)..(1358): n is a, c, g, or t
  misc_feature (1525)..(1525): n is a, c, g, or t
  misc_feature (1546)..(1546): n is a, c, g, or t
  misc_feature (1577)..(1577): n is a, c, g, or t
  misc_feature (1579)..(1579): n is a, c, g, or t
  misc_feature (1587)..(1587): n is a, c, g, or t
  misc_feature (1659)..(1659): n is a, c, g, or t
  misc_feature (1663)..(1663): n is a, c, g, or t
  misc_feature (1696)..(1696): n is a, c, g, or t
  misc_feature (1722)..(1722): n is a, c, g, or t
  misc_feature (1733)..(1733): n is a, c, g, or t
  misc_feature (1813)..(1813): n is a, c, g, or t
  misc_feature (1816)..(1816): n is a, c, g, or t
  misc_feature (1821)..(1821): n is a, c, g, or t
  misc_feature (1851)..(1851): n is a, c, g, or t
  Probeset Number=SeqID_15179
ncgaattccgctccacgccgcgcttcctgctcgccttcattcacactgtnnnananataattatagtagaatataacaaagatagagggagacgcggggcgcccgccccctcgcgaggaggnagagagtgtgtcagcactatacggacccatctctctctacttttcttttcttttttgtgtgtgtagcactatctatccacatgcagtcatgtcttatcgatctcgtgcactgcgaatcccacatattgtcagtaccccttactagatcatctgtgtcactagaagtctcagcgcatcgatcatatgaatctcacgagcgtatatcatcacccttatcaggtngatcttccaggcgcagatcgagcgcatgcatatatatgagaaaggcatactacatatctatacgcgatgtagtagataccctagcttactctccaactaacataatgtngaagtctgattatattgatatctatgagcgcactcctcagtcttgcccctttatccactcgtactatatcataacttgcgaggactccatatagacgtcagagagcgatgcacgtctgaacttcatgagcgcaaatcactcataccagagcaaatgattgtgatgtcatcacatgaggtncctacactgattntcanctctagcgcgagagacgacccacattncactacactcagacgctagagacgcagctcgcatcaatacgtgttattgcctctgagtcatgtgaatgaagctcgctgcgcagcagtcgcgttgaatgataacacaaatcgatctctgcgcccgctcctctgatcaatgcgctctagggtctctcgcatttatcatacccaactaggatacgcctcctcagactggcacagtacagatgcagatatggagatctatattgcctcagccgataataggctgnttattaccctatcgctagagcnaagcgtctcatgactagcatatcgatgatagatagatagcgacacctttagcttcttcatctgtcgaatgatataggcacatgctgtatatccggtgtggcgataatcggtaacctctctcgcgcatgcgtaatgcatcacgcgagagacgctcacacatcactagagcctgaccctctcctcngttgtgtgcttagcggctcacgaccaccctctgtctactgcncgtcatgctatattgatagaccttcttgccgcacggtaatataatgcttactatgttcgtattacctcgctactctgctgacgacagtatatgagtatcactctcactagttgagctgttatatatacatacgcgaacactaatcgtagggtctggtctntttcttgcttagtagactatgngacatatgagctgacgtctttactcgtcgcactctcgcgtatagctagtgatggcgagcactctctcacacgaccacagactgtgcgattaataatagatctactacacatgtatcgaagctatgatatatactcactactatgatgatgcttctctctatagaggntgcaccgcgactaaagtagangtcgatgaagtacgcttatgatcttgaggcncngatagagnatgctatgctattatgagagagccgctacggattctctacttatacacatgtcattgcatgtatagatgcgncgcncaactgtacgaatcgtctgatgtgacgactatnacagtatctactgtgagtgaatgagnatgatctctcngtctgatcgcatgcgtagatgactgacctagttgcatctgacatagatatcagagtgggatatactgcctacatgcgcgnggncgtanctcacgcgcagctatctgcacacccgtacn

SEQ ID NO: 5401 - DNA, 777 bp, Glycine max
  misc_feature (136)..(136): n is a, c, g, or t
  misc_feature (163)..(163): n is a, c, g, or t
  misc_feature (206)..(206): n is a, c, g, or t
  Peptide Sequence Number=SeqID_8859
  Probeset Number=SeqID_15180
aaaaagaagattaagataaggcaatgaatctgatgcaggcggttcgctacgacgcctacgggggaggtcctgccggcctcaagcacgttgaaagttgccgttccagtccaaggcaaatgaggttttaatcaactgnaagcagttagcattaaccctattgatngaagatccagagggtcttctccgtcctttatttctcccagaanctttccccacatacttgcactgatgtggctggagaaatagtgaaaatcgaactcaagtcaagattcaaagttgcggacaagtcctgctaaactccctcatcatatggaggggggtttgccgagtttgctggggctagggaaaatttaacagcgcccaaaccttttggaggctccagccgttgaaatttgaaatattggcaatcgccgggtaaaaacggctcgggggcccccccccaaattgcggagaaaaaagtttgtggggccgtgccccccccaaaaatttttaaaaccttgttttttcgggggggagaaaactttatttttgttcaaaaaaaaaaaaaaagaaacccccgttgccccccccttgtggggcgcccaaaaaaaattttttttataatggtgttagggcccagaatgtttttttaaaaaacaacaccagggggggtgtcgaaaaaaaacccctctttagagaaaaaaacggggggaaaatattaacaggcagaaacccccggctctttctccccaacattagtgggagaggggtgggtttttaataacaccggggcgtggg

SEQ ID NO: 5402 - DNA, 546 bp, Glycine max
  Probeset Number=SeqID_15181
gtgccgtgcgatgtatcatgcacttcgattttctcctcctatagagaatttaggaaagaggttggtggatcggctgacatcacacggaggaacatatattgctctgcatctgacatatgagaaagatctgctttctttgactgggtgtgcatattgactgactgatgcgaaatctgtctagcttacagttatgatggagattgcatcttcttggatgatcccactcatctattcgccagcactggtatgtggcagatcaagcccatcttctttggaacctgggatccttacactgccttgagcaggctatctcgtgcttgcaacacacagaagtgcattcgagctggcgtgtgacacaatgatcttgatgatgtagggaacgatactgtccatcacacccttcttgagatgttgggcaattgctccttttgggattactgttaagtacaacccatcttactgacgtgggagctcgtatgataagtcattaattacatgagatcgcattatagcacagttttttggtgggatgataatggtggagtg

SEQ ID NO: 5403 - DNA, 1353 bp, Glycine max
  misc_feature (23)..(23): n is a, c, g, or t
  misc_feature (66)..(66): n is a, c, g, or t
  misc_feature (146)..(146): n is a, c, g, or t
  misc_feature (148)..(148): n is a, c, g, or t
  misc_feature (152)..(152): n is a, c, g, or t
  misc_feature (155)..(155): n is a, c, g, or t
  misc_feature (195)..(195): n is a, c, g, or t
  misc_feature (231)..(231): n is a, c, g, or t
  misc_feature (327)..(327): n is a, c, g, or t
  misc_feature (332)..(332): n is a, c, g, or t
  misc_feature (509)..(509): n is a, c, g, or t
  misc_feature (556)..(556): n is a, c, g, or t
  misc_feature (964)..(964): n is a, c, g, or t
  misc_feature (967)..(967): n is a, c, g, or t
  misc_feature (970)..(970): n is a, c, g, or t
  misc_feature (1071)..(1071): n is a, c, g, or t
  misc_feature (1170)..(1170): n is a, c, g, or t
  misc_feature (1258)..(1258): n is a, c, g, or t
  Peptide Sequence Number=SeqID_8860
  Probeset Number=SeqID_15182
gttggtgtgtaggtttttttttntggtgtttattatgatgtgtacatcacacaccaccacacatanacaactctcaatacactacttgcgagctgctagttgcagggaggcatatacaacgacacgcagacacaaccacaggaaananaacncanaatagtataataaggatgaaatcgatagcggttgtgcggnctttatgtcgtcgcctgttgtggtagtcccacacantatcacaacacttacacactactctcaaagtaactcaccgtccacttctacctactactataacacgagcctcatgtatgcggcgcccccagtcancggangaggaaaatgacgcgggcacacaaatgaggtagggggataaaacaggtgatcgctacaacacatgcgcccttgtggttgatatacatcttgttttgtttcttttctgtgcccaactccgccccgccgtcctcatatgcaatgctcacatacacactataattataaaattgttaatngagtgagaagagttatgagaagataatgtgtgtggtatgtgttgtgnacacgaggtatgttggtggctcgcaaagacgacacgaacgacaaataaaccatcgcaagactcacaacagcaaaatatataaaaacacaatgatttattgtatagtaatcggatacggaagacgcgtacagatgcgtccgcacggcgcagcaaagctgcatcactcactctatttctcgaggcgagtccatactatcagacaagattggcgcccacgtgtgcactattgatctgtatagagactcatcaacccacaactccattgaacattgttggctatacgggagaacttactacggtatctgctcccacacgtattgagtggtggagagagtagtggtgtgcgtgggaagatggaagtcgcgccccagactcagcctgaactcgcaccgtataatccaaagaaanganganaccacacacgccagcttcactagtacctgtgtattgctaataagatgagattgtttattgcgctcatcttgaaacatctattcatccgaagtggacgtacntatctctccgcgcgatctctgtcccaccctcacactcgcgccgccggcggggtgacgcgatgagaggacaatacgccacgctaaatcgaacacgtatantgcattgtggtgtgggtgtgtagtacccacagtggtgtggtatgtcgtaggaagtatgtcctctggcgtgtggctaagttataaaacnataggatacgtcctcactccgcatacatctataatataattactatacacacattctacattatgtctgacagtaatatattcaaagtgacataa

SEQ ID NO: 5404 - DNA, 1532 bp, Glycine max
  misc_feature (1)..(1): n is a, c, g, or t
  misc_feature (10)..(10): n is a, c, g, or t
  misc_feature (24)..(24): n is a, c, g, or t
  misc_feature (58)..(58): n is a, c, g, or t
  misc_feature (236)..(236): n is a, c, g, or t
  misc_feature (243)..(243): n is a, c, g, or t
  misc_feature (424)..(424): n is a, c, g, or t
  misc_feature (572)..(573): n is a, c, g, or t
  misc_feature (625)..(626): n is a, c, g, or t
  misc_feature (651)..(652): n is a, c, g, or t
  misc_feature (658)..(659): n is a, c, g, or t
  misc_feature (661)..(661): n is a, c, g, or t
  misc_feature (681)..(681): n is a, c, g, or t
  misc_feature (717)..(717): n is a, c, g, or t
  misc_feature (725)..(725): n is a, c, g, or t
  misc_feature (727)..(728): n is a, c, g, or t
  misc_feature (730)..(731): n is a, c, g, or t
  misc_feature (734)..(742): n is a, c, g, or t
  misc_feature (756)..(756): n is a, c, g, or t
  misc_feature (770)..(770): n is a, c, g, or t
  misc_feature (792)..(792): n is a, c, g, or t
  misc_feature (794)..(795): n is a, c, g, or t
  misc_feature (838)..(838): n is a, c, g, or t
  misc_feature (843)..(843): n is a, c, g, or t
  misc_feature (857)..(860): n is a, c, g, or t
  misc_feature (862)..(863): n is a, c, g, or t
  misc_feature (865)..(866): n is a, c, g, or t
  misc_feature (873)..(874): n is a, c, g, or t
  misc_feature (892)..(892): n is a, c, g, or t
  misc_feature (896)..(896): n is a, c, g, or t
  misc_feature (913)..(913): n is a, c, g, or t
  misc_feature (959)..(959): n is a, c, g, or t
  misc_feature (961)..(961): n is a, c, g, or t
  misc_feature (969)..(969): n is a, c, g, or t
  misc_feature (975)..(987): n is a, c, g, or t
  misc_feature (990)..(992): n is a, c, g, or t
  misc_feature (994)..(997): n is a, c, g, or t
  misc_feature (1000)..(1001): n is a, c, g, or t
  misc_feature (1019)..(1020): n is a, c, g, or t
  misc_feature (1022)..(1026): n is a, c, g, or t
  misc_feature (1028)..(1029): n is a, c, g, or t
  misc_feature (1031)..(1031): n is a, c, g, or t
  misc_feature (1053)..(1057): n is a, c, g, or t
  misc_feature (1070)..(1073): n is a, c, g, or t
  misc_feature (1078)..(1083): n is a, c, g, or t
  misc_feature (1085)..(1086): n is a, c, g, or t
  misc_feature (1088)..(1088): n is a, c, g, or t
  misc_feature (1093)..(1093): n is a, c, g, or t
  misc_feature (1097)..(1097): n is a, c, g, or t
  misc_feature (1099)..(1099): n is a, c, g, or t
  misc_feature (1113)..(1113): n is a, c, g, or t
  misc_feature (1135)..(1135): n is a, c, g, or t
  misc_feature (1138)..(1138): n is a, c, g, or t
  misc_feature (1140)..(1141): n is a, c, g, or t
  misc_feature (1177)..(1180): n is a, c, g, or t
  misc_feature (1182)..(1182): n is a, c, g, or t
  misc_feature (1186)..(1186): n is a, c, g, or t
  misc_feature (1188)..(1188): n is a, c, g, or t
  misc_feature (1190)..(1191): n is a, c, g, or t
  misc_feature (1193)..(1195): n is a, c, g, or t
  misc_feature (1225)..(1225): n is a, c, g, or t
  misc_feature (1228)..(1229): n is a, c, g, or t
  misc_feature (1246)..(1246): n is a, c, g, or t
  misc_feature (1248)..(1248): n is a, c, g, or t
  misc_feature (1250)..(1250): n is a, c, g, or t
  misc_feature (1252)..(1252): n is a, c, g, or t
  misc_feature (1258)..(1258): n is a, c, g, or t
  misc_feature (1263)..(1263): n is a, c, g, or t
  misc_feature (1292)..(1293): n is a, c, g, or t
  misc_feature (1323)..(1323): n is a, c, g, or t
  misc_feature (1336)..(1336): n is a, c, g, or t
  misc_feature (1339)..(1339): n is a, c, g, or t
  misc_feature (1343)..(1343): n is a, c, g, or t
  misc_feature (1376)..(1378): n is a, c, g, or t
  misc_feature (1380)..(1380): n is a, c, g, or t
  misc_feature (1419)..(1419): n is a, c, g, or t
  misc_feature (1432)..(1432): n is a, c, g, or t
  misc_feature (1436)..(1436): n is a, c, g, or t
  misc_feature (1469)..(1469): n is a, c, g, or t
  misc_feature (1477)..(1477): n is a, c, g, or t
  misc_feature (1500)..(1500): n is a, c, g, or t
  misc_feature (1502)..(1503): n is a, c, g, or t
  misc_feature (1506)..(1507): n is a, c, g, or t
  Probeset Number=SeqID_15183
ntttttttcncgtcccccgccccncctccctccagtagtgcgcagctcgtgtgcgcgnggagagaagaggcgcaagatggccacgacgctctacattagagaggtgggcgggtactgtcgatcgtcgcacggagatagggtggactaggcaatgggaatagtgcggagtgtacgactagcttgatcacgagcgcgatcgcagagcgcgtccggcgcggccccgccgctccacacangctcttntccggaaggagtatgcgtgcatatctaccagagtatagagcgagcgatgtgtataataggaacatatatttaatattataagaagaaactcttcttgctcactgtgatgctcgccgtctggtgtcggctgatgggttcctttatctcttgcatacatatcatgacgctattttattatatngtcgctctgtgtctctcccttgctatatactccgcaccacccacgtgcgagcccagtcacagcgttattgctattctgagcatgcgtttactggttgacgaggatatatgcggtgtcaatgaacagacatacctacgaggcggaggtnntggcgaggtggatgtgcgtgcgattatatgatgagcctctcgttctgagcgnnggagcgcagacgacacacagcgacnnacacannangactacaacactaccgcgantgcataaatatatgaagatctagaatacacgtctcngtggaggngnngnnggnnnnnnnnnccctcttctcgtgntgtccggtggtgtntgaggatacgtcagagcgcggngnntggtttgctgtggtgttgttgtgtattggagtttatctaattnttatnaagtagataataannnnanntnnggggtgnnggtacggtgggagagaangagnggggatcacagtctcgnggtgttgttgtgtgtgtgtgttgatgaatgagtggtgggggacccnanaaccaaantactcnnnnnnnnnnnnnccnnncnnnnccnnaccacctcctatcatcgnngnnnnngnntngcgcctcaacgatcatcaaggnnnnnagaacacccacannnncaaannnnnncnncncgaancagntncgaccttgtttggngatgagtacttcatatcactgntgngnnggtgctcactatacactaactctacttctaaatgannnnantccnananngnnnggttgatgacttaaggcgcctagcatgtgncgnnagcacatacttccattntntntngagganatatnagaagtagatagtgaacatacgatcaagnncaccgacgttgttggcatatatacgatctntacgacacagacnacngagnaccaacgagccacacggcgccacacatcgtggnnntntgatagagagacacatgacctagtagcaatctacgcatntagtacagagcgnaggngagtgaaagaggaagcgtaggaagagtgtctgnacgtgacntcactctcattctacttatacancnnacnnaactctacaagtccagagcactcgc

SEQ ID NO: 5405 - DNA, 3507 bp, Glycine max
  misc_feature (3465)..(3507): n is a, c, g, or t
  Peptide Sequence Number=SeqID_8861
  Probeset Number=SeqID_15184
tacagctgcgagaagacgacagaaaggcagctgaaatggcacttttctgcttgtacattttatatatgcatcctttttcaccggtgtttatattgcagcaagagttttttcggaagctgatggaagtattcagaatgtgtgaagacttggaaaatattgatggccttcacatgattttcaaaatagtcaaagggattgttctgctaaatagtccagcgatttttgagagaatttttagtgatgactttatagtggacattattggtgccttcgagtatgatccagaggttccttttgttcaacatcatcgtaaattcttaaaggagcatgttgtttttaaggaggccatacctataaaagatcccgttgtgttgtcaaagatacatcagacatatagagttggttttttgaaggatgttgttctggcgagagtcttggatgagggtattggtgcaaatcttaactcgataatacattctaacaatgcctatgttgtctctttgttgaaggatgacagtacatttatccaggagttgtttgctaggctaaaatcgccaaccacctctcaagaatcaaagaagaacttggtttatttcttacacgagttttgtagtttgagcaagagcctgcagatggtccagcagcttcggctttttagggatctaatgaacgaaggcatctttgatgttgtcaccaatgttttgcaaagtcaagacaagaagcttgtgttaactggaacagatatcctcattcttttcttgaatcaagatcctaatcttctgcgatcctattttgttcgactggaaggatttgctcttctaggacttttggttaaaggaatgttaacagattttggagagaacatgcactgccagtttcttgaaattcttcgcaatttattggactcatgcacattacgtaggccccccccctaaatttgaagtgagttgtattttataatatatctgctgaattgtggaaaaactgtcagttaaagtttcacagggacactattattgacatattctttgagaggcatttggggcaattgattgaggttataacagcatctggtccttcagaaaatactgctgatgcaaatggcaaatcaataggtcctggacgaagaattcagtgtcagagtggaacaaagccggagatactatcaaacatatgtgaattattatgcttttgtgtcctacatcatccatacagaataaagtgcaactttcttcttaataatgtgattgaaaaaatattgctattgacacggagagcagaaagatacttggttgttggtgctgtccggttcgttcgaactattctctctcgccatgatgagcatctgataaattattttgttaggaataatgttctgaagccaattattgatgtctttgtttctaatggcaatcgctacaatctgctccattctgctgttctggaactttttgagtttattcggaaggaaaatctgaaattattgctgagatacatagtcgattctttttgggaccagctggtgaaatttgagaatttggcttcaattcactcactgaaagttaaatatgagcagtgtttggataatggtgggacaaatgatgatgccactactgcagtggaccttcgaagaagaaatgatgagcgtgctctggagagagaagaagaacggtactttaatgaggacagtgacgaggaggatactgcttctgttccacgtaatctgaaaggacaccagcaacctaatctatccaatggagttgctgcaagctattcacagttaagtccaaggtcgctggttgattatgaggatgatgaggatgatgaagattacaagccaccgccaaggaagcagccagaaacttctgaggaagatgacgggataatggagtctcttgggctgaagaggaaattaccttcaaaagataaggagcctgaacttgtgaagaaacagaagttatcgaagaattctaaatctaaagatagtgtttttgctgccttgtgttcaacattgagccaagctgtgctacccagtaagaaaacatcaatcagcattccttcctgtgctcgaacagatgggaggatgagctcaagcgaagataatcagggggatgtacaaaatatttctagaagcagcagttccaataatagcaacattgcagcagaagacaatcacgtagagaaagaaggtgaagcctctagaagcttttctgattgcttgcatgcaaaatcagatagcatacaattgggtggagaagaacgtccattggttgccccaaaatcctcaccagagatggctgtaaatggatcttaagctttcagaatcatatgcaggaagacagattatttgttttatttgacgtatagatttgctggtgggtaagtggttctgactacataaatagagctttgagacgaaggaaatttacctacaagggggtaaattctgcttttgcgttgcatcgaggacgtgggaatactgtacagtgccactaagaggcgggaagatattattaatacagcaacgtgggtggatctggctcctattcttcagtttgctattttgggcttttgagcttagtagttgttgtttttgtatgacattcctgagaaataattctgtattttccccttctccaaaatttacctcttccagctcatttattttcaaagtttctgccagaatatccaagtgccggtgaggggttatcattcatattatactacattatataacccttctcagtatttgaacttcctgatagagggcgccaatatcttgccctacacaggttttccgtgtgtttttttttcctcttttgtttttttcttctaaggcccatttttcacaaatgtgggaatcatcaaccgttgtaaatctgtattaaactgttgaatattgcaaagtactcttatgcagtttgtccatatcaaaactggattcactatttattatttcttcagccaacctgcctacggagatgtgtaatcttgagctccctccacaagcaagcaagaaagaacgaactacttgtgactcttgaaggcttttacgctcagtgagttcatacgcgcaatccaaataaagcctgagatttgccatgttgtaaatagtttcatccttttgtagggtgttgggacaatccacttcaagattgaagagcttctttgcatgtccaatgaatgatggacaggttaaaagaaaatgtttcagctcagtcccctctttatcagcattattgctataaggtttttccactacgatgccataaccactgtctctccgccaattcctgactcgccctcttctcccgctactcctacaccgctcgatccacctgagtccaaaccatcaatcctcctcccactgcgtgacccaacaccccacaaccaccccatccactcccctcactcacccccgttcctcacacctcttcgcgcctaacccgcgcatatctgctgtannnnnnnnnnnnnnnnnnnnnnnnnnnnnnnnnnnnnnnnnnn

SEQ ID NO: 5406 - DNA, 1953 bp, Glycine max
  misc_feature (1)..(1): n is a, c, g, or t
  misc_feature (14)..(14): n is a, c, g, or t
  misc_feature (51)..(51): n is a, c, g, or t
  misc_feature (112)..(112): n is a, c, g, or t
  misc_feature (161)..(161): n is a, c, g, or t
  misc_feature (187)..(187): n is a, c, g, or t
  misc_feature (272)..(272): n is a, c, g, or t
  misc_feature (274)..(274): n is a, c, g, or t
  misc_feature (309)..(309): n is a, c, g, or t
  misc_feature (335)..(335): n is a, c, g, or t
  misc_feature (349)..(349): n is a, c, g, or t
  misc_feature (366)..(366): n is a, c, g, or t
  misc_feature (371)..(371): n is a, c, g, or t
  misc_feature (422)..(422): n is a, c, g, or t
  misc_feature (430)..(430): n is a, c, g, or t
  misc_feature (920)..(920): n is a, c, g, or t
  misc_feature (944)..(944): n is a, c, g, or t
  misc_feature (990)..(990): n is a, c, g, or t
  misc_feature (995)..(995): n is a, c, g, or t
  misc_feature (1306)..(1306): n is a, c, g, or t
  misc_feature (1309)..(1309): n is a, c, g, or t
  misc_feature (1453)..(1453): n is a, c, g, or t
  Peptide Sequence Number=SeqID_8862
  Probeset Number=SeqID_15185
natcgtttcctgtntagtagaatacgtcaaatcatcattagctcctagcgntgacggtccgaaattgtcatccctagccgacatacgggtcacgatccgtcgtcagtcactngtaatgctatgtctccgtcaagccatcatgcatacatgaagcccgccanatcatctcgaaatatgtctgcaatanctgcgcagttcgtgtacgttgcgttcagatatatcgattctatctcaatacgtgacttatttttctgcgtatacgtgatgctgtngnaccctgatcacagcgacgagaccgtcgatctcacncgattggtacgatacacacagtagcngtacatgtacgttncgtatcttcatgccttncgatntagtattagtcgtatcactactgacgtatgctagtcattgagttctgacgncacttatnggtcggatctacagtacagtatactgacttcctagtgtctcgtacgatcactgtatcactgactgctttcgatgtcggaccatactgcagtgcaccatcgttcgtagcgtgtccctacgtcatgcgctatcgtggatgtaggtgatcagtcctcgctcgaactaattcatcaccactctcacatcagtgtcgacgcacgtggcctagcattcataactcatgtctcgcgcctcatcgatacttctacagctgacttgttcctaagcgtgctcgaccctctacactgactagtacgtatcctggtgtcatatgcgtcgctcactgagtctctcgatcactctgccgtacactcgcgtgcgtgctgcggatcggaagagcacgtcactagtccatttatgacacgccgtgcactgtgcaggtatatggtagctcgtgggccactctttgcaggacaacgtacaagtctcgcatactactcacgtatgacttntagagtgcgtatctatcaatctcncctctcatcttctcgatatgtcctcagagtcaaatctgtcgctgcnttacngtcctctcgagtggatgtagcggtgatgagacaacactgcgccgcacgaatgatatcgatactcgtatggtcgcgcacttctatgtgtagtcgcttcatgtaccttacgatagacaatatatgtttgtggcttagagctcatgatcgacgatacttccgtggccgtgcataggatcccgtgtgtccttagtacacatgcacatcttctttagtcgtgtggtggtgtcgattatgatggtgtatgcgttttcgtgccgcctgtgtctcgctcgggtctagtgcttagtgttatatggcgttactctatcatnacnatgtaagtcgagactacggtatgcacgcgtctgctctcggcggagccagtatgctcttctggtaatctctatgcttatagtaaatatattctgcgagtaattatgctccatgacgcagaaccgcacaccgcgcacacacatccnaatcgacagcgggaagtcgagacagcatgcagggagtcagttcgtccgcgtatcgtgcatttatataatcacctatctatccctcttgctccatatcgtcactatcattactattctcggcgtgcggagtgcgtcgggatggttgtactcgttccgtccgcaaacgcatgtataacccagacgtacacaatgaatcaatgcccgctcacagtatagacggggctccgcgaacacacctaaactctgtcctctgggcgtttgttgcttactatcctccgcttgccttggttcgtgcaaactacgtattctcgtcagatatagagaaaagtttgtctcctgtgcgccatccgtggatgtgccgtgatggcagaaacattcgtcctcccttcttgtgggcatcgcttaaagcatcgcagcgcacgaaagatgaataaactagaagacctgttgcgcttagcgaagacgaccacactctctacaccatcactctctcgctgtcg

SEQ ID NO: 5407 - DNA, 459 bp, Glycine max
  misc_feature (449)..(449): n is a, c, g, or t
  Probeset Number=SeqID_15186
ttattatattggtaatgcccggaagtatgacccactgcacccaatcgagtgctttcagctgcatctaaagaaagtggtgttgaagaattatgacggcgaaaatagtgcatttatcaactttgccaagttctttcttctgaatgcgaaagcgctaaaggaaatgaaaatcacatcgccttaccaccgccagcacaatttctttgctaatatacagagcaagctacgagatcaacttagagcttctccggatgctcaaattgaactgagatgtggcactagggattatttcacacgcaacaagcatacccatgatttgtcgatgaacgatccctttgacatgccgtccatcggatgctggaggtgtaaagagttgggtctaggagatactacataccaggtttaattagaactcgggctgcctgttgcccttgaatgctagttttaatctnttatgtagtt

SEQ ID NO: 5408 - DNA, 2026 bp, Glycine max
  misc_feature (1)..(1): n is a, c, g, or t
  misc_feature (6)..(6): n is a, c, g, or t
  misc_feature (14)..(15): n is a, c, g, or t
  misc_feature (20)..(32): n is a, c, g, or t
  misc_feature (43)..(43): n is a, c, g, or t
  misc_feature (47)..(47): n is a, c, g, or t
  misc_feature (57)..(57): n is a, c, g, or t
  misc_feature (59)..(60): n is a, c, g, or t
  misc_feature (62)..(63): n is a, c, g, or t
  misc_feature (66)..(67): n is a, c, g, or t
  misc_feature (70)..(71): n is a, c, g, or t
  misc_feature (77)..(79): n is a, c, g, or t
  misc_feature (82)..(82): n is a, c, g, or t
  misc_feature (84)..(85): n is a, c, g, or t
  misc_feature (90)..(90): n is a, c, g, or t
  misc_feature (92)..(92): n is a, c, g, or t
  misc_feature (94)..(94): n is a, c, g, or t
  misc_feature (96)..(96): n is a, c, g, or t
  misc_feature (99)..(100): n is a, c, g, or t
  misc_feature (102)..(103): n is a, c, g, or t
  misc_feature (107)..(108): n is a, c, g, or t
  misc_feature (114)..(114): n is a, c, g, or t
  misc_feature (130)..(130): n is a, c, g, or t
  misc_feature (195)..(195): n is a, c, g, or t
  misc_feature (290)..(290): n is a, c, g, or t
  misc_feature (292)..(292): n is a, c, g, or t
  misc_feature (302)..(302): n is a, c, g, or t
  misc_feature (370)..(370): n is a, c, g, or t
  misc_feature (395)..(395): n is a, c, g, or t
  misc_feature (420)..(420): n is a, c, g, or t
  misc_feature (610)..(610): n is a, c, g, or t
  misc_feature (651)..(651): n is a, c, g, or t
  misc_feature (701)..(701): n is a, c, g, or t
  misc_feature (717)..(717): n is a, c, g, or t
  misc_feature (775)..(775): n is a, c, g, or t
  misc_feature (793)..(793): n is a, c, g, or t
  misc_feature (912)..(912): n is a, c, g, or t
  misc_feature (957)..(957): n is a, c, g, or t
  misc_feature (1073)..(1073): n is a, c, g, or t
  misc_feature (1115)..(1115): n is a, c, g, or t
  misc_feature (1133)..(1133): n is a, c, g, or t
  misc_feature (1158)..(1158): n is a, c, g, or t
  misc_feature (1247)..(1247): n is a, c, g, or t
  misc_feature (1281)..(1281): n is a, c, g, or t
  misc_feature (1363)..(1363): n is a, c, g, or t
  misc_feature (1430)..(1430): n is a, c, g, or t
  misc_feature (1507)..(1507): n is a, c, g, or t
  misc_feature (1522)..(1522): n is a, c, g, or t
  misc_feature (1536)..(1536): n is a, c, g, or t
  misc_feature (1545)..(1545): n is a, c, g, or t
  misc_feature (1580)..(1580): n is a, c, g, or t
  misc_feature (1585)..(1585): n is a, c, g, or t
  misc_feature (1612)..(1612): n is a, c, g, or t
  misc_feature (1615)..(1615): n is a, c, g, or t
  misc_feature (1698)..(1698): n is a, c, g, or t
  misc_feature (1750)..(1750): n is a, c, g, or t
  misc_feature (1754)..(1754): n is a, c, g, or t
  misc_feature (1776)..(1776): n is a, c, g, or t
  misc_feature (1809)..(1809): n is a, c, g, or t
  misc_feature (1815)..(1815): n is a, c, g, or t
  misc_feature (1829)..(1829): n is a, c, g, or t
  misc_feature (1841)..(1841): n is a, c, g, or t
  misc_feature (1847)..(1847): n is a, c, g, or t
  misc_feature (1894)..(1894): n is a, c, g, or t
  misc_feature (1900)..(1900): n is a, c, g, or t
  misc_feature (1905)..(1905): n is a, c, g, or t
  misc_feature (1907)..(1907): n is a, c, g, or t
  misc_feature (1935)..(1935): n is a, c, g, or t
  misc_feature (1977)..(1977): n is a, c, g, or t
  misc_feature (1992)..(1992): n is a, c, g, or t
  misc_feature (2026)..(2026): n is a, c, g, or t
  Peptide Sequence Number=SeqID_8863
  Probeset Number=SeqID_15187
nttttnaaattttnnaaaannnnnnnnnnnnnttttttttttntttnttatttaatntnntnnaannctnnctattnnnttntnngtatntntntnctnncnncaanntttatncttccagactaatctntcctcccatgcctagcgcagcatccacagtcccacacacggctgaaggacgggccgcgctatctncaattattcacacatattagggggtagtatgaaaacacacaccgcggtcagaccgacgagagaggaggagaggggagcatcacaaatatcctctntntcgtgtcgtntatctcatgtactgagctgcgctacaacgagcatacagagcagatactggatagtgaagtaggatatnctgtctacgatatgcgtctgtagtntagtccccgcatcatctgcatagtntgacacacatatccgacttcgcactactatcacgtcagtgatcatgtgaagacaaacagaataagagaaagatatagaaacaaaatcataaccagacaggagacacagattatatacagacacaccacacctatatatcagtgctctctcatcgcgagcgcatcagcacaatatatatgatttgatgatngattttgtactagatgtcgtgtcgcacttatgatcaatgangatatatcaatgtacgtctccgcgcatcgccgcaactgagtgctacgccncgccctcgtcccgccntactgcaactagacacagaagagacacgcagcaagcgcaagaaagaacatatctctgntgcgacctctacagaganccgaattatgtaagagatccagctatccactgtcaggcactatatgagcatcgagtcgataatatcgtcacggtgctgcgcgtacgcgtcatcggtcgtgataccgcgctcgcatttcncgtcgagcatctgcattgcctcgtgacgcgcggagctgtaccctnatagataatcattgagactgaaactgttctgtcacgtatcctacagacgcgcatacattatactctctcccagtcgactcataatcatcacacagagatcagactagatcgacaantagctcaagcaggtacggagcagcagcagatcgaatcgaaangcaatacgagagctctcngacatatcccgttgtcgctcgcacncgaactgcgcagtaccaatcgctccgcctgacactaaccgtgttaagagtacgatgacagtgcgtgccggccgtcgtctacactctccnacatacgagtcgatccgccgagagcgcagagcgnattgaacagagcgtgacgtgtatgtgctcatatatcagcgacggccgagccgacagcgcacgcgagcgacgaccagcgagangcacagcacgaatgagacaagaagcaaactgtcacgtcgctgtacacacaccaacccagcgacaaantctcacactagtcatctgtagcgatgaagcatgcaccacgatatgacgaacacgtcgtactcacgcgttgctctcanactgactgaatccantgtgacagactagncacccacgntctctacgccacgtaccatcggacgtactgccctncatcncacagatggtgtcgtagatctacgtancgngcgcacatgacctgacgcgcgcgcggcacaactattagtgtctcgcatatcctgtaacctccgtcgcacactagatgtgatcntgacgcagcgcacgatgggcagcggctgcaatcatacagctagatgatagantacnaagtcgaatacgacacgcacangtcgagcggcacgcgcacgagcacgatgcatgngacacncatcatgctgcatncatcgacgatgntgcgcnaggctgctgaacagtgatacgttaatctgagaagtgaactgagaagngtcagnagtgngncgtcgggagtatacactgcgtcacggcnacgtgcgagaagatgtaagatgcgaagtgatcggacgtaggnacagacgcagacgcngcgcagctgaagcactcagtgctgctctgataan

SEQ ID NO: 5409 - DNA, 1552 bp, Glycine max
  misc_feature (18)..(19): n is a, c, g, or t
  misc_feature (21)..(24): n is a, c, g, or t
  misc_feature (32)..(32): n is a, c, g, or t
  misc_feature (35)..(39): n is a, c, g, or t
  misc_feature (43)..(44): n is a, c, g, or t
  misc_feature (48)..(49): n is a, c, g, or t
  misc_feature (71)..(71): n is a, c, g, or t
  misc_feature (73)..(73): n is a, c, g, or t
  misc_feature (75)..(75): n is a, c, g, or t
  misc_feature (112)..(112): n is a, c, g, or t
  misc_feature (137)..(137): n is a, c, g, or t
  misc_feature (139)..(140): n is a, c, g, or t
  misc_feature (142)..(144): n is a, c, g, or t
  misc_feature (146)..(147): n is a, c, g, or t
  misc_feature (150)..(150): n is a, c, g, or t
  misc_feature (152)..(153): n is a, c, g, or t
  misc_feature (166)..(166): n is a, c, g, or t
  misc_feature (208)..(208): n is a, c, g, or t
  misc_feature (216)..(216): n is a, c, g, or t
  misc_feature (367)..(367): n is a, c, g, or t
  misc_feature (578)..(578): n is a, c, g, or t
  misc_feature (787)..(787): n is a, c, g, or t
  misc_feature (913)..(913): n is a, c, g, or t
  misc_feature (1050)..(1050): n is a, c, g, or t
  misc_feature (1116)..(1116): n is a, c, g, or t
  misc_feature (1201)..(1201): n is a, c, g, or t
  misc_feature (1336)..(1336): n is a, c, g, or t
  misc_feature (1361)..(1361): n is a, c, g, or t
  misc_feature (1465)..(1465): n is a, c, g, or t
  misc_feature (1471)..(1471): n is a, c, g, or t
  misc_feature (1474)..(1474): n is a, c, g, or t
  misc_feature (1493)..(1493): n is a, c, g, or t
  misc_feature (1548)..(1548): n is a, c, g, or t
  misc_feature (1552)..(1552): n is a, c, g, or t
  Probeset Number=SeqID_15188
ttggtccgtgggtttgcnncnnnnccccgctnttnnnnntcanntttnncgcacttgggaaagagtgggtnananttcttttttgggggtagtggtggttggaggggatgtngttaagttggtgcgcccaacacccnannannnannaanannaaacataaacccncggacaacagggagaatatatgtgtggatagcagcgtatatnttttgttntccttgttgtctgtgttgttgtattgtctgttatgtgttgtatagagtgtgagtgtggtgagtgcgtgtggatgtgtagtctctgtgatgtgtatgtaatgttgtgtatattgtattggatatggtggatatatgtatacgtcttctcttntgtataagatatgtcgaatgattagcttatagtgtagaggatgtgtgagatgacatgtatgagagccagatagaaatgtcctctgtcgtgcgtctgatcacgccggcctggtgacatggacggaaataatcacacacaatatgtatagatgaatatattatagtgctggcgtggtcgtgctcgcggtgtcgcgatggtatggtgtgtggcnttgtgagctggtctgcagaaacagaaaacaatctagagtgactgaggatggaaaggagaggaggaatgagagtgtaggataaagtgacacaacatcataggaaaaataacctctacgagactatataagatggtatatgtagcagaggagtagagaagagaaatggtacgacgaagcattatacagaatagcaattgtgatgtaatganatacacgatatagcacggacgatgcgggcggaacgcagactcgacaagacactgaacggtaaaccagcctactagtgactacactcagcgtgacactaagcaactaacacgtctacataagcggangatactgcctcaaggcgcattgaccgatgatgagtgatgtggagtagggcgagagaagatataaattaatgagcaccgcgacgcgagacgacgcacagacacgacgtgagtgtgtgtatgtggtgtcatactgaaangtgtagcgacgtcgtccgccgatcacacgagccactggacgagcgcactgcgcgggtgagagtggnagtagagaaagacacacgaaagccaaccaagacagcgcgactcgagccgacgcgctcgacgtcatgacgatagtacccgagaggnagatgtatgacatagatcagaatagacagcacgcagcggaaggagacatataatctacacaccccgcacagaagcgagccgcagtgtcaacatgcgccgtgcgcactacacagtgatcgcaacatatatgcagantgaatagatgtgcgtgcgctagaancgagcgtcgcgtacgctatgttgacgcgcgcgatcatcttccatctctcacggcacacggtgcgtcgtggcgatgacactatgacgcgatctccgctcggacanggtacnagncgtacgcggacgcccgggntgcgtgcaggagagacgcgcagagacgatcgcgcgcgtcgcgagtgtcgccacgnccan

SEQ ID NO: 5410 - DNA, 467 bp, Glycine max
  Peptide Sequence Number=SeqID_8864
  Probeset Number=SeqID_15189
aaacaaaatccccatttaatgagattgattggagcccatcaaggtgatttccttcgcttaataaataaccctccaaaaggtgttgaagggaacatattggggcaaatggtttttgggatgccccaaccagtaacggtccctcttaaggaccggcaggcaattgaacgttttgaaccaatgggttttgatcgcgcaatcgtattggaggtgtatttcgcttgtaacaaaaatgagaaattggttgccccctcccttttggatcacaggcatgattttaaggaccaatagatctcctttggaatccccccaattataaggggtcattttttttctcgaggggtttttgttacatcctatgtttaatgaggtaatgcttttgataatgtcaaatctcaagtggataagggatgttttattttcccaaaaaaaaaaaaaaaaaaaaaaaaaattaaaaaagggtaaactcc

SEQ ID NO: 5411 - DNA, 831 bp, Glycine max
  misc_feature (577)..(577): n is a, c, g, or t
  Peptide Sequence Number=SeqID_8865
  Probeset Number=SeqID_15190
ttttttttttttttttttctttttttttttttttttttttttttttttttttttttttttttttttttttttttttttttttttttttttccaggggaaaggccgggtgggtaaaagaaggtgccccccctttggaacggggggggccctttaggccattggccaaggacaaacccgggaaaaactccgggggaaacccccccaaaccaaaccaaaaattccccccccaaattttgcccccccggggccccggaaaaaaagcaaaccctttccgtttccccttgaaaaaacggggttttattggggggccccctttgcccggggaaattaaacgggttttaaacccttaaggggcccccaccctggggtaaaaaacgggaacctggaccggccccccaaccaggtggatccacccccccccaatacccatctaaaaaaaatttttggccactaattattcagaatatcgggaacccccggctgaaactttcttaaaagaaaacccaagttggcttggatggaaacccgggaacccgggatccattggccctgggagccataacaaaacccccaaccngaattcttatagccgggccggggaaacaaccgttcccccccctttaattggccgggaaaaaaagcccttaacccccggggggatggaaaccttccccccccccggtgggaccaaagcgccaaaaactttgacaaaaaaccaaaaattttttaaggggcgcgcccctcccgttgggggaaaaagcccaaaacctgggattcacctccccaaaaagtgggactcatccgaaaaataagggcgccccttggaacaaa

SEQ ID NO: 5412 - DNA, 1528 bp, Glycine max
  misc_feature (1)..(1): n is a, c, g, or t
  misc_feature (59)..(59): n is a, c, g, or t
  misc_feature (112)..(112): n is a, c, g, or t
  misc_feature (116)..(116): n is a, c, g, or t
  misc_feature (211)..(211): n is a, c, g, or t
  misc_feature (290)..(290): n is a, c, g, or t
  misc_feature (320)..(320): n is a, c, g, or t
  misc_feature (459)..(459): n is a, c, g, or t
  misc_feature (461)..(461): n is a, c, g, or t
  misc_feature (464)..(464): n is a, c, g, or t
  misc_feature (518)..(518): n is a, c, g, or t
  misc_feature (578)..(578): n is a, c, g, or t
  misc_feature (629)..(629): n is a, c, g, or t
  misc_feature (706)..(706): n is a, c, g, or t
  misc_feature (1022)..(1022): n is a, c, g, or t
  misc_feature (1090)..(1090): n is a, c, g, or t
  misc_feature (1357)..(1357): n is a, c, g, or t
  Peptide Sequence Number=SeqID_8874
  Probeset Number=SeqID_15191
ngagtcgtgcgcgacgcgagatagagatgaaccgtcgtgtggatagtgagcgcgagagncgatacgccgactcacgatgacatcacggctgcagtcatatacgccgtgcaancgantttatgcgtgtagcgtagagatgcgtgccagtgtcgatcatatctcggaaggtaggcgcagagagctacacatgcagttgattatactcaatgtncaggtgtctacagatcatatgattagacagttgctgagtgtgggtgagtactgatagtatagtggacgtcagcaagtgnaacttgacagttatcgaggagtagtaacgnttagtacgtcagatttagtcgtcgatgtcgcgctcgaggtatccacgagacatgggagcggcaccagtatatgacgaatagattactgtaggctgtagtggggtagggatacgcttatatatcaatatgaagataagcngntgnggagctagagctagagcgagtagacagatcgtcggtacacgaatataagcatanatataccgtggtgcgtcggtccgtcgttagtgcagcataactcttcagcttggttatgcngcgtgtgcgcgtgggagttcgtgaggagcatcagtcgcgagataggatatnagacacaaaatcgcaatgtatagcgatgcagatggcgagagtgcacgagcttatagacgtccaggactgtgtatgangtgtgatattcgcacagtcatgagtatgacagtgaaaagtcacgagcaagcacaccgtatggtgtcagcgcgccggtctcaacacttcatacgatccgtcacgatagatcgtcaacatctcgagctgattcgtgcgcgtatcgataggtatcatggtccggtaaccgtgtgagagcttcgttactcgttaggcttgcctccccaatgcgaggatattgccgcgccaacagtgcggcggtttctgcactactaccagctctacactattcgtgtgatgccgcgtggtggtcgcaagataacagacagtgcagcggangcgctctgtgggagactgtgcgagcacccaaaggtgcgttgcataccgtcgttaggtctctaaccacncacgcgggggctcatgcacggcgagttctctcctctcgtccacatgtcgttactcgctgctcacgtctacgtctgaggcgtgtgattgagggcgtcagatagaccacacacggtcccaagcggcggagggactagagtgcatactggcacaggccgagtacgcgtagaaagcaagtctagtacgacagatgagcgaagtgatgacgtgatagaataaattagagatgggacacgacgaacgcgagcgaaacaggatcgcagtgagtnacatatagacacgtgctgtcgcgcgtggggcgtggatgctgagatcagtagtagttctgcgtcacccacttaagcgtgagcatcagccagtagtacaacgtacggtgagtagcgggcggggcggctgacgaggcgcgaaggcgggacgggggaggcgcgtgggtggggagg

SEQ ID NO: 5413 - DNA, 1790 bp, Glycine max
  misc_feature (1)..(3): n is a, c, g, or t
  misc_feature (8)..(15): n is a, c, g, or t
  misc_feature (20)..(24): n is a, c, g, or t
  misc_feature (28)..(32): n is a, c, g, or t
  misc_feature (34)..(37): n is a, c, g, or t
  misc_feature (41)..(41): n is a, c, g, or t
  misc_feature (63)..(63): n is a, c, g, or t
  misc_feature (81)..(81): n is a, c, g, or t
  misc_feature (119)..(119): n is a, c, g, or t
  misc_feature (131)..(131): n is a, c, g, or t
  misc_feature (135)..(135): n is a, c, g, or t
  misc_feature (152)..(152): n is a, c, g, or t
  misc_feature (157)..(157): n is a, c, g, or t
  misc_feature (169)..(169): n is a, c, g, or t
  misc_feature (254)..(254): n is a, c, g, or t
  misc_feature (265)..(265): n is a, c, g, or t
  misc_feature (323)..(323): n is a, c, g, or t
  misc_feature (476)..(476): n is a, c, g, or t
  misc_feature (482)..(482): n is a, c, g, or t
  misc_feature (650)..(650): n is a, c, g, or t
  misc_feature (720)..(720): n is a, c, g, or t
  misc_feature (777)..(777): n is a, c, g, or t
  misc_feature (822)..(822): n is a, c, g, or t
  misc_feature (853)..(853): n is a, c, g, or t
  misc_feature (1067)..(1067): n is a, c, g, or t
  misc_feature (1235)..(1235): n is a, c, g, or t
  misc_feature (1244)..(1244): n is a, c, g, or t
  misc_feature (1319)..(1319): n is a, c, g, or t
  misc_feature (1321)..(1321): n is a, c, g, or t
  misc_feature (1332)..(1332): n is a, c, g, or t
  misc_feature (1347)..(1347): n is a, c, g, or t
  misc_feature (1351)..(1351): n is a, c, g, or t
  misc_feature (1422)..(1422): n is a, c, g, or t
  misc_feature (1469)..(1469): n is a, c, g, or t
  misc_feature (1472)..(1472): n is a, c, g, or t
  misc_feature (1503)..(1503): n is a, c, g, or t
  misc_feature (1528)..(1528): n is a, c, g, or t
  misc_feature (1530)..(1530): n is a, c, g, or t
  misc_feature (1535)..(1535): n is a, c, g, or t
  misc_feature (1627)..(1627): n is a, c, g, or t
  misc_feature (1652)..(1652): n is a, c, g, or t
  misc_feature (1656)..(1656): n is a, c, g, or t
  misc_feature (1731)..(1731): n is a, c, g, or t
  misc_feature (1767)..(1767): n is a, c, g, or t
  misc_feature (1773)..(1773): n is a, c, g, or t
  misc_feature (1790)..(1790): n is a, c, g, or t
  Peptide Sequence Number=SeqID_8890
  Probeset Number=SeqID_15192
nnnttttnnnnnnnnaaaannnnnaaannnnntnnnntttntttttgatatttatcattcaanatgccacttagctgacanggatatcgcgatgcacgacaacagtgccgcgcgctgtngtcacgccgcgngcgncccccggcggctgctangtccncgtgacgcgcgntcacgacacgacaccatattgagattgtataataagtaatataatacgtaagcgcatggagcatgtaagtaacgctcgcggcctngcgccggcgcngtgtgcgcagtatgacgttctcggaggacagacaggatgatggtacagagcgacatcngtcggaaaatgagagataatgcttgagaagagatcgatgtcaggcgatcgcgaagagacgcacgagagtaccaccgacacatataatatagcttggcttgagcaaaatgtgtggccgatcacaattgatcgatgttgtacgcgagtcctctangttctngcgcagtcattatgttgttgtggtgtgttgcgtcgactagtcttgtctctatcgtctccatccactctcccgcagactgtgcctctcttgcactctttcatatctatacagagaagtgagacacgatgctctctgacaatgtcaactatgatctctagagtatacgcncacgggcgcaacgcgacgcgactactctgtgtgacggcgcgatgtgtctctaatgtatgcgaacgtgttntcgaattaccgctccgtagtaatcaattacgagctgaccgatctgctgttatcaccnacctacgtgtcacttctccagcgacgtactcacactctcctccancgcgcgtgataagtggcgtagcgtagcatancatcagtctgacgatcgctatgactctatatagatgacgatcgctacgcgtgacagcgcgtcgtagcgtgcgagcgctgctacgcgcacaacaacatatgcgagatatgagtgcgatatcttacactcctctctctcgtctgattactcatactgccacgcgagtcgctaataccacgatagacgtgatctgctggatctcgtgagactgtatntcgtatgcgcgagatacatgaaacgtatatagacatcgcacgatattgttatatgtagacatgtcagttatcgacgtaagacgcccgtgcacgatattccatgcgcagtagatattctagcaagcgctactagctagtttcggatgcacgcacgtgtcaatgctacanctgcgtccncacgtcgtagctctcgcgacagtttatgacgcatatgcacgcgtactcacactcctcgatactgagacgatgtancncacacacacgncattcagacacgacncgcncgccactacgaacgatgtgagtagttactctgatgtgtcactcggtcgcacgtatgtgagagatgaatcancaatcactaagtcactatctctgcttagtaacagtgcttatgctgcncanccgtctctcatagcactcagtagttgtgctngtatatgcattctgagactcgacancnatagnatcacatgcacacgcactgtatagctgtactgtctcgactgggtagactgtctgacgcacagcaggacacgagagcgcgacgtcacacgttnttgcgtcttcgcttgcaccagctcncacnctgacactgctatatactatgtcagtgctgatgcgagcgattgaagtggtgctgatattgatagtgttcaacagntgcgaacgtcgagacggatcgtcgataatggcgtcnatcacnatgcatatgtcatgtgn

SEQ ID NO: 5414 - DNA, 2168 bp, Glycine max
  misc_feature (216)..(216): n is a, c, g, or t
  misc_feature (237)..(237): n is a, c, g, or t
  misc_feature (398)..(398): n is a, c, g, or t
  misc_feature (490)..(490): n is a, c, g, or t
  misc_feature (500)..(500): n is a, c, g, or t
  misc_feature (600)..(600): n is a, c, g, or t
  misc_feature (640)..(640): n is a, c, g, or t
  misc_feature (676)..(676): n is a, c, g, or t
  misc_feature (678)..(678): n is a, c, g, or t
  misc_feature (697)..(697): n is a, c, g, or t
  misc_feature (731)..(731): n is a, c, g, or t
  misc_feature (831)..(831): n is a, c, g, or t
  misc_feature (852)..(852): n is a, c, g, or t
  misc_feature (875)..(875): n is a, c, g, or t
  misc_feature (933)..(933): n is a, c, g, or t
  misc_feature (940)..(940): n is a, c, g, or t
  misc_feature (942)..(942): n is a, c, g, or t
  misc_feature (944)..(944): n is a, c, g, or t
  misc_feature (1001)..(1001): n is a, c, g, or t
  misc_feature (1045)..(1045): n is a, c, g, or t
  misc_feature (1139)..(1139): n is a, c, g, or t
  misc_feature (1166)..(1166): n is a, c, g, or t
  misc_feature (1323)..(1323): n is a, c, g, or t
  misc_feature (1354)..(1354): n is a, c, g, or t
  misc_feature (1388)..(1388): n is a, c, g, or t
  misc_feature (1391)..(1391): n is a, c, g, or t
  misc_feature (1393)..(1393): n is a, c, g, or t
  misc_feature (1486)..(1486): n is a, c, g, or t
  misc_feature (1492)..(1492): n is a, c, g, or t
  misc_feature (1501)..(1501): n is a, c, g, or t
  misc_feature (1557)..(1557): n is a, c, g, or t
  misc_feature (1559)..(1559): n is a, c, g, or t
  misc_feature (1612)..(1612): n is a, c, g, or t
  misc_feature (1614)..(1614): n is a, c, g, or t
  misc_feature (1660)..(1660): n is a, c, g, or t
  misc_feature (1775)..(1775): n is a, c, g, or t
  misc_feature (1778)..(1778): n is a, c, g, or t
  misc_feature (1780)..(1780): n is a, c, g, or t
  misc_feature (1785)..(1785): n is a, c, g, or t
  misc_feature (1803)..(1806): n is a, c, g, or t
  misc_feature (1808)..(1813): n is a, c, g, or t
  misc_feature (1846)..(1846): n is a, c, g, or t
  misc_feature (1862)..(1862): n is a, c, g, or t
  misc_feature (1880)..(1881): n is a, c, g, or t
  misc_feature (1888)..(1888): n is a, c, g, or t
  misc_feature (1944)..(1944): n is a, c, g, or t
  misc_feature (1978)..(1978): n is a, c, g, or t
  misc_feature (1982)..(1982): n is a, c, g, or t
  misc_feature (1992)..(1992): n is a, c, g, or t
  misc_feature (2023)..(2023): n is a, c, g, or t
  misc_feature (2031)..(2032): n is a, c, g, or t
  misc_feature (2049)..(2049): n is a, c, g, or t
  misc_feature (2058)..(2058): n is a, c, g, or t
  misc_feature (2069)..(2069): n is a, c, g, or t
  misc_feature (2072)..(2072): n is a, c, g, or t
  misc_feature (2139)..(2139): n is a, c, g, or t
  misc_feature (2150)..(2150): n is a, c, g, or t
  Probeset Number=SeqID_15193
ccctttcatttgagtgtcaccgatttgtttgcgtcctgttgtttagtgaccacgtcctactagctgttgccatgagcgcgcgtgtgagcgtcactcactctacatcttatcgtttacccatcgtccacacgcgcgctatagctacttgtcgcagcgaggtggtatcacacgacgacggtatgttcgcagcgcgctccgcacgcggctcgtgtcttngacgcgttggatatctctccnagcacatagagacggtgcagacacagctgcagaagccgtcactgcatgcgttcgtctacgtcatatccttctaaattttcatatcacataattccgacttctctatgactgactatacatacgcgcgatacgcaccgtacctctggcgtcgtgcggttgcncatatcgtgagcgtgcgtatatatctatgctctatcaacactccatcactcactgtgcatatgtgactgatgtgttaatctgtgatggagancgatcgtgtncgagtaagcgcgagttgtgagtggtgcagtgttgttcgtcagccgtgcgcgcgcggcgagcgtgcactcgtcgctcctactctactttctgtcgacatcncagtcggcggcgtggcgtgctcggcgagcgtagtagaccnacaggacaccactagtagatggtgaagcatgcgcantnacactaactcacaccctcnctatgtacacactatgacgcactagtcgacatantcacatatatacactacgctgcccgtcggtatatgctcgtgcgagtgagagctgagctccaatagacatctacatgtagtgtacgacggagtgcagatantgagatagatgtagatatagnggtgtagtattgcatgatatgtngtggtgctcgtgagtggatgagtgtgtgtagagtacgatagtagcgagatactgagcnctgtacntntntctctctgagctagtagcatgtgctataacgcgcgcgatcgtactacagggactgtnttgagatctaatttgaggtgcgatatatccactcgatagacagntgtattcatgttgtatactcattgatcgacacggctactgctatgcactctgttacctgcacaacatgtgatcggaaagaggagctcatatcancatcagatacgtgagaaagcgcgcgtntatcgaagacagagagcgctgcagtatagatatacagcaagtgcatgcgctttgtacatcagtagaagctgatcagtgagacgagccaagtgtcgcggtgcgtgagcattctatacgctctacttacggagtgcagctggacactgtgacatacgancgtagcggtcagagtgcagtgaagactcggnatgctgacgagtcgcgcgccgacggacagcgccncancnggacgcgaccacctctcagtacgccgatatcagccgaccgtaggcacggagataacctcgcatatagtgcacggagatacacacagcagaggnactgcnctactactncttcgagatgtattacggtgcgtatcactcatgaatacgtatggagagcacacgancnttcatgtcattaggtacgtagctgcgcagagcgatagacacaatcacacagtntnttagtgcatggtgatgcatgcgtggtatacgatgacgcggcctctncatcatcgattaagacgagagactatacgctcgtaaagtagtgtagtatggcacgtatgtcctttacactcctgccataggcgcgtgacaatccgtactacgtgtacactcggcnatnantacgntactctacagttctctcnnnncnnnnnnctgcgatggatgacggactgaaatcacaccagnacgacgacacacgtcntcgcttctcttagtacgnntctcgtngttgacacgcagcatggagtcgatgatcagactgcgctatgaatgtgctgccagcnctaggatcagatgcgtgctcacatggcacacacncgtnattcattgtngtacatatagcgtgatgctcgtggactactncgtacganntcagatcaatgcagcancgcgaccancaatacgcgtntanatgttgagcgtagtcagaggacgcagtgatgagagctatgtggggattgagacgtcgaggacgcgancaaaggatcangtcgatcgatacaagagg

SEQ ID NO: 5415 - DNA, 454 bp, Glycine max
  Peptide Sequence Number=SeqID_8891
  Probeset Number=SeqID_15194
actccttcattcatcactcactcactcagctccgcacacaaagctctgaagaggacgagaagaagtccgatcgatcttgccatggactccagggtgtccaagagcccaccttcgtctccgcccccggcggcggcgcaagaagacgagggggacgcggcggcggcggtgcgggtgacgagccggctgtacctgcacaggcccgggcccggcgcggggccgctggagaaggacgccgtgctccgccgcatccgccaccggaggcgcgccaaccgcctccgggacacgctgcgctccctcctcgtcctgcagcaacagcagcccaccgcgccggagccggaggacgcgttcacgtctccgtagccgcgggacctccccggaccttctggatctcctccctctccgtggcgcacgctctgcctcgtgtaccgctgctgcctcgcgcacgcmcgttcga

SEQ ID NO: 5416 - DNA, 431 bp, Glycine max
  Probeset Number=SeqID_15195
acttttcctccccactctcgccccctcctcgcttgaagccgtcgcccgagctctgtcatcaccgtctccgtgtcgatcccgcggccaccggccatccctcgtcgccgcaccatgtcgaggagcaccgacgtcctcttcttcatcgactgcaagcgccgattccagctggagcccctctgagccgtcgcaatcgtcgtctccgtcgactacatccaccactgtcgtcgctcgatctaccgccgtcgacgcctccccgaccctctccggcctctccctggctcggtgatgctggagcccaggagccagacgccaccgtcgacgacgactcttactacactggaggtgcctactactacgagcaggccgctgacgacgaccaggagtagtttaggaggatcccaggcaggaggcatgcgcctctttcgatccgt

SEQ ID NO: 5417 - DNA, 686 bp, Glycine max
  misc_feature (601)..(686): n is a, c, g, or t
  Peptide Sequence Number=SeqID_8892
  Probeset Number=SeqID_15196
acggctgcgagaagacgacagaaggggactttcatttgcttcggaattcgagaatgagagaagaggttatgagctacggaggcaccgttgatgcaacacctgctgcaagttctgctggggcatcatccccagctgttccaatgaatgttggcagcatagatgggtcaagtcatggacaagtctctaaagcggcttctctctcgtgtgttggttcacaaccaccatggacttcattgagcacaagtgctggcggttctgctttttgattcttcaagatcttcatgtagaccttgggaaagaggagatttattaagacgtttggctacatttattccttcaaattggcttgggaagcctcagagaactgaccatgaatctccctaattatattacagccacaatgtgtatatttacattttcgtccatcttttccttgtgggtagtatggtactgattcacttatgcttcaatatcttaataatgatatcatgtaggcctagatgacaaagagtcgcatcttgtatgtctaaagtcaagaatgcatatgcttgttttaatagatgcttcgtgatgatattctatcctcatagattattggatnnnnnnnnnnnnnnnnnnnnnnnnnnnnnnnnnnnnnnnnnnnnnnnnnnnnnnnnnnnnnnnnnnnnnnnnnnnnnnnnnnnnnn

SEQ ID NO: 5418 - DNA, 1357 bp, Glycine max
  misc_feature (18)..(18): n is a, c, g, or t
  misc_feature (215)..(215): n is a, c, g, or t
  misc_feature (1146)..(1146): n is a, c, g, or t
  misc_feature (1287)..(1287): n is a, c, g, or t
  misc_feature (1333)..(1350): n is a, c, g, or t
  misc_feature (1357)..(1357): n is a, c, g, or t
  Peptide Sequence Number=SeqID_8893
  Probeset Number=SeqID_15197
acgtcgcatcatctacanctctaactcaccctcctcccttcgcctctccccgtttctacttcgacatatttatttctatataaattatcacaactacagttttacactccctcctccccaccaaacccacatatccttctttctttcttatttcttctaacccgtatatttttcttatttctctctatttttcattcttatatcctattcctctntcttccctttttatcttcttttttttatttttcttttcctattctcctcttatcgtttttcggctttctgacaccaattttccgcttttatcgactgattctcacaccttcttctcatctcttggtactcctctttgatccttatataatctgtcttttgtcatatattgatttctgcgatcctcagttgctatgccgtttctcccttcaatttcttcctgcccctatcttgtcgtcatattatgttaccccttcctcgttctttttcatttctcctatcatctattcttcctactgtattacctctttatgtcatcccacctctaccactccactcacagccacgtccgtctttatcttctctttcctcctttctctacttttctgtcattcatttagtatcttcattataggttctcacccctgacatactcatctttctccaatgctcatacttttctcgtctctcccgctctctcactttacgttgtcaccgatctgcacactctacctcacctcgcttcagtcctacctcgtcctgatcgccactccctcgtcccagctcgcttctcaactctctatcttgctacattactcgtgttcgtctcccaagttctcttttctttcctacgtctctagtctatattttttctgtggtgtgttgtagatgtctagtagagaggatgagggggcacgtagcaagacgccgcaaaacatcatttttatgacatttcttttttttttctatcatcttctatactacaccctcttacctttcttttcaataacttctacctccctcttctttatttctctcatccacccctctcccctctctaccaacctaccctccccgctccctccacaccatttacatctcgtattcaatatatttctatttttttgggtggtaataaacatattttttttncatactcctccttctcttgcgtcgtcctgccttccctcctcctgctgccccttctcggcaaagaaatcacgccagtcctgcctctttcttcgtctgtgaaacaaccactctcccttctcttcggtcgctccggttgttttngtcccccccctccgcaccgccaccacgccggcctaggccccaaggnnnnnnnnnnnnnnnnnnccccacn

SEQ ID NO: 5419 - DNA, 752 bp, Glycine max
  misc_feature (601)..(752): n is a, c, g, or t
  Probeset Number=SeqID_15198
acatgcatctcggcaacggatatctcggctcttgcatcgatgaagaacgtagcgaaatgcgatacttggtgtgaattgcagaatcccgtgaaccatcgagtctttgaacgcaagttgcgcccgaagccattaggccgagggcacgcctgcctgggtgtcacacacaatgactctcggcaacggatatctcggctcttgcatcgatgaagaacgtagcgaaatgcgatacttggtgtgaattgcagaatcccgtgaaccatcgagtctttgaacgcaagttgcgcccgaagccattaggccgagggcacgcctgcctgggtgtcacacagaggcagaggttttcgtcttccgaggaacactgcgtggccacaccgacactgtcaccgcaatagccaccccagagaacaacaacaacaactccgacaaaatcatcgtcagttcctcccgtgacaattccttaatcgtgtggcgcctcactaaggaatactcaaactcttacggtgttctccaccgcaggctaaccggtcactctcactttgtcagcgatgtcgctttatcctccgacgccgatttcgccgtctccgcctcctgggacggcgannnnnnnnnnnnnnnnnnnnnnnnnnnnnnnnnnnnnnnnnnnnnnnnnnnnnnnnnnnnnnnnnnnnnnnnnnnnnnnnnnnnnnnnnnnnnnnnnnnnnnnnnnnnnnnnnnnnnnnnnnnnnnnnnnnnnnnnnnnnnnnnnnnnnnnn

SEQ ID NO: 5420 - DNA, 519 bp, Glycine max
  Peptide Sequence Number=SeqID_8894
  Probeset Number=SeqID_15199
tttcttacaataacaatcaaggttccgtatgccagagcttcggaaatcgatatttacattgaaggcgacgacttcaaattctacgccaagccgtacttcctgaggctggcactgccaggaaggatcgtagaagatggaagacaaaaggcaacttacaatgctgatgacggtatcataacagtttgtgtacctaaagagacgcctggacagcattttgagggactggaattgttgacttctcttttggcgcctcgaggatccaagtcggctaaacccctgatagaagagattgggtcttcacaggatgttcttgaggaggaagatgaatttgattggcagatagagcagactcctttcgtggaacctacagaagaggctctccagtcacagtgcacttacggctttgggaatttacggtcaggcgtcttcgggcgactgcaggaggaattgaatgatgttattgacttaagggatccagacgtcactccggcatcagagcgcacacggaggcgtctggca

SEQ ID NO: 5421 - DNA, 679 bp, Glycine max
  Peptide Sequence Number=SeqID_8895
  Probeset Number=SeqID_15200
gtcgagtttcagtgttgcttagtttcaccgtcgatatgggaaaattaggcaaatttttatgtgataaggttgattcaagttaaaacagtccatggtaagttcgcattctgcaagatcaaccatcaattcgatgtttttctctttttcttcaattttttgcgttaaaagttgacgagggtctcgctcggaaaaatacacgacgcccagcgttgttggcccgctttggttcgctgatcgacaagcctcgacgatgtgcatgataaatcacccaccgtcacgatattgccgcttcactcatgacgcttccattcgctgcacacggtccacacgcaaaatgacaacactgcgtagaaagtgaccacggatgcgttattattcagtcaaaatcgattttagtaccccctccccgtccgtctgcggatgccggtggtgtccccagtcaaggtccggttaagtacccgaaattggcccgggccccggatcgcgacctttcacgctccatattgcacttgggtggattttgctacattccgacccccccccctgccccgggcccccctcttaaaattatcgggttccgatgcgtatcgcagtttctcttccgagccctctcgctgcgggaggatgtattccgaaaacctcttctgcccatcgttttccatccgccttattttccttg

SEQ ID NO: 5422 - DNA, 513 bp, Glycine max
  Probeset Number=SeqID_15201
atttcgaggctcttgcggcacaagaagccacacaaagatgcagatcttcgtgaaaaccctgaccgggaagaccatcaccctcgaggtcgagtcctccgacaccatcgacaatgtcaaggccaagatccaagacaaagaaggtatccctccggatcagcagcgattgatcttcgctggaaaacagctcgaagatggccgtactctggctgactacaacatccagaaagaatccacccttcatcttgtgttgaggcttaggggaggaatcatcgagccttctttgatggcgttggctcgcaagtacaaccaagacaagatgatctgccgcaagtgctatgcacgtcttcacccgagggctgtgaactgcaggaagaagaagtgtggccatagcaaccagttgaggcccaagaagaagatcaagtagactctgttcaaggaactatctgctggcttgcttgactcttttttttctttgcctcatctcttttgttttgacacaaacacgttctgtgg

SEQ ID NO: 5423 - DNA, 297 bp, Glycine max
  misc_feature (26)..(26): n is a, c, g, or t
  misc_feature (242)..(243): n is a, c, g, or t
  misc_feature (262)..(262): n is a, c, g, or t
  Peptide Sequence Number=SeqID_8896
  Probeset Number=SeqID_15202
aatacaatagtgctctcacccactcnccttgctttggctctcacaagatcgagtctttgaaggttggagagagaggttgctttgaaagtgtgtgaggaggagaaatggctttagagtacgatcttctgaatgaaaacgtgaagaagtgtcagtatgctgtaagaggtgagctctatctccgtgcttctgagcttcagaaggaaggcaaaaagatcattttcacaaacgttgggaaccctcannctttaggacagaagcctcncacttttcctcgccaggtggttgcgctctgtcaag

SEQ ID NO: 5424 - DNA, 1377 bp, Glycine max
  misc_feature (5)..(5): n is a, c, g, or t
  misc_feature (114)..(114): n is a, c, g, or t
  misc_feature (608)..(608): n is a, c, g, or t
  misc_feature (876)..(876): n is a, c, g, or t
  misc_feature (893)..(893): n is a, c, g, or t
  misc_feature (896)..(896): n is a, c, g, or t
  misc_feature (931)..(931): n is a, c, g, or t
  misc_feature (934)..(934): n is a, c, g, or t
  misc_feature (936)..(938): n is a, c, g, or t
  misc_feature (946)..(946): n is a, c, g, or t
  Peptide Sequence Number=SeqID_8897
  Probeset Number=SeqID_15203
catcnctagacacctcgttcgctcatatcgtgagaggttcagggtcgacacggccgtgctgcacacacattcttgctgcaccgagagtcatatactgtctcatctcccgacgcngtcttagacacatagtctctatagaacaggcttgtatcatgtgctggagatcaggaggcgtctgttggtgtagataatgcgcgaatagcccacgctcgctggcggatatgatggacatgagtgatggcgaaaagaagacaacgacggtattgacagtagccaacgagaccgacgagaacacagggaaggacagaacggagcttggcacctagccccaggagagaagtatagaaggagcggagacggaggggacgacgaacagacgacccgcgtcattattcgtgtactagctagcgtgtgaagttgctctctgattgggcctaccaccctctagagggtcgtgggttgtccgcgtacgcgcactattgttgcaacattacgaatatgttgtaacgagaatataacaagtggtcgtttgctgtagtagagtatggtgtggcgttgcatgtgtgcagacaaacaccagacgcgtggagccccctaaccgcagacanacagcataacgggggggttcactacgagctgaaactaacgcaaagccacacgcccaggccgcggccacgcggaaacaaaaatacatattaagtacgtgtctattcgctctctctccctccaaccccacagcccgtgcctcgtccgcccaccgaggagcggttatattttttcgatatttgttatgtgatgctcttgtgctgtcggcgcttgtatatcagggaagagtgtaaacgatttatcttatagcccctttcttctgtaccgccnccacaacccccaccggnggnggcgaccgccgcccgtgtggtatgaaatgagacancgnannnttccctancctattgagtggcttgcggtctcgcacaaacacaatacgaaggaggtaggcggcggcagggttattatttagttggattgtggtcgccgatctctccactacggacgggatatatgccgctcctctggctgttctgtcgtccctctcattgtctttttcatcttagcttattggattgtatcgtgatcgcgcgtccgccccactcatccgctcttcctcttcccaactctcctcttaacggtctccgcacaaatcttcgcttcgagccgaatatcgctcggcacactataagctcgcgacaatcgtctgccgtctgtgtgggatttggtcttgtaggtaaagtgggataaaatattataaaataaaaaaaattagggggtaacaccagtaggttaggattgagaaaggaaggagaaggataaagaaaaaag

SEQ ID NO: 5425 - DNA, 545 bp, Glycine max
  Peptide Sequence Number=SeqID_8272
  Probeset Number=SeqID_15204
agcctacgtgacattgatcttcttgtattcgcctgccaaaaggctgtatcaggagatacttacacgacgctatcactcgacgatgaccgctcctcctattccctcttagccaccgactgggactcccggtccgcctccgtgaccgcccctatatccaagaagtccaacgctttcgacgaggagtctgagacagacagagaggagtctgatgttagcggctccgacagagatgacacatactggatcttgtgattctgcaatttgagaggaaatgagttcttgtgcgaggatgatgacgattacatccaggacgacttcaagctgtgtggattgagcagtctggtgccttactatgatcatgctctggatttgattttggatgttgaatcgtaccatggagacatgtttaccgcggaacagagtgagttaattgaatcagcagccgagatgctttatgggctgagtcatgcccggtacatatggacaagcaaaagaatggcttggaatgcctggaccagtccgaaaactatgattttgggagatgc

SEQ ID NO: 5426 - DNA, 1554 bp, Glycine max
  misc_feature (21)..(21): n is a, c, g, or t
  misc_feature (47)..(47): n is a, c, g, or t
  misc_feature (106)..(106): n is a, c, g, or t
  misc_feature (201)..(201): n is a, c, g, or t
  misc_feature (245)..(245): n is a, c, g, or t
  misc_feature (338)..(338): n is a, c, g, or t
  misc_feature (384)..(384): n is a, c, g, or t
  misc_feature (651)..(651): n is a, c, g, or t
  misc_feature (728)..(728): n is a, c, g, or t
  misc_feature (840)..(840): n is a, c, g, or t
  misc_feature (846)..(848): n is a, c, g, or t
  misc_feature (862)..(862): n is a, c, g, or t
  misc_feature (1022)..(1022): n is a, c, g, or t
  misc_feature (1028)..(1028): n is a, c, g, or t
  misc_feature (1052)..(1052): n is a, c, g, or t
  misc_feature (1070)..(1070): n is a, c, g, or t
  misc_feature (1187)..(1187): n is a, c, g, or t
  misc_feature (1213)..(1213): n is a, c, g, or t
  misc_feature (1224)..(1224): n is a, c, g, or t
  misc_feature (1226)..(1226): n is a, c, g, or t
  misc_feature (1238)..(1240): n is a, c, g, or t
  misc_feature (1251)..(1252): n is a, c, g, or t
  misc_feature (1257)..(1257): n is a, c, g, or t
  misc_feature (1259)..(1259): n is a, c, g, or t
  misc_feature (1318)..(1318): n is a, c, g, or t
  misc_feature (1320)..(1320): n is a, c, g, or t
  misc_feature (1365)..(1365): n is a, c, g, or t
  misc_feature (1420)..(1420): n is a, c, g, or t
  misc_feature (1426)..(1426): n is a, c, g, or t
  misc_feature (1428)..(1429): n is a, c, g, or t
  misc_feature (1487)..(1487): n is a, c, g, or t
  misc_feature (1512)..(1512): n is a, c, g, or t
  misc_feature (1517)..(1521): n is a, c, g, or t
  misc_feature (1525)..(1525): n is a, c, g, or t
  misc_feature (1528)..(1532): n is a, c, g, or t
  misc_feature (1536)..(1536): n is a, c, g, or t
  misc_feature (1547)..(1547): n is a, c, g, or t
  Peptide Sequence Number=SeqID_8273
  Probeset Number=SeqID_15205
cgagcgcgtggggagtcatgnacgagactatattgctgcgatctgtnctcgctctgcgcacgtcgctctctggtgctatgatattggtatgcgggctgcggtgtantatgactatgtgatgtgtcttagatgcgcgtagccaatgtttccgtgcgaggtggggcgcggataaggctgtgtgttgcgagagttggtcgcatngtacttatcgagtggtcaatgggtcgcgtagtcgatagaggtcncacagtcactggcagtgtgtgttgtcaccgtgcgcgatattatgtatactgcattagtgttggatagtgatacgtggcgtcgtcatctgaccncgtcccagactctatgcgcgtgcttggctgtacttcagtgtagtgnggtggtggggtgtgtgcactagtcgctggcatggcacgagcacgaggatgtgtccagtacacgagcatagtagcatgcagtagtagagcgagcggcgactgtcatgggagtggcatcgtgctgtgttctattcgcaggtcactagcacgtactggtgtaatatatatgtatctatactttactacgcgatgaagagtacagggcgggtcgggggcgctgtctctgagcatgactcactcaagctctatactaccacacgctctagantaatatcgcaggagactagataagtatgcgcttggccacaccactcatcatcacagagtagagaagctaagacgaancttctgtattgtattattatttacttgtatagtagtgattagcacgcgatagagtagtacgtcttgtcattctctcgctcttgttttatcttctcatttcatactatgtctntttttnnntcccatcaccatcnttatgtaggcgcttcctctctacttattatgcatgtgggtgtcggatggcgagtccagtggcgtacatgatatagactgcagaggccagttctttctctcctttcttctgttcgcattcatagttcaagcatcgcgcacgcaggcgggtaacgcacacanctcatntgatgagtaagacacacaccgcancgcaagacagtcgttcgnggccacgttcgagcgcgcatactcgtgtcagttagctctcatgtggtgtctgattcgtcttccttctctatcatgttgtgctaatagttgtgtgactacatatatttctatcatttnggtgtagtgttatcgtcgctataacncaagcgccagncnatcacgacacannnccactcccgcnnggtantncagcctcactttcctacaccacacatacacatatttcttgtttagatcgtcttatatcntngtttctacttctctcttcctgtaggcaactacagaagtggaacanaatataaaaaatagaacctctatcatatatcagaacgttgcaaggcgatcagagnggtggncnnggcgcccctttacttattctcatctcctgctctgttgggggctggggcacatgtagancttccactcgggcatataactacanccacnnnnngcgnggnnnnngggnggggcaccacnaacacac

SEQ ID NO: 5427 - DNA, 1751 bp, Glycine max
  misc_feature (1)..(1): n is a, c, g, or t
  misc_feature (18)..(19): n is a, c, g, or t
  misc_feature (23)..(23): n is a, c, g, or t
  misc_feature (39)..(40): n is a, c, g, or t
  misc_feature (51)..(52): n is a, c, g, or t
  misc_feature (128)..(128): n is a, c, g, or t
  misc_feature (133)..(134): n is a, c, g, or t
  misc_feature (154)..(154): n is a, c, g, or t
  misc_feature (168)..(168): n is a, c, g, or t
  misc_feature (289)..(289): n is a, c, g, or t
  misc_feature (352)..(352): n is a, c, g, or t
  misc_feature (443)..(444): n is a, c, g, or t
  misc_feature (558)..(558): n is a, c, g, or t
  misc_feature (601)..(601): n is a, c, g, or t
  misc_feature (734)..(734): n is a, c, g, or t
  misc_feature (863)..(863): n is a, c, g, or t
  misc_feature (984)..(984): n is a, c, g, or t
  misc_feature (1006)..(1006): n is a, c, g, or t
  misc_feature (1055)..(1055): n is a, c, g, or t
  misc_feature (1127)..(1127): n is a, c, g, or t
  misc_feature (1136)..(1136): n is a, c, g, or t
  misc_feature (1210)..(1210): n is a, c, g, or t
  misc_feature (1537)..(1537): n is a, c, g, or t
  misc_feature (1647)..(1647): n is a, c, g, or t
  misc_feature (1671)..(1671): n is a, c, g, or t
  misc_feature (1716)..(1716): n is a, c, g, or t
  Probeset Number=SeqID_15206
naaatattttttttgttnntatnttgtgttgtgtttttnntctctttttanntacaacaacacacctattacattaacttacagagacgttcatctctttatctattgtattatcccaccccaccatnctccnnccccccgcccccgcccgccnctcaacacccctantagtgttgcgtggttattagagatatatcatctccatcttctacgatccgcctctctttctctatattttaaactctctactacacacaccccaaccatcacagagagaatatatagtcanaatataaataggtataatgcgtcgcactacactgtgtgtctcgttcttgttgttgtcgttgtngggctggatacgcagcagaggctgctatacgccaacgatgtcagcatcttctcatcatccgttccgctcctctctatctctctccttcaanntctctggtattactacgtatatactactctggatgcccacgatcctcagcgcatgtttgatactactccctcactcgtctcattattctcatacacgctttgtatggttgtaanctgtgaggagcacacgtctactcgctcgcctccacctccgttnttctagatctaccacaacgcaccgctctaccgtgactaggtgactgagtcatgtctgtccgccgcatcgtgcgacgactctctaatctctctgactctatcgtgctcaagccacacgcgcccgctctacacgnccgctgcaccgtcgacgtttatgtatatagagaagtcagtgatatatatattgcacgtggtcgtcgtcggtctcgtgtatgtttatgtaagatgtaattgattcttctgtctttaatcaaaatataatnacatcgaaaaccagaccatactatgagcatcgttagcatcgctgcactcgccgaccgccacaccatctccgcgtatctgtaccacctcagtatgagaattaacgccagtactctcacaccnctcacctcttcactactcctcnctcttctctgctctctacgccaccgcctctcaatgtgttgtattattantgagagctaatgtacagctttgcgttcgcgcgctccctcttcttcttgcgcgcggtcatattgttgatgtgncttcgtacnatcaactagaggtatatgtaccactccatgcacctgtctcacaatatgtgagtgtgccatcccgcgcgccgtcncgtgcggcctcactctctatacacgccaccgcgcgcctcgttacacatagcttaagagccctcgctctcctcatcgactctctccatcttctcatgctcctctctatcattctctatgtctgtatattgcttccacttctgacgcgcctatctcgtgtgtcgtcgtctcctatactgattctcgccgtatacagtgatcggctgaggatagcgtacgacatgaaccgacatgacacataagacacaatccatctactctgcattacactcgtacacaatacacacacctatctcttatatgtatatatctacgcacacacctgactncgctacaaggctcgagtgtgattgctgtcggatcgttgcgcgtgctactgcatctctgcatagcagtgtagcgtgtaatactggcgatcatgcacgccctgcgccagtcnaccacttcatgcgctgctactacntcctagctgacatcgtcacacatccatcttatacaggtcagaagntatgatgtcgcgctgtgcgcgccacgctctcgacg

SEQ ID NO: 5428 - DNA, 734 bp, Glycine max
  misc_feature (1)..(133): n is a, c, g, or t
  misc_feature (734)..(734): n is a, c, g, or t
  Peptide Sequence Number=SeqID_8274
  Probeset Number=SeqID_15207
nnnnnnnnnnnnnnnnnnnnnnnnnnnnnnnnnnnnnnnnnnnnnnnnnnnnnnnnnnnnnnnnnnnnnnnnnnnnnnnnnnnnnnnnnnnnnnnnnnnnnnnnnnnnnnnnnnnnnnnnnnnnnnnnnnnnnacccgtctggctgctcgtattatccggatccggggccccccagccactgctctcgttttcgcatctcgcaacatggtcggctccggggcctggcgtgtgccccagtcggctggggcggcttgcatgttcccttggtgctttctcaagcttggttccccagctgtttccagggcttttctgccgcaggacgctgccggctcttgtgttgcctagttccccctccggcttgagggtcctgcctggtcccatggtgcgtgctcaggctttcaccccctgcggtttcctggaccccgcgctcgctgggtgcagcccaagccagccttgcttgtatttctcgctggagcaggtgctctggctgggcccaggggttcgggggactcttactctgctgtcgagggcttttatccagtgcgttctgagttcaggacagcccttcgtggtgcccctcggccttgtgtgctggagctggcctggtgtggtctggtggcaggaagaccagagatagaaatatctgtaatctggattgagttttaataagacacctgtgtttgttctgtctttttctctcttttaagaaaagggatcctgctttagtaaagtn

SEQ ID NO: 5429 - DNA, 1342 bp, Glycine max
  misc_feature (1)..(28): n is a, c, g, or t
  misc_feature (47)..(47): n is a, c, g, or t
  misc_feature (49)..(49): n is a, c, g, or t
  misc_feature (57)..(58): n is a, c, g, or t
  misc_feature (299)..(299): n is a, c, g, or t
  misc_feature (417)..(417): n is a, c, g, or t
  misc_feature (438)..(438): n is a, c, g, or t
  misc_feature (475)..(475): n is a, c, g, or t
  misc_feature (512)..(512): n is a, c, g, or t
  misc_feature (534)..(535): n is a, c, g, or t
  misc_feature (583)..(583): n is a, c, g, or t
  misc_feature (605)..(605): n is a, c, g, or t
  misc_feature (607)..(607): n is a, c, g, or t
  misc_feature (614)..(614): n is a, c, g, or t
  misc_feature (632)..(632): n is a, c, g, or t
  misc_feature (675)..(675): n is a, c, g, or t
  misc_feature (690)..(690): n is a, c, g, or t
  misc_feature (700)..(700): n is a, c, g, or t
  misc_feature (702)..(704): n is a, c, g, or t
  misc_feature (706)..(706): n is a, c, g, or t
  misc_feature (713)..(713): n is a, c, g, or t
  misc_feature (725)..(725): n is a, c, g, or t
  misc_feature (803)..(803): n is a, c, g, or t
  misc_feature (807)..(807): n is a, c, g, or t
  misc_feature (833)..(833): n is a, c, g, or t
  misc_feature (835)..(836): n is a, c, g, or t
  misc_feature (860)..(861): n is a, c, g, or t
  misc_feature (882)..(882): n is a, c, g, or t
  misc_feature (900)..(900): n is a, c, g, or t
  misc_feature (929)..(929): n is a, c, g, or t
  misc_feature (943)..(943): n is a, c, g, or t
  misc_feature (973)..(973): n is a, c, g, or t
  misc_feature (985)..(985): n is a, c, g, or t
  misc_feature (995)..(995): n is a, c, g, or t
  misc_feature (1028)..(1028): n is a, c, g, or t
  misc_feature (1034)..(1034): n is a, c, g, or t
  misc_feature (1065)..(1065): n is a, c, g, or t
  misc_feature (1067)..(1067): n is a, c, g, or t
  misc_feature (1078)..(1078): n is a, c, g, or t
  misc_feature (1104)..(1105): n is a, c, g, or t
  misc_feature (1123)..(1123): n is a, c, g, or t
  misc_feature (1146)..(1146): n is a, c, g, or t
  misc_feature (1159)..(1159): n is a, c, g, or t
  misc_feature (1170)..(1172): n is a, c, g, or t
  misc_feature (1231)..(1231): n is a, c, g, or t
  misc_feature (1239)..(1239): n is a, c, g, or t
  misc_feature (1241)..(1241): n is a, c, g, or t
  misc_feature (1292)..(1292): n is a, c, g, or t
  misc_feature (1338)..(1338): n is a, c, g, or t
  Peptide Sequence Number=SeqID_8275
  Probeset Number=SeqID_15208
nnnnnnnnnnnnnnnnnnnnnnnnnnnnaatattcttccccccacananctcctccnnaaaattagataggggaggggagccctccccccgggggacggtgtcgcctcctagtagatggaggggatacccccggggggatgcggggagtgctctttcttattctccactccgtgggtcgtgagtgcatccttgcgcctagggagctctctaggacccccatggtagtaggaaaggttagtttgcatcatgatgttctcttagtccctccgagctcggctagggcagacgtctactcggncagaggttacagagaggagattagttctggcattatgcgttattcgcacttatcagtcataagaagtaccccggcaccccccagcgctatggcccacccagacttgatttgtagctgntgcaacttccctactcagggncccttatccacacgaagttagcagtggggcctccgcnagagctcctcgtgcagagggagggaggtctgtgcctntatactcctcacttcacctcannagtctattcctcgcgcctgccccgtgtcgctacagcagcgccttgagngggcatttggtcttgcttccanangagaagntagagcatgtgttggggngtgcgtgtcttacctaggcttcgcgcgtatgtcggctctcggnagccaagactagggngaaacgcgcncnnngntcgctantgtcgactctantgtacgttgccgtgagtcccagagacgacagaggtggtgtggtctcctaagaagacggccgcgaaggttcctcttcanagangaaggtttccgtgcgtatgcggttgntnntagaagcgcgttaccgtcccctcnngtagagcgtgcctggcgagtngcgagtgatcggtgctgngtctccctctcctcgcccgcgaagcagcncctcgtttggcgcnagactctcgtgccgtgcacttcgctgcgcnctcgcgaccganctagaaaggngatttttcatcctcacccgtctcaggtaatcgnttcggnccgcgagttctcatcggggaggatatacggngngagagtggcgncgctctccgagcgaaagccggtcagnnaacacaccgtcgtcctcntgtctccgctgcttcgcgtgaanaggaggcgcgcgnatgaagaggtnnngcctgcgctgagagcggcaaaggcgcataatcatgtatcgcgcggctcactatatgtgntgtcttanangtatttgtatatggatactaacacaggagagaactccgcgagtcagctccnctccgctcgagtgatctacgctgcatatgtcgtgagaggcatgtgnagag

SEQ ID NO: 5430 - DNA, 1679 bp, Glycine max
  misc_feature (11)..(12): n is a, c, g, or t
  misc_feature (197)..(197): n is a, c, g, or t
  misc_feature (314)..(314): n is a, c, g, or t
  misc_feature (318)..(318): n is a, c, g, or t
  misc_feature (321)..(321): n is a, c, g, or t
  misc_feature (323)..(323): n is a, c, g, or t
  misc_feature (330)..(330): n is a, c, g, or t
  misc_feature (367)..(367): n is a, c, g, or t
  misc_feature (373)..(373): n is a, c, g, or t
  misc_feature (395)..(395): n is a, c, g, or t
  misc_feature (509)..(509): n is a, c, g, or t
  misc_feature (517)..(517): n is a, c, g, or t
  misc_feature (541)..(541): n is a, c, g, or t
  misc_feature (778)..(778): n is a, c, g, or t
  misc_feature (780)..(780): n is a, c, g, or t
  misc_feature (879)..(879): n is a, c, g, or t
  misc_feature (1086)..(1086): n is a, c, g, or t
  misc_feature (1198)..(1198): n is a, c, g, or t
  misc_feature (1218)..(1218): n is a, c, g, or t
  misc_feature (1244)..(1244): n is a, c, g, or t
  misc_feature (1248)..(1248): n is a, c, g, or t
  misc_feature (1254)..(1254): n is a, c, g, or t
  misc_feature (1438)..(1438): n is a, c, g, or t
  misc_feature (1478)..(1478): n is a, c, g, or t
  misc_feature (1541)..(1541): n is a, c, g, or t
  misc_feature (1543)..(1543): n is a, c, g, or t
  misc_feature (1550)..(1550): n is a, c, g, or t
  misc_feature (1557)..(1557): n is a, c, g, or t
  misc_feature (1576)..(1576): n is a, c, g, or t
  misc_feature (1613)..(1613): n is a, c, g, or t
  misc_feature (1626)..(1626): n is a, c, g, or t
  misc_feature (1665)..(1665): n is a, c, g, or t
  misc_feature (1679)..(1679): n is a, c, g, or t
  Probeset Number=SeqID_15209
gtgggtaggtnnatggagtagtgcgagcgggggcgccggtagcagcagatgcgggccgcgccggcgtgcggtgtgggcgaagagcgatgtgctggaggtgatcgtacgcacggagaagacgacgcgcggcgatggaagagtaggagagggatgcgatagagtgaagctaggtaagataaatatcatcggtatatatntatattctgttcttcttctaccacatgtcgtgcacgcgctcagtagcagcaaataagagagaggggcagacgatgtggcgcggcgctgtatgtgtgtctgtgtctagagcgtgtaantctnaananggacganctgtgtcactccctctttctgctcggctctcctaccncacatngtgtgacacatacacatctccncgacaacgaacatcacaacaccacatcatctctacttgacagataatatataatataaaaaggacatacatggatatattcaatgacatgaaaataacgacgagagcgcacacncagcaagngcgcgccgcgacgccgggcgcagnagaacagaagctatcaagcgcgcgcagccgcaacgacgacaccgtctacaagatggcgcggcgatggacgaggcggcgcgcgcgcgcgcctctccagctgtgcgtgttgggcgtgtcgtgtgccgcgagggctgtgccgcgctgcgacgtgcgtcgtgcactacctcgctcgggtcacgcgacctaggctgaagatgcagggccacggcatacacatctgcgagtgtgagggtctangngcagatgtgttctatctcatcgatgtactagagtgatttactggcgctggtctatcggtctcctacataattataatatcgcacacccatacgcccacntccgtgagccaccgacgcgtctgcggtgtgtctagctgctcgccgcgatacgccgcgctgctcgtgtgagcaaacacggcgctcagctgagccgtccacatatacatatctgctcgtcgtcgctttcttctctcgtcgacgatctgcgccgactacgtcctaagcagctaccgcactctcctcgactcgactagataccgtctcatncgtctatacgacacatctgcgcgtcgatgcgatgatcgtgtgagaggacgatactatgagactatacagagatgagttatcgcgagagctctatctgtgttgtggatgtgantaatatcgagtcacgctacnccgtacgacatcgtgagtctgcaatnatcngtatangtacacgccacgtcgctcctcacagccgataactgcgtgacgtgctgtgctatgcgtctctgcatgagctccggcatctcgtcatacgctctctcgcgtctgcgttatactgatctagtcatagacatcatactccgcgcgtgctcgtgtggcgcgcctgccgcgcgatgcccacatcacacancaccactcactacgtcagcactcgacgcatatatatcgcngattcactagtcgatgatctcatatagtacacgagcgtcggctgagaacagcgctgcgggctngnaccgcanctgacanggaccgtacgctgcacttncgtcatatcgactgatacgtattcgttcatactgcantgctgtgcgtgtncagagtatgacctcatcactaccatatttctctacctcntacttctctaccgn

SEQ ID NO: 5431 - DNA, 545 bp, Glycine max
  Peptide Sequence Number=SeqID_8276
  Probeset Number=SeqID_15210
cggtgacaggagtcttcactccttcgacgcaattccgagatggctttcatggcagtcttggaatccgaccttcgcgctctctccgccgaagctcgccgtcgctatcccactgttaaagacggcgcagagcacgccatcctcaaggttactcttcgccgctcatgtttcatttcccttcagtgcttttcaactgcatctggttttagctctttgtgacctccgagatgcttctgctttgcgattcgattttggaactgattttaaaggaagaaaatgtggctgtatgaatttcaatttccacttataggctagtagatcatcacaactattgaaatggtgtcactggattgaaatgttggagttagtttgaagtaacctcaatgcttcgcgcttggatactcggaaaatgagaacatgttatttattttattttttttttattttgaatgatgctcgaatcacaatgtcaaggaagcatgtagaagtgtaatgatactgataataagaaattttagaaagatacttgtatgtgcgttttttttttt

SEQ ID NO: 5432 - DNA, 2017 bp, Glycine max
  misc_feature (1)..(1): n is a, c, g, or t
  misc_feature (4)..(4): n is a, c, g, or t
  misc_feature (99)..(99): n is a, c, g, or t
  misc_feature (106)..(106): n is a, c, g, or t
  misc_feature (109)..(109): n is a, c, g, or t
  misc_feature (116)..(116): n is a, c, g, or t
  misc_feature (168)..(168): n is a, c, g, or t
  misc_feature (175)..(175): n is a, c, g, or t
  misc_feature (180)..(180): n is a, c, g, or t
  misc_feature (222)..(222): n is a, c, g, or t
  misc_feature (293)..(293): n is a, c, g, or t
  misc_feature (389)..(389): n is a, c, g, or t
  misc_feature (437)..(437): n is a, c, g, or t
  misc_feature (483)..(483): n is a, c, g, or t
  misc_feature (535)..(535): n is a, c, g, or t
  misc_feature (537)..(537): n is a, c, g, or t
  misc_feature (597)..(597): n is a, c, g, or t
  misc_feature (677)..(677): n is a, c, g, or t
  misc_feature (687)..(687): n is a, c, g, or t
  misc_feature (708)..(708): n is a, c, g, or t
  misc_feature (731)..(731): n is a, c, g, or t
  misc_feature (827)..(827): n is a, c, g, or t
  misc_feature (829)..(829): n is a, c, g, or t
  misc_feature (1133)..(1133): n is a, c, g, or t
  misc_feature (1180)..(1180): n is a, c, g, or t
  misc_feature (1243)..(1243): n is a, c, g, or t
  misc_feature (1347)..(1347): n is a, c, g, or t
  misc_feature (1386)..(1386): n is a, c, g, or t
  misc_feature (1439)..(1439): n is a, c, g, or t
  misc_feature (1459)..(1459): n is a, c, g, or t
  misc_feature (1478)..(1478): n is a, c, g, or t
  misc_feature (1481)..(1481): n is a, c, g, or t
  misc_feature (1489)..(1489): n is a, c, g, or t
  misc_feature (1511)..(1511): n is a, c, g, or t
  misc_feature (1527)..(1527): n is a, c, g, or t
  misc_feature (1635)..(1635): n is a, c, g, or t
  misc_feature (1802)..(1802): n is a, c, g, or t
  misc_feature (1865)..(1866): n is a, c, g, or t
  misc_feature (1870)..(1873): n is a, c, g, or t
  misc_feature (1877)..(1879): n is a, c, g, or t
  misc_feature (1882)..(1882): n is a, c, g, or t
  misc_feature (1945)..(1945): n is a, c, g, or t
  misc_feature (1949)..(1949): n is a, c, g, or t
  misc_feature (1954)..(1954): n is a, c, g, or t
  misc_feature (1964)..(1964): n is a, c, g, or t
  misc_feature (1985)..(1985): n is a, c, g, or t
  misc_feature (1989)..(1990): n is a, c, g, or t
  misc_feature (1993)..(1993): n is a, c, g, or t
  misc_feature (1997)..(1998): n is a, c, g, or t
  misc_feature (2001)..(2002): n is a, c, g, or t
  Peptide Sequence Number=SeqID_8277
  Probeset Number=SeqID_15211
nagntgtgatcgagcgcagtagtgtagacacgtagatgatgactgatatacgatgaacctgctgtcactgtcgtagcgacgacgagtcgttcgtaggcnagcttancancggcganaatagcatgtcattatgctatatgatcatctacgtgcgcgcagacgcatacnagtgtcncagcngagagtagcagagacgatcgcagcgacatacataggcgcatncatgagcgtagcacagcgcgacgtatcagtgactttctcattgagcaaggagccgcactgttcagtggtcnttatgacatgaggcaatatcacgtgatcatataccgtcaatatagagcatatgatcgatgtcgcggagacgagcatcagagactagcagagatgangcacagagtcgcagtgtatacgtatcattcacgtcatcacacggagtnagctgtaagtgtataatgcgcacgacgagatacacaatgtcagatntatagtatgtataggtcatgcatatatgagtgagtaacgtagtatgtgagtngngtgctgcgggcgagtgagtgtatcagatgtacacagagtacgtgcatggctcgcatctcnttgggcgttactacatatcacgtctcgtacgttatagcattacgcactcacagcgcgcagtcggatgactgtcatacacnacatctctantgatgaagtgcgtagatgatngcgtgagagtaatggtcagtacntatctgtagtattgaggtatctacattcactcacatgcatgtatgcgtgctgtatcagatgcgtcgtgcgtgcgcattgatatatgtatatacttncnaattatgatatcacttatgatatatcgtgtgcgcggagctcttattgtatcacatcattatgtacaatacatatatacacataggtaatattccggtatatatgtctcggtccttatcataagtatatagtgtgtgtagtgtgatgttgcattacgtcaacgatgtatgacgagtgagtgcggtatcacacatatcactgtgttcctgctcatatgactggttgttacatatctatcagtagtatgactgctcgcgtcagtgacatgtcgtgtgtgctagatcatggagttagttgtagtactntatctttatactcgatataatagtgcagtgtggagtaccgctgaatnaataccacgtcgaatgactctcacagggtacatcactgaaggagacgtgtcgtgcgcagtagncgagatagtatcgatatcgtgtccacgagcctagcgtatatagtaatgaatgttgttcatcgtcatcgatttagcaactgcaagcgagtatcgtatattatatnagtagtgatcgatctattattattaatctatgtactcanaatatacgttatagttaaagatgagtattaatatagtatagcgagagccggancgacgttatatcacgatatngatgaatgagcatcatcgnagncacagctncgacgctatgatatatgtcgcntatataaagtgattanatgatagatagatattgtatgctactataggagcgaatgtctctggtagatagatagtgtgtagtttctcttatgtatctatcatcagcgtagttataatacacaaancatacaggtggacgaataagagtgatagccaataggatatataccaatcatatatagagtgatgtatataaatctccttattgtctaaagtactatgctcatcgcataggcgaggtctgatgtgtaacacgcgcgttgcgacctaggcgatatgtgtcgtgtgtatntttatatactatcgtccagtcgattgttatgttagtgattattatatcacagagagagggaanngtgnnnnctannnaancccatcggataattattatagaacatgattatgaaattacacgctagatttaataacacctanaagntggtnatcctactgnttctatagatcataaccaacnctannaantaannacnnctacccccaccccca

SEQ ID NO: 5433 - DNA, 613 bp, Glycine max
  misc_feature (81)..(81): n is a, c, g, or t
  Probeset Number=SeqID_15212
agctcaatctggcgcgcgataccagcggtcgatccagtcatattgtcggtttcttcgccgacctgacggcgcggcgcgagnccgaggagcgcctgcgctacctctcgcactacgacgacctcaccgggctggccaaccgcagcctgttcaaggagcgtctgcatgaagccagccagcgcgcacggcagagtggccgcagcatcgccttggtgcacatcgatctggatcgcttcaagctgctcaacgacagcctcgggcatgaggtggcggaccagttgctgcgccagataagccgccgcctgacccagaccgtacccgaggccgactgcatcgcgcggctgtcggctgatgaatttgccatcatcctcgatgcctatggcagcctttccagcctggcacgggtggccagtcggctgctggccaagttgcgcgtgccgatgaccgtcggtggccacgagctggtgatcagcgcctcgctgggtatcagtctgctgccggactacgcccgcgagatcagcgcgctgatcagccaggccaacatggccgtgcaacacgccaagcacctgggcggcaacaccttccagttcttcaccgacaacctgcaggcatgcaa

SEQ ID NO: 5434 - DNA, 1362 bp, Glycine max
  misc_feature (21)..(21): n is a, c, g, or t
  misc_feature (33)..(33): n is a, c, g, or t
  misc_feature (60)..(60): n is a, c, g, or t
  misc_feature (83)..(83): n is a, c, g, or t
  misc_feature (111)..(111): n is a, c, g, or t
  misc_feature (132)..(132): n is a, c, g, or t
  misc_feature (167)..(167): n is a, c, g, or t
  misc_feature (193)..(193): n is a, c, g, or t
  misc_feature (271)..(271): n is a, c, g, or t
  misc_feature (710)..(710): n is a, c, g, or t
  misc_feature (780)..(780): n is a, c, g, or t
  misc_feature (783)..(783): n is a, c, g, or t
  misc_feature (868)..(868): n is a, c, g, or t
  misc_feature (957)..(957): n is a, c, g, or t
  misc_feature (1090)..(1090): n is a, c, g, or t
  Peptide Sequence Number=SeqID_8278
  Probeset Number=SeqID_15213
tgaagtatgagctttgccttnattactacagantagataacgtcgttagtcatattgatncgtcattatcagctgtcagatanatcatgctcgagctataccgcacgagcnctcgactccggagagatgggngcgatggaagacatgtcgcagtatgagacgtccgncgcgcacgcgctacgctcactactangacacagacatagacacggaggagagagaacagagatattcacctgggtagtcagacagtgtcaggcaggcagtatgngtcggacagacgggagcgacatagatgttgatagtaccgcgacatttacgtaatcatgatcgagcatgctaatgcgcggactgagagatcgtcatgcagcagtgtattgagacgtcattgaggtcacaacaaatgattaataatatcagcgaccatccggaagatcatcgcacatgtgatatcatattcatatctagcaggaaggcgacgagcgtatatgggcgatagtgaagcaactaatctatgatttaatagatgtatgtcgatacatgagttatggaggtgtaagatcaagtagcagcgttaaacatgaggacacccaccacgcgggggtgcggcgcccacactccccacaataccctagtacacacccagctggtatgtaagcagcgtgtctagcggaaccactcgtgacgacatcgaatgatacatctatatnctataccatagggagagtaggagatgagagacaggacgatggcatcaccgactcaccacctacctatgantgntcctctaccctgagagccatacgagcatacataaactgacagcgtcagagaggtcaggtcgtaccatgcgtggaagaatctagtnagtgcactattgctctctatcaaggcgaagatgagtctatagcaagtcgtgcgagtagagacagcatgagattcctacatcgagagtgncgctcaagtgaactgagctatacgagagacacactggcatgcgctactgcacggcgcgctagtgtgctactatttctcatcccggagagaacacttagagtgttctgcagcacgtatgcgacgtatcctcgtnagcaagtcaatagagagaacctctgatttgtgctcacgctccacgtaagacacgggatggctgggctacagccgtaacacacaagcaggaaaggcagagagcaaagacacagccattcagaagccgccccgcatcgccgatagcagcatacgtgccaaaatccaggacggggccgcgcgacgcccgaagctagttggtatttatcttgtggtggtccaagttaatcgccagcgtgaacagaacccgcaagtacacaacgggggggggaccaa

SEQ ID NO: 5435 - DNA, 747 bp, Glycine max
  Probeset Number=SeqID_15214
aacatcctaatcgaaaaatctttttcaacaaccttatcaacaatgcaagagcttcatgaagcggcaattgcttattacaacaacggctccacggatcaacagactttggcatggcagtttttctgttcaatggacggtgacggtaatggccgtgtcagctttcgagagtataccgacttcttgtgtagaaccaccggtttcgcttgggtccatagcgagatgtttcaggagctcgaccggaatagagacggccagcttgacttctgggaggtcttgacgctttactatgtggctcggacgcggaccattggctgccgcacgtgcctccagcctctcattggtttgtactttacgtgtgtaacgtgctttgaatcgcaatgtgttggcgacacgtttgatctctgcgtcaagtgttatatgcggcggaattataatcatccgcatcgtgtcttcctggatagttttgttttattacgatctaagcgtagccaccctcctatgttgcaggagccgcctggcgaccaaaacatgcccgaacaacatcctgggatgatgggatggtgcaccgcgttgtcagcaatggaagctgcatttgctgtgggatcttttgctggcttttgcactattatgtaaaaatcatgttctatctcattgttgtttttgttcttaaatatttagccaataaacgcactataagtttaaatggcagactacaagataagagagtaatactacaaccttgatatt

SEQ ID NO: 5436 - DNA, 1255 bp, Glycine max
  misc_feature (1)..(8): n is a, c, g, or t
  Peptide Sequence Number=SeqID_8279
  Probeset Number=SeqID_15215
nnnnnnnngggagtctccattctccacgcgtccgatttctctctccctctcccacgcgccaccgccagaaagaggattttccatttctgccctccgattgcatgccgctcatccatggatcagtcttctggcctgaatctggaagatctgaaatgggaccattccttcgtcagagaattgcccggcgatccccgccgcgactcctttccccgtgaggttctgcatgcttgttacacccaagtctctccttctgttcaagtacacaatccccaacttgtagccttctcccaaccagttgccgacctacttgatctcgaccataaagagtgagtctgtcccataccttatatatcttcaaatacctacctttcattcttgctttttgactttcagatttcagaggccagattttccccttttcttctctggtgccacacctttagttggagcgttgccttatgctcagtgctatggcgggcatcaatttggtatgtgggctgggcagctgggtgatggcagggcaatgactctaggggagatactgaattctaactctgaaaggtgggaacttcaacttaaaggagctggcaagactccttacagtcgctttgccgatggccttgccgtcctccgcagcagcgtcagggagttcctttgcagtgaggcaatgcaccaccttggtataccaacaactcgtgcactttctcttgttaccaccggcaacctcgtcacccgtgacatgttttatgacggcaatccaaaggaagaacctggcgcaattgtttgcagagttgcccaatcttttctgcggtttgggtcataccaaatacatgcctccagaagtgatgaggacctaggccttgttcgtgttttggcagactatgctatcaggcaccactttcctcatattcaaaatatgagcaagagtgatagcttatctttctgcactggtgatgaagatcattctgttgtagatctcacttcagataagtatgcagcatgggtggtggagattgctgagcgtactggctccctgatgctagatggcacggggtgggtctcactcatagcgtgctcactacgcttacatgaagcatgtgggtctactatacgatatggccgattggattagacgatgcttgtgatcggagagtactcgtgatatgcaggtggtgcagtcgaagaattgtttggcaaccgaccgtggattccgtggtaggagttgggcagtgcacacagaatgtagctatacatg

SEQ ID NO: 5437 - DNA, 1501 bp, Glycine max
  misc_feature (1)..(3): n is a, c, g, or t
  misc_feature (8)..(15): n is a, c, g, or t
  misc_feature (19)..(20): n is a, c, g, or t
  misc_feature (1340)..(1340): n is a, c, g, or t
  misc_feature (1352)..(1352): n is a, c, g, or t
  misc_feature (1501)..(1501): n is a, c, g, or t
  Peptide Sequence Number=SeqID_8280
  Probeset Number=SeqID_15216
nnnttttnnnnnnnntttnntttttttttttatttttttttttgttttttctattcatcattttctctgcaccgcgacatattattcccttaacagaaaagctcgcagttcactacataaagggcaagacgggcctataggcctgtatttttctattaagaccgtttcgtgcacatagttatggctctatctttgcttcttcaatccgtcatctaatcttattactattttttacccagaacgacacactaccgcggcacccctctctaactccttacctctcattcagcaacattcgccatactacatccgtgtcgtcctaagactcctcagtgcggcacagaccagtccgcttatttcaattatataagcgttatagttgtgattatataatgaatcacatatataactatgacattaatagctatttattcaacatttgattagatatctgtcatagctataatcatcatattaagcgatcatagattacgttttctctctttaaatcaaccgcccctgatgtaatatatcatacaacgtgttgtacgaacactaattctctttcattaattaaatggcatcatatttccgctgcacacctcatgcactcttccttatccacccacgatgttaccacagtcaaaatcacctaactcctacattatagaagatattcattgtctaacgcacatatgttcccatattctaatgcactccactctcgttttacgcatctaaccctctgatttacatacagtctcgctttccatatacatcaccgactaaccatgactcgccactcatccatcactccctacaaccgccttgccaccctctctaccgcatacgtattaccctactgctccgcactataaacggcgtaccacacttaaatgtacttatattatatacacaaatttgaatatacctcgcgggtatatacgtattatatgtattatgtataatcaataataacgagttagcaattctcccacctttgaacacacgtccattatgagacgaccccgcatcccttcgagcactcacactccgcaaaattaaacaatctcatggccgtgcccccactctccataacattgccactgtcacacatccttgcactctaccccgctctgtcttccccactcactcttctctcacatcgcctcttacctctacaacacaacacaccccggcgccatctcacagcgaggcctccatacaacacctctggcacagtccactcactctctcgcctctcacacacacatggcacgccactgggctctctcccacattcttacctcttactcgccactgtcacaactctggagttncgcatacatctnatcatacagacgtttgaccgcttctgtcttgtgatacacgttctctatgtatatttatgtatatgtacgcctatctcagcattcttctttctccaatgtagtctctccttcgatcttaccgccactctcatctctcttcatctcacggn

SEQ ID NO: 5438 - DNA, 587 bp, Glycine max
  misc_feature (518)..(518): n is a, c, g, or t
  Probeset Number=SeqID_15217
ctgcaggcgctgcccgttctcgcaggcatcgtcgttgtcacgttcctgctgacgcgcgcgctccccggcgaccctgcggcctacttcgcgggaccgagtgcggatgcgcattcgatcgccgagatccgcaagagcctcggtctggatcgctcgctccccgagcagcttctcgtctacgtggggcagctcgcgcgcggcgatctcggccagtcgatctcgacgggacaacccgtcatggaggagttggtgcggcggcttccggcgtcgctcgagctgacgcttgcggccttgatcctctcgatcggcatcgctgtaccacttggtatcctggcggcgacccatccggactcgtggatcgatcacctctgccgtttcctcacgacggcgggcgtgagcctgcccacgttctttaccgggctcgcgctcgtctatctcttctactatctgctcgggatcgcgcctgcgccgatgggtcggctcgatatcgcagttctgtcgccgccacacataaccggttnttatacagttgacgcgctgctcgccggcgatccggcgacgggccgcgcagctctcgcgcaactgacgct

SEQ ID NO: 5439 - DNA, 1361 bp, Glycine max
  misc_feature (57)..(57): n is a, c, g, or t
  misc_feature (141)..(142): n is a, c, g, or t
  misc_feature (315)..(315): n is a, c, g, or t
  misc_feature (506)..(506): n is a, c, g, or t
  misc_feature (747)..(747): n is a, c, g, or t
  misc_feature (996)..(996): n is a, c, g, or t
  misc_feature (1274)..(1274): n is a, c, g, or t
  Peptide Sequence Number=SeqID_8281
  Probeset Number=SeqID_15218
ttttgattatttccgcacttcaagacgcagacagagatctagcctcattacttcctnttttaattaaaacagagaagacaccaaagataggcagacggggggacccctcccaacaaaagacgacacagcatagagcgcaanntaccctccaacacaagaacgactcaggaggtaaatccaatcgcacccggcagaacgcagcgcgctaaaagagtggatgctcatcctctctaattagtatggtgttagttcgaataatgtatatctgcgtagaggcgtcaccactaataaacatatcgtcctcttgcataacgnccttccctccctccaccctgtggtgttgccgcgggtgtttctcatcatgtcctgcctctcacagcagcctcggcgcgtttcctattttgtgtatcttcgttgctcatcttctgtctgggttctggttcgctttgtggccgcagatccttggcgtatgacgtcggcataaaatacatatggagagcgcgagncgacatacgcagcaagcgagtcatcggatctccacgcttagtgtcattcattggtctgctgcggcgcgcttgttgtgtcgcctctgaggatgcctagcatgcttatatatattgtgaagtatagatgacgggcgccgctgctgtcgagtatgagattgtgcagagagtgaggttgatgagtggtagagggtgatatagaaagaagaagaattaatgcaagaaataagaaaaacagagaaangaccaacttacgcataatacacacaccagagtgtaggattgaccacactccgcccacatctcttatatatttatagtgtcggtcgcccacccacccgcaccccggcgccggggcttctcacacacactctcttatttgcttctacttgtgagacgatcgtcatcgaaacaatttaatagagatcacatatctccctccataccttccccgttacatctattcacctcctcgccaccttacgcacattanaacatgaaatacaaaggaacatacgtacgcgttcaccacgtggagctctctcccggctccatgtacacgctccatgcaatgacgctttgataccatataatttctctgtctctgttccacctctcgacaccacccgccacacacaagtgaactcgactaatactatcgggaggcacgatataatcacgtgttctatcactagtggacattatcattgctgaactcgctacacttacgagtgaataggggagtgatgactgaatgggtagtaaagactnaattacgtccacacaccactagaatagctacaagaggcgctagagatatatgatatccagatggagtactgcacccgcatctcaccc

SEQ ID NO: 5440 - DNA, 550 bp, Glycine max
  Probeset Number=SeqID_15219
ccacgcgtccgctcaaaagcgcaaccccaccttgcatgcattcaagtacttcttctttgcaaccaaactttgacctccggatttattgtacaatttaatccaatcctgacaataatatcaccaccgcaccgacacggagtgcacggagctcttcattcaaagagtaacgcctctccacagactagtacttcattttgcaccattgctatctcaaatggctcgtgcttcgactaactggctatcgttctctctctcccccatggaaattctcccaaccccctgaacctcattttgcccaataagacgccgattccgacacttcattgcatcactactacctcaacaacttgcacaccaacgggtgggggaacgggagcctcaagttcgatcagaatctgaaccacagggacgtgagttatgttgaattgtcggcgcacagagttacgctcgcaccaacccggctggaggattatctcggggactactccgctggtatgcgttagtccgacagccatacggagacgctagactcgtcgctgacgcacatcta

SEQ ID NO: 5441 - DNA, 404 bp, Glycine max
  Peptide Sequence Number=SeqID_8282
  Probeset Number=SeqID_15220
accaaaacattttcttattaaaaaaaaacataacatcaaattttatttttcgcttactttctttcattgtttcacagtctacaaaaatggaaggaagacaatactaccctccaagagaaaccgtcgacggaaacagaaccaccatgggaggaccgcactcgccgtggcattcaccggttccttatcttttcggtggtttagcggcgatgcttggtctcatcgcctttgctcttctaatcctcggttgctcttattggcgtctctctggttacttcgacggtgaggaaaaccagagcagagacagcgatcttgaagccggagatatgaaacctgatacagctgtgaaggctgtagctttgccggagaagttcttggtgataatggccggagatgtgaaccccacg

SEQ ID NO: 5442 - DNA, 1362 bp, Glycine max
  Peptide Sequence Number=SeqID_8283
  Probeset Number=SeqID_15221
cacgagaccattacctagaacatcctaatcgaaaagaaaaatcttctccctgcctctgcgtagctcttctcgcccccgcttgtctccgccgcgggcgcggccggcgctcggccgtccgcacacgacgcaacgccccgccccgccctccgctcccactgttcggtcggcccaagatcctcatccgaacttaagacaaaatgggctcaagagtttttgctttgttcatcactggcgttgtccttttgggcagtagaatcttggccttggaccacactgttgttgaaaagagattaaatgagaacacggtatcacttacaacaaagggaagtccacaactatgccaactttgtgagcagtttgccacagaaaccctcttctatttgaaggagaatgagacccggatcgaaattatagatactcttcaccaagcttgtttgaaatttcattcacttaagttagagtgtacaaagttggttgattattatgcagcactgttcttcgcacaaattgattctctaagccctgaagaattttgcgtatcagcaagtctttgtgaggaagttacatacattcgcctcccaggacatgaacatgcttgcaccctttgcccatgaggttgttgatgagattcgtactggtcttgaagaccctgagatggagctcaagataatcgagatacttctgaaaggatgcaacaacacagagagcttcgtacagaagtgcaagaagatgataatccaaaatgcaccactcatactagaagatatcaagaagtttctcgagaagagagatttctgcgattctatccgtgtctgtggaggcaaaattgctcgccctccaggaggaggtctgagaggcctgtctactgtgtgagctctttcttttcctgaacacgcatgacgattgcgtggcatttaatgaagaacacgggggctatctgacctcacgcggtgatgtttagaagaaagattggtggtgtaagtctacgaacgaaaagatcttccataatgctatttccgagcagtgtactccctccgtcccataattcttgtcttagatttgtctagatacggatgtacctaacactaaaacgtgacttgatacatccgtatttggacaaatctaagacaagaattttgagacggagggagcatatattatacagcattggcattgtacctgtggagaagtgtatatattatcacagtcatcaaatgaaatttctgtgatagttgttgctacatgatcgttcatggaacgtaagcaaaatgtatgcttaaagtgtagagcatatacgcgtgtaaacaaattatgaactatgtgcagtggacttttatttatgatgcaaaaaaaaaaaaaaaa

SEQ ID NO: 5443 - DNA, 2040 bp, Glycine max
  misc_feature (10)..(10): n is a, c, g, or t
  misc_feature (15)..(15): n is a, c, g, or t
  misc_feature (23)..(23): n is a, c, g, or t
  misc_feature (40)..(40): n is a, c, g, or t
  misc_feature (47)..(47): n is a, c, g, or t
  misc_feature (53)..(53): n is a, c, g, or t
  misc_feature (72)..(72): n is a, c, g, or t
  misc_feature (77)..(78): n is a, c, g, or t
  misc_feature (90)..(90): n is a, c, g, or t
  misc_feature (97)..(97): n is a, c, g, or t
  misc_feature (114)..(114): n is a, c, g, or t
  misc_feature (157)..(157): n is a, c, g, or t
  misc_feature (216)..(216): n is a, c, g, or t
  misc_feature (332)..(332): n is a, c, g, or t
  misc_feature (337)..(337): n is a, c, g, or t
  misc_feature (394)..(394): n is a, c, g, or t
  misc_feature (397)..(397): n is a, c, g, or t
  misc_feature (403)..(403): n is a, c, g, or t
  misc_feature (425)..(425): n is a, c, g, or t
  misc_feature (478)..(478): n is a, c, g, or t
  misc_feature (521)..(521): n is a, c, g, or t
  misc_feature (531)..(531): n is a, c, g, or t
  misc_feature (584)..(584): n is a, c, g, or t
  misc_feature (634)..(634): n is a, c, g, or t
  misc_feature (652)..(652): n is a, c, g, or t
  misc_feature (679)..(679): n is a, c, g, or t
  misc_feature (682)..(682): n is a, c, g, or t
  misc_feature (744)..(744): n is a, c, g, or t
  misc_feature (814)..(814): n is a, c, g, or t
  misc_feature (826)..(826): n is a, c, g, or t
  misc_feature (855)..(855): n is a, c, g, or t
  misc_feature (1028)..(1028): n is a, c, g, or t
  misc_feature (1539)..(1539): n is a, c, g, or t
  misc_feature (1601)..(1601): n is a, c, g, or t
  misc_feature (1674)..(1674): n is a, c, g, or t
  misc_feature (1719)..(1719): n is a, c, g, or t
  misc_feature (1783)..(1783): n is a, c, g, or t
  misc_feature (1804)..(1804): n is a, c, g, or t
  misc_feature (1810)..(1815): n is a, c, g, or t
  misc_feature (1817)..(1817): n is a, c, g, or t
  misc_feature (1928)..(1928): n is a, c, g, or t
  misc_feature (2003)..(2004): n is a, c, g, or t
  misc_feature (2007)..(2007): n is a, c, g, or t
  misc_feature (2013)..(2013): n is a, c, g, or t
  misc_feature (2017)..(2017): n is a, c, g, or t
  misc_feature (2034)..(2040): n is a, c, g, or t
  Peptide Sequence Number=SeqID_8284
  Probeset Number=SeqID_15222
ccgcctgcgncgcgnacgggtanggctgacagcagccatnaatatantcgtcncagagatcggtcaatcttngtatnncgcaggcggtangccagtntcggcgtacgagaatgncgcgtatcatagcgccgtacggggtcaggagctcatctacagnacatcatagtagtagctggagtgcagtgccagcgcgcagtgcaccgcaggtcgtgtcancgagcaggtgacgggcggcggtagtgtagtgcgttatggcatttagagtgtacctgtgtgtactacatgacattgacattcatatatcgtatattaatagtttatacgtcagcgtnaccangagagtatacactgtcatgtcgcgatcttgtgtgtgtcgagtggatatcgtagagtnatngtgcgntgtgtttattaatcgagtacantatataacgcgtatagtcgagcatacgtacacgatatagtagtaaactatctntcacataacacagctagtgtcgtcgtgatagtagagctacacnttgtatgatntcagtcatctctcccatgatacatacagagacgagcagacgagtgagaggcanatcattacagagtatgccgactaaatcgtatattgatctcaccaatagtnaacaagtcgcatatcaancagaatgtatcacaatatcgcacatanacncatagcgcgatgcgcgagcaggcacacacggcgaggatcacaaactaatctctacaatagcnggataagtgagagacgtcttagacagcccatgctctttcacagcgcggacagacgcataccgacacgccnttcacagacagngagatctgattgtccaccatccgaatcantaccatcttgtagtgagtcacgaagtgccatgtactcagtaatcacatgagtaacgcagcagactacatcatagcgcagcatgagtcatgacagacatagcgtccagtgtcacggagccgagtcgggcgaactacacaatacaccaaacgcatgcgcgggcgatatcgaccangtgaggtcgcgataccaacgagggtagtacgtctgcgtcgagagtcagagagaatgacaccacgcgccgagacgtgcgaaacagccgcacccacaactagcacgagatgtcacacacataaaacaaacactcacgcacagcgacagacaatgtaagtattatcgtatatctcgctgtttctgttatacttcttgtgtgctatttctactctatacgcacatcatatagattgatcgctctatatgaatatttgtatattaccagtattcccgacgtatattggtagagtcaatcaagaaaggatattgcagtgatgtagagagtgtacataggatgaagaacacgagcagtgtataagacaaacacactaataaaaataacacaactgtattattcttattatttataatatcatttattataacactacatttatattatctgatgtgacaatgctaacaatagtgagcgtttcataaagattaagagagcatgagtgacgagagagacncgaaacatccgtatctgatgaatgagtacagcacagcgcgcgcggagtccaacgcgggtggnaaaagactacacctgccattatccatcatcaacattcacaatacactaggcgaatagataaatcgacacgatngccatctacagagctacgataaccacacgagagcggcccgcgcgncggcgcagactggaatccggcgcgtcccgaaacgcggccctccgacgatgtcgcagtagatcgnggtctggccgtatggagcagntggctnnnnnntnaaaggagcttccaaataaaccatttaagaacataatgtataaagcacagtctcaagtacttacatattcgctaagcaaaacgacaaatcatatggacactatcacactctngagaacaccaactcattaactataataattatgcccgcttacatgcgtccggcagcgcacatctcacacaacatnntanttctgntttnttttttttttttttttnnnnnnn

SEQ ID NO: 5444 - DNA, 1507 bp, Glycine max
  Probeset Number=SeqID_15223
tgcccgttccaatcgcagaagtccaatcggtgtgggggtaatcccgagcgcgtgccaccgagctggtgtcggacttcgcgacaccggcctcgacagcggccgcttcgccagtcccaatgagcgcggtccaattgattgtcgaatagcgctccggtgatacggacgctactccctgaatgctcgcgatgttccacggaagagctgttgcgtctgaggccttggccatggcactcaccatgagactcgccgccacggatagtgtgaacacattgagcgtttgcatcaccgtctccaacaaatgcgctacgacgagagcattgtttgtgtgtagcgcccggaagtcgtgaggggacggtgatatcgcagtggaattttcatgagggtttgcccggctcaccaaactttcacttcgatatcaccgcagcctcacgacgctggtgcacagaggcgggtaaaacggctctcaggtgatccgcgtgctctatgcccatggacgccaatgccccgagaggagagtctcatgagccacttcaccatgaccatcaacgcaaccgccctgttgcaagggcagatcgatccggcggccgccgcgaggactccaggcaaaagaaggcctttaccagtctggtgggtgcgcaaggtgcgtgagtatatcgatagccacatcgcaggtccggtattcgccacagatctcggcgcgcatgttgggctgagcgaagcgtacttcgcacgctccttcaaacgcgcattcggcgtaccacctcacaccttcgtgattcggcgtcgcctggagttggccgctcagtacatgctgcagactgacgcgccgttgagcgacatcgcgttgcagtgcggatttgtagatcaggcacacctgagcaatcgcttccgacgagctaccggcgtgagtccagctgcctggagacgtctgcatgggtcgcagggttctcacccgactttgaactgctcgagtgcatgagtaatccgccggacgtggccgatgaactcagtggcttgcaagttgaccggtcggccctcaccaaaattccactgcgacatcacccttccctcgcgactatcaacgcacgcatgccttaaaaagacgctcaggcaacacacgtcccggacatggaccatgaagcatagagcgactcgtctgctgggcattctgatttcgctatctggcgttttatcgggctgtgggcacggcgtgctcgatccggcggggccgatcggacactcagagcggatcattctcctcgactcactcgccatcatgcttgcgattgtcgtgccgacgatcctgtgcacgctcgccgttgcctggtggtatcgcgcttcgaacgagcgcgccacctacgcgccgcactgggccgaatcgggtcggctcgagcttctcgtctggtccatacctgcactcgtcgtgctcttccttggcagcattgcgtggatcagctcgcatgagctcgatccggccaagcctttgcgctccaacgtgaagccgctc

SEQ ID NO: 5445 - DNA, 1528 bp, Glycine max
  misc_feature (66)..(66): n is a, c, g, or t
  misc_feature (181)..(181): n is a, c, g, or t
  misc_feature (216)..(216): n is a, c, g, or t
  misc_feature (731)..(731): n is a, c, g, or t
  misc_feature (808)..(808): n is a, c, g, or t
  misc_feature (861)..(861): n is a, c, g, or t
  misc_feature (1189)..(1189): n is a, c, g, or t
  misc_feature (1193)..(1193): n is a, c, g, or t
  misc_feature (1357)..(1357): n is a, c, g, or t
  misc_feature (1407)..(1408): n is a, c, g, or t
  misc_feature (1418)..(1418): n is a, c, g, or t
  misc_feature (1443)..(1444): n is a, c, g, or t
  misc_feature (1511)..(1512): n is a, c, g, or t
  misc_feature (1519)..(1519): n is a, c, g, or t
  Peptide Sequence Number=SeqID_8285
  Probeset Number=SeqID_15224
ggccattgggagatgagagtggcgcgtctagcggaacgggttgtgttagtgatgtgggtagtaagncggcgggagtgggttggcatggtgggctgtagtagttaagagagtacgatagatggtgatatagccagagggtgaggtgttgtgatgaaggttatagagagcatagcgcagcagnggtcggaaggaacacgacgagaattgagagaaganggggcggattatgtatatggatatttgtggtgtgaagagttacatgtatttgaggtgtgagtatgtgtgtatgtatttagtggtgactgcggtagagtggtggagtgtaatgctgtagggggtgggtgtggatctgggcgcaaagagatgaggatggatgtgatgagtagcgggttgtgagccttgggagtatacggttggggtggaactcacatagtggtacgcggtttagtgtggtttgaggaggtgtagggtgaggtgatgatttttacatatatggtgaagattattatgaagttaaatatcaagaagtatgagtgtgtgatgtatatattcgtattcgctaactgtttatctagtaggagtatttcgtgataattggagtggtgtgttatgtatttaaatgtgcggttgtggtcaacacatagtgctctaacagtgtcatgataataggtggtgaggttggtgataagaacagaatcgtctatattactcacatgagaaatatatgtatntattagatatgtgggtcaggttgagagggtgaataattaggagagtaataaaatagtgtgtgtgttataattagganaaaagcgagaaacacatcaacagcagaacagagagaggacaaaacctacaaanataagagtagggatgaattgcgcagatctgggcggagtatatataactaatgtttgtgagttatagttcgtctgagaatgatatggattagtacgtttatgattaaatgtttgatagttataattggtgtatatgttggttggtgatatcgtttgattagttattttattatgtttgggatgtttatttatatataattaatcttaattcgtcgtgcgggcttggagtggggatatatatctcgtgagtgcagtctggaggagataaaagtgagagatcagggaggtgagaaaggtagcactaactcaacgagaatatccaggagatnttgngttgagatgtcgttcgaagatagagtggggtgaagtgatattagggggagggagataggttaatacttggtcgtttggtggtcctctttctcgcgtcacagacgcgtggagtggagaaactaaaataataatacaattgaagaaggcgtggacttgggttaacntctgttgtggtattggagtgtttgtagttatatttcgtgcagtgcgtttnnaaataaaaanatttaaaaggggcagatgaataatnntagtataataattattataatttttgtatgttgtcgagttatttattaaaaaaaaaaatgaaataanntaagaanaaaaccaac

SEQ ID NO: 5446 - DNA, 1616 bp, Glycine max
  misc_feature (1)..(9): n is a, c, g, or t
  misc_feature (14)..(46): n is a, c, g, or t
  misc_feature (65)..(65): n is a, c, g, or t
  misc_feature (71)..(74): n is a, c, g, or t
  misc_feature (76)..(77): n is a, c, g, or t
  misc_feature (80)..(81): n is a, c, g, or t
  misc_feature (116)..(116): n is a, c, g, or t
  misc_feature (224)..(224): n is a, c, g, or t
  misc_feature (227)..(227): n is a, c, g, or t
  misc_feature (337)..(337): n is a, c, g, or t
  misc_feature (365)..(365): n is a, c, g, or t
  misc_feature (386)..(386): n is a, c, g, or t
  misc_feature (401)..(401): n is a, c, g, or t
  misc_feature (573)..(573): n is a, c, g, or t
  misc_feature (1082)..(1082): n is a, c, g, or t
  misc_feature (1146)..(1146): n is a, c, g, or t
  misc_feature (1163)..(1163): n is a, c, g, or t
  misc_feature (1170)..(1170): n is a, c, g, or t
  misc_feature (1176)..(1176): n is a, c, g, or t
  misc_feature (1284)..(1284): n is a, c, g, or t
  misc_feature (1288)..(1288): n is a, c, g, or t
  misc_feature (1318)..(1318): n is a, c, g, or t
  misc_feature (1480)..(1480): n is a, c, g, or t
  misc_feature (1521)..(1521): n is a, c, g, or t
  misc_feature (1546)..(1546): n is a, c, g, or t
  misc_feature (1588)..(1588): n is a, c, g, or t
  misc_feature (1602)..(1602): n is a, c, g, or t
  Probeset Number=SeqID_15225
nnnnnnnnnccccnnnnnnnnnnnnnnnnnnnnnnnnnnnnnnnnnaaaatttttactaatgtcnatcacnnnncnnccnncctcgattacacaaccttttcaaactaccccttangctatctgtactttacaccttgctcttctctaactaaatcgtttaacgtgtaacataacattcgcctacttactattttatacttatttaaatctacacagtgctacnaanagaacatctagcaccatatcactactcaccatcgcccctactcactcggcacgctatgtcgagcctaaatgaagttaatatataaaccatgtgacatatagaaataactnccgatcactcataattctcactacctantagtcacctacttatcgtgtnactccttgcttcaanatggattagcaatcccaaagcaaccagacacctcacacaactaatcaatagttcgccttacctctcacgctcctctctattcacactcccgactacacaaaccgaaactaccaatataactgtatagcatagtaattaccacacccttattactctattatctattattatntctatcactctgcataccccacactgtcatagctcgtacttatactacttgaaactacactacctactgatctagaaaataataaattatatatcagatacaacatgtccatagcatcgtaatacacatataatatgacaaaacgatctgagttattacctctaatctcaccgatgctatatatatgagtctgatatacattggtgttcatataccccaaacggcgccatcaccctcactacttcttcgattctcttttggtcacttctgccatatcatactcgccacaactgaaaaataacagcacctatagctcttccctccgcagctatataccaattacccccacctacggtgacacccacatcctctatctgcacatctccataccttcatataaatttactatatctcacccaagacaacaaccaaattctgtcgagtcagctacgatcgttgacacgacatacgtacgtaatgttatacgcgagacagcgatgcgaatagangatgtatgcacacatccgcgcggcgcctacgccacagggcggagagtcaatgtcaaggtgactnggagacacaccacattncgactgntcatgncttctcttggctatacccacgcgcgcaccctcgggactctgcgtctgatctatcctgtctatatcaacgtacatacctcgacacgctcgcccaaagacacacaatatngatnatatatgatatgtacgataaacgtcacacncctctacagacatgctatactcgaacgcgcactattatgcggcgcttcctactctaccatacactctctacactcctccgtccacggctctcatcacgccacgcgcatcactacatcacgcatacatgatctcaacaccaccatctcgctacaaaacaatangaagtaattgtgatcgacatacacatcacggacatataaantagtatgcacactcacaccgcacantataccccatcacttcactatactatccacacacccatacancagcataattatangagcacttgttatg

SEQ ID NO: 5447 - DNA, 585 bp, Glycine max
  Peptide Sequence Number=SeqID_8286
  Probeset Number=SeqID_15226
atgggtatcatgaacgatgcccagggctccttctacttctataagggaattagctgcaagaacaccaaggacatctccaccgcgattcacttcttcagcctggccatcgagaagtatcagttggccctgacctccaccccgaactccaaccacatcctgcgcaacatcgcagtctctttggttcgtctcatcgagctccagaagctctcgggctccacctctccaccgcttgggggacttggggcactgccttcctcagccaacggaatcgaagagacagctcctcataacggggagatgacggtggccttctcgttggacgatccccaggtccaagaagctatgaggtatttcaaccgagctcttgaggccgagcccaaggatccttgcaccctctaccactatgccaagttcctttggcaatgcgatcgccttgacaaagcggagaaggtattcttgaagtgtctcgaagccgaacccaactacatcgtcgctctggaggactatggaaacttcttgctcgccttccgtaaggatgacttagggtcacagttcattgctcgcgctcagaagctgcgaaaactg

SEQ ID NO: 5448 - DNA, 1697 bp, Glycine max
  misc_feature (1)..(1): n is a, c, g, or t
  misc_feature (6)..(10): n is a, c, g, or t
  misc_feature (15)..(23): n is a, c, g, or t
  misc_feature (28)..(28): n is a, c, g, or t
  misc_feature (35)..(36): n is a, c, g, or t
  misc_feature (38)..(38): n is a, c, g, or t
  misc_feature (41)..(42): n is a, c, g, or t
  misc_feature (74)..(74): n is a, c, g, or t
  misc_feature (76)..(76): n is a, c, g, or t
  misc_feature (82)..(82): n is a, c, g, or t
  misc_feature (108)..(108): n is a, c, g, or t
  misc_feature (139)..(139): n is a, c, g, or t
  misc_feature (158)..(158): n is a, c, g, or t
  misc_feature (172)..(172): n is a, c, g, or t
  misc_feature (178)..(178): n is a, c, g, or t
  misc_feature (181)..(181): n is a, c, g, or t
  misc_feature (206)..(207): n is a, c, g, or t
  misc_feature (210)..(210): n is a, c, g, or t
  misc_feature (212)..(212): n is a, c, g, or t
  misc_feature (214)..(214): n is a, c, g, or t
  misc_feature (216)..(216): n is a, c, g, or t
  misc_feature (218)..(218): n is a, c, g, or t
  misc_feature (222)..(222): n is a, c, g, or t
  misc_feature (224)..(224): n is a, c, g, or t
  misc_feature (226)..(227): n is a, c, g, or t
  misc_feature (235)..(235): n is a, c, g, or t
  misc_feature (248)..(248): n is a, c, g, or t
  misc_feature (250)..(250): n is a, c, g, or t
  misc_feature (293)..(293): n is a, c, g, or t
  misc_feature (392)..(392): n is a, c, g, or t
  misc_feature (394)..(394): n is a, c, g, or t
  misc_feature (406)..(406): n is a, c, g, or t
  misc_feature (420)..(420): n is a, c, g, or t
  misc_feature (456)..(456): n is a, c, g, or t
  misc_feature (512)..(512): n is a, c, g, or t
  misc_feature (618)..(618): n is a, c, g, or t
  misc_feature (654)..(654): n is a, c, g, or t
  misc_feature (710)..(710): n is a, c, g, or t
  misc_feature (1002)..(1002): n is a, c, g, or t
  misc_feature (1545)..(1545): n is a, c, g, or t
  misc_feature (1591)..(1591): n is a, c, g, or t
  misc_feature (1697)..(1697): n is a, c, g, or t
  Peptide Sequence Number=SeqID_8287
  Probeset Number=SeqID_15227
nttttnnnnnttttnnnnnnnnnttttnccctttnncnttnntactttcttatgtgtgtctacacctcttatgncnctcgcnatacctcttccctccctctccctatnctcgctcattcatataagcgtggtggcggcnttctcatctcggtcgatgntggggtcggtgtcncgggcnttncttatgccaaatctacggatagggnnatncncncncncggngngnncttgggcnagtgtgagatgtncntctaatctgtttgtctctatctctgtatctctctctgcgtgtnctattcttttttatgtctgtctatctctatctatgtctatatgtgtatatctctatgtctatgtctctctatgtatgtatctgtgtatgtatatgtgtntntgtatctctctntctctgtatgtatntgtctctctatgtgtgtatgtatatatgtatgtgtntgtatatctatgcgtgtatgtgtgtgtctgtgatgttgtatctggctgtgtgtgtngatgtatgtctcattcatgtctctctgtctgtctttgaggggtcttggtgcgtctcgtcttggtctctgcgttacgttgtcgtgtctggtcacacgcggcggcgcnacacggcagcccgctcctgtcgcgggtcggctcacngtgccgcgcgctacccgccgagcgtaacgctgggtccttctctgtgccgacgctcngctgcttccgcccttgctgccctggtcactgctgtgtcgttcgtggctcttctgatgtgagcgtcgttatttcgtgcgcgcgcgtgtgggtgtcgtgtgctgacttccacggctgccgtcttctacgctagtgtctagtcgcgctcagtgctctcgtctctcgtttcgtattttgtactgtctcctcgcgcgcagtagtacagtagttgaacaatactctctctctccgtcgccgctccgcttgcattcggagcggccttcttggatctacgtggttctggtactatctccngctggcgtcgtcctgttacttcgtgtcgtcgcagatgtatagtggacccaccgcacgctctcgcttctgctacttgcgagcgttattgtagataggggtgacgcggctctatggttgtactgcgccatgggctggtggtcaactcacgcgttctggtcacatcttctcgatctctgctcttttggattgtgtttgaattccggcggtgacctctcctcctatgctctcgggtatcgtgcgggtcgggcgggctgtggatagtatgactttcgttagtcgcggtgtctatccgtgcctatattacttgtgtgcgctcctggagcgctgcgcgtcgatactggtgctgtgtgtgtcgctgtggtcgccgtaacgcgcgccaaggtgcgacgtgtagattagtgtcgtgattatccgcgcgtcgctgccgtgatgcgtgccggcgcggcgtgctgtgttcgcgtggtgtgctgtggctgtgcgcgctctgtgcgcgggcgactgttctggccgcacgcgcgtcgtggattgtgtgtgtacgtgggnagatgcgatgtgtcggacctatcgtagagggcgctgatcacagtcnactgtactcactatgacatatgatgtgtctccgtctatctcgctgactccttcctcgcctgcgccgggtctgcttattgccgctctatgtctctcatctcctctan

SEQ ID NO: 5449 - DNA, 1403 bp, Glycine max
  misc_feature (1)..(1): n is a, c, g, or t
  misc_feature (40)..(40): n is a, c, g, or t
  misc_feature (275)..(275): n is a, c, g, or t
  misc_feature (1158)..(1158): n is a, c, g, or t
  Peptide Sequence Number=SeqID_8288
  Probeset Number=SeqID_15228
nagactctatgagtgttgtgtatgagatatgctatcttangcttgagaagtgttcagacagtctagaggtgaggtactcaatgtatcttgtctacgtctgagtagtatgtatacactatatgcatatacgtcatgcatagaatgtttgttcgccgttcggcgtatgaggtatcacacgctaagaatataattatcgtggctctagagatctctcttgctggtcacgcgcctagcacaaggagaatacaatgatgtataataattcgtctggtgtngatactcgtataacaagttgagctcccgtctataacaatgttgccatgtactcggctgtggttgtcgcggagttgcactatattaaccacaggttaattggttatatgttccaagatgaggttcctttatacaataccatactaataaataatttctcttatgagtaagtacgattccgtttcttctgtggtatatagctctatggtgaaaatgtaatatacaacctatccgtggtaattacttctactcacccttgcataatatgcgttgtcaccgtaagtatataagcatagaattccagatattatcccatgtgaataggttatagtagacgagttttgtaagtaagggtggattaataatgtattagtaattatcgagcttgtgatcagataatgcgctaagtgcctctaatgctgcaagttcgcatcttgtgctttagtacgaggtcatatgaatccgttcttagttatttacgtgactatttcatatgagcgcctaagtggtgacatgggcatgctagtcgattactggcggggggggaggctgctaaagaaataaagaacaagttaacaagtatcttgatgcaatctttttgattgaaattatctcaacatatgatatgttagatccgtgttatatgtaataactaacttatgctagtgatactgcgcttactcatcgtatgcaataatgtaatggtgcatacgtatataaagactgaaacttgcgtcatgcgtaacatagagagtctgagacgttgaattcgctttctacctatttagggagatttgatgtgatccgttcatacaatgattttctgatcgtagctcttacattggtttgtgtgcagcgcggcagatttcgacatctgtggtgcgnatctgctctgttacatgtttatttctgggagaaaagaatatacatacatccaggtcgatggaaatcacgtaaacttgtgatcgttggaactaatatattcgtgagatttacacagaatggtgtatgtatttttatgcgtaataactatatagtcatcttataaaggtgaggtgggatatgttaaacggcacgcaatggaggggcgtatgaaaaaaataagaaagttgtaatatattattatatta

SEQ ID NO: 5450 - DNA, 1439 bp, Glycine max
  misc_feature (1)..(1): n is a, c, g, or t
  misc_feature (23)..(23): n is a, c, g, or t
  misc_feature (45)..(45): n is a, c, g, or t
  misc_feature (72)..(72): n is a, c, g, or t
  misc_feature (101)..(101): n is a, c, g, or t
  misc_feature (109)..(109): n is a, c, g, or t
  misc_feature (148)..(148): n is a, c, g, or t
  misc_feature (242)..(242): n is a, c, g, or t
  misc_feature (260)..(260): n is a, c, g, or t
  misc_feature (311)..(311): n is a, c, g, or t
  misc_feature (345)..(345): n is a, c, g, or t
  misc_feature (402)..(402): n is a, c, g, or t
  misc_feature (1285)..(1285): n is a, c, g, or t
  misc_feature (1376)..(1376): n is a, c, g, or t
  Probeset Number=SeqID_15229
ngagagcagtgcggagcgcgctnacgcacgatcatctcacacagnaccgtatagctgtcgtcggacagactncgcacagtccgtctaagcacgaaaaatcncgagcgcnacgacgaaacgatattgcacgcgagagataagggcgtantgactcgtcacaatagtagagtaatagatgtgccatcgtgcatagcactatgacatactaggccatattgcagtcgcgctgacaatctcaaacnttacgctagtagctgcgncgctgatcgcatactcgtgcgtaagtttagtgtcatcgtatccgtccacgncactccacggtctccacaaagtatgcatcagacngcgtggtcgatcgcagagtcgacacagcaccacacaactacgatcagcagctgtcangagacgctcgatgtcagcgtggctccactactatcgactgccgctgctcagctcgtgtgtatactgtgcgcacgctggcacgtcgtctcctccggcgtcttacgcgctacatcacaccacctctctagtcagtcatatctaatcgcgaccaaacacaacacagcctcgagcacttcacgaccacagcgcaccatagcagcaacggtaccctcatacaatcagcaaccacgtcgccgggctggttattacgcacgtgatcgccacaattgcaccgcaaatactgtatccggcgcgctctctccgtcatacacgacatgccacgcacgaaaggcgagcgcaccaacgtcctccggccttacccaccacatcgcaaacagcaacgcgcctccattgtctgacatacgaacaaatacacgcataacctcacatctcatattagtgagacgattctgtatagatatatagtacataaccagactaattgtatataaatttaataggtggagtcccggacacgtctctcgctgcgcgacagcatctatcccccacgcccacccgcgcacgcaacaccaccacacacaacccagcatccgacgtccgccgcgcctcctatatatgtagttagtataaatactagaggagcgattcgtggccgcgcgccgcgtttctcgccacggcaccctcccaccacacccacactatcgtgacaccgaagctgacatacaactcgcgtgtagcgctagacggacgtacgaggaagatcactgaaggaggcacagaaacacgtacgcatagtagacagagaatcacagcaagtacgaggagggcgcagaatagccatcctcaagaacaagccgacaaccatccccacccactcgtcccntcgcacctcatggttcgccctgccagtgtaccgtgaggcgatgatgcctctatttctttttctccgaggggacatgttgtaacgtatttanggcttcttccccacgcgcatcgcaaacagccttggtagtcaccgaagacacgcaccctaccgc

SEQ ID NO: 5451 - DNA, 636 bp, Glycine max
  misc_feature (110)..(110): n is a, c, g, or t
  misc_feature (162)..(163): n is a, c, g, or t
  misc_feature (168)..(168): n is a, c, g, or t
  misc_feature (172)..(173): n is a, c, g, or t
  misc_feature (193)..(193): n is a, c, g, or t
  misc_feature (296)..(296): n is a, c, g, or t
  Peptide Sequence Number=SeqID_8289
  Probeset Number=SeqID_15230
ttttagaacagctcggccaccttttgcagttaagccatggccgccccacggacttacttggatttcggccgtcgcaggactcgtggaaggacgccgcaaagcagaccttngtcgtcaccctccccgggttcaagaaggagcacctgaggtgcagatcggcanntacgncggnntgagggtcagcggcgaccgnccgctcgagggcggccagtgaacccgctccgcaaggaagtccagttcccgaggggctgcaacgccggcggcatccgcgccaggtcggagaagacgggcgtctnccacgtcatcatgcccaggctcacgcccctcgaggacgcctcaaagtcagcggcagaccacgaggcggaagctgcgcggcacgccgctgccgcagaagagaagaagcgccacgaggagatggaggaggacgctaggaagcgtcgtgcgggtgacgaggacgactacgccagcgacgacggggaaggcgcacgccagccggcgtctgccggccggcaggcgtacggcttcgccagggaccggagcaggagtgggatggtgagggcactgctcctcgccgtggcggtggccttggttgtgtttaaacacaataaagttggaacgggaggggggaaaggagtt

SEQ ID NO: 5452 - DNA, 494 bp, Glycine max
  misc_feature (2)..(3): n is a, c, g, or t
  misc_feature (11)..(11): n is a, c, g, or t
  misc_feature (22)..(22): n is a, c, g, or t
  misc_feature (27)..(27): n is a, c, g, or t
  misc_feature (35)..(35): n is a, c, g, or t
  misc_feature (49)..(49): n is a, c, g, or t
  misc_feature (56)..(56): n is a, c, g, or t
  misc_feature (94)..(97): n is a, c, g, or t
  misc_feature (108)..(108): n is a, c, g, or t
  misc_feature (122)..(122): n is a, c, g, or t
  misc_feature (127)..(127): n is a, c, g, or t
  misc_feature (133)..(135): n is a, c, g, or t
  misc_feature (141)..(141): n is a, c, g, or t
  misc_feature (146)..(146): n is a, c, g, or t
  misc_feature (155)..(155): n is a, c, g, or t
  misc_feature (157)..(158): n is a, c, g, or t
  misc_feature (161)..(161): n is a, c, g, or t
  misc_feature (165)..(167): n is a, c, g, or t
  misc_feature (169)..(169): n is a, c, g, or t
  misc_feature (172)..(173): n is a, c, g, or t
  misc_feature (176)..(177): n is a, c, g, or t
  misc_feature (180)..(180): n is a, c, g, or t
  misc_feature (199)..(199): n is a, c, g, or t
  misc_feature (292)..(292): n is a, c, g, or t
  misc_feature (295)..(295): n is a, c, g, or t
  misc_feature (308)..(308): n is a, c, g, or t
  misc_feature (310)..(310): n is a, c, g, or t
  misc_feature (313)..(314): n is a, c, g, or t
  misc_feature (316)..(316): n is a, c, g, or t
  misc_feature (326)..(326): n is a, c, g, or t
  misc_feature (355)..(355): n is a, c, g, or t
  misc_feature (367)..(367): n is a, c, g, or t
  misc_feature (390)..(390): n is a, c, g, or t
  misc_feature (393)..(393): n is a, c, g, or t
  misc_feature (401)..(402): n is a, c, g, or t
  misc_feature (404)..(404): n is a, c, g, or t
  misc_feature (420)..(420): n is a, c, g, or t
  misc_feature (436)..(436): n is a, c, g, or t
  misc_feature (440)..(440): n is a, c, g, or t
  misc_feature (444)..(444): n is a, c, g, or t
  misc_feature (448)..(448): n is a, c, g, or t
  misc_feature (464)..(464): n is a, c, g, or t
  misc_feature (479)..(479): n is a, c, g, or t
  misc_feature (482)..(482): n is a, c, g, or t
  misc_feature (492)..(492): n is a, c, g, or t
  Probeset Number=SeqID_15231
anntacgaatnagaatataggnatacntgagaagnagaacaggtgaatnacttganccttcttacacttctactctctcaatcatacataatannnnaaagattgganaaagactactgatnagagncctcannntatcgnacganggtacagangnnacncccnnntncanntgnncancgatgacgcttatgaagancaccaccatggatcatggcgatggctcctttttcacttgcaatgaaaatcaaaagcaatcggcgaggacattaggcgccactccggctattantgntctggatgaccgncnccnntncgttccgccncttcaccaacatcgtccgcgcgtgtgaangtgaaccgaggnggcacttgaaagccgtaccacgnccnccaaggtnntnaggttgacctaacggntctggaaggggagatncagncaanacgntggcctctggaacggnatcgaaatctgcgcncanttttccttanaa

SEQ ID NO: 5453 - DNA, 1969 bp, Glycine max
  misc_feature (1)..(1): n is a, c, g, or t
  misc_feature (173)..(173): n is a, c, g, or t
  misc_feature (186)..(186): n is a, c, g, or t
  misc_feature (198)..(198): n is a, c, g, or t
  misc_feature (231)..(231): n is a, c, g, or t
  misc_feature (269)..(269): n is a, c, g, or t
  misc_feature (271)..(271): n is a, c, g, or t
  misc_feature (418)..(418): n is a, c, g, or t
  misc_feature (495)..(495): n is a, c, g, or t
  misc_feature (497)..(497): n is a, c, g, or t
  misc_feature (499)..(499): n is a, c, g, or t
  misc_feature (505)..(505): n is a, c, g, or t
  misc_feature (530)..(530): n is a, c, g, or t
  misc_feature (542)..(542): n is a, c, g, or t
  misc_feature (602)..(602): n is a, c, g, or t
  misc_feature (604)..(604): n is a, c, g, or t
  misc_feature (606)..(606): n is a, c, g, or t
  misc_feature (653)..(653): n is a, c, g, or t
  misc_feature (705)..(705): n is a, c, g, or t
  misc_feature (745)..(745): n is a, c, g, or t
  misc_feature (748)..(748): n is a, c, g, or t
  misc_feature (817)..(817): n is a, c, g, or t
  misc_feature (1032)..(1032): n is a, c, g, or t
  misc_feature (1138)..(1138): n is a, c, g, or t
  misc_feature (1733)..(1733): n is a, c, g, or t
  misc_feature (1741)..(1741): n is a, c, g, or t
  misc_feature (1743)..(1743): n is a, c, g, or t
  misc_feature (1772)..(1772): n is a, c, g, or t
  misc_feature (1933)..(1933): n is a, c, g, or t
  Peptide Sequence Number=SeqID_8290
  Probeset Number=SeqID_15232
ncgtcgatgtcgacattcacgctaagtcgaatatctgtgatcccatcgtcatcatgcagtttgtgcgcgaccagatgctcgcgagtctgtcgtatcgacgtagacatcgcgcctgcagcagcagtcacgctgttcactcaagttagcgagtgattgcacgcggtccgcgcgcntcgcgatgagcgntcgagcgcgcgntcaggcgtgtgagcgagtagacgatgtggcgangatcgcggtcgagccagtatgcgtcgtgccacatcgcngnaagcattcgcgacacgaaagtcgcgacccacgagcacgagtgtatagtatgcgaacgagaggcgtgcagtacagatgagagatataggattgacgcagagagtgtcataggcgctatcgtgagacgacgataacaggtcagagatantagagatggcgtcacacgcacatcatgtacctgaggaaatgcatctcgcaggtaatcgagagtgtagcattgacagnancnagcagncgcggatactgacacgagtcggganttgctgacaacngcatctcagcgcatgcggcactgatgctacatatattgcacaatgacgacagaaatacgngnantgtgtcgacatgaagtactggaatgttgttcaataacgcgttcagangtcatacaccgctgcgagtgcatacggaagtatagctagcgccgacagcacnaagtgtgtatacacatacgtctatcaccgactcctgtctnatntgcgtcactgtgctgatgtaccacgctgagcgagtgcaacacgcgctgatcacgtacggggagtgctcnaacggtagtgcacatgcagctcaaatcggaaggtggtaccgcagataaataggtatgcatcgtgagcatcaccgccgagatatcaccataccaagcactgtgagtgtgatctagacattacaatacacatcctgacatattgatactatattgtactgcaccgacaatatcgcgccgagcaggtatagagcagcgtgcaggaagtgtccgtgagnagagaaagtatgtgcagtcgtagagtctgcactcgtcacgattggtgagacgcgatagctaagaagaacactcatggatacaacacaaggtaagtggtgtggaggngagtgtacgacgtaagaagaggcgcatggcagtcgacatcattgtgcgttccctatgctagtgcgcgtcttcgcttgtggtggtccgccacctcagcaatcgtcgtagagtgggaggaggaacatgcgaggggcgcgaggagcgagacgccggagcgagtgcggctggctattccctacgctgtccacctcccttcgactcacagagtgcgtgtcacattatgttatgatatctattgtcgagtatgttgtcaagcgagttggttgtcaagtctatgctctttcaagaagagcatagacgctggtgatgttcatgactcagtatagagacgacagctcgacatgtgagcacggaagtgatgcagatatgacctacagaccaatgccgcaacgtcactcgcacactcccatctgatcgtaccggttgtcttagtgacacatactcgttgtcacgaggctcgcgcaccgagtagcccccgaagccccgagcaacgaagagaaataggagcgaagttgtgtacgtgtagtgcgcatcacgccgatcctacgcgcacacgagcatcgcgacgcgtagtggcaggggtgatggggtaggnaggtactntnggacactccagcggtcagacgagtcgcancactaatcagagcatcagtcatcaacagaccagacgagataagagagggagaggagggcgaactaccgcgtacggagtgccgagctggtggtgtagaggccacgtgtgcgacccgtattgtggtggtttgtgtgggagtggatggactcttcatctgcgtncgcatgtgagagaggagagagcgagtagagggatgg

SEQ ID NO: 5454 - DNA, 425 bp, Glycine max
  Probeset Number=SeqID_15233
ccaattctaagtttacgcaaaagaattgtaaaccccatgagttgcgaacaatgtgcctgcatgtgttgcacctgatccattagtgacgtatatgagaagcagaattgcaggctctgacaggaactggaacagggaagcgcatggaatgggaccgagtttatgattatgatggttacaatgatttgggcactcctgactgtggtgaaaactttgctcgtccagttcttggaggatctctcactcatccctaccctcgtaggggaagaaccggttgaaaaccaaccaagaaagatcccaacggggagaaacctggcgaggcgtttgtgccaagagatgaaaattgcgggcacttgaactcatgtgatttccttacttatgggctaaaatgtttaactcgaagcttcttgcctgcacttaatactgtt

SEQ ID NO: 5455 - DNA, 381 bp, Glycine max
  misc_feature (86)..(86): n is a, c, g, or t
  misc_feature (329)..(329): n is a, c, g, or t
  misc_feature (376)..(376): n is a, c, g, or t
  Peptide Sequence Number=SeqID_8291
  Probeset Number=SeqID_15234
ttttttttttttttttttgcttcaaatttgtatttaatgttgtaatttttacaaatctctggtaactactatgctttgagtaccanaagctgcaatcgataatgccttatttgactccaaaaactttaacttatctccaagtccttcttgtatgtaagtaacatcaccattctcttccatagctattaaatgattaaatccagcaacaatttcagtgatatttttcgttgataattcttcaacaatctctgccttatcttcttcaagatcacatttaaacacttttccttctcttgatagagcaaaaatatcgctccatcctgcaacanacataaatcttgttccagttaacacatgcaaccatgtatttgacacnaatcc

SEQ ID NO: 5456 - DNA, 1695 bp, Glycine max
  misc_feature (191)..(191): n is a, c, g, or t
  misc_feature (542)..(542): n is a, c, g, or t
  misc_feature (579)..(579): n is a, c, g, or t
  misc_feature (593)..(593): n is a, c, g, or t
  misc_feature (637)..(637): n is a, c, g, or t
  misc_feature (708)..(708): n is a, c, g, or t
  misc_feature (875)..(875): n is a, c, g, or t
  misc_feature (1033)..(1033): n is a, c, g, or t
  misc_feature (1064)..(1064): n is a, c, g, or t
  misc_feature (1127)..(1127): n is a, c, g, or t
  misc_feature (1173)..(1173): n is a, c, g, or t
  misc_feature (1175)..(1175): n is a, c, g, or t
  misc_feature (1258)..(1258): n is a, c, g, or t
  misc_feature (1278)..(1278): n is a, c, g, or t
  misc_feature (1332)..(1332): n is a, c, g, or t
  misc_feature (1351)..(1351): n is a, c, g, or t
  misc_feature (1396)..(1396): n is a, c, g, or t
  misc_feature (1419)..(1419): n is a, c, g, or t
  misc_feature (1497)..(1497): n is a, c, g, or t
  misc_feature (1511)..(1511): n is a, c, g, or t
  misc_feature (1542)..(1542): n is a, c, g, or t
  misc_feature (1570)..(1570): n is a, c, g, or t
  misc_feature (1574)..(1574): n is a, c, g, or t
  misc_feature (1579)..(1579): n is a, c, g, or t
  misc_feature (1669)..(1669): n is a, c, g, or t
  Probeset Number=SeqID_15235
gaggaggcatacccacacgaatactacatattattaccagatatgtaatcgactaatactagatcatgtgcaagtgaaagattgactgtgctccacctgctcgattcggtgcagcgctggcacggagaaagatatttattagtgtagtatttacatataactccatagtaataggctcgcgattatgatgngaagaagcggatatgcacttggtcgtctactgctgcagtatagctcatagcgttatttatatatatattacataaaaacaacaaccccactcacgacgcacacattcggcatactcacggtatgaggacggtcgcgcgctgcgatgaccatcacggcgcgacgcatcggttggctagtcgcgcttgtcatcgatgcatgacctgatgcgcgtctaactgtagcgccgacgcttaatggaatcggagtctgtcatactgaagagcggcgtcgtctgcgcttgtgtggatacgtgtgacatgtccacacgccgaagcagcgtcgctgcttgcgttagtgatggcggtggtagnattatatatctataacaacactcgcggtcgctggtcnactgtatgcataantataaacgtgactatcgtcgctctcagtatgcaacgagtaatanagtctgaaccgcgatctcaatcggtatgatgctatatatgatgctcatgcttcttcgtcatcatgagtccnccgcattcgaacatacactcaccgaatgcgatagtgaattggtgatgtggcgttcggacggctgtgacgcggttgcggcgcgacgccaggtgcgacactgattccactgacacccccgcgtgggctgagcgaatgttagacactccttgcaaccaccaataacgccntatgtctattggtgaaaagtgcgatcgcgacggcgcgttggctaatagatgtgttgacgccttggagtggtagtatgtgtgctacgcactcgtgcgacttgtcttctcgtgtacgtttttctacatctttatataccccccaccacacgcgcacacanacttagtctggacacgttctataatcacagnccgcgtgtggcgctcctgcgtgtcgctcttcatttctatccgacgttacgattgtctgcgtgngtgcacatgaatagatagttatattcgcgctgtgataaagacagananaggatagtgcctggcaaatacgtggtagatgtacgatacccttgatcattctctgtgaatcgcgcacgcgacacgtatctcanccgtagcgagcttcttccantgcgactatgccccagatataattcacattgcgcagcgttcacgaccgagcgcnactcgtataaccatcatantgatctctagactgactattcatactccgtattactcacgtagcncgaagtcgatgttatgtcatgantatatcgcgcgcggcgcgcgcggtgcgatatctagttacgcgtgatctgtattatatataatagccacgtgatctaancttgatacgtgcgnctgcacgcgtctcgtcgcgtcgtcggatagncgctgaccctactgcacacacgtcatantatncgccngctgacgtattgtcgcaccgcgcgcacatgtacggtgtctgaatatgtgtatatgctatctcgtagtcactgcgtagacaggctgctcanatcgtattatgccctctcgctcgatg

SEQ ID NO: 5457 - DNA, 1411 bp, Glycine max
  misc_feature (1)..(1): n is a, c, g, or t
  misc_feature (285)..(285): n is a, c, g, or t
  misc_feature (549)..(549): n is a, c, g, or t
  misc_feature (811)..(811): n is a, c, g, or t
  misc_feature (1017)..(1017): n is a, c, g, or t
  misc_feature (1133)..(1133): n is a, c, g, or t
  misc_feature (1162)..(1162): n is a, c, g, or t
  misc_feature (1182)..(1182): n is a, c, g, or t
  misc_feature (1184)..(1184): n is a, c, g, or t
  misc_feature (1204)..(1204): n is a, c, g, or t
  misc_feature (1294)..(1294): n is a, c, g, or t
  misc_feature (1328)..(1328): n is a, c, g, or t
  misc_feature (1338)..(1338): n is a, c, g, or t
  misc_feature (1341)..(1341): n is a, c, g, or t
  misc_feature (1345)..(1345): n is a, c, g, or t
  misc_feature (1359)..(1360): n is a, c, g, or t
  misc_feature (1363)..(1364): n is a, c, g, or t
  misc_feature (1387)..(1387): n is a, c, g, or t
  misc_feature (1396)..(1396): n is a, c, g, or t
  misc_feature (1403)..(1403): n is a, c, g, or t
  Peptide Sequence Number=SeqID_8292
  Probeset Number=SeqID_15236
ngtgaacgattcataggagcgactatatagggtagtggacatgcataatgaaagtgagagaagtcacagaagtatatcatatgagaatgtcgtattagtagttaagtatgatattagcgaatggtgagatatgatatataaagaaccgtagatgctctacattgggatgaagaacgcgtatcaacgaagaaagagggaagtcacatcataataccaatagcaatagcatacttaaaatatcaaatgcgcggacgatagagaaatcgatagtatataatgtgatcnctcatcctaggttattaattgtcgtacgctgacaaggacgatattaggaagtaggagagggtgagggagtggcatcttgtgtactaatgtgatataatggatataattgtgatctagacactggcgtgggagatagtggactatcatccaacatgtattgagtgtaggacggacacggcttcacacgttcatatttctccatatccgttttcatctttagtatatcatagactcggactgtttggtgagagggaagtgaggggnggtgatgtgctaggatagtctggggagtgtacggcacatagcggatgcgactattgcttttctccccaacaacactattaatgaacaggcatgttgttagtgtatgcgtcacagctcagtatacgtatttgttgtggggctctagggtgtgtcttgtgggtttgtaataatttgattcttaatagtttgtcttcatctttctctcttcctctcacccacaccaatctacaaagaattagccctcccgcatcgtggtaatctnttgagtatcacaatctacatcctagagtgtagacgcacaaaagctcagtaatatttatagagcaggtgcattgcgatcatgaacgcggctgagaggagagaatacacccaaggaaaaatatataaaagacacaaagactagcatttggattattgtattcaaatctcttcaaaaaactttcataataactaaggagagagaaaatntagaaatattttatttttagtaaatctactatagttatgtgattgaaaactacttctttatatcatatctaataatagctagattatgatcacatgggtcatagataagttggtgngcccggcaggcttgtgtgatgatgaccanatagaagatggaggagagananggacagagacatatattctncggtcgtgtcctctcgctgtcgtgtatgtgccggtttagtttcttctatattatattgtgatataagtgtgcatgttgtagctgtcagtngtgactagaatattaattgaattgggtagagcanccgcggtgcncantcancccccccccccgcnngannacaccctagaaaaaaaagagagnaagagacgnaaccccnaccccacc

SEQ ID NO: 5458 - DNA, 580 bp, Glycine max
  Probeset Number=SeqID_15237
atgccgaaccaggtcgttccttcgaattggccggacgacgcggaacgcctcagtctcacgccttcccctgactcccgctcacccccaatctcagcgccgccaccccctcgtctctccccactcgatctgcgacgccggcggccaccccccctcgtctctccccctcgatctgcgacgccggcggccacccccttgtctctcccgctcgatctgcgacgccgccgaccgctccctcctctctccctcttcggcttcgactatccctctctaatggcgtgcaccagcagcgcgacagcagactagcagtgcgagcagaggcggctcgcgtggaagagaggcttggcgacggcccatttggccgagagcgagccggcaaggaagccgttgcagacctctgcgccatgggggtgttcaccgcggtgtgcgtgctgattgttctggtgctgtacgccgtgcagttcgagagcttcattttcttttgctagtaaaaaagaaggaaaacttttgctactgattgtaaactgcaattagcaaatgcgtgtgttgcaatgtcgagtatgaactctgaattgttggtgct

SEQ ID NO: 5459 - DNA, 826 bp, Glycine max
  misc_feature (641)..(641): n is a, c, g, or t
  misc_feature (826)..(826): n is a, c, g, or t
  Peptide Sequence Number=SeqID_8293
  Probeset Number=SeqID_15238
cgaacttcttctaaggagaatggcccagctagtgcctctgatcaggatgttgctatgactgatgcatgcactacctcagttaacaaggtctcaacaagtactagaagtgcaagtttcattgaagggatctccaaatcgtcatatgtgaagcatgcatctgacattaaaggttcctctgttaaggttctaaattgccatgagtctgccatatacatcttagcacctttgagatatgcaactgtctatggatgttcagatgcaacagtagttattggagcagttggcaaggtggctccctataatacattttactcccaattggaagagcatatgaatgaagttggaattgtgcccacagttaaccgatgggatgagcctctagcattgggcatggttgatccccatgattcattatctcatccagcgggtgtctccgaggttcaagctgagtctgctacacgggtggaccctgatcagttcactaattttgtgattccaagctggcttggagcagagtccactggggctacaaaagacaatccattcacgttaccagatgcgtatatggcatctcagcataaaaatcacaaaaatttataggatataaagcaactcttacgagaaacatctttacaagaaantcgcaaacgataattatcatctacactccatatctacttcaaagactaattatatactgtcaaaaacattcatcaactttactatctacacaataattaatctttatcagtcaatacaataactcactaaataataatacacaaacaaaatttctaacttcctttttaaacttcctcttcaattn

SEQ ID NO: 5460 - DNA, 1513 bp, Glycine max
  misc_feature (37)..(37): n is a, c, g, or t
  misc_feature (74)..(74): n is a, c, g, or t
  misc_feature (123)..(123): n is a, c, g, or t
  misc_feature (174)..(174): n is a, c, g, or t
  misc_feature (196)..(196): n is a, c, g, or t
  misc_feature (260)..(260): n is a, c, g, or t
  misc_feature (402)..(402): n is a, c, g, or t
  misc_feature (511)..(512): n is a, c, g, or t
  misc_feature (522)..(523): n is a, c, g, or t
  misc_feature (531)..(531): n is a, c, g, or t
  misc_feature (592)..(592): n is a, c, g, or t
  misc_feature (1160)..(1160): n is a, c, g, or t
  misc_feature (1171)..(1171): n is a, c, g, or t
  misc_feature (1218)..(1218): n is a, c, g, or t
  misc_feature (1356)..(1356): n is a, c, g, or t
  misc_feature (1430)..(1430): n is a, c, g, or t
  misc_feature (1432)..(1432): n is a, c, g, or t
  misc_feature (1438)..(1440): n is a, c, g, or t
  misc_feature (1446)..(1446): n is a, c, g, or t
  misc_feature (1450)..(1450): n is a, c, g, or t
  misc_feature (1455)..(1456): n is a, c, g, or t
  misc_feature (1461)..(1461): n is a, c, g, or t
  misc_feature (1465)..(1467): n is a, c, g, or t
  misc_feature (1470)..(1470): n is a, c, g, or t
  misc_feature (1481)..(1490): n is a, c, g, or t
  Peptide Sequence Number=SeqID_8294
  Probeset Number=SeqID_15239
cctcgatataagactgagtctgagtcattatagtatntagtaccgcgtgatgtgtagagtattgtgtttagatngcatacagacagagtagtattgatcatgtcgtctctcagtcacatctgncagagtgagagtatatacaataattagtaaaaggcgcgagataagcgtagnttgttttaggtcgcagaggcanccacactcaaaatctaataatatagatactcatcgatcgacaacatatattctcaggtcagatncaagagtcgggtggtagagagcgcagcacgaccagtatagagtgagagaagcaatataatagtatgcgaaaggaagctgtttatcaagtgagaaggacatatcacttatatggtgtagaaggaggaaggagatataatacantaaggagacgtgtcagataaagatacataatagttgataaacttaagctagtgtgtagaagaatcacaaagcgcacgtgtggatgtgagcaccacctcttctcaccccnntttttttttnnttcttatntatgggggcgaccagaggggggcggggttctacatcaaccacaacaaacactatctggcgngggttcttgatcctcactaaacagtcatgtttgtatgtgggtgagttgcgagagcaaatatatagtgtgcgatatttcaatgaaacagtgattggtggtgagggcagggcgcgcgtttggagataataatacacaaccatctaccgctgttatgatgcggcgctataatttaaaaccgcgtctcgcgtcattgtcattcgcaatgatatgaattaatatatataacactaaagaaaactagagatgaaaatcgatggtcgtaactctttgtgggtgagtgtcgaggttagagaaacaccgcgccagacacgttacggcgggcgggtcgttgttgagcgggtgtgggggtatggtggtgacacgccaataaggcaggagggggaaacgtgtaggggagaaggagagggggagatctgcgtattggataaagtaaagtatggagggtgtgggaggttgtggagaccgatcttcgcattcactatagtttcctagaggtgagcgggctggagtagcaagagagaagcgccacagagtagtcgaataggtgcggggcggcaagccaggacanagcgttggagngagaaaagagtaagaaacaaggaatgagagaagatggaggagggatngtcccgggttgtgggagagaagagacggtgcgcgaccagagtgattagtggggttgcgttggttcctcaccccaggtagacttatattgtctctaaaaaacaagcgcggacgtcctctttcggagagaagaggttccnttgtagaaatgttgcggcgggccgggcaggtggattaaagagagagcacatcggagtaagaatgcaagattgantnctaacnnntaaaangaanaaccnnttttntcgnnntgnagaccaacccnnnnnnnnnnaacacaccaaccccccccccccc

SEQ ID NO: 5461 - DNA, 1403 bp, Glycine max
  misc_feature (28)..(28): n is a, c, g, or t
  misc_feature (30)..(30): n is a, c, g, or t
  misc_feature (64)..(66): n is a, c, g, or t
  misc_feature (68)..(69): n is a, c, g, or t
  misc_feature (71)..(71): n is a, c, g, or t
  misc_feature (76)..(76): n is a, c, g, or t
  misc_feature (299)..(299): n is a, c, g, or t
  misc_feature (675)..(675): n is a, c, g, or t
  misc_feature (684)..(684): n is a, c, g, or t
  misc_feature (686)..(686): n is a, c, g, or t
  misc_feature (706)..(706): n is a, c, g, or t
  misc_feature (714)..(714): n is a, c, g, or t
  misc_feature (716)..(716): n is a, c, g, or t
  misc_feature (731)..(731): n is a, c, g, or t
  misc_feature (802)..(802): n is a, c, g, or t
  misc_feature (950)..(950): n is a, c, g, or t
  misc_feature (1074)..(1074): n is a, c, g, or t
  misc_feature (1077)..(1077): n is a, c, g, or t
  misc_feature (1219)..(1219): n is a, c, g, or t
  misc_feature (1251)..(1251): n is a, c, g, or t
  misc_feature (1254)..(1254): n is a, c, g, or t
  Peptide Sequence Number=SeqID_8295
  Probeset Number=SeqID_15240
tttttttttcttttcttgtgctgcctcncnccctccaccacaccactcctccgcttccggtgannnannangcgcnccattgcatgtctagcttctcctctagcgggaggaggggggccgcctcttattacaaatagcagagacaccccctccgagtgcgggagagaggaatgagcgctcatcacttatctctctatatacctccgtcttacgcgaatctcggagagtatgcgttaatatcatgctaggcacacatccccacacccatagatatgacagtattaggtatagttccactnttctattcctccatccgtactattgtctataatctcaccttcaagtagggtgctttaatctcccttcggtctcatggagcggagaatctttagccctgctacactctcgtgtcttctatttaagcaggtagatacatagacatatatataaatacttgacgacatactatcatagtacgagtgattggagaatccacatagaagtgagacacttcatatccgcgtccgacgtacagtaacataacgatatgaagcggacggaggcagaactatacatatcactgatagtcctactgatggtagtcggtatatctaatactgcttgtttgtagtgtaattagtaatttatgtgtcgtaggtgtgtgatttaataganaataatgtntngtaagaaatataatataatntattaganancaaacgacaacaacncaacacgcataatatattatgaaataaatggtagaaaaacaaagcatgatatttctcaaatcataacacanacaacgacatgatctaaattcgatgagagacagcactgtctccggcacctccccgcacacccgccgtgatcagggtgtgtagatgtcatcagtcttgtcattagtggagatacttgacggagcaccttatcatactgctcagtgtgtnctcgcgcacacactcgcgacatgctactaacactccgtcatctacgaatccgagaggagatatattgactgcacgtatcgcctctcagtatacgcacatggaattatgagtgcactagatctangtngcggcgtgcctcaggctagcacggaggcatatacgatatctgtatatctagagacatccgatgacgagacaagtatgagtgtgtatgctatgtctctgtacttaactatagtcatgctgtgctcctcatctcgtggtgtgtngagagacactctccgtcttaaggaataattanacnacactatcagtgacaatgtccgaatataaaccacgtaagctgggagatctcctatctgtcgcacacatacattcctaatgcatgactcctgcacccacagatattagagaatacgcacgcatatgagacacacacatgagagtaccgag

SEQ ID NO: 5462 - DNA, 1934 bp, Glycine max
  misc_feature (15)..(15): n is a, c, g, or t
  misc_feature (18)..(18): n is a, c, g, or t
  misc_feature (30)..(30): n is a, c, g, or t
  misc_feature (32)..(32): n is a, c, g, or t
  misc_feature (211)..(211): n is a, c, g, or t
  misc_feature (233)..(233): n is a, c, g, or t
  misc_feature (251)..(251): n is a, c, g, or t
  misc_feature (1105)..(1105): n is a, c, g, or t
  misc_feature (1108)..(1108): n is a, c, g, or t
  misc_feature (1210)..(1210): n is a, c, g, or t
  misc_feature (1263)..(1263): n is a, c, g, or t
  misc_feature (1375)..(1375): n is a, c, g, or t
  misc_feature (1377)..(1377): n is a, c, g, or t
  misc_feature (1501)..(1501): n is a, c, g, or t
  misc_feature (1504)..(1504): n is a, c, g, or t
  misc_feature (1518)..(1518): n is a, c, g, or t
  misc_feature (1543)..(1543): n is a, c, g, or t
  misc_feature (1552)..(1552): n is a, c, g, or t
  misc_feature (1576)..(1576): n is a, c, g, or t
  misc_feature (1626)..(1626): n is a, c, g, or t
  misc_feature (1631)..(1631): n is a, c, g, or t
  misc_feature (1633)..(1633): n is a, c, g, or t
  misc_feature (1664)..(1664): n is a, c, g, or t
  misc_feature (1690)..(1690): n is a, c, g, or t
  misc_feature (1758)..(1758): n is a, c, g, or t
  misc_feature (1781)..(1781): n is a, c, g, or t
  misc_feature (1787)..(1787): n is a, c, g, or t
  misc_feature (1790)..(1790): n is a, c, g, or t
  misc_feature (1804)..(1804): n is a, c, g, or t
  misc_feature (1866)..(1866): n is a, c, g, or t
  misc_feature (1934)..(1934): n is a, c, g, or t
  Probeset Number=SeqID_15241
cctctcctcacttanctnccctctcgtgcntnacacatatcagatcctcagtgagagagagcaagcggcgtgtgctgggtttccgcgggcgcaaccacccccaccgcccacctgccctatcggagtgagccaaccacccctccccatcgcgtgttctattatgttatctactatatcccacccacctatctagattgatatatactcacanactttctgactagcttggtacncactaattgatactctcnatactatgtatgtagtctcgctatatagatatctattgtcgtcaaggcgatagtatacacatgctctaaacggatgcgcacagcacaacggcgtacgattatcggtccatatatcaagatgatgtaatacataaatagtcatgtatcatggtcaatgataataccattctctaacgcttggtgccttgtcagagtttgactctacctgtgttgctaggctccctcctcgcgtctggtcgacctgctgctaactcaattcgacgaccttctgtccacgacaccatacataccagttgtacacgactagtcattgacgtctcgtcgcaacagcgctggcgtctatagttagtcgcgacgtaatggtgatcgaggcggcgcatgtatctgtgatgatgagccgacagatgcggtgcaagtcgtctcaatctcttgatatatctatcatgcgatactgatgccgctaatactgtgtcttgtattgtcgacagtgtcacacactatcgtctatacatccagtctcactatatctcctcacgatatcgattgcaccagctcaccgatctccgcctcactcgtgagcgcctcatagtcacgctgagccgactagccatcgcacattccttctctgtgttctcgtaattacgtagatactatcctacagcagacctaatctagaagacgtgatataccccaagcatctgaccacatgtggccatgctagagtacacgctatgatggtattcacatatgcgcgatgcgctctcgctgccgtgtataatctacgtgcacgcacattcatcagcacttgctatatagttgtatgcgtgcgcacaggactctatgcgctgatacgntancaactgctatcaacagacacacgcatatatacggcaatgaccatgaacatgcacacccatcatcccacacgcgtctgtacaccgcgcgtacatgtgatatcncgtagctaacctatcacccttctgccgtcatagcactctctacacctccgtanactcgtactctatcaatgtgatcctatcttataagactaggtggttagtatgcttatatatactcactctcgtgcgtatacccgcgacatctgaggtcatgcgtcccgcgtntntgacatcaggactcctgtcgtcatgttgacttctccaatctgtcagactatcacatgtcgtctctcatatctactcgctactttactgtgctcggcagtcacgctaccccttcagtacgtgtcngancacatgtcgcggtncatcaagtggcgctgtgagtagctncccgcatcnacactacgcactacgtaatcatantgcatccacacttgctcaatctagatctgaagctacgctccgtagccctncaagncnacctactaattgttcaatgactacatgatcnagatatagtgattgctgagcgcagcncagctacaagcttccttcatcattctctcgtgtagaaagacgcgacataattagtctagcatactgantgatgtcatgtctactgcatgcnatatgntgnctaagtatactatntccgtacctactctctatcatgtatgttctcgatctccttgtaacagaccgctcgtactgangaccacacgctacatctccacaacgtacagtaattgtatgccctacgtactgcccgcactattatgtn

SEQ ID NO: 5463 - DNA, 580 bp, Glycine max
  Peptide Sequence Number=SeqID_8296
  Probeset Number=SeqID_15242
aaaaaaggagccccttctgggcttgggcccaccctggttgggttgggtttggggccaccaccttccaagtgggggcttattttgtggtttttataacccccgcaagttttttgggccctccctgggtcgtggaaattgggcccattcatggggtttattgggttggcccttccatgggtggtgccctggcgggttccatttataagccttttttcattgcccgttttcatgttccccttcttggtgataaagaaaattaaccaataggattgccaacttggcctttcatcccttcttaaaaaatgctgcattattgtagttaatttaatctaataataatctttctttttgcgtgttatgcatccttgaaaaggtctatttatgtataatatatcgttaaatgatcttccccaaaataagatcaacgatttagttgagatctggcaccctgtgtagactttgtggacaggaatgaatgaataaatatatatttcaatggcttctgctttaaaaaaaaaaaaggagaaaaagataaagaaactgaaactacttttgcacccatgctttaaagatacataat

SEQ ID NO: 5464 - DNA, 460 bp, Glycine max
  misc_feature (417)..(417): n is a, c, g, or t
  misc_feature (447)..(447): n is a, c, g, or t
  Peptide Sequence Number=SeqID_8297
  Probeset Number=SeqID_15243
agccactatccccctcctccacctcgcctcgtttcccctcgatctggagctcacctgtgaggaaccggtgtgcgccgtcgtcaaatcccgtggccaccgccgttcccccgccccctagagttgctcgggagctccacctccgtcgtctacgtcctctacgcgaaccatctcgacctcaactccgccgcaccatcgggatcgagttcttctccgccttcagccaccgccgcatcatcgccggattcttcgccgtcagctcctcttcgaccacccctgcacctcccctagcttgcccccatcatcactaccccgagactgccggcgacccccagttcgactacggtgttgacgacccctccttcttgctagagcaaccagatgctggagcccaggagccagacgccaccgtcgacgacnactcctactacaccggaggtgcctactatnacatgcaacccgc

SEQ ID NO: 5465 - DNA, 1614 bp, Glycine max
  misc_feature (106)..(106): n is a, c, g, or t
  misc_feature (143)..(143): n is a, c, g, or t
  misc_feature (180)..(180): n is a, c, g, or t
  misc_feature (188)..(188): n is a, c, g, or t
  misc_feature (196)..(196): n is a, c, g, or t
  misc_feature (220)..(220): n is a, c, g, or t
  misc_feature (247)..(247): n is a, c, g, or t
  misc_feature (260)..(260): n is a, c, g, or t
  misc_feature (375)..(375): n is a, c, g, or t
  misc_feature (386)..(386): n is a, c, g, or t
  misc_feature (600)..(600): n is a, c, g, or t
  misc_feature (609)..(609): n is a, c, g, or t
  misc_feature (623)..(623): n is a, c, g, or t
  misc_feature (645)..(645): n is a, c, g, or t
  misc_feature (730)..(730): n is a, c, g, or t
  misc_feature (1200)..(1200): n is a, c, g, or t
  misc_feature (1241)..(1241): n is a, c, g, or t
  misc_feature (1369)..(1369): n is a, c, g, or t
  misc_feature (1383)..(1383): n is a, c, g, or t
  misc_feature (1386)..(1386): n is a, c, g, or t
  misc_feature (1432)..(1432): n is a, c, g, or t
  misc_feature (1463)..(1463): n is a, c, g, or t
  misc_feature (1487)..(1487): n is a, c, g, or t
  misc_feature (1522)..(1522): n is a, c, g, or t
  misc_feature (1525)..(1529): n is a, c, g, or t
  misc_feature (1540)..(1540): n is a, c, g, or t
  misc_feature (1545)..(1545): n is a, c, g, or t
  misc_feature (1547)..(1549): n is a, c, g, or t
  misc_feature (1554)..(1555): n is a, c, g, or t
  misc_feature (1557)..(1558): n is a, c, g, or t
  misc_feature (1560)..(1560): n is a, c, g, or t
  misc_feature (1571)..(1573): n is a, c, g, or t
  Probeset Number=SeqID_15244
ccgggggacgtccacggttgcatgcccgggtgtgtgtgtccagtgccgtgtgtctcgcacgcgtgcgaccttgatacggccgcctgtctggtaggctgttcctctngtgtgtatctgtgatagcacttctatctctcgtcatntatctgcgtcgcctctactgtcacattccttgtctcnttgtgccntgatcgcnatgatgtcgcagatgcccgatagncctgctggatgtgcgagagtcgtatgngtacttactatgngcgtgtatattaagagagagacaatctagagagagagtggtgtgagtggcatgtgggtgtgatgagagagagagtagagatgggtgagacgtattttatgttatgagtggtgtcnttagtatagangagttaggtatcgttgcttgtcagtctatactacactatatgtgaaggaggatacgtagtgtcaggtatgacgcagcttgacgatcacgtagtgcgcggtatatgtctagtcgtatatatactagactgctagtagtgagatgtgtgagtctgtgatcattgatgatatgacgtgagtgcatctgaacatatgtatgaatatcatagagtacancgagctatnaatcgtgcatgtanatacgatactacaatctcactncgagacataatatacatctgtcatatatgagtgtatatactgatcacagtatcagatacctgcgtacttactatctactgtatangaagtagcgcggtctcttgcgtgtgttgctagtggttatatctgcatgatattactgtatcatatctatctatgatatttcctcgtcgtgtagtctatcgtttgtcgtaatgccatgatatttgtgtatttggtcaccatttatgttggcgtagtttattatagtatcagtaatatatgtagttgtaaatgtgtatatagagatgtgtgctagggtgttgttgtgctagtgtgtgagtcgagtatgcgtttctctgcagagtttttgatttatgctatgttatctgtgttataagagtgtggtgtgtgtgatgtggtggggtagatcagtgtgagtatgtggacgtgtggggtatgggtcgtggtgtgttgtgttgtgagtgtgtgagtagtggtgtttgactagtggtggtatgagagtcgcattggagactgtgatggtgcgtaatagtgggtcgtataataacagtntgatgtatggataattgtatagttagtcggtgcggcgatanacgtctaggcgagagtcagggtgtgttatgagtagcgagtgggtatgagtgtgtgtgtgatgtgagtagatagagaagctgtagtgtcgagatgtagtgagtgagtgagagagtagacagatggaganagagggaactgctntcnccgggcgaagtcacggcgggtgggtgtaatagaccacggtgagttnactatatggaggagcgaggcgcggcccgagnggcgtgcgggtgaggagatgtagncaaggctcttgtgctttcgttctctctctctcccncannnnncacaataatantcgtntnnnaaaanngnncnctccatatatnnnacacaacaacaacaccaacaaacaacaaacatcacaaaacc

SEQ ID NO: 5466 - DNA, 565 bp, Glycine max
  Peptide Sequence Number=SeqID_8298
  Probeset Number=SeqID_15245
aattcggcaccagtgacgacttcgacttggtttcacactgcaatttctctctctttttctctctgcgcaccacatccccttaacatagtttgaaagagagagagatggctatgaattgcggtggcgttgtggttcggtttggtctgtgagtggtggcactgtgcattgcaggctacgtagtgggtccccctctctactggcacttcattgaacacgtcaaccactcttcttcatcttcttcttgcgctccttgcgtctgcgattgctcttctcaacccatcattacgattccccaaggacttagcaactcttcatttgaaggttggtttctggtttcctgaatgaactccagtgaaatatctctattggtgtactgtacatgagtaaacctttctttattatcataaacttctatatggctgaatttgaaacaaacttgaatgatgatgataggagctcaaataacgtagttaccctcacctaactagtaggctggcttgctttttctccttaggtagggtgaactatcaagatctgaaatcttatcttccttctctgtgttttt

SEQ ID NO: 5467 - DNA, 594 bp, Glycine max
  Peptide Sequence Number=SeqID_8299
  Probeset Number=SeqID_15246
tttatttttgcggcccggggggcggtataaaacccctctttttgggaaattgggggggggggccccccccagggggggggggtaaataaaaatttttttttttttttgggggccctttttttcaaaaagggggcgaagaaatttttcccccccctaaccccccgggggtcatttttgggacctttttaaattgggggacctgcctggcctttcacagagggtttgttattcctttcaaagttttttagaaaactcaaccagtcccatggtttttgatggcattctacatttggccaaccagtggatacatctccctagaatggcttatattttgcgtgccctccaacgcggttttggccatcggaatcatccctgtcactgccattgtccacaaagtacttgctagtcacgtcttgatacggagcttgttcacacggcgagtgttcatctgcctcagcataatcactgtcgtcctcgtaggaatcacttccggcgtgagtgcagaatcttgaagccatcttctgtcaaaagtcgtgagtagcgtcaagaatcggttttgcaagcggcgtgtgctctgtaagagaaggagagaac

SEQ ID NO: 5468 - DNA, 2261 bp, Glycine max
  misc_feature (1)..(1): n is a, c, g, or t
  misc_feature (6)..(6): n is a, c, g, or t
  misc_feature (18)..(18): n is a, c, g, or t
  misc_feature (32)..(32): n is a, c, g, or t
  misc_feature (42)..(42): n is a, c, g, or t
  misc_feature (59)..(59): n is a, c, g, or t
  misc_feature (81)..(81): n is a, c, g, or t
  misc_feature (89)..(90): n is a, c, g, or t
  misc_feature (136)..(136): n is a, c, g, or t
  misc_feature (139)..(139): n is a, c, g, or t
  misc_feature (142)..(142): n is a, c, g, or t
  misc_feature (153)..(153): n is a, c, g, or t
  misc_feature (155)..(155): n is a, c, g, or t
  misc_feature (180)..(180): n is a, c, g, or t
  misc_feature (189)..(189): n is a, c, g, or t
  misc_feature (205)..(205): n is a, c, g, or t
  misc_feature (219)..(219): n is a, c, g, or t
  misc_feature (233)..(233): n is a, c, g, or t
  misc_feature (245)..(245): n is a, c, g, or t
  misc_feature (266)..(266): n is a, c, g, or t
  misc_feature (275)..(275): n is a, c, g, or t
  misc_feature (289)..(289): n is a, c, g, or t
  misc_feature (321)..(321): n is a, c, g, or t
  misc_feature (323)..(323): n is a, c, g, or t
  misc_feature (340)..(340): n is a, c, g, or t
  misc_feature (350)..(350): n is a, c, g, or t
  misc_feature (362)..(362): n is a, c, g, or t
  misc_feature (375)..(375): n is a, c, g, or t
  misc_feature (382)..(382): n is a, c, g, or t
  misc_feature (430)..(430): n is a, c, g, or t
  misc_feature (432)..(432): n is a, c, g, or t
  misc_feature (443)..(444): n is a, c, g, or t
  misc_feature (451)..(451): n is a, c, g, or t
  misc_feature (457)..(457): n is a, c, g, or t
  misc_feature (477)..(477): n is a, c, g, or t
  misc_feature (518)..(518): n is a, c, g, or t
  misc_feature (520)..(520): n is a, c, g, or t
  misc_feature (544)..(544): n is a, c, g, or t
  misc_feature (555)..(555): n is a, c, g, or t
  misc_feature (561)..(561): n is a, c, g, or t
  misc_feature (565)..(565): n is a, c, g, or t
  misc_feature (582)..(582): n is a, c, g, or t
  misc_feature (600)..(600): n is a, c, g, or t
  misc_feature (654)..(654): n is a, c, g, or t
  misc_feature (674)..(674): n is a, c, g, or t
  misc_feature (693)..(693): n is a, c, g, or t
  misc_feature (722)..(722): n is a, c, g, or t
  misc_feature (742)..(742): n is a, c, g, or t
  misc_feature (758)..(758): n is a, c, g, or t
  misc_feature (760)..(760): n is a, c, g, or t
  misc_feature (783)..(783): n is a, c, g, or t
  misc_feature (817)..(817): n is a, c, g, or t
  misc_feature (852)..(852): n is a, c, g, or t
  misc_feature (884)..(884): n is a, c, g, or t
  misc_feature (988)..(988): n is a, c, g, or t
  misc_feature (1076)..(1076): n is a, c, g, or t
  misc_feature (1099)..(1099): n is a, c, g, or t
  misc_feature (1355)..(1355): n is a, c, g, or t
  misc_feature (1374)..(1374): n is a, c, g, or t
  misc_feature (1429)..(1429): n is a, c, g, or t
  misc_feature (1441)..(1441): n is a, c, g, or t
  misc_feature (1444)..(1444): n is a, c, g, or t
  misc_feature (1535)..(1535): n is a, c, g, or t
  misc_feature (1543)..(1543): n is a, c, g, or t
  misc_feature (1790)..(1790): n is a, c, g, or t
  misc_feature (1814)..(1814): n is a, c, g, or t
  misc_feature (1843)..(1843): n is a, c, g, or t
  misc_feature (1845)..(1845): n is a, c, g, or t
  misc_feature (1852)..(1852): n is a, c, g, or t
  misc_feature (1857)..(1857): n is a, c, g, or t
  misc_feature (1955)..(1955): n is a, c, g, or t
  misc_feature (1977)..(1977): n is a, c, g, or t
  misc_feature (2047)..(2047): n is a, c, g, or t
  misc_feature (2067)..(2067): n is a, c, g, or t
  misc_feature (2091)..(2091): n is a, c, g, or t
  misc_feature (2132)..(2132): n is a, c, g, or t
  misc_feature (2225)..(2225): n is a, c, g, or t
  misc_feature (2229)..(2229): n is a, c, g, or t
  misc_feature (2233)..(2233): n is a, c, g, or t
  Probeset Number=SeqID_15247
ncgcgnacccgacgttgntcgataattaggtnttcagtaccntgcagtgtcagcccagngtacatatgtacatcaggagtncatcgttnngatgcgttcgagagatcgtactagctgcatcgatacgtacgacggntcntgntatcatgatgngnaggatacttacaaactaccacgtangactagtgnattacagtggcatgcntagtatctgactcngacagtacgcgtgntgcgctcgtcantagaagcagtgagtaagaatncgacgcgtnatgagttcagatgnttgcatcgtgtacgtctaccgactgtcgtagntngcggagtaggtatacgntgcagcatantcacggactacnatcgaccaggttncatttgncgtactgttacgagtcagcctaatcgtcatccagttcatcatgtcgantnagagtattgcnnagtacanagctgntctatcagtagtcctgatangcacagtcttagcaggatgatcactttatgcagtagctgcnantcacgtacagtgtagcagctcgangcgtgcgtgangcgcgntgangtagacgtcactcactngtgagcgtcatagccgtngcatagtaaagtagtgcatgtagctgctctgatatgcgatcagtcatctgatgncgcctcgtcagtcacgtcgntcgactgtacacgaatgtnagtagtcgaaggcgcgtaacgtacatccntcgcaggctactggaaaganagtgatcgacagtcgntnattacggccatttcatgtgtganacgtgcgcacagtcacgacgctgatgacacagcngtgcacatgtgcgctgcctgctacatatgatatgngatctgatacggtgatagtcgatcgtgtgacngcgtgtgacgataggacgctctcgacgtcacaatgctcgtcgcctgcgttcgacttatgcgtcaatgatatacatgtgcagtgacagtgcactacgacatgttnctactatacatcgagatctctacgacgttccggaagcacatcagtaacacgtagcgtcgtcagtcatacggattagagtagtgctgantcctccaatgctggcacacatgntgcagatacgattcatacctacatgaagtcgtagcatcgactcagcatgcttctgtcgagagcgtcacgctctggtgtactcgagactatcacctgagcaggagcgatagcgaatagtctctactactcagtcatgttcttacatttacacgatatcgtctagtaagatagcgctcttccaagtagcacgctccacgattagtgcagtacgtgaagctttacgatacagagtacttctctcttcgagcgactgacngttggtagtgtgcggcgcngcacagacgcacaattacactagtatcatcacgtagacgtctactgacgcagagncgtgcgcagtgntangtgaccataacatctggccatgtgcaattgctcacgtatacatgaagcatgatataagtattatacgaccataatatcagcctatgcagtnacacacanaagacgagagcagacgttctatcagagatagagatagctacgatatgacgataacgccatctactgattagtcgcgtaattcagagtagacgagtgagcgtggcggcgtccatggtgacgacaccacacgagacagatcgctacagcttcgagcgctccttcatggatcttcgcagtctcttgcacaagaccgtcgctagttcttctgctcgtcgagtgtgacgtgtacgtataggtagagactcgnaggtagcgtcgaggatcgatatcnatgctctaacgagttagttctctctgtanancaaccgnatgtncataggagctgagagacacaatagatgatcatcgctagtcgtgaacagtcgcctacgatgaggtacaacactctgtagctagatcctctatctcctcntcacgtgctgatctatatcgtngtgtgatcgtctactcatgtgggcgtcacaccactacacatcgcacctcgactcttatctcatctcatcntgcgatatgccatcagccgnactaccgacatgactatgtgagtntcgatgtaggagagcagcgcgggagagtaggagggaggagngggagtagagattcagagatatgcgaggttcttagatgattatctcacatcatagatggtaaatcatatagtagatgcacataatggcaagtncganagtncgactaagagtgatgtgtacagctgcag

SEQ ID NO: 5469 - DNA, 1527 bp, Glycine max
  misc_feature (1022)..(1022): n is a, c, g, or t
  misc_feature (1081)..(1081): n is a, c, g, or t
  misc_feature (1337)..(1337): n is a, c, g, or t
  misc_feature (1394)..(1394): n is a, c, g, or t
  misc_feature (1463)..(1463): n is a, c, g, or t
  misc_feature (1489)..(1489): n is a, c, g, or t
  misc_feature (1495)..(1495): n is a, c, g, or t
  misc_feature (1527)..(1527): n is a, c, g, or t
  Peptide Sequence Number=SeqID_8300
  Probeset Number=SeqID_15248
aatcgtcgggagagacactaacacactaaagcccactcgaacgacgaaggtttcttgagatacgaacgcatcatacaggggtaggtggtgtgtgtatcactcttcctaacctaatgttacctccccgacgtcgccgacatacacacattactcatgtgtccttgacgtcgcactacacaatagttgagtcatgcccccacctcccctctcccccctactccctctcccgcctatttgacatactctttaaatgatttagatgtgtgtgcctcggactattattcgcttacacgcactcgcaccgtgcgacctattctccgccggatcacccaccggagcgcgcgcgctccccgagggtgggcaccggccgtcacagcattgtgtccccccgacgagttggtgtaccgtgatgcccacatctttcgatgccgcgtgtgcttatctcgctacctcaaccgaagcctgccccttacacccccgccttagagtggtgccgctcccggccgtccgcgggacgcctgattgccgcgtcctctattctatgcatatgccgtcaatctatttagctcaggacttacaggaagatacttctcttcctagcagtacatgtcgtctgtgttgaacaacgactcgtgtccgtcccgcaacacttcatccacgtcgtgagaatacccctatgatgtaaccatcacacacagaagcccttcgtattaatcctctttatgcccagcgtcgctcgttcgaacgcggcgggcagcgtaggttggttaccgatgtgtcccgtgttttcgtctacatgccgctcgatcgtccatgcctagacgtaatctcgacggcacagaagcgcgaggtgtgggccgcgtgctaagtaactcgcacctcgatcccatcgcctgctggcctatgttgacgtatcgttcggcatgagccagtgccttgcgccgcttgcgtgtcaccgccactttgtagatcgcgtctgcgattaatcgtctatgcctacggagggatgcgctcctcgtgancgtaactctctcctacgtatgttgtccgcgtgtacacctgagcacatcagaggacctancgactctgttcagaggccactcgcgaattgtatcggaggagccacgcgaccacactctaccccaccgtctgctagtcgcacagcatggcataaaatgccgcgcctcatggtacgttcgtaatgattgacgagtgcagtcaacatcttccgatgtctttacgtggccactactcaatcgctctctacactactcactcactctcataccctcagcgacgcagcttcgaacagcctagtagagacgtgacgctgcccnctgcatcctgctagtcctcacaccacctacagccgagtaacgacatctataacgganatggacactcgtcgttatccgcatatcatgctgctatctgtgtgatgaagacggtcatgcaggtagagnggcagcactatggaagtagagtcaanagcggncggcgcggctgtttcgcgctctaagctcgcgn

SEQ ID NO: 5470 - DNA, 1336 bp, Glycine max
  misc_feature (122)..(122): n is a, c, g, or t
  misc_feature (627)..(627): n is a, c, g, or t
  misc_feature (648)..(648): n is a, c, g, or t
  misc_feature (662)..(663): n is a, c, g, or t
  misc_feature (666)..(666): n is a, c, g, or t
  misc_feature (676)..(676): n is a, c, g, or t
  misc_feature (756)..(756): n is a, c, g, or t
  misc_feature (1326)..(1326): n is a, c, g, or t
  Probeset Number=SeqID_15249
agggtggcggacgttgttatacgtagagatagatggagattagtgtgagcttcgatgggtaccgtgataagttatgggcgttctgcagtgtgtttgctccagaaggagtgatagttctgagntggtgacaaaatatatagatatataagatgtaatgagacccgcgtgcattagaagccatgcacgataggaaggagaggcagaagcggtggtagtgtcgttgatgcgctgccagctgatgctactgaggtcgtgtaggatagaaagtgaggccgcatggtaactgaagagcagagatgaggagagagtaagcggtaggctacaataagctagctacgcttaggcgtgggatgtgtgtcgccatattcctagaagagcgaggagtgaataagaggcgggagaatcgtctagagaatgagtgagtggaggtggagaatacggcgtcagggagaggtgtataagagaccgtgtacgtttgagcagtagtctgtcatgggagagagggtcgagaagtaggtggtgtgggtgtctaagatatttatatatatacttcatattttgtgagggtgttagtagtggggtattcacttatctaaatcatacaggcggaggaatgtagttattgtntttccttgtttcttctctttntatttcaattattnntanctttaagatntgtggacgcagcgggcgaggatcgggaaggaagagggagaagaggatcaaagactatatcagagagaaacgagacatcgnagaggcgcgcgacactattgtaccgcggcgacatatatttggatagtaatgtggttgttactaggtcagtatatatgatatttttattagtgaaatgtaagtgcacatctagtgatgagtgagggagaagtgaggtaaatggggaggtatgtattgtatggagagagtggggtgaggtgatggaataaggggcgtcacaccgtgcgcactgactggtcccacaggacgggagctatagataatcaaggggcagaggcagatcacgaacgcgtctgagtagtgcgttgtttgatagggggttgagtgtggtgtgagcgggcggggagggtttcgttcgatatataggatcactgtcagaccccatagatatacatccatatctagggaagagatctatgcgtattagatgaggagggacgccgcggtgtgtgctaggttaaggcgggggaaggcgtcttatctctcatactgatctgagggcgggcggaccgtgagcaccattgtggtggtgctgtgtcgctggtagtaggcgcgaggtcgcgtttgcggttttttactgttccgatcccnccctccctcc

SEQ ID NO: 5471 - DNA, 1515 bp, Glycine max
  misc_feature (1)..(1): n is a, c, g, or t
  misc_feature (39)..(39): n is a, c, g, or t
  misc_feature (1391)..(1391): n is a, c, g, or t
  misc_feature (1398)..(1399): n is a, c, g, or t
  misc_feature (1412)..(1412): n is a, c, g, or t
  misc_feature (1459)..(1459): n is a, c, g, or t
  misc_feature (1468)..(1468): n is a, c, g, or t
  misc_feature (1482)..(1483): n is a, c, g, or t
  misc_feature (1485)..(1485): n is a, c, g, or t
  misc_feature (1487)..(1487): n is a, c, g, or t
  misc_feature (1495)..(1496): n is a, c, g, or t
  Peptide Sequence Number=SeqID_8301
  Probeset Number=SeqID_15250
ncaactgacgcgtgatgtgcacacgtgtggcactcactncttaaccgctacgtccccccggcgctggtctcagccgtcagtcgctcaacactctacgttacacactccgtcaccatcagctcacgagtgcctgaggcttccgccgttggcgtgcaccacctgtggcagatgcggacactgcatagcagagtcaagcgcatcccctcacgcccaccctcaccatcacctcaatccagtgttgcagacaaaagaccatccgtgggagcgatgcgtagcgaacgcatccaagctccgctacgccctcctgctttctgcgcctccttctgttgctgcgttcttctatttcttccgttcctttcgtgcgtgtgtgtgtgtagtcagccgtcgtccagtcaggatcggcgccagcccacgtgcgacccccgttcgccccctcccgctgccgctttccatctctcaacactatatctttcctctagtattactagtctaccgggatcacacgactacacagacagtcaaacccagccatgcgataacataagcgatatgagcaaccgacaacacactcccacgcctgaccataagggcgcggcgccatgatgcagcgcatctatgatgtgttctcgatatatcgtttgttctctatgtgtccatcagctgctttcatatattccatagtagtatcgtatcgtgggttccttgtgctctcatatcgtactctctgcgcacacatggcgcgctagtccgagaattcaagcatctctcgcggcgctgagagacttttcaattccggcatcatccgtgcccttgtatactatattcgcgcatgattcttcttttaccgaccgctcactcctcccactattacttgctccgttctcaccctacacttaataatagggtcgcgagctggactagtcgccgatatgtgttgattcggccgtggctgcgtcgtattccgccgtcccgcggccagtctcggcgcctcctacaacagcacccggccacagacgccccacacactcaacccacgcgacactcaacaatagagcaccactaagcggcgaggggatagacgggaagagcggcaagggaaactccattgtcaagacactgggggtgttggctgtgctacgtctctcatatcttgctgaccacagtcaattcccctaattacacgaagagcctagtagcatacactatacattgtaaaagaatacgtacattaattatggaggagttaaaagcagtgaagctatagccagccgaataccaaaacttacagatatctgagcgcaccacgagtttcactctatctctccagcttatttcctagactaggttctgcatgtcatctctaatcattattatataacagtagatgggangcggtgnntattggtctaggnggtgtgtgagtcgtgccgccagtctatccgtccctgccctcttccanttcccagcnctacacaaacaaannananaaaggggnnggagaggggcaaacccccc

SEQ ID NO: 5472 - DNA, 1528 bp, Glycine max
  misc_feature (9)..(9): n is a, c, g, or t
  misc_feature (115)..(115): n is a, c, g, or t
  misc_feature (521)..(521): n is a, c, g, or t
  misc_feature (549)..(549): n is a, c, g, or t
  misc_feature (1087)..(1087): n is a, c, g, or t
  misc_feature (1467)..(1467): n is a, c, g, or t
  misc_feature (1503)..(1503): n is a, c, g, or t
  misc_feature (1507)..(1507): n is a, c, g, or t
  Probeset Number=SeqID_15251
cgcgtagtnatatagagcgaggggatggagtggtaatatagattgcgccatggtgccttgagagcttcactgacggtgaattaagaagtgacagcgaagtgcgatggattatggnacgcacagagacgaccgccgtgtagtgtcgtggaatgtatgagtatgtgtgcgcagtgtcgtgtccgtagtgcgcagagtgcgcgcgggtagttgtactctggatgtgggtatgtgttgatacaagaaggtggtgatagtgagagaccagagaggtgagtctgtgtatgatcgatctccagcacgtagaaagatggattatgagcacatcattgcgccggcgtcgcccggattggtaagatatgttattggtgtgcgggcgagaggctatcagcgtgttataggtgtgactagtatgtgcgcagggaagaggccgtagtgtttgcgtgggctgtgtcaagagcgcgtgtagtcgcactccaggagtgtagtagagcgatgccgtagaccgctgagcagagaatganattagtgtcagacgcttttattaggaangttatatcgagcagtgtgacggacggatataggagtatataggcgatccattgacagcctactcgtatggagtccacatgtattcttctgtatttctatggaaggatctttgcgcgcatgtccgggtgtgttgtatgtagtaagctaaggtggataagcgggatgaggactgtgtgatggtgacggttgagaggaacgcacatttctaaaccagtggggagggatcagatatatagcgaggcgaatgactaggtgatattaggtctaagagatatatagttggactagagttatatgaccgggtttcagaaatatgcgtatgtatagtgattcaattataggagtagcaaggagggggtggatgattgtgtacccattacggcctgcgagggaagtcattcgtagagaaatccaataacacgtagttatatctagggacgatatgagatggacagtccgatacgattgtgtacaagtataaagctcgtgcctgattgcactggcttctagtgcagagggcgtgacgagggctttgtcntgcggtagcgagctataggaacacaacgagtctaggctgaggccgagtgaactctgtccatatgatcagacatggcgctaattggtggcatgtgagatctcacttgattcatatactactcctgcgaatagcgtagcacagatatcgatcatgattatagtggcgagcttgtaacgaagtcagtacctgatctaaccgtagcaacacagaacaatggatacatgaggatgcggagcgggcatatttgttggactagcgtgacagcctatgtacgcacagagaacatatatataatatttatgaggggggacgggagggtgcactaacatacggccgaccgcgggggaggcggcatcaacagtattatcaaatagagggangtgtggggggtggtagagaataaagatagaataaangtgnagaggtggaaaggggagttct

SEQ ID NO: 5473 - DNA, 1496 bp, Glycine max
  misc_feature (1)..(1): n is a, c, g, or t
  misc_feature (18)..(18): n is a, c, g, or t
  misc_feature (28)..(28): n is a, c, g, or t
  misc_feature (62)..(62): n is a, c, g, or t
  misc_feature (96)..(96): n is a, c, g, or t
  misc_feature (100)..(101): n is a, c, g, or t
  misc_feature (135)..(135): n is a, c, g, or t
  misc_feature (195)..(195): n is a, c, g, or t
  misc_feature (244)..(244): n is a, c, g, or t
  misc_feature (274)..(274): n is a, c, g, or t
  misc_feature (439)..(439): n is a, c, g, or t
  misc_feature (500)..(500): n is a, c, g, or t
  misc_feature (770)..(770): n is a, c, g, or t
  misc_feature (901)..(901): n is a, c, g, or t
  misc_feature (1009)..(1009): n is a, c, g, or t
  misc_feature (1025)..(1025): n is a, c, g, or t
  misc_feature (1037)..(1037): n is a, c, g, or t
  misc_feature (1051)..(1051): n is a, c, g, or t
  misc_feature (1137)..(1137): n is a, c, g, or t
  misc_feature (1260)..(1260): n is a, c, g, or t
  misc_feature (1263)..(1263): n is a, c, g, or t
  misc_feature (1320)..(1320): n is a, c, g, or t
  misc_feature (1322)..(1322): n is a, c, g, or t
  Peptide Sequence Number=SeqID_8302
  Probeset Number=SeqID_15252
nggggggtgggcggcgtngtctccctgntcccttattcatcctggcgcgctctgtggggagncaaatgtgaggggggttgaggacagtgtggtttnttannccccgcggcacaagtatcgcgtgctctctcactnattatgaatcacaaacatgactccaccgagtctgtacgcccacacctcagcacacgaatntattaggaggatagacagcctgcttggagtagttccgtgagatatgatntgtatctcccggctgtcgcggctatgccgnagctctccaccaccctgtcgcgctcttattgtacttcgtaacatatacctttcctaccatatagacacatacgtctcgtatttcgcgctaccccatgactacccccacggatcgtcgtgctctcctgcgtactctgtgatttgcgcgtcgtggtgttggtcgggntgcggtagtaaagtagagtggtgccgtgcaatgcggtagaagcgccagcgcataggaggancacggcgactcgctctcacgcgcacaccctacatactcaccccgacatctctcatattatatgaactctcatatattcattctctaacaacatcatgagacacctatgatattacaatgcgcaccaccgacatcatcaaggaagagaatattcatacatcactatcataatacacaatatcaactctctctcacttacactcgacgtagccaacgtcatgacgacaacgacataatatcacggagtgtgtgtgctgtgctctcttgcgcntcctcttggattaggagtatctgtgcgccgaggaagatgtgtggtgagatgtagcatctaatacgagctacgagcctgtggaggctgtcgcgaaacagtatatggagctgcggacagaagtgtgtgatgantactaacaacaataacaacataggcctacaccgtatacatcacaacacacgtacagtcatattatgcactcaatgtatcgaacgtcgcgagtgtctatatgagcgtgnagacgcgctcgtgctngtgtatatgaantaatatatatggantcgctcacgcgcacatatcatcgatcactcactcgctgcgtgcgctagcgctcatactactgacatgccattgcatagctcgacgncagtcataaccgatagtactttatcatacgcatatatatgtagatcgtgtatgttgaaagagaagacacactgcaggacgcagatcagctcgacacagaatacacattacacacacgtgtatnatntaagaacagagtcacacatcgactcagtagagagtccgcgcgcgtgcgcagatatgncnatacaactgtgtgacttcacgagcatcgctgtgtgagcagacgcagactcgcacgtgatagaatcgcgatacagagtctgatcactctgcgacctcgctctcttcacgccagagcagctacatgcgcgagcacttacagctatcacgtatctgtcacgcgtcgcgcacctctcg

SEQ ID NO: 5474 - DNA, 427 bp, Glycine max
  Probeset Number=SeqID_15253
atcagtttagttccatcttcttatggttatgttccgtcagatcatgttagcatagaaaaaatagttttgttccatctacttatgggctttatggctatctaaaaaggctagtagcatctgtaagtgtatttttagttcctaccttcagtatatttctgtgtaggctatgttcttgaccacatcatcctcgctgttggtttatttgctatagaaaagaaaataacatgtgtgatcaagtcggtacggcattacttgcgagtgtgtttccaaatattccctttctcttacatttctcatgaactctttgagctttatgtagatcacccggtcaacaataccaggtctttatgatgctgctatgcctactttctgtagcaaagattgaatgtgacaaataggtctgtgtatccagcccacctacatattg

SEQ ID NO: 5475 - DNA, 1659 bp, Glycine max
  misc_feature (21)..(21): n is a, c, g, or t
  misc_feature (57)..(57): n is a, c, g, or t
  misc_feature (67)..(67): n is a, c, g, or t
  misc_feature (97)..(97): n is a, c, g, or t
  misc_feature (112)..(112): n is a, c, g, or t
  misc_feature (118)..(118): n is a, c, g, or t
  misc_feature (176)..(176): n is a, c, g, or t
  misc_feature (342)..(342): n is a, c, g, or t
  misc_feature (954)..(954): n is a, c, g, or t
  misc_feature (1179)..(1179): n is a, c, g, or t
  misc_feature (1254)..(1254): n is a, c, g, or t
  misc_feature (1375)..(1375): n is a, c, g, or t
  misc_feature (1380)..(1380): n is a, c, g, or t
  misc_feature (1401)..(1401): n is a, c, g, or t
  misc_feature (1404)..(1404): n is a, c, g, or t
  misc_feature (1466)..(1466): n is a, c, g, or t
  misc_feature (1535)..(1535): n is a, c, g, or t
  misc_feature (1537)..(1537): n is a, c, g, or t
  misc_feature (1546)..(1546): n is a, c, g, or t
  misc_feature (1571)..(1571): n is a, c, g, or t
  misc_feature (1587)..(1587): n is a, c, g, or t
  misc_feature (1592)..(1592): n is a, c, g, or t
  misc_feature (1605)..(1605): n is a, c, g, or t
  Peptide Sequence Number=SeqID_8303
  Probeset Number=SeqID_15254
gggactaaggaggcgctcacngtgagacctcgcgccggtctattcatcttttatatnatttgttgtnattatgcatctgtgtgcgtgagtacactantgacagtatatttantcaagnagtactgatggtcagacctagacgcgcgacgtgacagagtgagccggtagcttgactntatagaatcaggcggtagttgtggatgtcctaccggagggagttgataacgatatcgagtgagaaggggtgctgtctcttgtatatgtggttcttcaccatataataaaaagagcgagaacacgtacagtatcgctatcgctgtactatcgagatgtgctcacggngcaccccgtaaacataatgagaacgaggcgcgacaaaaggacgcggcgacaagcgtgacagatgtcaagtttatccatatatatccgctgctcgtttgcgacctgacggacgacaactgtatcacatcataaggtgtcatctcgtctatattaatatggagattctatcgtgagcgcagcaataattcgatctatacacactacttggatacaccgcgcatataatacgtgcgcaagagcgctcagaatacgcaagagatgaatatttttacaataataataataaaactttcgattctcgctgacaccgcacaagcggtcacacatcttaatgttgagatatatgatatagttccgggaggtggtagtggtggtgcgaatacgagctgcgataatatacgcctccgctggctcgcggctcgccacctgtgtgtattaggccgagattgatcatagccatgtgtagtgtcgtgtcatgagagtggatatgtgtgtggattattttctgtgcgctctactgtagacttgtgttgactaattctcatctgtcactactaaaccactgtttattgcgtcgtgcgtacttccgatgtgtatattatattatgattnctaccttactccacacacacctcacaccctgctagtaatatactatcgtatgctggtctgtcgcttatggtttgtattattgactatgcataacctgtctcatatactgagcgtcacctcacttcttctcgatacagaccgtgcgtcgaatatactatcactgagactcgtgcagatgatgatagtatcgatcgtacatacagtgacatcatatacaaccgcccntgcatattaaatattatctgtctaggcgtgtatatgtggctcgctacactattcgatgtcttcaacactactgangcgtgcggtcgtaattatcccgcaccgagtcctctgtcgccgcggcgcctcgaacagtcattgaatctcagaagtatatgatacatgatgtagtcgacggtcgcgagagaatatatacacngagcnacgcgagctgatatattatcnatntatatcgcatgtgattgtcgctaagtagaccgactgtgatggagactgagtgcaacacgcgncgaccgcagttcgaccgtatatgcttatataatatgctcggtactcgtgaccgctcgtttatataacgntngcgaggggngagctctagtggttaagtgacacgngcgtacggagtggcgngtagngcgcgagtaacgntcatatatagatactatagtaatcgtgttacgtcacgaacgcgtctatcgaggt

SEQ ID NO: 5476 - DNA, 625 bp, Glycine max
  misc_feature (624)..(625): n is a, c, g, or t
  Probeset Number=SeqID_15255
tcagctacgtaggccccctccccccccagcagcaaatggaaatttcctaacttatgacgttactggtgtcaaggcaaacacatctgctttcattcatccaaatcatcgcttcaacttcaatttcagttcagacaatctcgctcagattactgccttgggtgctggtgttgaggcaagattgactctagctcaaaacggaaatctggtttggcaagtcggctcaaatgatgcatggaaaatcattcgtgcctctagctactacaatactctgatccaactccaaaatgtgagaactggcctgtacttaaaagcagcaagccaaagctgggcgatgactgataaccaatcagactcttcaacttacctcaaagtcttttccattaatgtccttccacccaaaactcagtggaatgaaatgaaccctcttgctctctcccctcctggaacaaagctcgttttagctgctaataacttgattcagcaacaaaatagagccactctcgataaggaatacagtttgacttggaaagccactcatatctatggcgatttcttcaccctgcaaacatccaaaactctcgataagccctctctttctcttgttggatcaggcttattaactgnn

SEQ ID NO: 5477 - DNA, 1760 bp, Glycine max
  misc_feature (116)..(116): n is a, c, g, or t
  misc_feature (172)..(172): n is a, c, g, or t
  misc_feature (218)..(218): n is a, c, g, or t
  misc_feature (308)..(308): n is a, c, g, or t
  misc_feature (359)..(359): n is a, c, g, or t
  misc_feature (433)..(433): n is a, c, g, or t
  misc_feature (480)..(480): n is a, c, g, or t
  misc_feature (1073)..(1073): n is a, c, g, or t
  misc_feature (1333)..(1333): n is a, c, g, or t
  misc_feature (1440)..(1440): n is a, c, g, or t
  misc_feature (1486)..(1486): n is a, c, g, or t
  misc_feature (1542)..(1542): n is a, c, g, or t
  misc_feature (1666)..(1667): n is a, c, g, or t
  misc_feature (1716)..(1717): n is a, c, g, or t
  misc_feature (1728)..(1728): n is a, c, g, or t
  misc_feature (1744)..(1744): n is a, c, g, or t
  misc_feature (1747)..(1747): n is a, c, g, or t
  Peptide Sequence Number=SeqID_8304
  Probeset Number=SeqID_15256
agcgcgaagggtcagtgtagagtacatctactctacgtgagtagacagggaaggcacctctatctattcgtctggatagctattatgagtgcgtgctaccacattcagacacgcgngcgcgaagtatcagtgccacgcgagtgtctaacgtctgcttctgtggagcatgtcncgtgcgctatgtgtgcgcaatgcacattcacctcgtcttccgagtncgccgcagttgtgtgtgtctcctagctcacattgtacgtgtagtcactcactccgactgtgaaggacccgtgtataatggtagtgtgttncccatacatcatccgcatcgacactaggcatggcaatgtctactcgagtcngcggattgggcgcgtagaagcacactcccctctatacatgtcgtgacagaaccatatcgtagggtgtagacacnagagtccactactctatatctctcgcacgagaggatagtcgaagcantgtcgcgccgccagcacacacctcatagaaggacgtgtggacacgctgcccgcagcgggcttgcaggtatacctgtctgagagtatccatcctgcatatatagcaagcatagcactcctattacgcgtgcgtaacgcgagggtagtacgactctacttccagagtggccgaccagcgttccatactctctgtgtaacgagtattagcgcgtgataactggcgcccaggtatgagccgcttcccgaagaagtgacgcacttcgagttagtcctccaatacgcggtgatgcctcccatctgcaatgaatgcggcgtgaataccctattcgtagtatctcttcagagagagagtagaaggatatcgtaccaagttcttccctgcgaggatgttcatagtgtcaactactactttgcttatgaggcgagaggcggaatctccactagttatagatcatatactgcatgtcagttggccgctgagcttatgcacggtgcgagatatttcctccgattggagcctcctcctatgtgcctctgcgcgcggtggatggactctaaattccggcagagacatcaaagggagtgtagacactnccttagacatgacaaacaatatactaggatacacgttgagcaacctcctcgaaacactgctttcgctgcagttgtgcttcatccgggctcggacctggaatatagatgcgccgcaatcctgatatggcctcgctagcgatacggtgatgcgacagagattcccacttctgaccggagcagaactgtgttagttttacccatcttcctaccgctcgcacggggtcagcggcgcgatgtcgcaatacagtatattctcaagncgggcacgtacggaatcatacgtgtcccaccatgtacatgcctcccagatagggtcgcgtgaccactaggatgagtccaccgtcaacatgttaacgtcactagttanctatgcaccccataagcaatcattagtccttgtgattctagtctgntctccgtcactaatttgaggcgcgtaaacagtatacctctcctctctcattggtangctatattcgcgacacggtctatttctatcatgcaaccttctctgtgtttccggcgcgaagataaaaaaaaagagagaaaacgacgctctgctcgtatcgacaaaaacgccctctgcggagggnngggccctctctgttctactcattggcgaaaataaaaatgttctctactnngatgatattgngatcaacgctgcgtancgncgcgccgctcagc

SEQ ID NO: 5478 - DNA, 956 bp, Glycine max
  misc_feature (956)..(956): n is a, c, g, or t
  Probeset Number=SeqID_15257
ctctttctttctaatctctctctaaaggtttcgaagaaaaaaaaagactttggtggccggtggctaccaaccctttctttttttgttttttgatcggtaaaatatcttcgatcattagatcgattttatgtttccgttttagcggatcttttcttcgcaaggcgattttgaagtgtaaaagtttcaatcaaatcagacttgttcatcactcgctatctatttttgatttgattgattctgaataaagtttgaaatctgcttttcgctctgacctctattcttattccggtgatgctcagttcagatgcctttttcaccgctcactctaaccactttctaagagaattagtcttcgctatttgatatatccacttgtggtgttctgtaaagcgtctctgatcggaagtaggtggagttagaaggattctccaaatcgttgttggagaaggttcagaagagttggcgttcttgtgacggtccagcaaagagtctttctacacctcgatttaagcgtcctcagatataaaatccggtgcatcaaggcctctctgtttgagtactgtcggttaaggtgaaaagcaatcagggagaattcaagttttaaggttaaagcttgaggtagatcaatcatgacaaaagctacgccggcgacaagtaccggcatcggtggtggcgatagaaacgactcctcagtctcccatctgttacggcggcgcgtgcagacacgtctgcagaagctcgagtggaatgtgacctggaaggacgcgtgttaggaagtccttggaagggagacgcgtggccttttacgtgttacacgattaggtttcgagtcaatatattaggcttgacaactatatgggtttaattttaattgagtttgtaataatatgggatttgggcttttacctttcttgtatctctccctatttggatttctttcaatgaaagaaaggttn

SEQ ID NO: 5479 - DNA, 1660 bp, Glycine max
  misc_feature (16)..(16): n is a, c, g, or t
  misc_feature (53)..(53): n is a, c, g, or t
  misc_feature (70)..(70): n is a, c, g, or t
  misc_feature (73)..(73): n is a, c, g, or t
  misc_feature (78)..(78): n is a, c, g, or t
  misc_feature (103)..(103): n is a, c, g, or t
  misc_feature (185)..(185): n is a, c, g, or t
  misc_feature (236)..(236): n is a, c, g, or t
  misc_feature (251)..(251): n is a, c, g, or t
  misc_feature (275)..(275): n is a, c, g, or t
  misc_feature (280)..(280): n is a, c, g, or t
  misc_feature (321)..(321): n is a, c, g, or t
  misc_feature (341)..(341): n is a, c, g, or t
  misc_feature (469)..(469): n is a, c, g, or t
  misc_feature (522)..(522): n is a, c, g, or t
  misc_feature (606)..(606): n is a, c, g, or t
  misc_feature (752)..(752): n is a, c, g, or t
  misc_feature (756)..(756): n is a, c, g, or t
  misc_feature (761)..(761): n is a, c, g, or t
  misc_feature (777)..(777): n is a, c, g, or t
  misc_feature (781)..(781): n is a, c, g, or t
  misc_feature (790)..(790): n is a, c, g, or t
  misc_feature (792)..(792): n is a, c, g, or t
  misc_feature (798)..(798): n is a, c, g, or t
  misc_feature (810)..(810): n is a, c, g, or t
  misc_feature (853)..(853): n is a, c, g, or t
  misc_feature (865)..(865): n is a, c, g, or t
  misc_feature (872)..(872): n is a, c, g, or t
  misc_feature (917)..(917): n is a, c, g, or t
  misc_feature (924)..(924): n is a, c, g, or t
  misc_feature (937)..(937): n is a, c, g, or t
  misc_feature (948)..(948): n is a, c, g, or t
  misc_feature (1069)..(1070): n is a, c, g, or t
  misc_feature (1115)..(1115): n is a, c, g, or t
  misc_feature (1124)..(1124): n is a, c, g, or t
  misc_feature (1345)..(1345): n is a, c, g, or t
  misc_feature (1347)..(1347): n is a, c, g, or t
  misc_feature (1360)..(1360): n is a, c, g, or t
  misc_feature (1362)..(1362): n is a, c, g, or t
  misc_feature (1405)..(1405): n is a, c, g, or t
  misc_feature (1510)..(1510): n is a, c, g, or t
  misc_feature (1619)..(1619): n is a, c, g, or t
  misc_feature (1621)..(1622): n is a, c, g, or t
  misc_feature (1624)..(1628): n is a, c, g, or t
  misc_feature (1633)..(1633): n is a, c, g, or t
  misc_feature (1635)..(1635): n is a, c, g, or t
  misc_feature (1639)..(1640): n is a, c, g, or t
  misc_feature (1644)..(1645): n is a, c, g, or t
  misc_feature (1648)..(1648): n is a, c, g, or t
  Peptide Sequence Number=SeqID_8305
  Probeset Number=SeqID_15258
ttcatgagcgcagctngcagcgtgactgtgttgatgtctcgtatacgcgtacntcgtcgacagatctcgncgntttcntcatggtgcagctgaccgcgcaagntactctctctctgtgtctagctgagtgactatcacgtgttagctgacctgcgcataacagatcattatacgaggtaccgtgngacagttgacgaatcaacgacgctgggctacagctcaccacaccgtacgtnacgaatcctagtgancgtagcgagatcagtcgacagcgnatagngcaacatacagtgataggctctgcacgacgcggcgcaggcnacgtatatacgtacaatgcntagacaagataccataggcgacatgtgcggccggtgattgtccgtgtaagaagagcgaggcggcagagaacataggagagagtggaggcgagcatcggcatagtcactgtgtaccgcggggagtatgntgtgtaagcgataggtctcgggctccgcgctctgtgatgccatggcagggcgnggcgggggagacagagtgtataagactaattctaaccgaatgtagactaaccagaggacaagccacactgtgggtgtgggaagntgtatagtggtgggtgagtgcaggccatcgatcgacaactcacatacaatcagcaccacgagacagcgagaagcggctacaactcgagcagcacattatcaatcatcaatctctacacaacagccagacaccgacaccaacacacnactnatgtnaattaatccttccatntctnattatccananatatcnctcagttacgtnatcatcaacacatattatcacaattacaaaatgactataaganacaagcggaagnataaganaacgtcgaaatgacgagaggagtagcgagaggaggcgcagacacnatagacngtagcgtagcggnactcagcacgncgtcgcgagatagaacaggacagaacacagcagaacgagagaatcgaacgtacgagacagaggtagaaataaaaagagcaaagcggtgagatggcgtaagaagactataattatgaaaaanntagatacaaccatacgataatgtataaatgtgcagggtgactctngctgcatcntcgcactcatgccctccgctcctcgcgctctctccttatcatggatgtaaatggatagttatagataatgaatataactgaccgtacaatcgaacaagcgccaagtaggagagacgggcgcgcgctcacgacttcagcgcgatgccgcgcggtgctgccacccgtgtgatcgtcgtgtgcacaagcacaagtatgacgcaggcagacacagagagagagtncnaatcctacgacangnggtgaatgtattgttgtcgccccatcgcgctcgcgcgcggacnagcagagagactaagagagagagacagagcaccgtatccccgccctggctacgccgtgtgctgtgggagctctctctgatattgcttcgtgtaggtcgagcgacncacctcactcccctcctgatgagagaggcggcgacgaggacgtatgacttgtgttggcgctacgaggcgagcgcgggcaaagcgacgagcgggacgccgacgtctcctncnngnnnnnaaaanancaannaaannacnaaaagaaaaaaa

SEQ ID NO: 5480 - DNA, 398 bp, Glycine max
  misc_feature (58)..(58): n is a, c, g, or t
  misc_feature (84)..(84): n is a, c, g, or t
  misc_feature (252)..(252): n is a, c, g, or t
  misc_feature (279)..(279): n is a, c, g, or t
  misc_feature (319)..(319): n is a, c, g, or t
  misc_feature (362)..(362): n is a, c, g, or t
  misc_feature (364)..(364): n is a, c, g, or t
  misc_feature (379)..(379): n is a, c, g, or t
  Probeset Number=SeqID_15259
ttttttttttttttttttgaacaacacgctttgcagttggatatatctacaccataanaagcctgtctaatacaatgaactacnccaatagttcctttctttttccctatgtctccttgatctgaaggaactatgatgcttatccccattctcgttctccgccatctcccatttcttctggaattcctcatacacctagtatggaatgccgtcgtattcaccgtaacccagcgccaagttcatgttctgcanacactgtgtagcagcgcccttgagcanattatcaatagtagcattgacaacgacgcgcttgccgganctgtggacggcgaaaccaccaatctcaacgccgtgcttgccananatgttcttgacaagnggggactcgcccacgatct

SEQ ID NO: 5481 - DNA, 555 bp, Glycine max
  misc_feature (23)..(23): n is a, c, g, or t
  misc_feature (292)..(294): n is a, c, g, or t
  misc_feature (336)..(336): n is a, c, g, or t
  misc_feature (339)..(339): n is a, c, g, or t
  misc_feature (354)..(354): n is a, c, g, or t
  misc_feature (374)..(374): n is a, c, g, or t
  misc_feature (380)..(380): n is a, c, g, or t
  misc_feature (401)..(401): n is a, c, g, or t
  misc_feature (405)..(406): n is a, c, g, or t
  misc_feature (411)..(411): n is a, c, g, or t
  misc_feature (415)..(415): n is a, c, g, or t
  misc_feature (417)..(417): n is a, c, g, or t
  misc_feature (423)..(423): n is a, c, g, or t
  misc_feature (425)..(425): n is a, c, g, or t
  misc_feature (444)..(444): n is a, c, g, or t
  misc_feature (447)..(447): n is a, c, g, or t
  misc_feature (450)..(450): n is a, c, g, or t
  misc_feature (453)..(453): n is a, c, g, or t
  misc_feature (475)..(475): n is a, c, g, or t
  misc_feature (485)..(485): n is a, c, g, or t
  misc_feature (489)..(489): n is a, c, g, or t
  misc_feature (491)..(491): n is a, c, g, or t
  misc_feature (496)..(496): n is a, c, g, or t
  misc_feature (512)..(512): n is a, c, g, or t
  misc_feature (517)..(517): n is a, c, g, or t
  misc_feature (522)..(522): n is a, c, g, or t
  misc_feature (525)..(525): n is a, c, g, or t
  misc_feature (527)..(527): n is a, c, g, or t
  misc_feature (539)..(539): n is a, c, g, or t
  misc_feature (541)..(541): n is a, c, g, or t
  misc_feature (543)..(545): n is a, c, g, or t
  Peptide Sequence Number=SeqID_8306
  Probeset Number=SeqID_15260
cgggccccccctcgagtcagctncgtaggccccccccccattttacataaagagaatgcaggataggcttaacgattacaagagaagctctctcgactttagcgaatctggatctggcgaaaaagattacagatcaagaggttactcaaaagaaagcagcgtcgaagatccatatagtccagaaggcaaagcctattcacctgacgtccattctcttgaaggatctttaaaaccaactccaaaatcaactctcagagaagtgaatacattagcctcaaaaggaaagaagaannntatcatcctgaaagattgaacgaaacacacagaatagctcanaanagcgagagtagtctncactctggagaaagaaggantgcctncaataccaatgatttaggacnttgnnattcntcananaggaancnggatattctggcggttttnggnttncanatagaactgaagaagagaggcnagcccttgtncttnanataantctggtacttctgctntgatncttgntancnatttgtccctanantnnngtgatgcgtt

SEQ ID NO: 5482 - DNA, 1399 bp, Glycine max
  misc_feature (19)..(23): n is a, c, g, or t
  misc_feature (27)..(27): n is a, c, g, or t
  misc_feature (30)..(32): n is a, c, g, or t
  misc_feature (34)..(37): n is a, c, g, or t
  misc_feature (88)..(88): n is a, c, g, or t
  misc_feature (90)..(93): n is a, c, g, or t
  misc_feature (95)..(97): n is a, c, g, or t
  misc_feature (99)..(99): n is a, c, g, or t
  misc_feature (175)..(175): n is a, c, g, or t
  misc_feature (221)..(222): n is a, c, g, or t
  misc_feature (235)..(237): n is a, c, g, or t
  misc_feature (255)..(255): n is a, c, g, or t
  misc_feature (262)..(262): n is a, c, g, or t
  misc_feature (264)..(264): n is a, c, g, or t
  misc_feature (408)..(408): n is a, c, g, or t
  misc_feature (615)..(616): n is a, c, g, or t
  misc_feature (806)..(806): n is a, c, g, or t
  misc_feature (1024)..(1024): n is a, c, g, or t
  misc_feature (1179)..(1179): n is a, c, g, or t
  Probeset Number=SeqID_15261
ttggggggccctgggtttnnnnncccnccnnncnnnnctctcatctcactcccgcgcgctctctccgctccgcgggtttctcgtcgcngnnnncnnnanaatgatggataagataagtaattaaagagggaggaagaggcgcgcccaccccccttctttaaatgttatataaacnagatatataacacattagaggtatgtcgactgggattgtagacganntttttcttccttnnntttattgttatatagaanacatatnanataccacaatccaacaaatgagatcgccatatcttattctacttcataacgaactaccgaatggaaggtggagccgcactagtcactaacctataaaactcaacagacaaacagggccgacgtgcagacgcgacgcgcgtcctnactacatactacaaacgccggtcgtctttatattattctgtaacaacaccgtgcgcgcggtgttgtgtgtgtggttgtgctttctcttcgcgccctctctctccgcctctcgtgcctctcgtcctcgctttcggtcgtccttctatccgttgcgtactttgtatgctgtccgagtctattaccgtgacgactatagtactataggannacaatatataaatttgacatagagatagtagtcagatatcatagatgtggtggacgcgatgacaacttacttacgacacactgagatacgaacgacaggcggaaggagaaataggacatttgtatgagattagaacaattcaaactatatagttcatgtaagtcacgtgccacacctacaacccgcgaancctacaaaaacgaaagcaaaataacatccaaaacaactcactccttggttatgtgcaaatagtgtagggacatgcgtgtcaagataaatatatatattttgtgttatttgatgtcattatttcgcccacatctacgtgtctaagtctgatggttgttacttattatgtagcgttgtgctatgctgtctaaacagcgaccgcctcaccaccgcacagangagagatgtccatctgattgtcgttatatatatatatacatgataacaacaatctctattatgttcgtcttatctctatgtcgtacattctcctatacgctccttacatttcctactcttctacacttacctaactgtgcgagttcgacggagcnacgctgcattggggtgtgcggggcgctctatctatcttatcatcttatcggtcttgttaactgactatataactgtaatcataacatcacgtagatatcaccgatctgacaacacgcacactgatagcacgctttgctgctcctcccttctattcctctgcgtctagttcgttcacattctgaccacatacacgtgcagacacagatacaaagacgactg

SEQ ID NO: 5483 - DNA, 1858 bp, Glycine max
  misc_feature (15)..(15): n is a, c, g, or t
  misc_feature (23)..(23): n is a, c, g, or t
  misc_feature (26)..(26): n is a, c, g, or t
  misc_feature (30)..(30): n is a, c, g, or t
  misc_feature (36)..(38): n is a, c, g, or t
  misc_feature (46)..(47): n is a, c, g, or t
  misc_feature (50)..(50): n is a, c, g, or t
  misc_feature (58)..(58): n is a, c, g, or t
  misc_feature (61)..(63): n is a, c, g, or t
  misc_feature (89)..(89): n is a, c, g, or t
  misc_feature (93)..(93): n is a, c, g, or t
  misc_feature (95)..(95): n is a, c, g, or t
  misc_feature (114)..(114): n is a, c, g, or t
  misc_feature (199)..(199): n is a, c, g, or t
  misc_feature (202)..(202): n is a, c, g, or t
  misc_feature (232)..(232): n is a, c, g, or t
  misc_feature (234)..(234): n is a, c, g, or t
  misc_feature (295)..(295): n is a, c, g, or t
  misc_feature (297)..(297): n is a, c, g, or t
  misc_feature (323)..(323): n is a, c, g, or t
  misc_feature (534)..(534): n is a, c, g, or t
  misc_feature (556)..(556): n is a, c, g, or t
  misc_feature (563)..(563): n is a, c, g, or t
  misc_feature (584)..(584): n is a, c, g, or t
  misc_feature (646)..(646): n is a, c, g, or t
  misc_feature (666)..(666): n is a, c, g, or t
  misc_feature (703)..(703): n is a, c, g, or t
  misc_feature (882)..(882): n is a, c, g, or t
  misc_feature (1066)..(1066): n is a, c, g, or t
  misc_feature (1182)..(1183): n is a, c, g, or t
  misc_feature (1190)..(1190): n is a, c, g, or t
  misc_feature (1223)..(1223): n is a, c, g, or t
  misc_feature (1232)..(1232): n is a, c, g, or t
  misc_feature (1236)..(1236): n is a, c, g, or t
  misc_feature (1238)..(1238): n is a, c, g, or t
  misc_feature (1244)..(1244): n is a, c, g, or t
  misc_feature (1248)..(1248): n is a, c, g, or t
  misc_feature (1267)..(1267): n is a, c, g, or t
  misc_feature (1275)..(1275): n is a, c, g, or t
  misc_feature (1284)..(1284): n is a, c, g, or t
  misc_feature (1326)..(1326): n is a, c, g, or t
  misc_feature (1335)..(1335): n is a, c, g, or t
  misc_feature (1347)..(1347): n is a, c, g, or t
  misc_feature (1392)..(1392): n is a, c, g, or t
  misc_feature (1433)..(1433): n is a, c, g, or t
  misc_feature (1450)..(1450): n is a, c, g, or t
  misc_feature (1466)..(1466): n is a, c, g, or t
  misc_feature (1501)..(1501): n is a, c, g, or t
  misc_feature (1509)..(1509): n is a, c, g, or t
  misc_feature (1511)..(1511): n is a, c, g, or t
  misc_feature (1516)..(1516): n is a, c, g, or t
  misc_feature (1521)..(1521): n is a, c, g, or t
  misc_feature (1537)..(1537): n is a, c, g, or t
  misc_feature (1539)..(1540): n is a, c, g, or t
  misc_feature (1556)..(1556): n is a, c, g, or t
  misc_feature (1564)..(1564): n is a, c, g, or t
  misc_feature (1574)..(1574): n is a, c, g, or t
  misc_feature (1585)..(1585): n is a, c, g, or t
  misc_feature (1597)..(1597): n is a, c, g, or t
  misc_feature (1608)..(1608): n is a, c, g, or t
  misc_feature (1613)..(1613): n is a, c, g, or t
  misc_feature (1632)..(1632): n is a, c, g, or t
  misc_feature (1661)..(1661): n is a, c, g, or t
  misc_feature (1672)..(1672): n is a, c, g, or t
  misc_feature (1676)..(1676): n is a, c, g, or t
  misc_feature (1685)..(1685): n is a, c, g, or t
  misc_feature (1688)..(1688): n is a, c, g, or t
  misc_feature (1694)..(1694): n is a, c, g, or t
  misc_feature (1696)..(1696): n is a, c, g, or t
  misc_feature (1699)..(1700): n is a, c, g, or t
  misc_feature (1702)..(1702): n is a, c, g, or t
  misc_feature (1709)..(1709): n is a, c, g, or t
  misc_feature (1740)..(1740): n is a, c, g, or t
  misc_feature (1742)..(1742): n is a, c, g, or t
  misc_feature (1768)..(1768): n is a, c, g, or t
  misc_feature (1771)..(1771): n is a, c, g, or t
  misc_feature (1774)..(1774): n is a, c, g, or t
  misc_feature (1784)..(1785): n is a, c, g, or t
  misc_feature (1801)..(1801): n is a, c, g, or t
  misc_feature (1807)..(1807): n is a, c, g, or t
  misc_feature (1818)..(1818): n is a, c, g, or t
  misc_feature (1824)..(1824): n is a, c, g, or t
  misc_feature (1835)..(1835): n is a, c, g, or t
  misc_feature (1842)..(1842): n is a, c, g, or t
  misc_feature (1847)..(1847): n is a, c, g, or t
  misc_feature (1850)..(1850): n is a, c, g, or t
  misc_feature (1857)..(1858): n is a, c, g, or t
  Peptide Sequence Number=SeqID_8307
  Probeset Number=SeqID_15262
gttgttgtgcctctnccgcgccnttntttncttttnnnttttccanncgnataccgtncannnacaacaccacaccacaccgcaccacnaatnanactataacatatatctagngtcgctacggcgcccggacctgttcgagatgagagcgccgcctctgcttatctacacgtaacgtcagcgcagtcgcacacccggnagnggagtagtagaggagtattatctgcgtacngntggtatgtgacgcgactgtgaactcgtaacgtagaacagtcacacatgagagtagcagcanantatacacacacacaccaccatacganaacgatgtatctgttgttatgtagtattgtgatatgttgtgacgagcggagggagatggctggtgttggtctctgtctgccgctctggtggctgaatcagtacaacgacgctggtgaagagaggaagattggcgcgagcgcggatgtacatgcagctcgacatacgtgcgcgtggtcggtggtagggtgctagtatgatcacatagagttnatatgtgacaaaacacatcccncttacancacacatatagacgagcagcngcgcgataagtagaggagcgcgagaaccgagaaacattaagtagtaaatatgctcacgacanacctcgactcatcgcgcatnagaacagtgaaccccatcacatcagacagagactccnagccacactcaacatataaatcacacaacagaagacgacacgaagtagccagagcacgacgctaatatcgagctcatcagagcaatgatcctgcattacgggcgagatagcggcagggcgcacgatgcgtggcgacaacaggagagtcgtcacaaccgatgaatgtgggcaagcagtanagacaaggtgtggaagcacagccgcggcaccctctccagcgccgccggtcatctgttgttgtctactctgcagtgtcatatatacttagtcgatggtgagatcggacacgcacccccacactgcgcgtgtgaggaagtagagcaaggagacaggcacgcgcggccgtggccatcgacgtgtcgnctcgcgcgctgcacgactgtgatacgacatcatcgaccgtccatgtcgacgtgtgaccgcgaaccacacgcacgagcactccacgtatgtacgagtctgtactcgcgagacggacnnatctcanagtcgacgcgcatgctctagtcatactgcactncgtcgccancctncnacctcntcgncgcgcaatcgagatcgcgnactgcggntgtatggcnaacagtgctcacacaaagatcagactcaccgtagcagaccgntcgcgctcntcccgtccactnctacagcacatctacgcacggacacactgccgtcctcaccatccngcgctcacgcgcactacgacgccgcacgtcacgaacgatantataccacatgaactantaacgtgactgcatgntcagcgcgcatgtacgtctgagcgtatgcggacgntgatgcgnantgganacacngatactgcccgcacancnnctccacacatcacccnacccacgntgggcggcgncgacacattgncaccgatgtcantcgcgacttanaccanaccattactagatacaatnctgcccatctcgtacacgaccgtcccatncatcactcctncatntatacaacnacncaacanancgnncnacacgcncacactagcacagacgcatgctgacgaccgntnacttgactctcttgtaccatcgctgngancgntccatgacanncgctgcccgccacctntccagnatcaacagccnctgacnacgactgacgnacgatcntctgnacntcaagcnn

SEQ ID NO: 5484 - DNA, 1394 bp, Glycine max
  misc_feature (1)..(6): n is a, c, g, or t
  misc_feature (11)..(11): n is a, c, g, or t
  misc_feature (24)..(27): n is a, c, g, or t
  misc_feature (29)..(29): n is a, c, g, or t
  misc_feature (54)..(54): n is a, c, g, or t
  misc_feature (200)..(200): n is a, c, g, or t
  misc_feature (976)..(976): n is a, c, g, or t
  misc_feature (1312)..(1312): n is a, c, g, or t
  Probeset Number=SeqID_15263
nnnnnnggggnccccccccccccnnnncncccccacacccaccccgcccgccgngcgcagacgcgggcgaccagccacaccacgccatccctattcacaccaccacctacaataacttccttcgtgctatttctgtggcgtcgcagctcagacgagcagatataatagtttgtatctataggatagtgcaactctacacnacactctccatctgcttgtggttctgtcttgataaccttgtctattatattgttaaaacgttgtattacaatgtaatactaatagcggtggttacaataccgtactcgctgattgcgtacaagtagaataataaattacaaagataatacggagtacagtgtaacaaagagccggcgcggcacggcgacttgttttgtttcctttgtcctcttcttcatgatattaattataagataatatatcatgtggtgtggttctcctcacacttccttcttcgctcactcccccgccgctctccaacccataatattataaacactgatataattaatatcacaatttcattattgggttggtggtgcttgttcctttactcgcgtcttcttatattgatggatgtcttactatgaatacgccctcctcacccgcgattaatcctccatacaatcgctctacgtcgatatgccctgtactactcactcagtgcattctctactactccatttccctacctcatcctctcactgcggcctctcgcgacgctgctcacatacacacttgatgtgttctgtcatcacaccaacctcgcgctcgacactatatatacaacaaacaaatatcgtgggtgcgaacagcatcatcatatatcgctggcgtactattatacctactctattatatgatgaatactataatacattgtggcgcgcggagagacgaaactcgcttcgcgctcacctctctcactctcctactacatcttacctctcgatcntgatgttccgcttgtgtgggtggctgtatatacaacatatctctcactgtataatacttctaatctttcaacaactatattaacattcacacatctcacttctctctcgcgacatcttcgaccggggtgaagacactcactcactcggtgccgcgctcatacagcgcccgcaccactccctctctgcgctccttcacattctcctccgcactctcccgtgctccctctctcgacacttctcataacatatcaagtgctgttggcgcgacagacactatcgattcactactcactatggcgacacataataccatacaacaacacaccctcgctctncgccctctgccttgtattcctgtctctcgcatacgttccatcacttctctatctgttgtgtcttcgtgcttctgccctacat

SEQ ID NO: 5485 - DNA, 485 bp, Glycine max
  misc_feature (23)..(23): n is a, c, g, or t
  misc_feature (463)..(463): n is a, c, g, or t
  Peptide Sequence Number=SeqID_8323
  Probeset Number=SeqID_15264
cctaacctagttctgtgttctgntctcggcactcttctctccccttctctctgaacctctgttccaatcctccaaccatgtggcgaaccataagactattcgaagagcgggcaactaagcagcaaacaaacccgcaggagctagggtacgactccgaactttcgtccccgactcggtaaaaatccttcgtgggtccacctctaccgccaacattccgcggagaagaacgtgtacgagatcccaccagatgtacgagagctccttccagaccctctcggagcgtctcttcaaagacaccccctggccctccgtggacgccgtcgctcactgccgcgacaacgaccacgtcttctgcctcctctaccgcgagatgtggttccgccacctctacgcccgccttactcccacgctccggcagcgcatcgactcgtgggacaactactgcagcctctttcaggtcgtnctccacggcgttgtcaacatgc

SEQ ID NO: 5486 - DNA, 1369 bp, Glycine max
  misc_feature (971)..(971): n is a, c, g, or t
  misc_feature (1017)..(1017): n is a, c, g, or t
  misc_feature (1033)..(1033): n is a, c, g, or t
  misc_feature (1088)..(1088): n is a, c, g, or t
  misc_feature (1162)..(1162): n is a, c, g, or t
  misc_feature (1189)..(1189): n is a, c, g, or t
  misc_feature (1271)..(1271): n is a, c, g, or t
  misc_feature (1369)..(1369): n is a, c, g, or t
  Peptide Sequence Number=SeqID_8324
  Probeset Number=SeqID_15265
tgtgcagtgtgtcgcttgctcttcgtcccgcccaccgctcatcctcaccgttttgtacactctcctctctgacataggttgaaagtactgtcctgcccacgggcggtgggcgcgttattcttatattacaacgacactactcccgcaggggtagagagggaaatggcatcgtatctctttctctttctcctctttcacactttctatcgcatcgagaggtacgagcagaggcttacaatcatcactgatagtgactctgtagattggcgaactagctctctaagcatccgtcttcgcaacttccccgatcgttttctctaactaatttaacgagagcaagaaatagcgtcgccgcttcgcgtggtcgtgcagaggtctccttggccagatgttaaatgcctcgtacgcgtgtggcctcccctgctcttgtgtctataccttgagcgttatcatatcatgcaatatatagcgtctgctcataacgagagcgccgattctctattctgcgcgatgtacatgcattctatcactacaattattttcactcgatgtcgggtagagtgacacgctttaccgcatggtgattcgtggggttcgtattagtaagtttcgagctcccgaacagaccgccgctgggtgtccgccattgccccatgctgttacaatacagatgaagcctgcattgcgcaccctacaacggttagctacttgctactattgagctcgcagtgaggtagaccacccacgcgatgaggaagtcacgtcattggccacagtgtctcaattgtcgatccaacggctaaacacttgcgatacagcttacatagtcagtcgtgtctctcatgctcaagagcaatacgataatgggttgtctgttcttgcgatcgtgcttactccacttcatgacagactcaatatatatgatactcatccggagacacatgagaggtggacgtattattgactccacnctcactctatagtagcgataccatgaacaatagtattcacgatgtngtcatcgtgctatgtncaaaacttgctatactatatgtaacaacagtaagatccacattcatatatcacantgcactactcgtttatctcgtactcgtctaaacgacaaccatacgattgctacacatcgtctcgtgagtagagntgttatgtatgtgcgtactatatcatncatcgctcaatctatgcgctacctcactgctgtcattcggcctcttccctctcactcatacatccgtcacatgatgcgcttnatttgtcgtttcatactatggccgatggtcctgctaatagctggcataacatgcgtcgcatgctccattagtctctgcgtgtcgtagacatactcacn

SEQ ID NO: 5487 - DNA, 1735 bp, Glycine max
  misc_feature (1)..(1): n is a, c, g, or t
  misc_feature (119)..(119): n is a, c, g, or t
  misc_feature (195)..(195): n is a, c, g, or t
  misc_feature (268)..(268): n is a, c, g, or t
  misc_feature (301)..(301): n is a, c, g, or t
  misc_feature (357)..(357): n is a, c, g, or t
  misc_feature (434)..(434): n is a, c, g, or t
  misc_feature (461)..(461): n is a, c, g, or t
  misc_feature (492)..(492): n is a, c, g, or t
  misc_feature (719)..(719): n is a, c, g, or t
  misc_feature (762)..(762): n is a, c, g, or t
  misc_feature (909)..(910): n is a, c, g, or t
  misc_feature (991)..(991): n is a, c, g, or t
  misc_feature (1234)..(1234): n is a, c, g, or t
  misc_feature (1560)..(1560): n is a, c, g, or t
  misc_feature (1663)..(1663): n is a, c, g, or t
  misc_feature (1697)..(1697): n is a, c, g, or t
  misc_feature (1706)..(1706): n is a, c, g, or t
  misc_feature (1720)..(1723): n is a, c, g, or t
  Probeset Number=SeqID_15266
ncatctaaaatctatagtccctgcactcagggacagtgtgtggtaatcggcagataggatactagtatcatgcatctctgtcggcagcaggcaccgacgatcagcgctcttgtcgtagncagtagtattactctcgcggagctgctctgggcgcgctccgtctggtgatgtgacgcgcggatatatgtgatgtantcatcctctgtgttatattctgtcacatgtgtagtacataggcgatgtatgatgatgcgagtcgtaccgttcnacggtagtcatatgtactcactcgagcctgtangatagagcgtttctgcgcagtggtgtctacatgtcagatcacacgtctcagataangatgatctagaccaagacgtgtacgcaaacgcaagagataatgtacataatgccatatatagtatgatgagtatgtnttgtatatattagatctaccaggatcnggtgtttaatccatgagctctaattctaacngttattatatgctcgtacgtgaacagtgtggtgatgagcttcgactatacatatatgtatgtcatacgtagatagtgactgagtacactgaatcacgtgttactccaccaacagatatagaatatactacatgaaatgatagtgtggtgagctcgtatacgcaccctcatctatactggtaactctaccatcgtggtgttccgaataggctctggtagactcaagcnattctggtcgctacatgcgtactatcataccgatgacagtagngctcatatatgtctgtgttctcgatggcgctagaagacagagacggcgcactataatatattactccacttgtcttgctttctgtgatcgcatgtgagtctgtcatcaggactcgacacctatactagcgtctgctacacgtgcgtnnatccgaggtggccgcacaataggcaatcgacgaaccggccgcgcgcggctgacgatcagtacacacacgcaggattacatntgcggcggacgagtgcgcatcgctagattcgtcacatgaacaacggacaacccatatcacccgagacacacttgtattaaatgtgagggagagataacgactagcaaccctcatgcgacacacagactcacaacgagtataggagagaggaggcgtggactgtacacatgcatcagtctgatcaattaacgaagctaattccatcgcattactccttcacgttcgcgcgtcattaacaaaagncgaacgccactcattagtgcattgcacgcgccgcctccactggtgtccgtatcgcgttactgcagtatcgataaaacaggagatcacaccagtcatggcgagactaacgtatatccatcagagaccataaagtgacatgtcgccatatggagtcatagtgcgcgtgtcggttcgactctgctcgcagcagtgctcatagttatttatatgtctgttgctcttctgtacgtctatgtaatctcgcgtgctgtatgcgtagatgagatatcaggtgcgatccggcgatacagatatatagatagacatacgagacatagagagatctngtcgctcacgcatacgctgcagtaactcatctctatcagaagtgcgctcgagtatacactcctgttgccatacactgcggatcgtagcacgacgtcatgtagnatatgctgtgacagtgtagtgcagggaaaagttnagataaaanagagagaagaaagnnnngtaggagaaggc

SEQ ID NO: 5488 - DNA, 606 bp, Glycine max
  Peptide Sequence Number=SeqID_8325
  Probeset Number=SeqID_15267
cggaaagtttttttttttttttttctggggcccccagtttgatttttttaagtggaagttcccaaaattttttttgaattcccgggtttttcaaggttttgaactctgggccctgatcgcattatgtgaacctcctttgggggtatttcccccggagagttttcctttatgcccttttttttttttcgatggagcaaccatagggtgccttggccatttcagggggcaggaattggaattttcacttttagtagccttcagaacaagaaaattgcttccctgttaggccactgaatccttgatgcagcagattcagcaggcaaagatcggattgaagagaaggcttcaagctcaccccctttgaaatgaaacatttagagattcaaccccaaagggggagagaaagaagttgtaggacactggggcatggaccgagaaagaggccatttcgcaaaccaacccccacgaaccaaaaactagactttccttcctctcttcctaaaggggtgcgtgatctgcaaagaatggtgagaatggcaatgtgggtcggtgagaatataagccaaagaggcgttgagatcgaagagggtgtgcgtgtgaggaatt

SEQ ID NO: 5489 - DNA, 1583 bp, Glycine max
  misc_feature (14)..(14): n is a, c, g, or t
  misc_feature (25)..(25): n is a, c, g, or t
  misc_feature (27)..(27): n is a, c, g, or t
  misc_feature (30)..(31): n is a, c, g, or t
  misc_feature (34)..(35): n is a, c, g, or t
  misc_feature (39)..(42): n is a, c, g, or t
  misc_feature (115)..(115): n is a, c, g, or t
  misc_feature (133)..(133): n is a, c, g, or t
  misc_feature (295)..(296): n is a, c, g, or t
  misc_feature (316)..(316): n is a, c, g, or t
  misc_feature (350)..(350): n is a, c, g, or t
  misc_feature (358)..(358): n is a, c, g, or t
  misc_feature (467)..(467): n is a, c, g, or t
  misc_feature (558)..(558): n is a, c, g, or t
  misc_feature (594)..(594): n is a, c, g, or t
  misc_feature (655)..(655): n is a, c, g, or t
  misc_feature (714)..(714): n is a, c, g, or t
  misc_feature (871)..(871): n is a, c, g, or t
  misc_feature (901)..(901): n is a, c, g, or t
  misc_feature (917)..(917): n is a, c, g, or t
  misc_feature (942)..(942): n is a, c, g, or t
  misc_feature (995)..(995): n is a, c, g, or t
  misc_feature (999)..(999): n is a, c, g, or t
  misc_feature (1002)..(1002): n is a, c, g, or t
  misc_feature (1389)..(1389): n is a, c, g, or t
  misc_feature (1391)..(1391): n is a, c, g, or t
  misc_feature (1444)..(1444): n is a, c, g, or t
  misc_feature (1449)..(1449): n is a, c, g, or t
  misc_feature (1456)..(1456): n is a, c, g, or t
  misc_feature (1462)..(1462): n is a, c, g, or t
  misc_feature (1501)..(1501): n is a, c, g, or t
  misc_feature (1510)..(1510): n is a, c, g, or t
  misc_feature (1521)..(1521): n is a, c, g, or t
  misc_feature (1525)..(1525): n is a, c, g, or t
  Probeset Number=SeqID_15268
cgtgtgggtgtgtncgccgcttttntntannttnntttnnnntctttctctgtgattcttctgcctcgtctgtcctctacaaccgccgcccgcagagaacaatctattaaagctntctagctactatcgcacnagcgcgcacctaccgacgactgcaatatatagagataaaattattatattaatctgctcactcttctatacgtcccactacctctacggttattgtgcgctgctcacgagaggtgtcttcgtctctatgcgctcatatctgtgcgggtggagagtcgttgannttctcgatactacccaccantcgctctacgttgtcaatacgcacatactcatcnaatacagnatattaccactttgtctctctctgaccccgcttcacgcgtcgcgagctgatcgcctccggacgacgaacacgccgctagcatactacatcaaactcagatcatcatagnaccgtccatcacaccctacctgctgctcatgtccaccctcgctctcgtcctcacttctcctacgttcgtacattgcagccgagcgttcgcntccacgcgcaagctcatcatctcaagatacagaccnacgtcatcgcacacttaacagcagacatacacgctcatgacgtcatattactatgtgatancagcggagacgggaagagacgacgtacacatgatagcagaggagacgagacagtagacngcgatcaactgaagccaccatacgcatatcttcgcatactatattcttgacgcacatcgtacgccgctcgtaccgacatcatgctgctataccgagactcgcgcgcagcgcatacgacaccgctcagcgtgcctctggctgccgctactatctcgtncccgctcgtgcctgacgatgtggtcagtcntgctcgcgattgagtngatgatcactgttcggctggcaganataccagcgagttgcgtccgtaatgacagcagagtacgatataaaattataanaaanaanacccacgaatgagacctgaccacgcactgagcgcatagagacagctcatatgtatgccgacgtcttcgtcatgctgctaggctgatgtaatctccgccctccccttccgtctcatgtactcagtcgatcgctgcatcatgctacgtcgactatctgctccacgcttgctacaatgcgagtgacacggcactacacgcctctacgtcgcatacctcatcgtatgcagcgccttatcagcatgaaagtgatatggcgactcacgcgcggatgcgtcggctctacagctctaacgatcgtgctcgctccacagcgcatctctgcactgtgaatatgacgtcctacgacgtcggagcactgccacgtacgcatcgcgctcgctgctgtgtncngtaagccgcgtctgactgcgcgacctctccgcgctcactaagccagacactcncgtanactctcngtctantaacgagaacatcatacgctgcgacgacgccgatactcncgtgtggcncgtatcgcagngcgncaccaatacgcatgtcgacgatgtacactacacgtagcgatctcgcattattgatgag

SEQ ID NO: 5490 - DNA, 718 bp, Glycine max
  Peptide Sequence Number=SeqID_8326
  Probeset Number=SeqID_15269
aagacatggaacaaactcatattctgatacagctagagacttccaagagtacatctcagcatatgaggagactggagaaggatacaccccagaagctcgaggcagaattagcgagttgctttccgatctaaaagaaagatatgaagatctgaagcaagctgcaaaacaaaagtatcactactggaccgatagggctgaagacataaaagaagaagataaatctaaagcactcactatttataatgaggctcgaggaagatactatgagagcaaggagagactaaaagctgaatttgactaccttaatggcaagctcacagaagcggagtacaatgctaaggttatccttaaaagagaagatgaccgtagaagaaatgtctttggaagagcagcagatgctgttaagcacggttatgaaaacataaaacacaacatccaaactggaacagaggaaaccgtgagaagatacgaagaggcagcaagaacagctcaaattgaaagagaaaagcttaaagatgttgtaagagaagattatgaagcgctaaaacacaagatcaaggaaggagtccatggaagtcatgaaaccaacgatggtgagctctaatggcaaaacttcagctatgattgcaattagtgtttgttaagtatcaatttatataattggcttcattctattgaccaacatgtggatctatatgttcaaatttaattaacgatc

SEQ ID NO: 5491 - DNA, 1557 bp, Glycine max
  misc_feature (1427)..(1427): n is a, c, g, or t
  misc_feature (1467)..(1467): n is a, c, g, or t
  misc_feature (1497)..(1497): n is a, c, g, or t
  misc_feature (1536)..(1536): n is a, c, g, or t
  misc_feature (1538)..(1538): n is a, c, g, or t
  Peptide Sequence Number=SeqID_8327
  Probeset Number=SeqID_15270
aaaactaaagcaacatcgcggctacactttccccgcgccattgttaccccccgagtgcgttgtgcggtgtttgggcttggtttctatacgcaggttgtactaccctttacgcaagtatgtgaacgatgtcgcggtggccgtgtgtggtattagttgaatcataccttttgtcgatcgaggcgatttgagggcataattaccgcttctacacacacacatattcttatcaacagataatgcccctccaccgaatcgttagccggctgtggtataattttaaaaggtgagaacccatctgatcatcttttacgccccggcgctgatctctctaaaataggcgggtttacctcggccttgttgttaatatgttaggctcatgttgttgcgcagcgcgagttaggtagcgggggcaggtttatagagaaaccggcgcttccggtcgtgcccccccgggggtcacagagaggaaatgtaaagtgggtttaaataccctccgccggtggtgataaaacgttctctacgccaacggaagcgcggccgtcgtggggaagaaaaaaaatctatttaattgccgggagcggaaaccaggtgtaacgacacaaaatacataatattttggttctttttcccccgccgattttttataattcgggggtgatttgtttaaatacagctaggcccggcgcgaacaaaaaagcgcgctggggcgcggggagaatgaaacaaacacgcgcggggtaatacactctggtggttcacactcctctgaaatgagacgatcggtgtggcggccctcaaaatcacataaaatgatcccctcctgctcaccctttacttttattgtataaataaatggttgtgaacactacccaagagctatgtttaactaagaaaacagtggcatatgtgggttgtgaaattagtatgttttagttacagacacagatgttgtggagataatacgaagtattgatatgatgcgaatatacaaaaagagtgttattggttgaattaccgcaaattaataatgaggtgctgcgtgctgtggaccgtcccgtctccgattattaaaacggctgcctattctgcgtgtcgtcgcgtacatttcctaaatatatacatacggcgccgtcgaacatatacacgcggggtggagcgcgaataatagagttgttgataaatgcgtgtcatctcgcgcgccgtcgccagatattataaacaaacaatagagcgttgcgtgaagaatgttatttgtggtctggttcttcctcgtccgcgataataaaaatatagcgtcgactatagtggctgcgcaatatgtggcacagtgaggcacacactgtgaggtggctctccgctctcactacgcggtaatatatatcactcgctctcgcgaatagatgcacccgcgccgccgcgcgatagantaattctatctatattgcacggcgcgggtcgacgcgcgcngttaaaaggcgaattaatatatgcagctgntgcgcgctcatcgctgacggattataacacgacgaacantnggcgctcgcacggccctcc

SEQ ID NO: 5492 - DNA, 461 bp, Glycine max
  Probeset Number=SeqID_15271
ttttcaagtactgaaccgatattaaaaaggagtctctgatattccatctggagaaatatgatcactctcattttaaagatcaatggggaaaaaattgtagtatagtcatttttatcattttatgttttattagccagtaacttggtattctgttttgatgctccaaaaccaggtggaacctgacagcaagtggaccaagaccaaaccctcagggatcataccactatggattgatcaagccgagtcgaaccatcgtgcttgcaaattgtgctcgttatatcaatggcgagcggaggtatgcggtcagcggtgtctgatactatgaaccagatgccgcattgagacttgccgactacgtgaagcaggctggagtgatctacattagaagcattcgtacctagtggtgcgggggcagcggagcactcctgcaaacttctgtggtaggggctaatagccgtgaa

SEQ ID NO: 5493 - DNA, 847 bp, Glycine max
  misc_feature (18)..(18): n is a, c, g, or t
  misc_feature (27)..(28): n is a, c, g, or t
  misc_feature (30)..(31): n is a, c, g, or t
  Peptide Sequence Number=SeqID_8328
  Probeset Number=SeqID_15272
aggggggggggggggggnggttgttgnnannttttttttttttttttgatagaaaacaaccacaaagtgccagtgtgtagagaaatagaacttgacagccatgatcgatgagaaactgctccatgctaaaatgtttacaaagacgctccatgctaaaattcagtatttctatacagttttcattgatggatctagaacagcagctatgagcaacacaatattaggatttatccaatatttttggaacttgggatacataacatttgccatctcattaaggagttcatttgagttataattctccatcaagcagcacacctcggataacgagcaacatcttgagaaaaagatgagctgtggggtgcctatccacccagaatgctttggtttcggtcactaaactcttgtagaaaaccatgaagagcttctgcccccccccccccctcttcactgttttttttcctggcgtgtgcaccccccccatatctgttccgaccagccttcaaaatcccggctttccaatagcataccctaggctcgcatccccacccatgtcgatatctctcgaactctccccccgggggggcacttattaaccccgcacactcaaacattaaacctctcaaagaatctccccgcccccccttggccattctattccttacccacccctctcttctctagcctccccaaaaaaccttaaaaaaaatgtcactctttgcacaaccgcctcccgccaaaccctttaccccgcccccccgccacgtctctgagcccacacccccccccccaccgccctccctttggggcagacaacggcgggatctggacgcgctctgggaaaagc

SEQ ID NO: 5494 - DNA, 532 bp, Glycine max
  Peptide Sequence Number=SeqID_8329
  Probeset Number=SeqID_15273
cgaacagaagggcaaacgcgccaccgatctatccggcggctccatctccgccgagaaagtccaagacaactacaagcagtactggtccttcttccgccgccccaaggagaatcgagacccgccgacataagttcccgacttcgtcgaccaccttctacaattcctagtcaccgacatctaccgagtgggggctgggggccagtccttccactttctcccccatccatcccccggtaagatccccaccgctgaggcccacgcgccctccaacgaggaagatggcctgtcgatctcattcgaggccatagccctggcaacaaaaattcctggacgtgggcctgcggcgtggggcgggtcctcatgctgggccatcgtcggcccacttcccgcgccgaacgtgggtgggcatcacccatcaacgagtacccagtcaattcaagcaatgatgcacaacaagaaggctgggttggactctctctgcgaggtcatgtgttggaatctctttaaaatgccgtttgtcgacagcagcttt

SEQ ID NO: 5495 - DNA, 2442 bp, Glycine max
  Peptide Sequence Number=SeqID_8330
  Probeset Number=SeqID_15274
caatgggactgagtcagaaaaaccctggtggtggtactgacactctcccaagcaatggaagttccttcggaagcgccgtctaccggcatcgccgccgaaaccataagcaaaaatgcgctgaagcgcgaactcaagaacaaacagaaagaagaagaaaggaaacgcaaggaggaggacaaggccaaaaaggcagctgaatgcagaaggctaaggataacaaatctgcacctgctgatgaagatgatatggacccaactcaataccttgagaataggctaaagtatcttgcagttcaaaaggcagaggggaataacccctatcctcacaaattctttgtcactatgtctcttgatcaatacatcaaggaatatggaggtttaagcaacgggcagcacctcgaggatgtctctgtgtctatggctggccgaatcatgcacaagcgcacctctggttctaaactcgtcttttatgacctgcacagtggtggcttcaaggtccaggttatggctgatgcgagtaaatcagacttggatgaggctgaattttccaaattccattctaatgtgaagcgtggggacatagttggtatcactgggtttccaggcaaaagtaagaagggtgaacttagtattttccccaagacttttgtgttgctgtctcattgtttgcatatgatgccaaggcaaaagtctgctgctgctgcggataatgcaaatttgaagaaaaatccatgggtaccaggaagtaccaggaatcctgaaacatatattttgaaagatcaggaaactaggtatcggttacgccatttggatttgatgcttaatccagaggttcgagaaatattcaagacccggtctaaaatcatttcttatattaggaggttccttgatgaccttgatttcttggaggttgaaacaccaatgatgaacatgattgctggtggagctgcagcccgtccatttgtaacacatcacaatgatcttaacatgaggttattcatgaggattgctccagaactttatcttaaggagttggttgttggtggactggatcgtgtttatgaaattggtaaacaatttaggaatgagggcatagatttgacccataatcctgagtttactacctgtgagttctatatggcttataaggactacaacgacttaatggatataacagagcaaatgttgagtggtatggttaaggaacttaccaaagggagctataaaatcaagtatcatgctgatgggattgacaagaaacttattgaaattgactttactcttgcttttagaatgaatgacatgattgatgaattactgaacgtgccgcccttatgtattcacaaagtcatactgagtttggaacacactcattctatcaagctctcttactttccggatctgaccagatgtgttcgccccggattaactacgggtttgttagtatagcttgtaactacgttgtcgttggttttatgcgtgcataagcaaatcacctaaactctgtatgccttcgtgtcttgtttagtttgtgatttacactgcatgttttaatgcagacatttatttctgagttcctggagagctactacaccggttaccatacccccctgagcaccgtccagcaggaggaaatgaaccaatggccttcgatgcagcagtatcgacggctccaactggttttttcccctctacttttggtctcagcttgagtagttttcctgcgatcacctcacgagcagccgcatagaaactcaaagaggagcctaacttcacaagcatgaacgctctcaactgagccttcagtcacagccatgtttaactcgcagcagcaaaatcatatacttcaacaacaacatgagaatggcaagcttattaccatgggatctcaattttattttatgtccctgattaggagccttgccatcgataggtcatgcattaatgacatttgtttatcgaattcttaaacacgattggtggacatgattttttgtttatctttagtccgtgcgattgtatcacattaaaattaatataatatcattttattcatacagattcttcctgctctggtatctaaattgatggttttattagaatcttaatatttatctgtttttatctcttccttttgtactgtatttacagaattgatcataatttacaattctgctctcggcatttccaatatggaataattcattaagaaagaacgaaaaagagctttagcttttgtatttagtgtagaaattaaaattaccaccaagcatttggattgaaaatagttatatgctaatgaaaatgtcaatgaacagagtacaaatgcaagctagctagcttgcctgcgtgtggccatcatgaacatattctgatggatgatgacacggtaaattcccatagccccttgcttttgagatagttatcctattattgtttttgc

SEQ ID NO: 5496 - DNA, 2112 bp, Glycine max
  misc_feature (10)..(12): n is a, c, g, or t
  misc_feature (14)..(14): n is a, c, g, or t
  misc_feature (22)..(23): n is a, c, g, or t
  misc_feature (28)..(30): n is a, c, g, or t
  misc_feature (36)..(36): n is a, c, g, or t
  misc_feature (39)..(39): n is a, c, g, or t
  misc_feature (41)..(42): n is a, c, g, or t
  misc_feature (65)..(65): n is a, c, g, or t
  misc_feature (68)..(68): n is a, c, g, or t
  misc_feature (86)..(87): n is a, c, g, or t
  misc_feature (95)..(95): n is a, c, g, or t
  misc_feature (110)..(110): n is a, c, g, or t
  misc_feature (114)..(114): n is a, c, g, or t
  misc_feature (129)..(129): n is a, c, g, or t
  misc_feature (146)..(146): n is a, c, g, or t
  misc_feature (257)..(258): n is a, c, g, or t
  misc_feature (260)..(261): n is a, c, g, or t
  misc_feature (359)..(359): n is a, c, g, or t
  misc_feature (428)..(428): n is a, c, g, or t
  misc_feature (564)..(564): n is a, c, g, or t
  misc_feature (577)..(577): n is a, c, g, or t
  misc_feature (630)..(630): n is a, c, g, or t
  misc_feature (639)..(639): n is a, c, g, or t
  misc_feature (747)..(747): n is a, c, g, or t
  misc_feature (769)..(769): n is a, c, g, or t
  misc_feature (807)..(807): n is a, c, g, or t
  misc_feature (1174)..(1174): n is a, c, g, or t
  misc_feature (1274)..(1274): n is a, c, g, or t
  misc_feature (1323)..(1323): n is a, c, g, or t
  misc_feature (1328)..(1328): n is a, c, g, or t
  misc_feature (1500)..(1500): n is a, c, g, or t
  misc_feature (1535)..(1535): n is a, c, g, or t
  misc_feature (1537)..(1537): n is a, c, g, or t
  misc_feature (1567)..(1567): n is a, c, g, or t
  misc_feature (1585)..(1585): n is a, c, g, or t
  misc_feature (1591)..(1592): n is a, c, g, or t
  misc_feature (1670)..(1670): n is a, c, g, or t
  misc_feature (1717)..(1717): n is a, c, g, or t
  misc_feature (1751)..(1751): n is a, c, g, or t
  misc_feature (1778)..(1778): n is a, c, g, or t
  misc_feature (1783)..(1783): n is a, c, g, or t
  misc_feature (1811)..(1811): n is a, c, g, or t
  misc_feature (1827)..(1827): n is a, c, g, or t
  misc_feature (1844)..(1844): n is a, c, g, or t
  misc_feature (1852)..(1852): n is a, c, g, or t
  misc_feature (1904)..(1904): n is a, c, g, or t
  misc_feature (1913)..(1913): n is a, c, g, or t
  misc_feature (1915)..(1915): n is a, c, g, or t
  misc_feature (1920)..(1920): n is a, c, g, or t
  misc_feature (1928)..(1928): n is a, c, g, or t
  misc_feature (1943)..(1943): n is a, c, g, or t
  misc_feature (1976)..(1976): n is a, c, g, or t
  misc_feature (2021)..(2021): n is a, c, g, or t
  misc_feature (2024)..(2024): n is a, c, g, or t
  misc_feature (2053)..(2054): n is a, c, g, or t
  misc_feature (2084)..(2084): n is a, c, g, or t
  misc_feature (2093)..(2093): n is a, c, g, or t
  misc_feature (2095)..(2095): n is a, c, g, or t
  Peptide Sequence Number=SeqID_8331
  Probeset Number=SeqID_15275
tttttttccnnntnttccccanntattnnncttttnatntnnatacagtaatattatacacgaanacnttataaagacacaaaccnncaatttcncgcacatcgcgccgntctnctgcagcgacgagcncgacggcgtcgcgccgncgtgtgcgctgtgtcgtttgtgatattagagagagagtatgagtgatgagagcgtgacgggtctaggagcgacacgcgttggtgacatcgagcagggtagcgacgctggtnngnnatgtatggagtgcgttataatattggtgatcgaatagaagatgtatagatatgagataatagatgtagtatagagacagatatgacctttattgtctntcattgatgtctatgagctgcgtcactgtatgtatctcgggcagcgttggtgtggtatgtgggatattngttgtggataggtctagagtaataagatatagtctgtatgtgaagatatgatgaaaatataatataatacacataatactgatcatatgacaattaaaacatagaacataacaaacagcatataacatatcattcntatatcaattctnaatatcattataattcatatctacaccacgttactattcttacagtgttgtgntgtcttatntgttatagttgttatgtgttaagtatctatattgtgatcttatattagtactagtgactagattctgtacgatatgatgacagagaatagtgtgatatctcacacatnctataactatctacttttagtntgcatcttctcgctgtatttcgcataatgtgtgggtcncacgcactctctcctgtcatggcgctacgctgcgatgctacggtcgcagcgtatactgttgcttcgtaacgtggataatgttcacgtgcatcatgtagttatagatatgagtgcacgtaaagaaccgagctaatgagacgcgacgtaagagaggtagactgcgacgaatcgaatacgacacactagaaggtagctgtgtgtcggtgtactcgatacgactagagagctagtcagtcatataagtagagtacgcagaaagtgcacgagtgaaatgaggcctgaagatcgcggaatatgacgtgagcatatcgtgtgtatatcgatatctcattgacatatgtaatatgatgatgggttgttactatantgatatatgttgttatctacaatgacacaccgctatctcaggatatattactatactacgcgaagacgtcatagagtactgatcgcatcgctatatcagngatccagtatatcgtacatatgcagagatacgaatatatcacagattcntatgntgatgatgagtgaagagcgagtgatggatcggtactctcgtatgtatatctgtcgactattggatacttatggtgtataggtgatgatgtccgtatatcgatatagatgtgaagtacactgatgctcgcgcggatctgtgctctctcttgcgttacttctatgattcgacanctgctgtcgtatgactaacatcgttattatcaatncnaatactcagcataataatacatcacatcancgtagatataatgttagntgacannagcagtaccatacactgtcacacgagactatacacactcgttgaactgtatcgacgaacacgatacatacacagctgntcacgcgtcgatacatcaccttcgcgccacgcgctgctctgtcgtgntgctcatctcgctaccgacgcacagctttgtctnccgacgttctactgtgagatattcatngatgncagcgatgcttagtatgattatgtgttngtagtagcatctctgngcgacgcatgaactacnctcgagantagaactcatgaatatatgatatgattaacgtgatactagagcatgcactantacgacatnancggancgacagtntactatatgaccgtnagctatacttaaataagcgtcgcgatcacatantctacgtaacgtctctcgacgtcagcgaggccgtccgtggatgtngtngtacatctagtcatcgcgtctggtcgacnntcgcactttacatcgacgcgtctagtcccntcacaggtntnactgacgatacgatcga

SEQ ID NO: 5497 - DNA, 581 bp, Glycine max
  Peptide Sequence Number=SeqID_8332
  Probeset Number=SeqID_15276
aggcaccaggggttaaaaataaatgtgaatgagtgttgctccatgggttatccggtatggggcatcaacttccttttcggtccagaatggacaaaaaaaaaaagaaaagtgttttttagaaagccccatgaacagctttctgttccaaaacgtagccatgttcaagttaaattaatcccaacaacaaaaacatttttgtttcaaaacccattagcaacatcaacccctatcaacacttcgcaacaaaaaaaaagtacacaaatccatgggaaacaaggtacaatggaaattcacccagaaaatcgaaattcaaaacgacccaaatgataattagtgaaggaaccgaatggaagtggaaaaaaaacaaatatctagatgggaaataaaggcgagaaatacctgaaacggaggaaggggaagagagatgggaaggagaagagaggaaggagcaatggaggagcggagagcgagcgctggagcaagtgcgggtaaggttcaaagagagtgaagatggttttggggtagtgagaatgagagaagctgagggagtgggtgctctcatggctatgcaaagcgatagc

SEQ ID NO: 5498 - DNA, 1614 bp, Glycine max
  misc_feature (9)..(9): n is a, c, g, or t
  misc_feature (22)..(22): n is a, c, g, or t
  misc_feature (24)..(24): n is a, c, g, or t
  misc_feature (45)..(45): n is a, c, g, or t
  misc_feature (133)..(133): n is a, c, g, or t
  misc_feature (140)..(140): n is a, c, g, or t
  misc_feature (218)..(218): n is a, c, g, or t
  misc_feature (306)..(306): n is a, c, g, or t
  misc_feature (308)..(308): n is a, c, g, or t
  misc_feature (315)..(315): n is a, c, g, or t
  misc_feature (340)..(340): n is a, c, g, or t
  misc_feature (500)..(500): n is a, c, g, or t
  misc_feature (635)..(635): n is a, c, g, or t
  misc_feature (773)..(773): n is a, c, g, or t
  misc_feature (867)..(867): n is a, c, g, or t
  misc_feature (1142)..(1142): n is a, c, g, or t
  misc_feature (1364)..(1364): n is a, c, g, or t
  misc_feature (1372)..(1372): n is a, c, g, or t
  misc_feature (1421)..(1421): n is a, c, g, or t
  misc_feature (1441)..(1442): n is a, c, g, or t
  misc_feature (1499)..(1499): n is a, c, g, or t
  misc_feature (1502)..(1503): n is a, c, g, or t
  misc_feature (1505)..(1505): n is a, c, g, or t
  misc_feature (1507)..(1507): n is a, c, g, or t
  misc_feature (1509)..(1509): n is a, c, g, or t
  misc_feature (1519)..(1519): n is a, c, g, or t
  misc_feature (1536)..(1537): n is a, c, g, or t
  misc_feature (1545)..(1545): n is a, c, g, or t
  misc_feature (1558)..(1558): n is a, c, g, or t
  misc_feature (1565)..(1566): n is a, c, g, or t
  misc_feature (1576)..(1577): n is a, c, g, or t
  misc_feature (1580)..(1580): n is a, c, g, or t
  misc_feature (1582)..(1583): n is a, c, g, or t
  misc_feature (1589)..(1589): n is a, c, g, or t
  misc_feature (1591)..(1591): n is a, c, g, or t
  misc_feature (1600)..(1605): n is a, c, g, or t
  Probeset Number=SeqID_15277
ctgggtgcngtatatcgctatntngtgtcacgcccgcgttatttnatattcgctcagtctatacatacatacacacacgatgggttctcatgctgttatgtctagtacatgaggtgtgcttgcgagcggacgnttgatgntcgcgcacggcctgcgcacatacgtgtctctctgtcgttcacgcgactcgcggtgcgtgttgcagcgtgtgtctgtcngcgtctattagtgaactcgtctgagagatgtgtgttgtttcaagacacgcgtcgtggttgaactattagaggctctgcagacagtcgncncacacgncacactcgatatccaatgcatctcntagtgcacacatcatgtctatagagacgccaacgcgtcgcagacgactagattaagtgtcggcacatcacacgtgcacagcacgcccaccggcgcacggggcacagtcgcagcgcgtgctcctgcgacaagaacacacatatactgcaccagcgcacaantcacaggcacaggcgatacagcacgcacttagcgtccacagcactatatctatatactacaactatcatcactcatcatagcgtatacagactctccgacactctcttcatgtctgttcgtgtcgcgcagtccangcaccgcctgtatgtgtggtttgtctaatgtatatcacaacgaccgtgcagcagtgctccccacgttagttgtacaccgcgtggtacgtttgccgctctctccacccattctatgattatatcgcgcacatgttgcgncgctggtccgccggtttcgcggtcggtgacgacagcgatgatattgaccgcgaggctgcgcgatgcgcgccgcgcttcggcgttatcgtctgcnatatatgtaacacgcgctgccccccgatgttcacagttagtaaccatgttattaatcatccaaccggatggtggtgcgggcgtggtcgagaaggtagcaacatataagacaatgaggtttgtgatcgagcggcacaggagatggtgtagtgccgcaggtagtgaacaggctgtgcccagcgaaaaccagacgatactctataactgacgcatcctcctgtcccctcgtcaacaacacataacagaagaggaggggagagggagagatatgagagngcggatgtgcgtgcgggctgcgtgcgcgggccgccgcaccgtattcgacctggtgccctccgcggacaggtcgcccggaccatgtaccgcgcattggcgcgagccctgcaccgtaattacaatgcagcatacaataccggggagcagtagcgcgataggcgcagaaaggcggtggaatcagcggagcagatcagcgacgcagagacgtgcacactcatagancgcagganctacaatatatttatatcacctatcaccgagtcttcattcaattctcanacaccaattttgatattaannaataccaccaccacgtcctcacccagcactccttcctttctcttctttcctctctcnccnnantnancaccttctancaatacccaatctaccnnttatcaancaatcacatcttnactcacnnatattccaanntanannaaaaananaattcaaannnnnnaaaaccaca

SEQ ID NO: 5499 - DNA, 1336 bp, Glycine max
  misc_feature (280)..(280): n is a, c, g, or t
  misc_feature (305)..(305): n is a, c, g, or t
  misc_feature (467)..(467): n is a, c, g, or t
  misc_feature (596)..(596): n is a, c, g, or t
  misc_feature (689)..(689): n is a, c, g, or t
  misc_feature (1073)..(1073): n is a, c, g, or t
  misc_feature (1141)..(1142): n is a, c, g, or t
  misc_feature (1224)..(1226): n is a, c, g, or t
  misc_feature (1229)..(1229): n is a, c, g, or t
  misc_feature (1231)..(1231): n is a, c, g, or t
  misc_feature (1315)..(1315): n is a, c, g, or t
  Peptide Sequence Number=SeqID_8333
  Probeset Number=SeqID_15278
cagaaggtaggaatagagtggatctgagatagagacacggagagtggtggttgagaggtcgcgcgttacgcacgagcgtacatactcgttcaacacgagctcatacacaacagtgacaagtatatgctctcatattacatcgagaggagataggattcggccgcgggtgcgcacatgctctaaggttacgatgctagctgatctatagcgctgcgcacgagcaggcataggtgatagatagatgtcagtgcattctgagcagatgatagctcgcttgacncgcggtcgcttacgtggtgtgacgntgggctggtcttcagcgtcttgtgtccgatatcgattctgaccggcgcggcgtatacataggtagaaccgcaagcggcgccataaatacgagagagtggcggaatcgcacgccagaagagtgtgagttgtgtgcactcctctggtcgggcggcggtagcgcngatcaacttaatctctaaccacatagcatttgttgcttgtacttagtcgacgtgcgaagtagcatacacggcatgtggagagcctatcatgagtcgtaggacgagttgttgatctgtaacattagtcanctcatcggtcgcttaagtttgcatatggggtacgtcggtaatactacaggctagtctgtgtctcggattgagaagcgtatagactagtcgcgnagcgcatgtcaggacggaggcgagagcgatctaaggtcggaactaagaggcaagcagctccagagttcatccccatctgcagcggccggcatattatcttgtcgatgctattgtgaagagggtgatataagggtcaatcagggcgtgagggtcacatctctcatttccactctcactacatacaacagagttatagatgagcatgtgtggtcaatttactatactgtatccatcgtagagagctacctctctgcatactattcatggtctcgatacgccttaaaaggtggattatgtatggctagcatcacctccgcatgacccggcgcatggtctctcgaccgcgagcgcgaggtcgggcgctctttctctctattatccagnatcatgtcaattaagggtagaaaagagtactgtatgcgagaccttctcactcacacagccgcgggggnngattctcatttattctataatgcagtgcggcctcgccgctccctcactgtaggtatgttgccgcgcgttctctctccctccnnnttnanccccgtcggcccctacccactccccacttcgagcgcgctactttcatctcgcactcctttaataattactcttgccggccccangttaaatatataaaataaata

SEQ ID NO: 5500 - DNA, 1424 bp, Glycine max
  misc_feature (36)..(36): n is a, c, g, or t
  misc_feature (100)..(100): n is a, c, g, or t
  misc_feature (102)..(102): n is a, c, g, or t
  misc_feature (884)..(884): n is a, c, g, or t
  misc_feature (919)..(919): n is a, c, g, or t
  misc_feature (921)..(921): n is a, c, g, or t
  misc_feature (999)..(999): n is a, c, g, or t
  misc_feature (1094)..(1094): n is a, c, g, or t
  misc_feature (1117)..(1118): n is a, c, g, or t
  misc_feature (1155)..(1155): n is a, c, g, or t
  misc_feature (1180)..(1180): n is a, c, g, or t
  misc_feature (1183)..(1183): n is a, c, g, or t
  misc_feature (1266)..(1266): n is a, c, g, or t
  misc_feature (1285)..(1285): n is a, c, g, or t
  misc_feature (1289)..(1289): n is a, c, g, or t
  misc_feature (1320)..(1320): n is a, c, g, or t
  misc_feature (1323)..(1323): n is a, c, g, or t
  misc_feature (1336)..(1336): n is a, c, g, or t
  misc_feature (1343)..(1343): n is a, c, g, or t
  misc_feature (1345)..(1345): n is a, c, g, or t
  misc_feature (1387)..(1387): n is a, c, g, or t
  misc_feature (1401)..(1401): n is a, c, g, or t
  misc_feature (1416)..(1416): n is a, c, g, or t
  Probeset Number=SeqID_15279
caacacaatagagatagaacagaagatgcgagaganctacttatagagacataagtaagcgcaaatgcagcgtcgtagttgccgggacggagtagatttngngagaacagaggaatcacacaaacactaaatagggataataacacccacacatactctcctcttgtttctctctctatataaggttattatctaataacgtgatatcacacatcataatgcctagcacagtcgcgtctgactcacgtggataggatatgaggagagaagtaatggtgtggtcgtgtgcgactgtcactactatatacaacaatacacacatatatatatagtagatataataatatacatatattatacacgcgcaggatgtatgttattataacaccacagaatagagagagaagtgctctgcaggtgtgatctcatacccgatgtagaaggcatacacgtagtagacagttagcggatggtacaaggcagctatattgagcgtatatagtgtgtctgttagatatgtgaatagtatttttactaagcgcggagggcaccgcaatgggtgtgcacgtatatcgagtcggtggtgagtaggtgaatggtgtaccctttgtatctagctagtgtgtcggcgcgcgccacacaggcattatgctaaagacaatcacatactaagagaaaacggatacaacacaattttacacctaatacagaccgatacggaaagaaggcaacgcacagcacgtccttgtactctacaaccagacacaatgacacgaataaaggaggatagtgatatagaaagaagtatggtagagcgtagagctttggataataatcatacaagatataaacaagataagtgggagaggagagatgtatgggtngtatttgtaggtcttggcttgttcggtgacgagcntnccgtgtgatgaccagaagaaagaataaagcaggaaaaagaacagaaaacagtacatataagcgtacatatacaaaatnaagagcaagcataacatgttcacgcagagagcagagcgcagtgagatgagacagtataatatggttctctcgtctgtttgttctgttcttatatntcttattatatgaagatatagannaattatgttatcattattttattaatattaagatatnaagatagtagaaatgagagaatagnatnacgacgtattctcccggctgatagtatcttagagacatgaatagataggaggagtgttaagtggactggtggagatacggagnttagagcagagcttctctngtcntagacacaacgaagttggtaataataagagnatngtgaggagtgagnagaggtntntatgttgaaggcgcagcagcgtgcggctcgcgtgccggcggnggccgcccgcgcgnccagtggtgtgctgntttcacaa

SEQ ID NO: 5501 - DNA, 517 bp, Glycine max
  Peptide Sequence Number=SeqID_8334
  Probeset Number=SeqID_15280
tacaatctactatgctaagcacagcggattctgcgcctctagtcaaactggattagaaataggagggaggctaccctactggcatttgtgacacatgagtccaaatccagaccatgctttgaactgtgtgaaagaaaatggacagccatttcttcctgatacacgcattcgtggaatcgctgtatgcaatgaatttttgggtggtggtgactattatttgtggggagaactactcggcgctggtgctaatatgtacaatgctgccgcgagacttcatctatatcaactggatcaaatgtctactgctaactcgtttgcagtttcttcacatgcctacccttcctcctgtggtcaatatgatgataatgtgaaactgtttatgaagccgctactggagcttttccagcatattggctctccattctgtgataatgcgtacccttttctattccatgcgagagatccttaacatatatgtataaaataagccattgctgaatcctcaaatggaatgtat

SEQ ID NO: 5502 - DNA, 1479 bp, Glycine max
  misc_feature (854)..(854): n is a, c, g, or t
  misc_feature (910)..(910): n is a, c, g, or t
  misc_feature (975)..(975): n is a, c, g, or t
  misc_feature (979)..(979): n is a, c, g, or t
  misc_feature (1230)..(1230): n is a, c, g, or t
  misc_feature (1387)..(1387): n is a, c, g, or t
  misc_feature (1417)..(1417): n is a, c, g, or t
  misc_feature (1449)..(1449): n is a, c, g, or t
  Peptide Sequence Number=SeqID_8335
  Probeset Number=SeqID_15281
tttttttatgggaagattttccccccgcctcgtcctccccgacctatagactatagctggaagctccaccgccgggtgtgcgggccgcctctaccaactatgtggaatctccccgggcctggaaggaattccccacgcagaccatataccttatcaacatctcttattcgtaaaaatgaccttctcatcttgtcgtgcaggcctcctcgtcccccctgcttcttaatgctgccacatgaggcgcggtatgatatgcagtatagctcccttccgccgcaccaccgagaggtacgcatcgctaggtcttgtaggttatcaagtacggtacctttgttccagtggcgggccttggcaagaaccctccatagagtccaaccccaatgaggtatcacacgaagcggccgattcccttcttagaaggaatgtacagtgcctccgcggccccatttatggcccgacgattagtcatcctatcttcagagccaacctgggttgttcacatcgaaattggcattaaccatgatccgctggattccgaatgttttttagtttgacatccccatgtcacttaccccgcattgtgaggctccccggatcgtccgccttcacgacaacacatgtttgtcaacgttttatcccccctaaatgagagttgggcctgacctacatacggactccccctgtaatataggaatcattgtgccacccttcgccctggctctttatccccacaaacatacacaagtctttcctccgtctgcttacgtcgccgccgcgtgtcctgttcccaagttttgtagcggcgatctctctcctctctgccaacgtctcgcgtctctgactattcttaccgncggcaacatcatccccccgaactttaactcctgcaggtgcgtcaacacgcggccanccatcccggcgacacactatagacagcgtgctgtgtcacacctctctcggagacgtgaagcatantcgngtaaagaaatcactccgattatgtgtctcgctgtttctcccacttcttataataacgagtgcttgcaacgctacctgcaatgataaaatactgcgccgtcaggcgtgtattaacagaaacgagactacggttgtgcatctcttcttctgactacattcccattctacagtctagtcttcggagaacacgctgtgtctatctctctctgtctctctctcaacacgacacatcacagcatctacccacacgcntctctcctgttagttagcgaacactcacaactcctcgtctgtcgccctacataacttgatgtggtgacagccctcctctctacccccagcaatactatcctcatatcgccctacgcctatcgcacgtagagagtcacacctcacatcttcttatagnctcttcgtcgacatctacctcatccgtcgnccactctctacttcatcctactattacttcgncctgcctactgattgtccactatatatctg

SEQ ID NO: 5503 - DNA, 687 bp, Glycine max
  Probeset Number=SeqID_15282
actcaagcttatcgccaagggtgtcaacgaggttgcgttcatcaccagtgtgctcggcattggagagttcttgccgagcaattggttcacgtcctacgttacctcgatcatatgtgcagacggctcaatcctacagaaactctgcaccaacacccttttcctcattgctggcttcgactcagaggagcttgacactgaaaagcttccggatatcatgatgaatgttcctgctggttcctctaccaagcaacttcttcacttcggacagctgattaacagtgacaaattccgtcagtatgaccttggctatttcaaaaacctgtggaactacggcagcatcaacccgccagagtacccgcttgacaaaatcacaacgcgcgtgtacctgcactacgccgataacgacttgctcgcaactcccaagggtgtggagaggttgagcaagggcctgaccaacgtcaagatgctccggaaagtgccctttgagaagttcaaccacctcgacttcctttacgcccgtgatccgaggcagctgctctacgaccaggtcatggagagcgtcgggcaggtgctggcagaggaagcagcccgagcagcgtaacgttgaaccggctcatccgaaccccaagcttctcttctcaatgtatagactgtctgactcaacaataaatttaactcaattacgcc

SEQ ID NO: 5504 - DNA, 634 bp, Glycine max
  Peptide Sequence Number=SeqID_8336
  Probeset Number=SeqID_15283
aaaaacatttcgagcatgtctgggcgaggaaagggaggaaagggactgggaaagggaggagccaagaggcacaggaaggtcctccgagacaacatccaggggatcactaagccggcgattcgtcgtttagcgaggagaggcggtgtgaagcgtatcagcggtttgatctacgaggagactcgcggcgttctcaagatctttctagagaatgtgattcgtgacgctgttacttacactgagcacgctaggaggaagaccgtgacggcgatggatgttgtgtatgctttgaagaggcagggaaggactctgtacgggttcggcggctgaggggattcaattaggggtttttaaatcgcgtttgtgtttttacggtttggttctatttgggagtttaacaactctctaagttgtctttatctgaatgttttaaaaaagctttatctgaacttgtccgtctcttagaaattattgaggcatttagaaggtgggaaggagtatgagcttctgataatcgaatatcgacaagtaatagttgttgtgagctgggacgggtagagatttcgatactggtcatttaacgatgttgtgaaaaggataatgtccgagactaagatgaacctttacatactatgct

SEQ ID NO: 5505 - DNA, 1370 bp, Glycine max
  misc_feature (1)..(1): n is a, c, g, or t
  misc_feature (148)..(148): n is a, c, g, or t
  misc_feature (154)..(154): n is a, c, g, or t
  misc_feature (164)..(164): n is a, c, g, or t
  misc_feature (294)..(294): n is a, c, g, or t
  misc_feature (394)..(394): n is a, c, g, or t
  misc_feature (413)..(413): n is a, c, g, or t
  misc_feature (544)..(544): n is a, c, g, or t
  misc_feature (594)..(594): n is a, c, g, or t
  misc_feature (670)..(670): n is a, c, g, or t
  misc_feature (672)..(672): n is a, c, g, or t
  misc_feature (731)..(731): n is a, c, g, or t
  misc_feature (761)..(761): n is a, c, g, or t
  misc_feature (814)..(814): n is a, c, g, or t
  misc_feature (860)..(860): n is a, c, g, or t
  misc_feature (981)..(981): n is a, c, g, or t
  misc_feature (1023)..(1023): n is a, c, g, or t
  misc_feature (1250)..(1250): n is a, c, g, or t
  misc_feature (1296)..(1297): n is a, c, g, or t
  misc_feature (1314)..(1314): n is a, c, g, or t
  misc_feature (1335)..(1338): n is a, c, g, or t
  misc_feature (1344)..(1345): n is a, c, g, or t
  misc_feature (1351)..(1352): n is a, c, g, or t
  Peptide Sequence Number=SeqID_8337
  Probeset Number=SeqID_15284
ngccgcagcacacagctatcagccatctctatatctatacacgagagtgcggcggagagtatgagtgaatatagcacaccggcaccagccgagtggtcagcgagcgacgttagatgactctgtatatgcactcatacacttacatccncacatntctcttctcntcttgcccactttatatagaggcggcggtgtaacacattagtcatgtgtacaggtgatacacggctccttatgtttacaccatcgtatacgggcacaacgacaggcggggcaccccagccaggagagggncgtcagtgtaaagcatcttattcagtcgagtatggggcaggctagtgcaggtctatacagtcacccgttacagccaccacactattagaccatctagagncatacacttcaggtgttgncaatatgactggatgtcgacgccacggtcttcatctatcatctttatccagcaaatgacacaacacgagagaggagttgggtgggcatgtgggtgcactccaccataacttatcgggcttagagctcaatnttctcttgtgtgggtttctacagccgaaactttacattacaattcatctncccgtatacaggcgagccagctattctatcgattggtacacagcgcaccaatggtgtgcgcatcgcgcgattacantnacatgtgcaccgtatttacgcggtcatggctatcacgatatatatatatcgatgatcancaaatatattctcacaaatcatcccgatcngcacttgtctgcatcagcgtcttacgccagatgatgtgacacatgtactcacngctcaatctgctgatacggcaggctcacgcacactctcttcaacanatcacagaaattacctatgagtcacatcactaaacaggcacatggcacgacctgtctactacatgcagactacatcgccgtatcgcatagtagtgtctatacacaatttagacatcttatnagatggatgttaaggctagtttactcgtcgcgtgatactcangcagcagtagatagtcagttccatagcacaggccaggctagctatcgcatctaggcgcaatatacccaactctaacatgtagatgcttcagacagatctctctcagaaggatgaagacccaccatccacgttgaaatatgtctcctacaccattgtgacagcgcatcctctcggattttggggggggtgtgtggggcacatcacgctccatcacaggactggcgatnggggcggtgcctccctcttatctccattttccgtttgctcctcttnntcataatattattattntttgtgattcgcaccggcgtnnnnccacgnnagacanncggggggggggcaaccct

SEQ ID NO: 5506 - DNA, 1908 bp, Glycine max
  misc_feature (130)..(130): n is a, c, g, or t
  misc_feature (223)..(223): n is a, c, g, or t
  misc_feature (362)..(362): n is a, c, g, or t
  misc_feature (364)..(364): n is a, c, g, or t
  misc_feature (409)..(412): n is a, c, g, or t
  misc_feature (435)..(435): n is a, c, g, or t
  misc_feature (483)..(483): n is a, c, g, or t
  misc_feature (488)..(488): n is a, c, g, or t
  misc_feature (496)..(496): n is a, c, g, or t
  misc_feature (543)..(543): n is a, c, g, or t
  misc_feature (620)..(620): n is a, c, g, or t
  misc_feature (703)..(703): n is a, c, g, or t
  misc_feature (716)..(716): n is a, c, g, or t
  misc_feature (718)..(718): n is a, c, g, or t
  misc_feature (730)..(730): n is a, c, g, or t
  misc_feature (732)..(732): n is a, c, g, or t
  misc_feature (770)..(770): n is a, c, g, or t
  misc_feature (812)..(812): n is a, c, g, or t
  misc_feature (873)..(873): n is a, c, g, or t
  misc_feature (878)..(878): n is a, c, g, or t
  misc_feature (925)..(925): n is a, c, g, or t
  misc_feature (973)..(973): n is a, c, g, or t
  misc_feature (1009)..(1009): n is a, c, g, or t
  misc_feature (1052)..(1052): n is a, c, g, or t
  misc_feature (1168)..(1168): n is a, c, g, or t
  misc_feature (1174)..(1174): n is a, c, g, or t
  misc_feature (1202)..(1202): n is a, c, g, or t
  misc_feature (1254)..(1254): n is a, c, g, or t
  misc_feature (1305)..(1305): n is a, c, g, or t
  misc_feature (1620)..(1620): n is a, c, g, or t
  misc_feature (1637)..(1637): n is a, c, g, or t
  misc_feature (1649)..(1652): n is a, c, g, or t
  misc_feature (1654)..(1658): n is a, c, g, or t
  misc_feature (1663)..(1663): n is a, c, g, or t
  misc_feature (1670)..(1671): n is a, c, g, or t
  misc_feature (1696)..(1697): n is a, c, g, or t
  misc_feature (1702)..(1702): n is a, c, g, or t
  misc_feature (1704)..(1704): n is a, c, g, or t
  misc_feature (1709)..(1710): n is a, c, g, or t
  misc_feature (1715)..(1717): n is a, c, g, or t
  misc_feature (1729)..(1729): n is a, c, g, or t
  misc_feature (1732)..(1734): n is a, c, g, or t
  misc_feature (1738)..(1738): n is a, c, g, or t
  misc_feature (1741)..(1742): n is a, c, g, or t
  misc_feature (1812)..(1812): n is a, c, g, or t
  misc_feature (1816)..(1817): n is a, c, g, or t
  misc_feature (1819)..(1819): n is a, c, g, or t
  misc_feature (1825)..(1826): n is a, c, g, or t
  misc_feature (1831)..(1831): n is a, c, g, or t
  misc_feature (1838)..(1838): n is a, c, g, or t
  misc_feature (1843)..(1843): n is a, c, g, or t
  misc_feature (1850)..(1850): n is a, c, g, or t
  misc_feature (1854)..(1854): n is a, c, g, or t
  misc_feature (1856)..(1856): n is a, c, g, or t
  misc_feature (1858)..(1858): n is a, c, g, or t
  misc_feature (1872)..(1872): n is a, c, g, or t
  misc_feature (1893)..(1893): n is a, c, g, or t
  Probeset Number=SeqID_15285
cgctgtcagacgttcgcgcggcgtgacgacgtggtgctatgggcgagggtgtcgcgcggattgatgtttcgtgtctccgaggcgccgtctcgcgcgagggtagtgtcgatcgtgacgtgtagtgacgcanatggcattagcgtatagtatgagtgtgagtgtgtagtgttccgtctgatatagtacggagcagatgatatcgcgcgagtaacggagctatgcncacacactaactattagtattatgtcactacgtacatacatagatagtggtggttgaatcgtactacagcagtcgcgtatcgagcagacgatccgttgagagggagtgtcagatgctgtacgtaggtactagtagtagnancatgatgaattcgacgatgacgcacatgcgtggtatggttgagannnnagttgagtatgatcgatatcgtnatgtcgtatgagatgcgtatgcgcctgcttctcgcacgcgccatacantcacngctcgcgncggcatgagagccacgcgtgcacggacacatactcacgagcactcancatcacgatcccatgtcatgagtgaacgtgtggtagagctgtgtagatcacagagcgcagattgctgctacgatagntcggctgacgtacaatcattgctcgcgcgccctatgagacgtgcacgatacgtcgagatctcgcggccgcagcggagtccacnagcgctgaacgcntntgagccgcgtgncnagtgcacggaccactcgacagacatgacgcagttagcnagctcgctgaatgacgcgctctctacgataatatactacatntagatagtgcgatctatcgtcagcctactacacaagatcacagtacgagcatacgcgacangcgcntcaccgctcgcgcgcgacgtcgactctcgcacaccagtgacacactnctcacatcatctcatatactgtacacgcgcgtcatatagcatacatanttgattacatactcgattgaagcgactaccatacanacctatcgcgcatacgaccgagtttctctatcgatcacacaantgagatgcgacagcaacgcgtgacgagtggcgtcggcgagcatgatagacgaagagtgcgcgctgagcgcagagcgatcgaacatatctgtcatgcacggtcgaatcatcgtaacnttgatntctgtagcgccgacgtcctgggtaggtnagcaggagacatgaggtgccgagatgacgtggagtgtgagacgagagtatgnggtagagacgcggatcacagacgagagccggagactacaataaatgcgcgncatagcattataagcccatcatcctctatcttcgctcatcactccgctcctagacgatctcaggctcccctcgcacgtctctacatgtacgctacgcgtatccgtgagcgcgcgcacttatcacgacgcggactgtgagtcgcacgcatcatcgtacgctcataccaacccccagcagtcccgtctgaatgttacacgcagcgccgcgatacagcgcacacgacgcccgcatgtcacacgctaattgtatctcccaagatccgcgcgcaatataagaagctgagcatactcacgatatatgtagttcgtttgtcntgccgcgcgcgtgtacnactccatcgtannnntnnnnntaaanaagatannataagagagggcggtggggggcggnntaagngngcatnnagaannnagtatcagatanatnnngaanaanngtaggttcgtcgattgagatgtagtatgtacgtgcggtgtcgtcgcgctcccggtgctgctgggcggtcncgcnncnccgccnnccacntcccccnccccnccacacncccncnanggtgctcgcgtttngggtgtgtgctggtttatgtnataatatagagacct

SEQ ID NO: 5507 - DNA, 505 bp, Glycine max
  Peptide Sequence Number=SeqID_8338
  Probeset Number=SeqID_15286
cagtatagtattgtttttattactcacacaacattgttactagccccgtacaacattacaaccgatcaacaccacatcatcacgcacgttaaactcgccaacaaaccacaaaaccagtacggagcagtctggtacaacaagcaaaggaaggctcgtttgtgggtctggccttctgggagacatggcagctcagctagctcgtcggtttagcgagcggcctgcacatcggggaaacgctgctgggagcaccagtcctcgcagctctgcctttgagccttgcattcctcggcgcagaaacgccacggcctggcagcgcactcgctgtcgcagccatcgccttcctgcctgcatgtgctatagcaggcctccctctgccccgccgtggccaggacgagcagcgcgcacagggcggccgccatgacagcgaccttgctagcagtggccatttggtcgaggatgataacttctgtgtaagagcagatatgaggttataggatggattggt

SEQ ID NO: 5508 - DNA, 370 bp, Glycine max
  Probeset Number=SeqID_15287
ggaaagctggcacgcctgtaggtaccgcgcctctattccctggttgagcggggcgtgcgctcaccaccagctaaatcaccagctgaagaagactggaaggataaaccagaatatctgctggaaaaacgggtaagaagtgtggatgcaaaggaagctttccgtcttcagaaagaaaataattttgtcattctagacgtactgtcataagcagagtggaaagacgctcatcctccagatgctatcaatgtgcaaatatatagggcttagtgaagattggacaccatgggacattgccagacgtgctgcatttgcattttttgggattattgctgggactgaagagaatcccgagttcatccagcctgttgaa

SEQ ID NO: 5509 - DNA, 779 bp, Glycine max
  misc_feature (170)..(170): n is a, c, g, or t
  misc_feature (252)..(252): n is a, c, g, or t
  misc_feature (261)..(261): n is a, c, g, or t
  Peptide Sequence Number=SeqID_8339
  Probeset Number=SeqID_15288
atttcactcacttgctttcaaattctcattttcaagctgtttggtgtaaagatgggacaagtgcttggttgtgttcaagtgaagcagtcaactgtagccgtcaaggaatgtttcgggaagtacgatgatgttcttcaacctggttgccattttgtgccatggtgtcttgnctgcggtgtggctggtgtcctttctacgcgtgtcatgcagctaagtcttcgttgtgaaactaagacaaaggacatgggttgntaatgtggntgccctcatcaatatcgagcattggcaaaaaggcatcaaatgcttactaaaacttccccataccaaagccagatacattcttatggcttgatggttccaaaactactggtccaaagaggaaattggtgctttttttggacaaaaaaaccatttcaaaagcggggaaaaaaaatttggaaagcttattcccatattggaccaaaaatcccaaccctttttggggatttggccccaaggccttggaaaaaaccccaaaaaaaatttggcttcccaaaaaagggggggtcccaacccaggtgtgaaaaaaaaattgcgtatatcgggcggaaggggggaaaaaaaaaccctaaagccgtggtttttcccccccccccccattttggggtaaaaaaaaggtgtttttttttttggggggggggggacaaaaaaaaagagggggggggttcctcttcttttttttgaggggggggggggcgccccccacaggttgtttttctccggggggggggggggggtgt

SEQ ID NO: 5510 - DNA, 1439 bp, Glycine max
  misc_feature (12)..(12): n is a, c, g, or t
  misc_feature (18)..(18): n is a, c, g, or t
  misc_feature (65)..(65): n is a, c, g, or t
  misc_feature (212)..(212): n is a, c, g, or t
  misc_feature (252)..(252): n is a, c, g, or t
  misc_feature (292)..(292): n is a, c, g, or t
  misc_feature (318)..(318): n is a, c, g, or t
  misc_feature (333)..(333): n is a, c, g, or t
  misc_feature (591)..(591): n is a, c, g, or t
  misc_feature (1223)..(1225): n is a, c, g, or t
  misc_feature (1232)..(1234): n is a, c, g, or t
  misc_feature (1243)..(1243): n is a, c, g, or t
  misc_feature (1245)..(1245): n is a, c, g, or t
  misc_feature (1251)..(1251): n is a, c, g, or t
  misc_feature (1254)..(1254): n is a, c, g, or t
  misc_feature (1258)..(1258): n is a, c, g, or t
  misc_feature (1265)..(1266): n is a, c, g, or t
  misc_feature (1272)..(1272): n is a, c, g, or t
  misc_feature (1274)..(1274): n is a, c, g, or t
  misc_feature (1276)..(1277): n is a, c, g, or t
  misc_feature (1285)..(1285): n is a, c, g, or t
  misc_feature (1289)..(1289): n is a, c, g, or t
  misc_feature (1308)..(1308): n is a, c, g, or t
  misc_feature (1318)..(1319): n is a, c, g, or t
  misc_feature (1321)..(1322): n is a, c, g, or t
  misc_feature (1331)..(1331): n is a, c, g, or t
  misc_feature (1337)..(1337): n is a, c, g, or t
  misc_feature (1353)..(1355): n is a, c, g, or t
  misc_feature (1357)..(1357): n is a, c, g, or t
  misc_feature (1360)..(1360): n is a, c, g, or t
  misc_feature (1363)..(1363): n is a, c, g, or t
  misc_feature (1365)..(1369): n is a, c, g, or t
  misc_feature (1376)..(1378): n is a, c, g, or t
  misc_feature (1381)..(1381): n is a, c, g, or t
  misc_feature (1384)..(1387): n is a, c, g, or t
  misc_feature (1405)..(1424): n is a, c, g, or t
  misc_feature (1429)..(1439): n is a, c, g, or t
  Peptide Sequence Number=SeqID_8340
  Probeset Number=SeqID_15289
tcgagagtgtgngtactnaggatagtgatgtgaatggggatgtcgtgcgtgcgcagcgagcgcgntgttacgctctgtctcgtcatagctaagtcctcgtagtcttgagtttcatatgctatagctgtgatcaaaatgagtgtcgagagcagacagaacacgagtgatatatgcgagtgttctcaattgatttaatatatgtgagacaggtnagaatgcgcaggcgtcgagagtgaaatcatacaatgtcantggcgtctcggaggaggggcggaataggcgagaacgtgtnacagagacgatttgctgcgagtccgncgcgcgagaggtcgnctagcagtgagtttatgtgttgtttgtttattccacaccatcggactagtttaatgtatctctgttaacacatagaaacctaatacatatgaggtggcagggcttggtgtgagagctcggtagtaacagttagctagcgtgctgcgttctcttctcttgtctcttcatctactattacatgcttgtgacgccgtctcggtcactactcagtacgcagagaccacaattagcatactatagcttaacagtctgcgagtncactagtgcactcgtgtcgtctcttcaccagctgtcgcggtccctggcatgccggtgggagggatgtcgtgtttttcttgttgcactcgcatcaccggctacggccacaacgcaagagagtgccacacaccccactcaccgcgtggtagagcggcgaagatgagaatattaatattctattctcccacaccaccctcactcataaatgcatatatctatactcttcataatacgaagatataagagtagacgggagagtgtactactctgttatctccacacactaattaaatagatgtgtggtaggtggggaggaagaagcgggatcttcgcacaccccccgtaggcttgtgtcttatttgtacgcgaggacagtttacaatactacttcttttcagtcacccaaatactctacactctctctctacaagcaatatatctgtgacgggtaggcgactgtataactgatcggcatgctgtctcgctagagacattactggatagatgatagatctagctcgtctaccatcggtagacagaatgccatactcgttaatatatacactacttctaacgatgactattacagtcacatgctataaactcttgatgtcttctacttagaccatccnnncacaatnnnttaataccncnagcatnaancacncccctanntatctncnannaaaaacgnactntcatatacttaccccccanaatacccaanntnncaaacaaanacaccntaaaattcataaattnnntnaanatnannnnnaacccannnaanttnnnnccaaccaaaagaacaaannnnnnnnnnnnnnnnnnnnaaaannnnnnnnnnn

SEQ ID NO: 5511 - DNA, 1610 bp, Glycine max
  misc_feature (33)..(36): n is a, c, g, or t
  misc_feature (39)..(40): n is a, c, g, or t
  misc_feature (46)..(46): n is a, c, g, or t
  misc_feature (53)..(53): n is a, c, g, or t
  misc_feature (56)..(59): n is a, c, g, or t
  misc_feature (64)..(64): n is a, c, g, or t
  misc_feature (89)..(89): n is a, c, g, or t
  misc_feature (96)..(96): n is a, c, g, or t
  misc_feature (104)..(104): n is a, c, g, or t
  misc_feature (117)..(118): n is a, c, g, or t
  misc_feature (141)..(141): n is a, c, g, or t
  misc_feature (256)..(256): n is a, c, g, or t
  misc_feature (261)..(261): n is a, c, g, or t
  misc_feature (289)..(289): n is a, c, g, or t
  misc_feature (334)..(334): n is a, c, g, or t
  misc_feature (758)..(758): n is a, c, g, or t
  misc_feature (771)..(771): n is a, c, g, or t
  misc_feature (779)..(779): n is a, c, g, or t
  misc_feature (879)..(879): n is a, c, g, or t
  misc_feature (946)..(946): n is a, c, g, or t
  misc_feature (990)..(990): n is a, c, g, or t
  misc_feature (1002)..(1002): n is a, c, g, or t
  misc_feature (1109)..(1109): n is a, c, g, or t
  misc_feature (1144)..(1144): n is a, c, g, or t
  misc_feature (1268)..(1268): n is a, c, g, or t
  misc_feature (1305)..(1305): n is a, c, g, or t
  misc_feature (1309)..(1309): n is a, c, g, or t
  misc_feature (1322)..(1323): n is a, c, g, or t
  misc_feature (1374)..(1374): n is a, c, g, or t
  misc_feature (1426)..(1426): n is a, c, g, or t
  misc_feature (1438)..(1438): n is a, c, g, or t
  misc_feature (1510)..(1510): n is a, c, g, or t
  misc_feature (1525)..(1525): n is a, c, g, or t
  misc_feature (1530)..(1530): n is a, c, g, or t
  misc_feature (1534)..(1534): n is a, c, g, or t
  misc_feature (1542)..(1542): n is a, c, g, or t
  misc_feature (1567)..(1567): n is a, c, g, or t
  misc_feature (1571)..(1571): n is a, c, g, or t
  misc_feature (1578)..(1578): n is a, c, g, or t
  misc_feature (1588)..(1588): n is a, c, g, or t
  Probeset Number=SeqID_15290
gtgttgggctgggtggggtttttttttttgtgnnnnggnnggcggngagcgcnggnnnngttcnaatttctttggtcctctctctttancacacgnggcggccngacgcatctcccnntaatctcttcccgaataatattngaccatatctttttaatctacgctgcggagctggccggcgaccaataccatccctcgtgaggggaaggactactaaattgttctttctatcactctctcttcaaccatactcatngcagnagaaataaaatgatgtggtgtatcatcnacacaccgcgggcaatatagatagtattatattatctatattgtnatacgcttataatgagatataattattgagattagtggttatatatatcttggaaaattataacaagaaataaatattaatcacataatatataattaacaaataatgtggcgtcattacacttacttatgcttcttctctctaatttataatttctatctaactctcattctatacatcactagagtacatgcggcgaataataactcgctggctgttatatactagcagtcgtcctgtggttatatactgtgcgctaatacaaatcgcgttgggcgcgatctactcatctagatgccacagcgcgctcttgtggttgatcacgctttcatctgtgtgtataatttctcatgtatgttggacaaggacagtcttatatagtgggagtaagaactaattttatatatatagtgtgtgtgagaanataaataaaaaanatggaagnaaaaacaaataataacgttgcaggtaagaaaaaaatacaaacaacatacgcggcgcgactacaccagctctcaataccgcgtctaacactacatacaacncacaataagatgtgtgtggtcggtggataatataactgcatacactaaccgcgcagcgctacacaanagacgtgtcgttgtgtcaatccaaaccaacaacgaggcgacgcntatacatacacncacttctctcacccgagagaaaaatatataacatgtgggtgctgattgtgtgtgaatataatatatatgtatattatactgtgcatcgtgttgtacggctcttatanatacaaactattatatgtgtcctgctccagtctantcattatctccatacactcatgcatattaactaatatcggtgcacctgcggacgagcatatgaagataacacatgtacatctctctgcggcagtactcgtctctatactcacacggcatgtgangcacatcaacatacgtgcgccgtacgcaatgtagacnaganagatcttcatacnnacacacgcgctacagtgtcttcgctctgtgacgcgatataatctacgttanactacatgctcactcggtgagtatctctatctgtggtatatctgtgacatantgttagaaatanatctgcatatatcacgtaataaaaactgcagcatatatgatttgtatactgtaatatatactatatactctntcatatatattatancatanatcntcacgacntctcgttctcactcacggcgcacanctanattctanactgtctcangcacgacagcattgagaacatg

SEQ ID NO: 5512 - DNA, 515 bp, Glycine max
  misc_feature (416)..(416): n is a, c, g, or t
  misc_feature (467)..(467): n is a, c, g, or t
  misc_feature (476)..(476): n is a, c, g, or t
  misc_feature (504)..(504): n is a, c, g, or t
  misc_feature (509)..(510): n is a, c, g, or t
  Peptide Sequence Number=SeqID_8341
  Probeset Number=SeqID_15291
caagtttcagctctaagcttcatctatctccgtctttcaggcaaactaaaaaggttataatctagttttctgtcctcctctatctagaatggcgcttgtcaaaagtattgtttcaacagtaagacccaacttaatgacatttctgaagtttgcaaaagttgaattaactccacctactcctggtgacattccagcaatttcccgtgggtttggagacatcgttagtgcagccaagactggtcggtggaagcaactgactgttaaagaagcatggctggaatggtttggtgttcactgaagtaacatgctggttttggattggagaagtaattggcaagaggaacatgattggatatgacgttcaagtataagtcatgccatcaaaaaaaggttagaaatgtatcttttcaatttancaggcattggttaacactcatattgagatttggccatggaaatggtaaaanaaaacttgnttctaaaaaaaaaaaaaaaagcttatcnatacnnccacc

SEQ ID NO: 5513 - DNA, 1473 bp, Glycine max
  misc_feature (18)..(18): n is a, c, g, or t
  misc_feature (66)..(66): n is a, c, g, or t
  misc_feature (79)..(79): n is a, c, g, or t
  misc_feature (102)..(102): n is a, c, g, or t
  misc_feature (211)..(213): n is a, c, g, or t
  misc_feature (215)..(217): n is a, c, g, or t
  misc_feature (250)..(250): n is a, c, g, or t
  misc_feature (333)..(333): n is a, c, g, or t
  misc_feature (344)..(344): n is a, c, g, or t
  misc_feature (365)..(365): n is a, c, g, or t
  misc_feature (385)..(385): n is a, c, g, or t
  misc_feature (387)..(387): n is a, c, g, or t
  misc_feature (488)..(488): n is a, c, g, or t
  misc_feature (530)..(530): n is a, c, g, or t
  misc_feature (1158)..(1158): n is a, c, g, or t
  misc_feature (1224)..(1224): n is a, c, g, or t
  misc_feature (1285)..(1285): n is a, c, g, or t
  misc_feature (1294)..(1294): n is a, c, g, or t
  misc_feature (1310)..(1310): n is a, c, g, or t
  misc_feature (1328)..(1328): n is a, c, g, or t
  misc_feature (1330)..(1330): n is a, c, g, or t
  misc_feature (1384)..(1384): n is a, c, g, or t
  misc_feature (1471)..(1471): n is a, c, g, or t
  Peptide Sequence Number=SeqID_8342
  Probeset Number=SeqID_15292
gtgtggtggtgcgccccngtggtgttgtgtgtgtgcctcttctcctgtttccgctgtttcccctcntccccctcttctnataatctaacggagacggagtcnagtaacttgaggatgattataaacttatgcagaaagtaaggtacgcttgagttagatatatataaatattattgttgtatgtttcctgttgctcagggttatgtatgannncnnngtatatgaagatggagcgctagatgactacgcntgttctgccccgcgcaaagaactcgggaaatagaacgacccacatctaagctactatgagatcagtctcataccgtctcaacngccgccgcacnctcattatcgctctttactgngcgggggatgagcagccagnanagccgcacgacacggcaatcacagtcgatataatatataaagcataggaacaagaaagtctatgactgctcagatttacttcagtagtggcagactgtgtnacgataggagcagagagagagagaggagcgagactactattntacccatcactaccgcactcacactcaatctgcaccacgcggcgcggcgagggttgggtggatgggcgcgctcggtggggagcgtgaggagcacctcggaatgtagttttggtctgatagtggatgtccgtctccctgctcagtgctatgtgtgtctgctaactcaactggctgactcagaacgaatagtagcgccagaggaggggggagatcgagtgccgtggagggggagcgacagagtcaattgcacgtatccgttctgtgtagtgagttgcgttcgacctagagtgtaatgtggtatggtacactagatctcgcccgcccgcctcttatctcagatgactcagcgacactaatttagtatgatatactaatatcacatctcttcctctgatttatatttgattttatgttatacttttcacactaagacgtcgtgtctacgactattgccaagtcgctgcatgtctgcagtccacgtggacgcaggcgagtggttagtgactgccacactgtatccattcacgggtatgattatgtagtctcgtcgtccgccttctgctctgtcgtgactatgtggatgacgagtccatgcctcagccgtgagagtgacacgtaggacaatccncaagcagatagcattgtcgtctctcccgttgtctccatcatctctctccctcacgcggtcctcacnctcagagcaactcgtctactacctcattattcagctatcactaatatactgtatcatagcnagagctacnattacatatttcactnttgtgatcatgcgcaatngncattcttacgacgagtcatagagtcagcagatacacgcatcccctgctgtcaancatcgagcaacgagcactgaaaaacgtggaaacatacactcacgacatcagacacagctacgcactaccccgtactgccgagttagngg

SEQ ID NO: 5514 - DNA, 1697 bp, Glycine max
  misc_feature (298)..(298): n is a, c, g, or t
  misc_feature (527)..(527): n is a, c, g, or t
  misc_feature (1627)..(1627): n is a, c, g, or t
  misc_feature (1648)..(1648): n is a, c, g, or t
  misc_feature (1666)..(1666): n is a, c, g, or t
  misc_feature (1670)..(1670): n is a, c, g, or t
  misc_feature (1675)..(1676): n is a, c, g, or t
  misc_feature (1680)..(1682): n is a, c, g, or t
  misc_feature (1686)..(1687): n is a, c, g, or t
  misc_feature (1695)..(1697): n is a, c, g, or t
  Probeset Number=SeqID_15293
cttaagatataaaatgttaacacagagattacatcaggccggcacaaaacagcgctctatacttgtgtatacactacgtccctaccgcagacgccactgaggccaccgcgccatcgtcaaatgtgcgctcacgcattgatgatagacgcgcgatagcactactcacattgatcactctgatgccgcgacgatcggcacactacgcctcgccaccgcacatcgcttgcctgtcgtcctcgccctaaactcagcggacaccgtcatcggtgagaaattaacgcagaggaacggcatcagnatcagagtcagtatgatcatgttatgtgtcagagcccgacgtagctgctttcaatagatggtcacctatcgagctgagagtaactctcgcgaaataccagtgactgatacgccgtctaccgccccgctaactctctcgtgtcacacccgcccgcatagcgcggagcagcgtactcatcctgaacgagagcctcgttggtgcgtcactttctcatcatccgtcggactgncaggtgaagcgcgtcgcgatacactcgtgactacacgctcacatcgcacagcacccaccaaggtcctgtgatggcgtgcgcgagggcgatagaccttcgcgcgcggcatcgtgtctcccaacacgcaacccctagccgcacccgagtcctcctcttgcgagcgagcgtgagattgtacatcgcgaccatcgagacggcagcgagtgaatcagaaatgtcgatacatgcgtgggacgcagcgcaagaagtcagactgacaatgactgacgccacgcagctcatccttcatatccgtcgtcgacgatcgtcaactcatcactactatctatgcaggcgcagcgaagaaagtaacagtagctcgggcgtgcgaccccgtaactatatgaattgatgcgaaggtgcgtcatccgtacaaaatcattgtcttttgcacaacagtacagagcaagacgaaccagcattaatcgagcaagcaccaagtcacccaccatgtgagatatagaataaacacaacgcgtgccgcagacgcatacagaatgcgaagattggtgatagtcactcccaagcgcaataccatctactccacaactttatgtcgctcccaacaactcacaatccctccgaaacaaacccaggcacgtacgggatgaaaaacatgtaacaaggtgtatatgagattattagatgaatgaaatatcaggggggtatgtatcgcgggcgtgggcgggcgttaatgtggcgccacaacgggggggtactggggtgagcggcagcgttggtaatggaacggggcgggtccagatacagcgtaaccgatcgtgcgcgtggaggggataggggagcgggggcaaagggagctgttggtccccccgccagccacgcgcccacccgcaaggagaaaacacataagagcccatataacatggtgagttcgtatttgtgaaatacatgtctacagacactatacatttaaattattcaccctcctctagaagtggctacgcacagacgcgccacagcggggcggacgtgtaacacatctagctagcgcgaaggcggccgtgggtgccgtgagggggtgcggggagaggatagggtgnggcgaggcgggggagacaganccaagagggtaaagaganttanaaaannattnnntttnnttaaaagnnn

SEQ ID NO: 5515 - DNA, 1974 bp, Glycine max
  misc_feature (43)..(43): n is a, c, g, or t
  misc_feature (48)..(48): n is a, c, g, or t
  misc_feature (53)..(53): n is a, c, g, or t
  misc_feature (60)..(60): n is a, c, g, or t
  misc_feature (62)..(62): n is a, c, g, or t
  misc_feature (74)..(74): n is a, c, g, or t
  misc_feature (133)..(133): n is a, c, g, or t
  misc_feature (177)..(177): n is a, c, g, or t
  misc_feature (185)..(185): n is a, c, g, or t
  misc_feature (189)..(189): n is a, c, g, or t
  misc_feature (222)..(222): n is a, c, g, or t
  misc_feature (227)..(227): n is a, c, g, or t
  misc_feature (233)..(233): n is a, c, g, or t
  misc_feature (247)..(247): n is a, c, g, or t
  misc_feature (249)..(249): n is a, c, g, or t
  misc_feature (273)..(273): n is a, c, g, or t
  misc_feature (276)..(276): n is a, c, g, or t
  misc_feature (282)..(282): n is a, c, g, or t
  misc_feature (319)..(319): n is a, c, g, or t
  misc_feature (325)..(325): n is a, c, g, or t
  misc_feature (377)..(377): n is a, c, g, or t
  misc_feature (382)..(382): n is a, c, g, or t
  misc_feature (392)..(392): n is a, c, g, or t
  misc_feature (442)..(442): n is a, c, g, or t
  misc_feature (481)..(481): n is a, c, g, or t
  misc_feature (493)..(493): n is a, c, g, or t
  misc_feature (614)..(614): n is a, c, g, or t
  misc_feature (640)..(640): n is a, c, g, or t
  misc_feature (702)..(702): n is a, c, g, or t
  misc_feature (724)..(724): n is a, c, g, or t
  misc_feature (755)..(755): n is a, c, g, or t
  misc_feature (814)..(814): n is a, c, g, or t
  misc_feature (834)..(834): n is a, c, g, or t
  misc_feature (867)..(867): n is a, c, g, or t
  misc_feature (1007)..(1007): n is a, c, g, or t
  misc_feature (1019)..(1019): n is a, c, g, or t
  misc_feature (1025)..(1025): n is a, c, g, or t
  misc_feature (1050)..(1050): n is a, c, g, or t
  misc_feature (1099)..(1099): n is a, c, g, or t
  misc_feature (1142)..(1142): n is a, c, g, or t
  misc_feature (1167)..(1167): n is a, c, g, or t
  misc_feature (1217)..(1217): n is a, c, g, or t
  misc_feature (1221)..(1221): n is a, c, g, or t
  misc_feature (1223)..(1223): n is a, c, g, or t
  misc_feature (1225)..(1225): n is a, c, g, or t
  misc_feature (1274)..(1274): n is a, c, g, or t
  misc_feature (1315)..(1315): n is a, c, g, or t
  misc_feature (1339)..(1339): n is a, c, g, or t
  misc_feature (1367)..(1367): n is a, c, g, or t
  misc_feature (1418)..(1418): n is a, c, g, or t
  misc_feature (1421)..(1421): n is a, c, g, or t
  misc_feature (1425)..(1425): n is a, c, g, or t
  misc_feature (1456)..(1456): n is a, c, g, or t
  misc_feature (1468)..(1468): n is a, c, g, or t
  misc_feature (1490)..(1490): n is a, c, g, or t
  misc_feature (1505)..(1505): n is a, c, g, or t
  misc_feature (1507)..(1507): n is a, c, g, or t
  misc_feature (1521)..(1521): n is a, c, g, or t
  misc_feature (1580)..(1580): n is a, c, g, or t
  misc_feature (1584)..(1584): n is a, c, g, or t
  misc_feature (1587)..(1587): n is a, c, g, or t
  misc_feature (1597)..(1597): n is a, c, g, or t
  misc_feature (1616)..(1616): n is a, c, g, or t
  misc_feature (1664)..(1664): n is a, c, g, or t
  misc_feature (1666)..(1666): n is a, c, g, or t
  misc_feature (1670)..(1670): n is a, c, g, or t
  misc_feature (1701)..(1701): n is a, c, g, or t
  misc_feature (1717)..(1717): n is a, c, g, or t
  misc_feature (1737)..(1737): n is a, c, g, or t
  misc_feature (1760)..(1760): n is a, c, g, or t
  misc_feature (1764)..(1764): n is a, c, g, or t
  misc_feature (1772)..(1772): n is a, c, g, or t
  misc_feature (1777)..(1778): n is a, c, g, or t
  misc_feature (1794)..(1794): n is a, c, g, or t
  misc_feature (1796)..(1796): n is a, c, g, or t
  misc_feature (1816)..(1816): n is a, c, g, or t
  misc_feature (1828)..(1828): n is a, c, g, or t
  misc_feature (1836)..(1836): n is a, c, g, or t
  misc_feature (1874)..(1874): n is a, c, g, or t
  misc_feature (1879)..(1879): n is a, c, g, or t
  misc_feature (1928)..(1930): n is a, c, g, or t
  misc_feature (1933)..(1939): n is a, c, g, or t
  misc_feature (1941)..(1951): n is a, c, g, or t
  misc_feature (1953)..(1954): n is a, c, g, or t
  misc_feature (1956)..(1958): n is a, c, g, or t
  misc_feature (1963)..(1963): n is a, c, g, or t
  Peptide Sequence Number=SeqID_8343
  Probeset Number=SeqID_15294
ccgttagttagtaatgtagtatatatacgagtcgatgatagcntatgnatgantgattgntngtcgctgcgagngtagttttagtagtctgcatgctactgcgtgctgagtcgtccatctatctgcagcagcngactgtcgcttcatcacgacgacgcgtcgtgtcgtcgttcttcncttgcgtntgtncgactatcacgcatgaaatagacacacacgacntcacngcgagnagagagatgtgtanangtcaagtcatgcagcactggtatngangcgcgnagtttatatactgtttataactctcttgttgatgtcnactatncagatatgttcgtaagtcgcgtgctgggatctatagataatagtatatatgnattgngtatagtgtnaaagtaggcatgtgtatgcggcagtcgtgtgtgatattggcgcgagtgtnatagcaactatgtctctatccactcgtcactcgtcatancaaacttatatngttgtggtagtggagagtagagttgtgtcgtcggacgagcgtttacgtagtacattatgtcgagataatcgagcgagtcgttgagagagatatgtgtcgcaccctctttcaagcgtagagnttgcacgatgtcgccgaacacatgantgatatcatcagcatgactcacactcatatagttgcgtgagagatgtgtaggtagctatcanaaccatacatacgtcagtacgngagtacgagcgacgtaccgtagacagcatcntcacatatacatatagcatcgctacttgaacacgcgcaaccatgacgcatctctgcatngatattacgtctgtgtgtgnacttcgtggtgtgcgtgctctcacagcaatatncgtttatctatacacatcaaatacacctgatccgtatttgttgctatatcgcactcgtacatacatcactatatatcactctgtcatcgctctcgtatatataatactacctacactctcctacatactcgaatataatnagtgcgtgctangtatgnatacgtaccatctgatgtattgtantttagtgactatgagtacagtgagagtcatatgtgcagtagtaatgtgnccgctcagttagacagcgatcacgacatcgtgtatcgaagctnttgatgatgagtattcatactcgcntcctgacgtgagacgtggttgatagcgcgagcgtcgcggcgcggcggcgnggcngngncgcagggatgtgggtgagtgtgtgcgggggtgtgtgtgtgtggtagtgntgtgacgggcaggagtgtttcaggctgtggtgagagtgagnattgtacgcgctgctccgctaatntcgagagttacgagtgatatatagtagngtcgacgacggaagccgctcctacagtacgacgctaccaggacggcggagncangcgngtcaagggagtccggagtggcgccgcggcgnctcccactcccncaatcaggagcacacccctcanccgtagacgcagagnangtgtgtgagtatcngtcgatctcactggagtgtgaggcgccgccgtgtgtgtgtgcagtggcgctgtgacacnacgnagntcgctcgcgngtgtcgagtgttgtagatntgcgagtagttttatgtggtgttgatgatgaggtcgcgcgtggtgtgngntcgngaagcgcgcacctgcaccgcgcgctatatangcgcagcgccgcacancagaggcacaaccacacganagacacacacatagaaaataganaaanaataaganacaanncagaaccacaaaatananagaggacgtcgagagagtangaagagaaaggncgatgggnagagccagagagacagaggagaaaggaacgaggaaggnagacnacgagacagaacaggaggacgcaaagagcgaaagacgacacacagcccnnngannnnnnnannnnnnnnnnnanngnnnaaggnaaaaaaaaaaa

SEQ ID NO: 5516 - DNA, 1689 bp, Glycine max
  misc_feature (1)..(1): n is a, c, g, or t
  misc_feature (47)..(47): n is a, c, g, or t
  misc_feature (464)..(464): n is a, c, g, or t
  misc_feature (689)..(689): n is a, c, g, or t
  misc_feature (966)..(966): n is a, c, g, or t
  misc_feature (1165)..(1165): n is a, c, g, or t
  Probeset Number=SeqID_15295
nagtgccacgcgcgggactcgacagatgagaggagtgtatgtgcgcncacttccctccgtcacgcttgtcacacgatgctcgttcctgtactgtttacatactactacctctctgtccacaggtcgtcctgtcacccgccactacggcagcgtcgtccaacaacattaaacgtctacgggtgtgtgtgtcgattatactatatactcgtcacgtattcatacgcctgccaccgtggcgtagtaagtgctcctcagccctcagcagcgcgcgaccgatctgatcgcgtgtcctacgttcttacagagaagtacgccattatgaggttaagacgggttcgtgtatatgtcctataaacacatatatcgtactgcgctccattcttagacgagcgctcacatacaactacgagaacataaatcatattacctactctacgtatatgtgtacacaacaacgtcagagngctgtagtactctcgtagtacaagcagctcgtttatatgatgttactctatatgtcccatatcatactcatatgcataatatgtcttggtatagcactctgatggtactaccatcattggatgcaccacatgtgcaacttgtcgcacagctcagaccgcctgccctcctagcgctctcgccatgtgcttcgcttgtatgcgtccattctctacgcttcggagctncagatcttcacgcgttccgctcgccttcataagccaatgcacatgactgcttcacgcataattcgtgaccgactgcgccgttatgcattctggtgtgctctttataacgctctggctcatgtgcaggctgctcggcatgatcaacacagagcctgtacgaacatactctcctcatgcgtaccttaacctcggtcgtacatacactcggtcggtctcgatatcaccgcatacctgcgctattactagtcgttcactccaaccaccaccgctgcactgntctacgctcatactactataatatcccatgaaggataacataatacgggtgtcatcgatgtcctgtcctgcacgtgagcgatgcgcgcgagaagattcgtatgaagcgttgtgcgtacggcacggacaacggtggcgtcgttgcccttaccgccacgcttgtccaatccattccgctcgcatatgcgagaacgtctccnggccgcaccaggcctgcctcgccctcgaacattatataccaactacattttcgcgaagtccgtcgcagattttcatccatcgtctatcctttgtctcgcagaacgtctcgccggtatggccggacaatcgcagcgactcccggcgtcctgtgcgacgagagtcctacaaaacacgcgtcttaggagacgggagagatccatacaatcttcattgtcaggtatgtcgttaggaggccctagggctcccgatgatatcatatatgactctccgcgggagaagtaacgttcccattccatgtttttccctttactcgcgtccaccccttacgacggcgagaagaacaaaaatggaaagcaagtggacttcctctgccacggcacggagaggaatctcttctagtttgtatgagagcccggcaccacgcgccgcggcggcgtgagccgcacacgccaccaccaaacagaagacaggtccataattgggtgtgggggggggggagcggaggtcagagaaagaagaaata

SEQ ID NO: 5517 - DNA, 1612 bp, Glycine max
  misc_feature (159)..(159): n is a, c, g, or t
  misc_feature (406)..(406): n is a, c, g, or t
  misc_feature (684)..(684): n is a, c, g, or t
  misc_feature (702)..(702): n is a, c, g, or t
  misc_feature (805)..(805): n is a, c, g, or t
  misc_feature (1052)..(1052): n is a, c, g, or t
  misc_feature (1070)..(1070): n is a, c, g, or t
  misc_feature (1078)..(1078): n is a, c, g, or t
  misc_feature (1204)..(1204): n is a, c, g, or t
  misc_feature (1230)..(1230): n is a, c, g, or t
  misc_feature (1247)..(1247): n is a, c, g, or t
  misc_feature (1317)..(1317): n is a, c, g, or t
  misc_feature (1320)..(1320): n is a, c, g, or t
  misc_feature (1348)..(1349): n is a, c, g, or t
  misc_feature (1407)..(1407): n is a, c, g, or t
  misc_feature (1409)..(1409): n is a, c, g, or t
  misc_feature (1512)..(1512): n is a, c, g, or t
  misc_feature (1550)..(1550): n is a, c, g, or t
  misc_feature (1593)..(1593): n is a, c, g, or t
  Peptide Sequence Number=SeqID_8344
  Probeset Number=SeqID_15296
cgcgcgactcatctttctgagtgttattttgtgatatttctttatgccgcttttcggtagtgtctgactgtagtatcgtgttgttgtttctgcttcttctctcttctcttctttattattttgttgcctttatttcttttatctttcccttccttttantaacgagccaccgccctttcttctcgctataattttggagctaatcaaccgggtctatcttccccccccacattcttctaagatatttcgagaaaacgggctaaacaataggtgattataaagaggaactagagagtgacataaaggccttacttttggtgcacccacaaatcactccgctcctctctttgcgtcgtctttctcacccgggcggtgtagcatgagacagactctgggtgaaccatgngcggagtggcgagaatttattaacatctactattacatttactactcttcttactacctgcgcctatccttctctgcaacatttatttatataacactccatcgccgcccagtatacctactaattacattctaacccgccgcagaccaccatcgaacccacgacgaatgtctagcagcgacgacgagcttctcgccgctaccatatatcatcgactcaacggcatagatacatagttctctgtcgctcacgctcgtatgacctctcagtatctttcntaatttgtatcgcagttngaattccatatacttctccgtcgtgcacgattccgcgtttcagtcatttgattagatcatatagcttgtatcatccatatgccgaccgcaatcatctgcttcntactacataatcttatctcatcagtggtagcttgatatcaccacttatacattgaagtctatctacatttaatatgatacagcttacacgacatgtagatatgatgcttgcgcgcaccatattcagactcatcgcactatactgacacattatgtgactcaggacgcgatgacgtctctaccccgctcctctcgtgacagtctactataatctcttgtattgagacatatggatcacgcgacatcgnctctgcactagtctatantgcctacnctcatcatctctcacactaactactattgtcacacgagtctgagtctactctgttgtatcatgtgcctattatcatgtgctgctcagcgcgtgttatgtgatgacgcgtgctatatagagacacgntactctgactattataactacgtcangccatgcacattcgttnacatctcgtgtatctaactcttcgtatcgttcgaccactaacgctgataagacacctacgttatatgtcncancaccatcttcactcgcacatatctacgnngcgtctctcttcatctcgtctcgcgtttgtatctatctctgatattcatctttccgcntncattactcatgactctttgatctattatcatgctatcaatcgatcatactactctgctgctaactcgctctcatacatagatatatacaccacagatcttatnatcaaatatgacgatctgtctcgaatacatacgtgcanctcgtcgccgaactatcatctagcactagctacgggactgacncatatcgcgctcatcactg

SEQ ID NO: 5518 - DNA, 1813 bp, Glycine max
  misc_feature (124)..(124): n is a, c, g, or t
  misc_feature (133)..(133): n is a, c, g, or t
  misc_feature (152)..(152): n is a, c, g, or t
  misc_feature (164)..(164): n is a, c, g, or t
  misc_feature (198)..(198): n is a, c, g, or t
  misc_feature (201)..(201): n is a, c, g, or t
  misc_feature (203)..(203): n is a, c, g, or t
  misc_feature (221)..(221): n is a, c, g, or t
  misc_feature (227)..(227): n is a, c, g, or t
  misc_feature (238)..(238): n is a, c, g, or t
  misc_feature (270)..(270): n is a, c, g, or t
  misc_feature (396)..(396): n is a, c, g, or t
  misc_feature (436)..(436): n is a, c, g, or t
  misc_feature (470)..(470): n is a, c, g, or t
  misc_feature (521)..(521): n is a, c, g, or t
  misc_feature (550)..(550): n is a, c, g, or t
  misc_feature (561)..(561): n is a, c, g, or t
  misc_feature (701)..(701): n is a, c, g, or t
  misc_feature (733)..(733): n is a, c, g, or t
  misc_feature (981)..(981): n is a, c, g, or t
  misc_feature (1102)..(1102): n is a, c, g, or t
  misc_feature (1217)..(1217): n is a, c, g, or t
  misc_feature (1284)..(1284): n is a, c, g, or t
  misc_feature (1342)..(1342): n is a, c, g, or t
  misc_feature (1419)..(1419): n is a, c, g, or t
  misc_feature (1433)..(1433): n is a, c, g, or t
  misc_feature (1472)..(1472): n is a, c, g, or t
  misc_feature (1478)..(1478): n is a, c, g, or t
  misc_feature (1481)..(1481): n is a, c, g, or t
  misc_feature (1544)..(1544): n is a, c, g, or t
  misc_feature (1619)..(1619): n is a, c, g, or t
  misc_feature (1648)..(1648): n is a, c, g, or t
  misc_feature (1753)..(1753): n is a, c, g, or t
  misc_feature (1758)..(1758): n is a, c, g, or t
  misc_feature (1760)..(1760): n is a, c, g, or t
  misc_feature (1779)..(1782): n is a, c, g, or t
  misc_feature (1784)..(1784): n is a, c, g, or t
  misc_feature (1787)..(1787): n is a, c, g, or t
  misc_feature (1789)..(1790): n is a, c, g, or t
  misc_feature (1805)..(1805): n is a, c, g, or t
  misc_feature (1813)..(1813): n is a, c, g, or t
  Probeset Number=SeqID_15297
gtctgttatgatactttcaaagtctcacagagcaagtagtagcacaaagaccaaaatcagtacacgacgtcatatatacacaacacacacatcacagcgcgcagagatataaaactccacacanagaagtatnatggactcatgcagcgaanactcgcacacangactacgcagaggtatcgtctctcaagagacacnaantnttgttctgtgcgtgccanctagtntcacaagctantctctaggtactgcctcacatcgagacgaacnatccgccacgtcccactcacgctagctcacaccagctgcggcccgagcgccgatccagcgtgtaacgcggacgcgacaagtcttagaatatcattatgacatacacgccgcgctatactacacatngacgtctacactcagtagctcagacacatgatcgatcatntataccgccgcacgtgtcgtcagcgagcgcatcntcacacgctggtcgagctacacgataacacgtttgtagaataacatgccantgcgcgtcactccacgcgcacacgcgcanacgtagtgatngtcgcctactactgtacgcgcactagactgtcgcgtctcgtcacatcgctgcgatcgacctggctcgccacatctgctctcacgatcgaaagccagagacatcactataacataacgcacgactatgacgcgacgcaggntacctacgttacgatcgtcgtgatcatattgncgaggtaacctatagcacttcacagacctcgccgcatacactatctcccggtaatcgacatctcggagtctctcctatcacctcgagtatctcatgcgtcatatgatatcgtcagcctatctcatcgactgacacactacgtactcaacaacacgacacaggaacgaatatataacacagaagtaggcgcgcagtcgacggaacgcacacccgaccgcatattactactagacacatcgagtcgcacnacacctcagtgccgatcagctatctctgacactgctacatgatatatatgctaatatatatgtagcagtaaagcactgacgacaagcagtacaagaataacatgtatatgcttaaatctgnctgcttgacctagcatactgataggctgaccgagtgcttgactacgccatactctatgtttttgctggtagtgtcgtggattggttgttttgtccctgctctccagcgcgacgcngtcgcgtcggcgtgtgtggtataataagaaaagatcgactgacatatattatatgaagaattatatntaataaataagataatagacatatctcgcaaagaagaacgacaagtcagcgtgctatntgcggcgagtaagactatcaaagagatggtcagagacaatcagactaagacatgtcggaagtgtgtacagcacatgnagggcggcagatanaaacgacacaagaacgtcgtcgctgcgcggctcttacgntgtggngancgaaccaccgacaccatcggtcctcgtgtgtgtttaatctgtcttcattttatgcatatgtgnattcttctcgcctctcctcatacacacctacacgcctaccgactacacacgcactactacacatccacacacacncgcagcaccagcagcacgctacatattancagagatgaggacgacgaggacagggcgcatggccgtacaccgctgcacacaaggcatagctcagcagtcgtcagtgtctctatcgtctgcccgcgctctgctcncgccngncgcgcctagtcgccggggnnnngncgngnngtggggggggggggnggggcttn

SEQ ID NO: 5519 - DNA, 775 bp, Glycine max
  Peptide Sequence Number=SeqID_8345
  Probeset Number=SeqID_15298
aagaaccctaggtacacctcatggagaacgccaaccaaggtgtggatccgcacgtgcttgatatagtcaattgcccggattgtggaaggcgggtggtgacgtttgtggcgaggcgcagccagtttgcgggcaagaggttctacaagtgccgcaaccacaacctggggagaggcgggtgtgatttctattggtggcaacaagcatatgcggagcacttggctgggcttggaccagtcgtgcctccattggcgcagatcaatcagggagaaaatggcatcggaggagcagatcaaggtggtcagatgcagccggcggatctagcaggaggccagtagatcggagggctggatgcctccaacatggcatccacggcggccgatgttgcaaggtcttcgatccacgtggtggctgttggtcggcgtcaggaagccacaactcttgatcccgcatttatcaatatggtcatgtctgtcggcaatatggctatttgcgttgccatcctttactggttgtggctgcaatcgtgatcgatgcgcttgatgagtcgatccaatattagcagcttatggatgcttagtaggtgtcaagggttaagtagtattagcggtgtgcgcgtgttagccatatgcttttggcttggtaaccttgttgcttgtatgtttggacctatggctagttttatttaatgaaatgtttgtaatgtagacgtaatgatggacaacatctgtagtatgtttcctttctttaaaaaattcagtgatgaatgcttttatcg

SEQ ID NO: 5520 - DNA, 325 bp, Glycine max
  Probeset Number=SeqID_15299
gggagtgcagaagcagttgttgaggtctggaaccggtccgaattctattcccggtcataacgtaaccgttcactgcactggtttcgggaagaacggtgacctttctcagaaattctggaccacaaaggatactgggcagaaaccattctctttcaaaatcagccaaggttctgttatcgaacgatgggatgaacgtgtgcttggcatgcatattggtgaatttgctcgtctccggagctcctcctattatgctaatggcagctggtgctttcctgcttagaaaatacggcccatctctgtgttggaattagaaattcttgtctta

SEQ ID NO: 5521 - DNA, 495 bp, Glycine max
  Peptide Sequence Number=SeqID_8346
  Probeset Number=SeqID_15300
ctgaagcaccacaatctggttcgggcattgctcagagtctgccaaacagtggccacattggaaaccaacatgatcagtttggatcgggtggaataaaatttagcacccagtcacctcaggaggactttggtacccaggcatcacatgaagtggctgtcaagtatgctgagcgatactaaaatggcaaccttgtcctcaaaatcaaacatggcctaatttgaggagcagggcattgtgaaacaattatgtcgtatttgtttggagcaaggtgctgcatggatgcaaatgtctgttagccgatcaagaacagcaggagttaggcgatcaaatgggtttggctgtagtaattttgagtaccatttatttgcctcagttacatttggctaactttggtctagtataggcttgtaataattaggcatgataattcacatgcactatgagttgatctactcgaataggattggggggcaacataattaattgctgatccta

SEQ ID NO: 5522 - DNA, 1511 bp, Glycine max
  misc_feature (19)..(19): n is a, c, g, or t
  misc_feature (24)..(24): n is a, c, g, or t
  misc_feature (26)..(26): n is a, c, g, or t
  misc_feature (31)..(31): n is a, c, g, or t
  misc_feature (37)..(39): n is a, c, g, or t
  misc_feature (43)..(44): n is a, c, g, or t
  misc_feature (49)..(51): n is a, c, g, or t
  misc_feature (53)..(53): n is a, c, g, or t
  misc_feature (56)..(59): n is a, c, g, or t
  misc_feature (63)..(66): n is a, c, g, or t
  misc_feature (69)..(70): n is a, c, g, or t
  misc_feature (72)..(74): n is a, c, g, or t
  misc_feature (76)..(77): n is a, c, g, or t
  misc_feature (96)..(96): n is a, c, g, or t
  misc_feature (103)..(103): n is a, c, g, or t
  misc_feature (121)..(121): n is a, c, g, or t
  misc_feature (124)..(124): n is a, c, g, or t
  misc_feature (169)..(169): n is a, c, g, or t
  misc_feature (177)..(178): n is a, c, g, or t
  misc_feature (199)..(199): n is a, c, g, or t
  misc_feature (213)..(213): n is a, c, g, or t
  misc_feature (269)..(269): n is a, c, g, or t
  misc_feature (309)..(309): n is a, c, g, or t
  misc_feature (356)..(356): n is a, c, g, or t
  misc_feature (566)..(566): n is a, c, g, or t
  misc_feature (639)..(639): n is a, c, g, or t
  misc_feature (825)..(825): n is a, c, g, or t
  misc_feature (940)..(940): n is a, c, g, or t
  misc_feature (1171)..(1171): n is a, c, g, or t
  misc_feature (1192)..(1192): n is a, c, g, or t
  misc_feature (1265)..(1265): n is a, c, g, or t
  misc_feature (1307)..(1307): n is a, c, g, or t
  misc_feature (1330)..(1330): n is a, c, g, or t
  misc_feature (1380)..(1380): n is a, c, g, or t
  misc_feature (1451)..(1451): n is a, c, g, or t
  Probeset Number=SeqID_15301
tatatataattattatatnttttntnttttntttaannntatnntgagnnnangannnnaagnnnnaanncnnngnnaaaaggagtcgggtgaggnaggatanggatttattaaatattangangttagtaagatacttatgtgtataaacgagacatagaagttgaangaacaganngagggagaaacagtcacgccngtacacggcggcgngttcgcccgccgcggcggtgtgctcgcctcgtcgtgatgttcctcatcttgtcctntcttctcatcgcccttgtcactctattattctgtctattnataatcaacctctcgtcgtcccgcggtccccgcagaataaacatatntactttaacataatcatatcaacacaatatacacagtcacgatcaatcatcaccaaataaaatctgtcacctatgccgtcactcttctcctcgtctctgttcacgtctgttatatcacgtatctcctcgttgcgttgtgttagcccgctttagacgcttacctcgtttcgcgtcttctgtacatttggtacactctttcgttcgtgtttnctatgccgtctgttctattgtgtatagtgtgcaccgatatacctcctcacgtcgtgtctcgtcgccgcgccangcagacgcggggcgctccgttgtttgcgtcgttgtctcgtttttgcctgcctctcctcacctgtttcgcgactcttttctacgcgcaactctctcttcttttctctctactctcctccctcgttgttttctggcagtgtagattcatttaccttctctacgtttcatatgactccgactgcggatnttgttaacgctctccccacgccacaaaccagaatcggtcgagtagactactgtgtccaagcactctatgaataggtggtaatatttatgtcatcgagcgccgtggctgcgggagntgatttataaagctaatcttatgtcttacttacaccaacgtatatatgtgttctactgagtatgttgttttcatcatgaaattatatattatatatatgtcggctgcttgctcgcatatatgttgtgtctattctgtatcgtcgcgctatgctccgcgatcgcatatgcgcttgttctcgtgctcgtctctcgctcgttgtgtcggcgttctcctttgtatacatcctccnctacttttatcttatcaacancgaagtacgtgaactgcacatatccgaaactatcactatgtaactgtatcctattctattcacagacagcctntctaatcaccgatgctcacatcactacgtcagcactcatttntacgccctcgcctttatatattncctctactcgtccgcggtctgactgctcattatctccgctacctgtctcnctgctcactatctcctctcagttgtctaccactctctcactctcatcgcctacgtctcgatatctaatctngtagcacctcctcaacttcataccctctcttctacgcagtctataaccatgctcggcgcg

SEQ ID NO: 5523 - DNA, 1368 bp, Glycine max
  misc_feature (51)..(51): n is a, c, g, or t
  misc_feature (557)..(557): n is a, c, g, or t
  misc_feature (847)..(847): n is a, c, g, or t
  misc_feature (952)..(952): n is a, c, g, or t
  misc_feature (1102)..(1102): n is a, c, g, or t
  misc_feature (1198)..(1198): n is a, c, g, or t
  misc_feature (1282)..(1282): n is a, c, g, or t
  misc_feature (1308)..(1308): n is a, c, g, or t
  misc_feature (1368)..(1368): n is a, c, g, or t
  Peptide Sequence Number=SeqID_8347
  Probeset Number=SeqID_15302
agaccagcaccaaccgagaataaccgatgcacaacaagagacagaacagantatagattaagagaggaggagacttcctgtctgcgtctcccgcacacaaattactgactacagcgggcaccaccctctattcactagatcgaagattatggtgtggggagcaagcatacctcccatatgctcaccctccctgtcgcctcgctatcctaactcacaagagaggataatggggcgatcatgaaaccatacgcgacgcacgtatactcatgatacctactacaaccacaattccaatccttaagacatagaaagaaaaccgacgacacacaacgacaagcagatgcagcaatagacctacccgcaacagccgtagctctttcattcacaagagacggtcgaggcgagactcccgcacacactgaatgattggcccgctgtaccacacaccagcagtcgggaagatctcctcaccccacccaccactcgccttttacccgcggagagggatgttccacaagaggacttcctgtataaaagcgtactatataatagaaggngtgtataataattcttctctctcgttctctaccccgctcgcgtcgttgtaggaagatatattataaataaacgcgcgggaggtattaactaggatctctcccccgcgaggtttttgtttggacctccccacgacagacgaggggtgtgggtatacacaacaacaaccctggggaagagaaatatattattttggtgggcgaggggcagtggcgccacccacacaacaatatgctcgtggacacaactgagccgagcctactcaccacctcgatactgtgtttgtccagcnagcggcgcattcagaagcgagaggaggtgagtacacaacctcctcgactctacagagcgcgacgagctgttgagtaagctaacactactaaagttatacctcccnccgcgcgataccatgatgagattacacctctatgtaagtcgagaacaaactaataatatgttgataccgcgcacgtgtccaccacccctaccacagctaggatgagaggtgagtgaagagagcattagcgcacgaccacacaatgatccncacactactcatcgtcacaaagatacctcaagacaacagctaccacgtcgactaagagagaacaatgagtacggtactacgagctataccagcganatacaacttaagtctacatccacgacgtaatcacgtcacagcatagaatagttatgacggaggatataacatcggcgtgcctcngcactcctgagacctgatgcgtctgnataccacacagcagcacgacttctgcgcacggacactcttcgagccagaaacatatgacn

SEQ ID NO: 5524 - DNA, 1536 bp, Glycine max
  misc_feature (21)..(21): n is a, c, g, or t
  misc_feature (28)..(28): n is a, c, g, or t
  misc_feature (110)..(110): n is a, c, g, or t
  misc_feature (821)..(821): n is a, c, g, or t
  misc_feature (917)..(917): n is a, c, g, or t
  misc_feature (945)..(945): n is a, c, g, or t
  misc_feature (1013)..(1013): n is a, c, g, or t
  misc_feature (1069)..(1069): n is a, c, g, or t
  misc_feature (1237)..(1237): n is a, c, g, or t
  misc_feature (1374)..(1374): n is a, c, g, or t
  misc_feature (1536)..(1536): n is a, c, g, or t
  Probeset Number=SeqID_15303
ataactctctttcattactcnttatctntatcctctttcctcacatagttatttatctatactcatgcattactgatctgcacagaataatatatgttgctcgtatgtcntctatgtctccgtagaggacagtagtgcaacagccgcagaggcacaacaccctacgcgcgtcactatgtagacgaacatcgcacagcaagagaaacagctctgatcagctagatatctatcctctatggtataacgtgctacatatttgcttcagtgccgagcaccgacacagtgccgcgtactacccctcactgtcattgttatttcgtatatgagtctgctgagtgctttcctgcgatgctggactgaagttagaggatggagatattgaggccagagtgcgttggtggtgcgagcgctctggtgtgcttctgcggtagtgcttgtgtttcgtgttacgtcacgcggctatattacttgataccgtcacctgcgtgtgccatgttgacgcactgcgttatgtagcgagcgaccgaccttggctcgcacaccactaccgagcgcatagcgttccgcaaagataccgtatactagtctacctgatcattccatcactcgctcatattcgtatagttctgtcgtgttgtggtcttctatcctcttccactcgtcgttcgctgttattgttttgtatgatactgtgattctacagacaaactcatcctttatcagagtagggcgcctcaggcgagcatatataacgtcagcgacgcgatagacacatatcacgtgctacgctccgacgcgagacgactgacgcgacacatatnctgctatttctgacggcggctgttgtggactcatgcctcgacctgcgtaatacaagctgagccagtcgtcttgcgcgtcgctcctcatgcgtatantagtccgccgccaatacgctgtgcacancatctctaacgtgatagagtcttctgtatctgcagtctcacacgctaatgcttatgtttcagatcatncagctccgtgtatcgcgatagctattgtcacgagacatgcagagtctgtcctgagntgctccgcgcgacgatgagagagagagtgaccgatgcgttatctctctacagatgtgttgacaagacgctacttatcactattactgatagccgtcggaacgctagtctctcacgccgctcatatcgatcgcgttgtacatattcataaccaacgcgccacggatatncaagatcgcgctgatgttgtatcacagcttactagaattgcagtgatgtctgttgttgtcatcgatcggtggctgtctcggcacagcgtctgtaattctgacttgacattgatcgccatgactaaactgtgtactangtgcaacatcggtgtgccgtcgcagtctagcggcgactacgactgtgacgtgcgtcgcgctggctgcacgacgagtacgtccggtgctgtgcgcatgtcgagtatatgtacgccgtccctcgttgatgtgtgtgtacgttgatgattactgtggagtagcgn

SEQ ID NO: 5525 - DNA, 406 bp, Glycine max
  Peptide Sequence Number=SeqID_8348
  Probeset Number=SeqID_15304
cacctcttccattaacgggtggtgcctctcttccatctccccagccaaaacctatctcaagaaggccacattaggcccttctgtcttcgcaaccgaaaacactccttctactccttcttcttattcttcttcttccttcccttctctcatacaagacaggcctgtctttgctgcccctgcccccatcatcaccccaactgtgagagaggatatggcaaaggaatacgagcaagctattgaagaactccataaattgctgacggacaagagtgaactcactaccacatctgctgataaagtggagcacataacagctactctgagaacatcatgatctgatggcatcccatcatcagaagcctcagacaggatcacagactgatctattcactttcagaggataaaa

SEQ ID NO: 5526 - DNA, 2482 bp, Glycine max
  misc_feature (2)..(2): n is a, c, g, or t
  misc_feature (53)..(53): n is a, c, g, or t
  misc_feature (74)..(74): n is a, c, g, or t
  misc_feature (77)..(77): n is a, c, g, or t
  misc_feature (120)..(120): n is a, c, g, or t
  misc_feature (173)..(173): n is a, c, g, or t
  misc_feature (209)..(209): n is a, c, g, or t
  misc_feature (360)..(360): n is a, c, g, or t
  misc_feature (362)..(362): n is a, c, g, or t
  misc_feature (406)..(406): n is a, c, g, or t
  misc_feature (418)..(418): n is a, c, g, or t
  misc_feature (424)..(424): n is a, c, g, or t
  misc_feature (426)..(426): n is a, c, g, or t
  misc_feature (430)..(430): n is a, c, g, or t
  misc_feature (438)..(438): n is a, c, g, or t
  misc_feature (443)..(443): n is a, c, g, or t
  misc_feature (447)..(447): n is a, c, g, or t
  misc_feature (458)..(458): n is a, c, g, or t
  misc_feature (499)..(499): n is a, c, g, or t
  misc_feature (504)..(504): n is a, c, g, or t
  misc_feature (521)..(521): n is a, c, g, or t
  misc_feature (530)..(530): n is a, c, g, or t
  misc_feature (535)..(535): n is a, c, g, or t
  misc_feature (537)..(537): n is a, c, g, or t
  misc_feature (540)..(540): n is a, c, g, or t
  misc_feature (572)..(572): n is a, c, g, or t
  misc_feature (574)..(574): n is a, c, g, or t
  misc_feature (587)..(587): n is a, c, g, or t
  misc_feature (591)..(591): n is a, c, g, or t
  misc_feature (597)..(597): n is a, c, g, or t
  misc_feature (619)..(619): n is a, c, g, or t
  misc_feature (623)..(623): n is a, c, g, or t
  misc_feature (641)..(641): n is a, c, g, or t
  misc_feature (668)..(668): n is a, c, g, or t
  misc_feature (687)..(687): n is a, c, g, or t
  misc_feature (692)..(692): n is a, c, g, or t
  misc_feature (719)..(719): n is a, c, g, or t
  misc_feature (757)..(757): n is a, c, g, or t
  misc_feature (791)..(791): n is a, c, g, or t
  misc_feature (798)..(798): n is a, c, g, or t
  misc_feature (805)..(805): n is a, c, g, or t
  misc_feature (840)..(840): n is a, c, g, or t
  misc_feature (848)..(848): n is a, c, g, or t
  misc_feature (873)..(873): n is a, c, g, or t
  misc_feature (902)..(902): n is a, c, g, or t
  misc_feature (905)..(905): n is a, c, g, or t
  misc_feature (912)..(912): n is a, c, g, or t
  misc_feature (927)..(927): n is a, c, g, or t
  misc_feature (947)..(947): n is a, c, g, or t
  misc_feature (951)..(951): n is a, c, g, or t
  misc_feature (961)..(961): n is a, c, g, or t
  misc_feature (964)..(964): n is a, c, g, or t
  misc_feature (982)..(982): n is a, c, g, or t
  misc_feature (1017)..(1017): n is a, c, g, or t
  misc_feature (1035)..(1035): n is a, c, g, or t
  misc_feature (1047)..(1047): n is a, c, g, or t
  misc_feature (1051)..(1052): n is a, c, g, or t
  misc_feature (1087)..(1087): n is a, c, g, or t
  misc_feature (1089)..(1089): n is a, c, g, or t
  misc_feature (1092)..(1092): n is a, c, g, or t
  misc_feature (1101)..(1101): n is a, c, g, or t
  misc_feature (1124)..(1125): n is a, c, g, or t
  misc_feature (1137)..(1137): n is a, c, g, or t
  misc_feature (1160)..(1160): n is a, c, g, or t
  misc_feature (1204)..(1204): n is a, c, g, or t
  misc_feature (1212)..(1212): n is a, c, g, or t
  misc_feature (1237)..(1237): n is a, c, g, or t
  misc_feature (1243)..(1243): n is a, c, g, or t
  misc_feature (1264)..(1264): n is a, c, g, or t
  misc_feature (1277)..(1277): n is a, c, g, or t
  misc_feature (1280)..(1281): n is a, c, g, or t
  misc_feature (1283)..(1286): n is a, c, g, or t
  misc_feature (1309)..(1309): n is a, c, g, or t
  misc_feature (1365)..(1365): n is a, c, g, or t
  misc_feature (1392)..(1392): n is a, c, g, or t
  misc_feature (1425)..(1425): n is a, c, g, or t
  misc_feature (1459)..(1459): n is a, c, g, or t
  misc_feature (1497)..(1497): n is a, c, g, or t
  misc_feature (1561)..(1561): n is a, c, g, or t
  misc_feature (1579)..(1579): n is a, c, g, or t
  misc_feature (1620)..(1620): n is a, c, g, or t
  misc_feature (1628)..(1628): n is a, c, g, or t
  misc_feature (1668)..(1668): n is a, c, g, or t
  misc_feature (1676)..(1676): n is a, c, g, or t
  misc_feature (1730)..(1730): n is a, c, g, or t
  misc_feature (1761)..(1761): n is a, c, g, or t
  misc_feature (1767)..(1767): n is a, c, g, or t
  misc_feature (1772)..(1772): n is a, c, g, or t
  misc_feature (1785)..(1785): n is a, c, g, or t
  misc_feature (1787)..(1787): n is a, c, g, or t
  misc_feature (1802)..(1802): n is a, c, g, or t
  misc_feature (1853)..(1853): n is a, c, g, or t
  misc_feature (1858)..(1859): n is a, c, g, or t
  misc_feature (1863)..(1863): n is a, c, g, or t
  misc_feature (1870)..(1871): n is a, c, g, or t
  misc_feature (1890)..(1890): n is a, c, g, or t
  misc_feature (1911)..(1911): n is a, c, g, or t
  misc_feature (1916)..(1916): n is a, c, g, or t
  misc_feature (1928)..(1928): n is a, c, g, or t
  misc_feature (1940)..(1940): n is a, c, g, or t
  misc_feature (1973)..(1974): n is a, c, g, or t
  misc_feature (1979)..(1979): n is a, c, g, or t
  misc_feature (1988)..(1988): n is a, c, g, or t
  misc_feature (1990)..(1990): n is a, c, g, or t
  misc_feature (1992)..(1992): n is a, c, g, or t
  misc_feature (2004)..(2004): n is a, c, g, or t
  misc_feature (2074)..(2074): n is a, c, g, or t
  misc_feature (2096)..(2096): n is a, c, g, or t
  misc_feature (2148)..(2148): n is a, c, g, or t
  misc_feature (2151)..(2152): n is a, c, g, or t
  misc_feature (2167)..(2169): n is a, c, g, or t
  misc_feature (2171)..(2171): n is a, c, g, or t
  misc_feature (2180)..(2180): n is a, c, g, or t
  misc_feature (2188)..(2188): n is a, c, g, or t
  misc_feature (2190)..(2190): n is a, c, g, or t
  misc_feature (2194)..(2194): n is a, c, g, or t
  misc_feature (2197)..(2197): n is a, c, g, or t
  misc_feature (2200)..(2200): n is a, c, g, or t
  misc_feature (2203)..(2203): n is a, c, g, or t
  misc_feature (2217)..(2217): n is a, c, g, or t
  misc_feature (2220)..(2221): n is a, c, g, or t
  misc_feature (2225)..(2225): n is a, c, g, or t
  misc_feature (2227)..(2227): n is a, c, g, or t
  misc_feature (2237)..(2238): n is a, c, g, or t
  misc_feature (2264)..(2264): n is a, c, g, or t
  misc_feature (2281)..(2281): n is a, c, g, or t
  misc_feature (2283)..(2284): n is a, c, g, or t
  misc_feature (2287)..(2288): n is a, c, g, or t
  misc_feature (2293)..(2294): n is a, c, g, or t
  misc_feature (2296)..(2296): n is a, c, g, or t
  misc_feature (2302)..(2302): n is a, c, g, or t
  misc_feature (2345)..(2346): n is a, c, g, or t
  misc_feature (2350)..(2351): n is a, c, g, or t
  misc_feature (2379)..(2379): n is a, c, g, or t
  misc_feature (2392)..(2392): n is a, c, g, or t
  misc_feature (2397)..(2399): n is a, c, g, or t
  misc_feature (2406)..(2406): n is a, c, g, or t
  misc_feature (2417)..(2422): n is a, c, g, or t
  misc_feature (2424)..(2429): n is a, c, g, or t
  misc_feature (2431)..(2431): n is a, c, g, or t
  misc_feature (2433)..(2436): n is a, c, g, or t
  misc_feature (2438)..(2442): n is a, c, g, or t
  misc_feature (2444)..(2444): n is a, c, g, or t
  misc_feature (2446)..(2447): n is a, c, g, or t
  misc_feature (2453)..(2455): n is a, c, g, or t
  misc_feature (2457)..(2459): n is a, c, g, or t
  misc_feature (2462)..(2462): n is a, c, g, or t
  misc_feature (2464)..(2465): n is a, c, g, or t
  Peptide Sequence Number=SeqID_8349
  Probeset Number=SeqID_15305
cnccacactgagtacgtcgcacgcaacaacgagcatcgagtagcggggtgggnataataatgatttatcttttnatngtgttctgatctcatggatcctgtggagctgagtgctgatgangaatgtggcatgcagagaattgaagacgaggtgtaggatgacgcgtagtaggntagacacgcggagcagtatgatcattgtagcagacngtgtcggtcgtgtcattgatgatacgtcatttatgtagtactagatcgagatagaacgagatgtattatagatgatagagactagtagtaggagatgcagcaggaagtgtgagtacgtgacggagagtatcatctaggtgatgatagagtntnatgtataacagtagagtgaacgggatgagactaaagtgacgtcntgtcagttgtgnatggtntngggnctagtacngtcgntccnacacggtacgnggtctctgtcagcgcgctctgccgatactctgtatgacacntgctngactgcgaggttgtgtngtatgcatnagtcngnagnacggacgctatccgtgagcgaggagtgcgatncngatgatgcgcagnacangtgcanctgacgacgtcatctgtagtcnttgntgcatgcgctactatcanatcactacactgcgtacagatgtagantcagtacgcagcgtagatncagancgagagtagtgatggagtagtgatcgnagatgatgatagtcagtagctatgacgcagcgcactcnttcgggtacttaggtcgtctagtctgtcagccgncgacagncgtgcgntggcgacggtcgcgtcgtacgctcgtggagtgcgncacatgcntgggagtagcgagcggataacgatnctagcacgacagcctactactagcatcgntgngagtggntgtaggtggcggcgntgcgtcttgctctacgcgtnctangcatcatatntantactctcatgagttgtcngagtttggtgtatcatgctagatctcagacatcanatgaccatgactgcacancagcaggatacnattnnatatctgcatactgatcatctatcgtcgactggantnggntgtgtgtanggtgatgtgcatactacaaagtnntatcgatgtagncgagctgacggagttagtagtangtggcggatagatatagttgagtaatgatgtgtcgtctgttcgnatcgtatncttcgctcgtattgattagtgaagnggtagnattcatgtgtcgtcgcatgcntgtgtgcgagagntgnngnnnngtgttggttacgttcaatgacgntccagtagacttaatagagatgcaatgtcgctgcgcatcacgcgacgagtggctgncggcgcggtgtgcgtagtcgtgtgatngcgagtaggcgtgcgatcacgagagtgtcgttnagttgcatagtgatcgttagtctatcagctgtcncaggatatatcagtcgcgtgatagcaatgagtagtgancacgcctacgtcagctgtcatgttctgtagctcactcacactagatgacgcacacatcagctcntatcatgcatgcatatanttgtatagtgagcgatgtgtagtgtttatattgatagatanacagtgangaagatattatttatattatttaatcatatataaatatanatacgtcncgtgatgagtcgtcgtcgtcgtacgatgctgagcaaaagagagagaaagagaantagtgaaacgtatgacgagagacacagagtnatacangaatngcgagcgagtagnanatgtgcgcgagcaanaagcgtgagatgagcatagaaggtgtggagagagcaaggaagacgcgtganacggnnaggntagacannaggaaagacacacacacancccgtgaacacatcggcgtancatcnatggaatcgacncagcacatagcncagtcaaagtatcatgattacataatgacgaanngcatntctatgtcngngnagtgatagaccnactcgtcgcgttcgaagtgagagagatgacgagagatagtatgagacggacgagtgtgtcgatagagacnagatctctgtataatccgtagncgactagactacgattgtaacatatacatctatgagtaatcacagagtatgncannataagtagttaatcnnngngaggcagangaagaacntngcgnggngantantacagatgaaaaanaannagtntngtatgtacanngtagacgccgatgggcttgtgcgccncacgtggtcgcgcgagntnntgnngccgnngngtgtgntgtgggacgagagacagcgagcaacagagagaggagagagcgnncgcnnagagcacgcgacagagcgagcacagagnggggagagagcangggannngggaggncaaggaagacnnnnnnannnnnnanannnngnnnnngncnnccccannngnnnacnanncacgggccccccccccc

SEQ ID NO: 5527 - DNA, 507 bp, Glycine max
  Probeset Number=SeqID_15306
ggggctcgagcctattcggactctgaggtcatggcagcatctaagacttctcattgctcctctctcgctctctatcttccacttatctctgaatgctgcttgctgctacttgactcactagggagaaactctggcaagaggggaaactataacagattcagcactgcagcagcagttgaggatgtaatcactccagcaggttccaataacatacactaagcatctgatagatggacacatctgtggatgctccttcagggagaacttttccagcatatgatccacgcacaggagaagagatcgctcaaggtgctgaaggtgatgcagaagatatcaaccgagcagtatcggcagctcgcaaggccttagatgaaggaccttggccaaaagtgactgcttatgaaagatgcaagataatactgcgctttgctgattggcggctgagatacaccggtgatgaactctagcagctctggagacatggaacaatggatagcctcatgaaca

SEQ ID NO: 5528 - DNA, 1422 bp, Glycine max
  misc_feature (26)..(26): n is a, c, g, or t
  misc_feature (39)..(40): n is a, c, g, or t
  misc_feature (65)..(65): n is a, c, g, or t
  misc_feature (122)..(122): n is a, c, g, or t
  misc_feature (1207)..(1207): n is a, c, g, or t
  misc_feature (1229)..(1229): n is a, c, g, or t
  misc_feature (1270)..(1270): n is a, c, g, or t
  Peptide Sequence Number=SeqID_8350
  Probeset Number=SeqID_15307
ccggggtcgttgttgtgtttatgggntcctttctcccanntttctcctcacccgccgcttaggangccgcccgcggattaggcacgggcaatagacactcatcgcaatattgggcgcccccnccacccccccccgcgcctaaataaagcatgataatagagaggacaacagagaacggcggagaccaagacgaaagagaaggaggcctctggcgtgtcacctgctacctacccctatatatttggtgttctcgctgtgcttctactcatcacactgcccccgccctctcgcgaccctcccctccggcaagaccagcaagggagagaggacacccacaccgcatacaacaattcccacaactaactcctactccctcgcaccgcgcgccccccgacctacagccccctaagtacctctacctgcgcctctgtacgtacttaaatggtacctataagcttaccctataaaatcccgatgcgcaggtccttcactaactttattttgtcctcctcggtggagtcattggccagagggtagcgtgtaggcgaaaaatcttcatcatttcattatccaagatgttgaattgaccgcctctaggtagcaccacgctctcttctgtttatgcttgtgtagagtgcctgtccgatagagctttgtcgcatctcaccccctctattttctcatcgacctataccgcaccagataatattccaccaccaaccacatagataatacattttataattatcgtaaatcactctatagatttggtatcgctcctcacgattcacacgccggccacggcgacgggagttattatgatttacgtcctcacacccacacctactccgtctattttgctcaagacctcaccctactgcgtgcggtgtagagattatgtgtcagggactacacagcttcccctacacctctctactcagtgctaactcgaatgatatattattattttcgtgtatagacgatatacaatccacatattggcccacatattgacaacattctgagattaagcccacgtttcccgcctccaggacccgacccctagccatccaatataatgtacgacctcaccctaaacgtgcacgaagaataaactatctaacctccgtacacgcatcttgtcgcttggtgtctcttctacggcatcatcgtatcatggactgcgaaccgcgcacgagtacctatngatgatagagaactgtctatcncacacgtgggctgtctgctaggttgcacattgttcgcgagngctggtttagagagcagtcgagtacaagtatcgatattagtgtggctcgatgtcgggcggtcgaagactgtgcctcgatataccacatgaaatgatcccaccaacacatgcgcacatatactcatccacgatgagtccactccactcccttg

SEQ ID NO: 5529 - DNA, 409 bp, Glycine max
  misc_feature (349)..(349): n is a, c, g, or t
  misc_feature (394)..(394): n is a, c, g, or t
  Probeset Number=SeqID_15308
agtgaattttactgagcgatggcgacggcgaagagaaagccggtgtttgtgaaagtagaacagctgaagcctgggacgaccggtcacacgttgactgttaaggtcgttgattccaacccggtggttccgacaacccggaaggctcgtcccgggagctctatgagccgtccgtctcagcctagtcgaatcgctgagtgtctcatcggagatgagactgggtgtattctcttcactgctcgtaacgatcaagttgatgtcatgaagcctggagaaacggtgatactgcgcaactcgaggattgacatgttcaagggtacaatgaggctaggggttgataaatggggacgcntcgaagtcactgagcctgcatctttcactgtcaaggaggataacnatctgtctctcgttg

SEQ ID NO: 5530 - DNA, 661 bp, Glycine max
  misc_feature (607)..(607): n is a, c, g, or t
  misc_feature (661)..(661): n is a, c, g, or t
  Peptide Sequence Number=SeqID_8351
  Probeset Number=SeqID_15309
tcagctacgtaggccccccccccgtaaaaccagatatcatagataatggagatggaacatacgatgtgaaatatgtggcaaaaggcaatggcaaacacacaatcctcgttaatgtgcgtggcaaacccattcagaacagccctttcactgttgaagctgtgagattaggagtggatgttacaaagacagaagcgtatggcccaggattggagggagcagtgaccaaagagcctacccacttcacaattgcaaccaaaaacaagaatggggatcctattcccaccggtggagagaagtttgacatcaagattgctggtccttacaactctgatgtcagaccagagttggttgacaacaaaaacggaacttacacagtcaactacaagccattagacaaaggaaaccacaccattaccatcttacacgagaaccaacacgtagccaacagcccatatcacatagtggtgaatgctaataaagatgccgctgatgcgggcttcagtttggcatttggacctggaattgaggaaattgtcagcaaatgatcccacttccttcaccatccaggcatacaacagcaatggtgagaaggtccatcatggtgggngacccgtttgatactgaggttactggccctgatggtgcacccatcaaaaccaan

SEQ ID NO: 5531 - DNA, 216 bp, Glycine max
  Peptide Sequence Number=SeqID_8352
  Probeset Number=SeqID_15310
cccgacctgcagtcgttttggtaagtttgtggagattcaatttgaccagaggggaaggatttctggggctgctatcagaacttatctgctggaaagatcacgtgtttgtcagttgtcagatccagagaggaactatcactgtttctatatgctctgtggtgcacctccggagactgtctgacaatggaacttatatagtggtttggtagaatatta

SEQ ID NO: 5532 - DNA, 1345 bp, Glycine max
  misc_feature (19)..(22): n is a, c, g, or t
  misc_feature (28)..(28): n is a, c, g, or t
  misc_feature (36)..(36): n is a, c, g, or t
  misc_feature (40)..(40): n is a, c, g, or t
  misc_feature (42)..(44): n is a, c, g, or t
  misc_feature (55)..(59): n is a, c, g, or t
  misc_feature (69)..(72): n is a, c, g, or t
  misc_feature (80)..(81): n is a, c, g, or t
  misc_feature (88)..(88): n is a, c, g, or t
  misc_feature (130)..(131): n is a, c, g, or t
  misc_feature (138)..(138): n is a, c, g, or t
  misc_feature (211)..(211): n is a, c, g, or t
  misc_feature (243)..(243): n is a, c, g, or t
  misc_feature (333)..(333): n is a, c, g, or t
  misc_feature (427)..(427): n is a, c, g, or t
  misc_feature (438)..(438): n is a, c, g, or t
  misc_feature (440)..(440): n is a, c, g, or t
  misc_feature (454)..(454): n is a, c, g, or t
  misc_feature (854)..(854): n is a, c, g, or t
  misc_feature (863)..(863): n is a, c, g, or t
  misc_feature (1031)..(1031): n is a, c, g, or t
  misc_feature (1057)..(1057): n is a, c, g, or t
  misc_feature (1066)..(1066): n is a, c, g, or t
  misc_feature (1127)..(1127): n is a, c, g, or t
  misc_feature (1263)..(1263): n is a, c, g, or t
  misc_feature (1299)..(1299): n is a, c, g, or t
  misc_feature (1314)..(1314): n is a, c, g, or t
  misc_feature (1345)..(1345): n is a, c, g, or t
  Peptide Sequence Number=SeqID_8353
  Probeset Number=SeqID_15311
gggtttttttctttttttnnnngcgggngggggggngctncnnnggggcgtgggnnnnnggggcggccnnnngcggtccnnctccccntctccttcatatcactctatttgcagcgtcagagattagatnncgtcaanatgtatctatgatatccggctatagtttatcacatgttgtgtgtggtatagtgatgtgtggttggtagaagcnaaacaatcgcgtgcgtcagctactgctactantcgatcgtcgtatgcgtaccgatccgcacaggtgtcttgcgcggcgtaagcggcagtcgttatctgcgcttcctcactcttctctctatnattaatttattgtaatcttctatgaatactaaatgtgtgattatattattttaatcacattgttctatcaagaataggtaatgagcggggcgangcactggatgntntgactctggttcanaaatcacacacgtacgcactcgcgtacaacacagacatatgctctcgcatcgatattaaatactagcatatattgggcggtgttactatgacagggaggagagtgcacgtacgtgacagtgagtaggtggtgtttaataaagcgcgagctctgactcagcaacaaactcgcggtggttctacacgccggtgatcctctgcacaagaggcgtatagagctagataataaaatagtttaagtgataaaactgaagagggacacgaatacgacaccgttcgttcatcattcgtgggatctcggttagcggcacacgctagacaatatataccgatgatgggataggcgtcgtaagtctatagtggttggtgtgtttgtgactgtggtatataagtgggtgagngtgtattantaactcccctcctcgcacacatccgactgtgactctggtgatcacaacactgcatagcatgagagacctcacctctatattcttgctggtgttcatacacacataccatacctgcgcgatctgttcacgaacacatgtcaactaagatcaaacacgaccgcggcggcncgagaagcatatatggtgtctcgcgntcatagtgnattacacatggtgtcacacagctgtgcgctctaacaatctacaactattcatcgctctganacacttgcgtggtgtgaatcataacacacatgcaatgtgactgctcaactattgatggtgtgatgtggcggcgtttgctgttgatgtacggttggtatatatagatatatatattcttgcgtgcggtgtggtacgnggttatgagatatatcatatgcggcacataaatatnctatcaacagagcgngagagcgaacgcagcgtatgcagtagagaan

SEQ ID NO: 5533 - DNA, 1369 bp, Glycine max
  misc_feature (1)..(8): n is a, c, g, or t
  misc_feature (27)..(29): n is a, c, g, or t
  misc_feature (198)..(198): n is a, c, g, or t
  misc_feature (787)..(787): n is a, c, g, or t
  misc_feature (940)..(940): n is a, c, g, or t
  misc_feature (1127)..(1127): n is a, c, g, or t
  misc_feature (1179)..(1179): n is a, c, g, or t
  Peptide Sequence Number=SeqID_8354
  Probeset Number=SeqID_15312
nnnnnnnnttttttttccaagcacaannncgcgcaccgtcatttcgtatgcgaagagcgataataactggaagcctcaagtgccgccgcgaggggcggctccttcttttccgttggatcaccctccgggggtgcagagatattgtgaacggagcatcatatatactaacaacatatctcagtgcgcacaacaatactntttcttaagtaacttcttctcaacatcgtgtacgaactgtttcgcctctatcgcccgcgctcaagcatccgtgagattatattcttcgaaacatccacaaacacatccattccaaactcccgtaaaattcacttctcttaatattctttctttgtgaccaggtcctcacagacactctcccagatacatcggagttaacatgattgcaataacccaggaaaaatagaggataatagaatatataaatatacatataaagagatgtgtgaggcggaatgtgtctaaaaacttatgtaaaatacgcatactacgtcagaacactcccaccagaattcactgtttacgcatcctctgtttattattgccataccactcattatcgcctccacgtacaacgcgctgagacaacgtgtcgtactaacagcctcgttgtaaccattgacaatgatcacatagaatgtatcgtaccacaaacgctgttatacctcaagaaaaactctagcataaccaacaagagctcgagatgtgagtatcaaaatatcctacaaatctagcgcctttgttggtgtcatattcaccctccacgtanctaactcaacttccatagtcaggtgtcatatctacacacaactggataatccaaatactaatataattctatgttatacgaacacacaacacatctataaactaatgcgtaatagtgttgttacgatgctacatacatacgcgtcgcatgcgnctacactacggatgatatcacctatacagctacacaatttaatcttggctgctagatgatatatatagctctctaatatcatcataatatacacaacacaacacaatataccggcgtatccataacacaatcaactgtgagagatcaaacacacttgagtggaacgacatcaacaaactcttggtgnatatcgatctcaccacaactacatacgacgatatactaacccacaaccatgncgatagagaataacataatataattcaatacaacgattcaatatctaatcccgtggccgcgatgctcttaattattccgtgaccgagaacattgtacagctcactacataacgctatacttgatacagttgggtgtgcgacctatatgacaccctaacacaccaccaatgtgtcctcgcatctcataaac

SEQ ID NO: 5534 - DNA, 652 bp, Glycine max
  Probeset Number=SeqID_15313
ataacgaaggggagatctgaaaagtgaaaagggagaggtgagtcaaatggcgatcaaagcgggaaaggttctcagaacggcgtcggctgcctctaggaagttattagcagcagcacatccggcgccttcagccgtatcaccgccaggtgtgacgtcatcttccgctgtaggagcatttcttggtattatcgaagttcctcgctccaccaccgatatgttgatctccaagtacatccgactctcccagaaccgattgacgaagaagggtgatttcactgaggagaagctaatgacaatgttgtctggtaatgtcgggatcagtgagactgtcaagttactcgatggccgcaaaactagcgctgacttttcttctccaaagtcaaccaacgttccgtccattgccaagcccaagaagaagaaatgaaaaaattcctctgttttgttcagttttttttaacgaaccatataaagcttcaagctttttgcatttctacttttgcaagtttgttcctttttgagtttcaatctagttgctgaacatatatatttttattatgcattcactcgaaagatagtttttggttgttgttttcaactgtctcaaaacattctctgaatgagtaataacattgagaagaatatgtttctgtcc

SEQ ID NO: 5535 - DNA, 2724 bp, Glycine max
  misc_feature (1)..(14): n is a, c, g, or t
  misc_feature (21)..(22): n is a, c, g, or t
  misc_feature (27)..(35): n is a, c, g, or t
  misc_feature (40)..(41): n is a, c, g, or t
  misc_feature (43)..(46): n is a, c, g, or t
  misc_feature (49)..(65): n is a, c, g, or t
  misc_feature (68)..(69): n is a, c, g, or t
  misc_feature (83)..(83): n is a, c, g, or t
  misc_feature (90)..(91): n is a, c, g, or t
  misc_feature (93)..(93): n is a, c, g, or t
  misc_feature (99)..(99): n is a, c, g, or t
  misc_feature (114)..(114): n is a, c, g, or t
  misc_feature (122)..(122): n is a, c, g, or t
  misc_feature (127)..(127): n is a, c, g, or t
  misc_feature (131)..(133): n is a, c, g, or t
  misc_feature (139)..(139): n is a, c, g, or t
  misc_feature (161)..(162): n is a, c, g, or t
  misc_feature (207)..(207): n is a, c, g, or t
  misc_feature (214)..(214): n is a, c, g, or t
  misc_feature (219)..(219): n is a, c, g, or t
  misc_feature (232)..(232): n is a, c, g, or t
  misc_feature (246)..(246): n is a, c, g, or t
  misc_feature (255)..(255): n is a, c, g, or t
  misc_feature (260)..(260): n is a, c, g, or t
  misc_feature (274)..(274): n is a, c, g, or t
  misc_feature (289)..(289): n is a, c, g, or t
  misc_feature (312)..(313): n is a, c, g, or t
  misc_feature (315)..(315): n is a, c, g, or t
  misc_feature (331)..(331): n is a, c, g, or t
  misc_feature (359)..(359): n is a, c, g, or t
  misc_feature (363)..(363): n is a, c, g, or t
  misc_feature (370)..(370): n is a, c, g, or t
  misc_feature (373)..(373): n is a, c, g, or t
  misc_feature (377)..(377): n is a, c, g, or t
  misc_feature (417)..(418): n is a, c, g, or t
  misc_feature (443)..(443): n is a, c, g, or t
  misc_feature (457)..(458): n is a, c, g, or t
  misc_feature (476)..(477): n is a, c, g, or t
  misc_feature (496)..(496): n is a, c, g, or t
  misc_feature (501)..(502): n is a, c, g, or t
  misc_feature (509)..(509): n is a, c, g, or t
  misc_feature (513)..(519): n is a, c, g, or t
  misc_feature (523)..(523): n is a, c, g, or t
  misc_feature (540)..(540): n is a, c, g, or t
  misc_feature (544)..(544): n is a, c, g, or t
  misc_feature (546)..(546): n is a, c, g, or t
  misc_feature (552)..(554): n is a, c, g, or t
  misc_feature (561)..(561): n is a, c, g, or t
  misc_feature (566)..(566): n is a, c, g, or t
  misc_feature (592)..(592): n is a, c, g, or t
  misc_feature (599)..(599): n is a, c, g, or t
  misc_feature (621)..(621): n is a, c, g, or t
  misc_feature (627)..(627): n is a, c, g, or t
  misc_feature (629)..(629): n is a, c, g, or t
  misc_feature (632)..(632): n is a, c, g, or t
  misc_feature (634)..(634): n is a, c, g, or t
  misc_feature (636)..(636): n is a, c, g, or t
  misc_feature (639)..(639): n is a, c, g, or t
  misc_feature (647)..(647): n is a, c, g, or t
  misc_feature (649)..(649): n is a, c, g, or t
  misc_feature (652)..(652): n is a, c, g, or t
  misc_feature (659)..(659): n is a, c, g, or t
  misc_feature (662)..(662): n is a, c, g, or t
  misc_feature (664)..(664): n is a, c, g, or t
  misc_feature (667)..(667): n is a, c, g, or t
  misc_feature (669)..(669): n is a, c, g, or t
  misc_feature (671)..(671): n is a, c, g, or t
  misc_feature (675)..(676): n is a, c, g, or t
  misc_feature (679)..(679): n is a, c, g, or t
  misc_feature (688)..(688): n is a, c, g, or t
  misc_feature (700)..(701): n is a, c, g, or t
  misc_feature (709)..(709): n is a, c, g, or t
  misc_feature (711)..(711): n is a, c, g, or t
  misc_feature (714)..(714): n is a, c, g, or t
  misc_feature (719)..(719): n is a, c, g, or t
  misc_feature (726)..(726): n is a, c, g, or t
  misc_feature (732)..(732): n is a, c, g, or t
  misc_feature (736)..(736): n is a, c, g, or t
  misc_feature (740)..(741): n is a, c, g, or t
  misc_feature (743)..(743): n is a, c, g, or t
  misc_feature (747)..(747): n is a, c, g, or t
  misc_feature (752)..(753): n is a, c, g, or t
  misc_feature (756)..(756): n is a, c, g, or t
  misc_feature (766)..(766): n is a, c, g, or t
  misc_feature (768)..(768): n is a, c, g, or t
  misc_feature (770)..(771): n is a, c, g, or t
  misc_feature (793)..(793): n is a, c, g, or t
  misc_feature (809)..(809): n is a, c, g, or t
  misc_feature (811)..(811): n is a, c, g, or t
  misc_feature (821)..(821): n is a, c, g, or t
  misc_feature (843)..(843): n is a, c, g, or t
  misc_feature (856)..(856): n is a, c, g, or t
  misc_feature (880)..(880): n is a, c, g, or t
  misc_feature (909)..(909): n is a, c, g, or t
  misc_feature (911)..(911): n is a, c, g, or t
  misc_feature (1024)..(1024): n is a, c, g, or t
  misc_feature (1064)..(1064): n is a, c, g, or t
  misc_feature (1239)..(1239): n is a, c, g, or t
  misc_feature (1251)..(1251): n is a, c, g, or t
  misc_feature (1287)..(1287): n is a, c, g, or t
  misc_feature (1308)..(1308): n is a, c, g, or t
  misc_feature (1318)..(1318): n is a, c, g, or t
  misc_feature (1323)..(1323): n is a, c, g, or t
  misc_feature (1359)..(1359): n is a, c, g, or t
  misc_feature (1369)..(1369): n is a, c, g, or t
  misc_feature (1391)..(1391): n is a, c, g, or t
  misc_feature (1451)..(1451): n is a, c, g, or t
  misc_feature (1464)..(1464): n is a, c, g, or t
  misc_feature (1471)..(1471): n is a, c, g, or t
  misc_feature (1481)..(1481): n is a, c, g, or t
  misc_feature (1496)..(1496): n is a, c, g, or t
  misc_feature (1505)..(1505): n is a, c, g, or t
  misc_feature (1508)..(1508): n is a, c, g, or t
  misc_feature (1510)..(1510): n is a, c, g, or t
  misc_feature (1515)..(1515): n is a, c, g, or t
  misc_feature (1523)..(1523): n is a, c, g, or t
  misc_feature (1529)..(1529): n is a, c, g, or t
  misc_feature (1624)..(1624): n is a, c, g, or t
  misc_feature (1634)..(1634): n is a, c, g, or t
  misc_feature (1663)..(1663): n is a, c, g, or t
  misc_feature (1673)..(1673): n is a, c, g, or t
  misc_feature (1676)..(1676): n is a, c, g, or t
  misc_feature (1678)..(1678): n is a, c, g, or t
  misc_feature (1724)..(1724): n is a, c, g, or t
  misc_feature (1759)..(1759): n is a, c, g, or t
  misc_feature (1763)..(1763): n is a, c, g, or t
  misc_feature (1769)..(1769): n is a, c, g, or t
  misc_feature (1776)..(1776): n is a, c, g, or t
  misc_feature (1829)..(1829): n is a, c, g, or t
  misc_feature (1834)..(1835): n is a, c, g, or t
  misc_feature (1840)..(1840): n is a, c, g, or t
  misc_feature (1848)..(1848): n is a, c, g, or t
  misc_feature (1883)..(1883): n is a, c, g, or t
  misc_feature (1916)..(1916): n is a, c, g, or t
  misc_feature (1926)..(1926): n is a, c, g, or t
  misc_feature (1944)..(1944): n is a, c, g, or t
  misc_feature (1963)..(1963): n is a, c, g, or t
  misc_feature (1984)..(1984): n is a, c, g, or t
  misc_feature (2008)..(2008): n is a, c, g, or t
  misc_feature (2026)..(2026): n is a, c, g, or t
  misc_feature (2047)..(2048): n is a, c, g, or t
  misc_feature (2053)..(2053): n is a, c, g, or t
  misc_feature (2083)..(2083): n is a, c, g, or t
  misc_feature (2093)..(2093): n is a, c, g, or t
  misc_feature (2101)..(2101): n is a, c, g, or t
  misc_feature (2105)..(2105): n is a, c, g, or t
  misc_feature (2117)..(2117): n is a, c, g, or t
  misc_feature (2120)..(2120): n is a, c, g, or t
  misc_feature (2135)..(2135): n is a, c, g, or t
  misc_feature (2159)..(2159): n is a, c, g, or t
  misc_feature (2176)..(2176): n is a, c, g, or t
  misc_feature (2187)..(2187): n is a, c, g, or t
  misc_feature (2196)..(2196): n is a, c, g, or t
  misc_feature (2200)..(2200): n is a, c, g, or t
  misc_feature (2206)..(2207): n is a, c, g, or t
  misc_feature (2222)..(2223): n is a, c, g, or t
  misc_feature (2225)..(2225): n is a, c, g, or t
  misc_feature (2232)..(2232): n is a, c, g, or t
  misc_feature (2244)..(2244): n is a, c, g, or t
  misc_feature (2250)..(2250): n is a, c, g, or t
  misc_feature (2259)..(2259): n is a, c, g, or t
  misc_feature (2275)..(2276): n is a, c, g, or t
  misc_feature (2278)..(2278): n is a, c, g, or t
  misc_feature (2285)..(2286): n is a, c, g, or t
  misc_feature (2302)..(2302): n is a, c, g, or t
  misc_feature (2327)..(2327): n is a, c, g, or t
  misc_feature (2330)..(2330): n is a, c, g, or t
  misc_feature (2341)..(2341): n is a, c, g, or t
  misc_feature (2344)..(2344): n is a, c, g, or t
  misc_feature (2358)..(2358): n is a, c, g, or t
  misc_feature (2362)..(2362): n is a, c, g, or t
  misc_feature (2368)..(2368): n is a, c, g, or t
  misc_feature (2372)..(2372): n is a, c, g, or t
  misc_feature (2375)..(2375): n is a, c, g, or t
  misc_feature (2389)..(2390): n is a, c, g, or t
  misc_feature (2392)..(2392): n is a, c, g, or t
  misc_feature (2400)..(2400): n is a, c, g, or t
  misc_feature (2406)..(2406): n is a, c, g, or t
  misc_feature (2422)..(2422): n is a, c, g, or t
  misc_feature (2427)..(2427): n is a, c, g, or t
  misc_feature (2459)..(2459): n is a, c, g, or t
  misc_feature (2467)..(2467): n is a, c, g, or t
  misc_feature (2473)..(2473): n is a, c, g, or t
  misc_feature (2480)..(2480): n is a, c, g, or t
  misc_feature (2483)..(2483): n is a, c, g, or t
  misc_feature (2507)..(2507): n is a, c, g, or t
  misc_feature (2538)..(2539): n is a, c, g, or t
  misc_feature (2548)..(2548): n is a, c, g, or t
  misc_feature (2551)..(2551): n is a, c, g, or t
  misc_feature (2557)..(2557): n is a, c, g, or t
  misc_feature (2596)..(2596): n is a, c, g, or t
  misc_feature (2646)..(2646): n is a, c, g, or t
  misc_feature (2656)..(2656): n is a, c, g, or t
  misc_feature (2684)..(2684): n is a, c, g, or t
  misc_feature (2689)..(2689): n is a, c, g, or t
  misc_feature (2704)..(2704): n is a, c, g, or t
  misc_feature (2713)..(2713): n is a, c, g, or t
  misc_feature (2722)..(2724): n is a, c, g, or t
  Peptide Sequence Number=SeqID_8355
  Probeset Number=SeqID_15314
nnnnnnnnnnnnnntttgggnnggggnnnnnnnnnggggnngnnnnggnnnnnnnnnnnnnnnnnggnnggctatggcgcgcngggcagnncncttggncgcgggtcgtcgccncgtctccnctagncgcnnnctcgcntagctgtgtagctgcctgcagnnggctcgtagtgcttcgtacttacgcgacggtcgtctgtacggttncacactngtagngacatcgctcgcncgtgtgctagggtngtgcgtgtntcacntcaactactgactncgcgtggggcgctgntctgactggtagctctctgttgnngngtactgtacgactgtncaactcctatacttcgctcgctctgctnatgncggaatnagngtgntgtactactggtgcggcgcactcgtgcgcgtatatcatgnntttgacttctgtgtagatggtgtgnatatatgtagtatnnagcgatgctaaaccgctnngagagtgtaaggtagatanatagnngagaaanagtnnnnnnnctcncacacacacacaacacnaagnantacgannnacagtanatcanactatcatatcattacataccatatnagtcatnacatactgcactcaacatcacnacaacnancancnancancaaacganangancaacaanacncnagncnanacanncancagacacanacatagccgctnnaatacaananacncacanaaccacncgacanatanaaanncnatanaccgnnatncacagtatantntnncgtctaacttcataatataaancagttacgttgattgngngtaggagtangatatatatgatagtcaatgtngaagcggcgaganctgcgatgtaggcgagtgtcagancgtgctgagtagacgactgacgagaccangnctgagtcgctgtgcacgactagacgcgcacgtcacgacagtacgtataacactcatgagagtcatatctgtatagcatagtgactgggtatccgcggtgccggtcgtgctctntcgtctgtgtgctgaccgtgctctgttgacgtcatcgcgncggtctagcgccgtattgtgcacagcgcgagcagacgagcagtatcagtgatacacatgcgatagacgtcgagacgctgctgtaccagtgcgcatgcgtctagtggcacagcagtggctgatgctatgagtagcaggtcagttgttgcgtacattatcgcgcatgtcgtgtgtcnggtgtatctgtntatagatgctatgtgtagtgtagagctacgtgatantaatgatatactatgagaatnagtacatcanacgangagagctgcgtagtattgagactgctgcgcactganacgtgtgtgntagaggtcgtatcgatgtgtangtgtctgagctgagattgctatacaacttctgattagtgacatgactcgtgactgagtantgtatagtggtangtagtantagatgttantggcactgctgtgtnatccgcgtntantnctgcncgttgcgntctgcntgtgtgtataagatcatcatcgatagtaggctgatgtgaggttgacactacgtgctgtacaccgtgctagccgtctgcgtcgcatcctgcgacanatcagctcanatcggtgcgctctagtcgtacgagcagtngagacaagtnatngncgcatcacgacgagtatgacatattgactgagtgctatactagatncgtggtactgatgacttagacgacacggaatcganggantctgangtacagnagggtatgatagtgctaggacttttcaatacgagatcgatctcggattcgggnatcannacatntacgtcgnagatgtaagtgactatatatgtagatacgtacatntattcttactgaacgtagtactagtgcgaggtngatagtagangacgagcgcagttgatantagctaagtcagtagcccnggactgtgtacatgactaganctgagtaatgtagtgctacgtcgncatagtgatactgaatantctcgtctttacaatcgtttnnaatcnaaatagactgcagatagatgcagacagctncgtaggagtncgacttcngacnctccgcattacngantgaacgaacgacgantatcaatcacaggacagattacgnacgttgacttaactacngactacaatgntgaatcaanaacncgacgnnacggaccacaaccanntnagggtgnatgtggatcgtnctgttncttacgatngttagctggtgatganntnaattgtnncatcctgctttctacngctgaggcagaggctgcaagacagnaantgaacggtatngancgatgcgaaatgcngtanccaggngtanganctaggccacggganngngtgagcgnagtagncatgatgctgactacnattancaatacttcgattaagtgaagttgttctgcancattctancatatnactatgntanacttactactcatttgctgacttnagataactgtggctgagcgtcgacagtgtanncacgactgnatnatgcgnatttttcatctgtactccactagactattagtaagtatnggtataagtcatcattacatgctttcgcactatggcataatagtctcagncgtacgtgtncgttgacgatacataaagtgcacgtagnatacntacattatttgatcntctaatacncatacaacnnn

SEQ ID NO: 5536 - DNA, 877 bp, Glycine max
  misc_feature (13)..(13): n is a, c, g, or t
  misc_feature (17)..(17): n is a, c, g, or t
  misc_feature (20)..(20): n is a, c, g, or t
  misc_feature (24)..(24): n is a, c, g, or t
  misc_feature (28)..(28): n is a, c, g, or t
  misc_feature (32)..(32): n is a, c, g, or t
  misc_feature (34)..(34): n is a, c, g, or t
  misc_feature (42)..(42): n is a, c, g, or t
  misc_feature (44)..(44): n is a, c, g, or t
  misc_feature (48)..(48): n is a, c, g, or t
  misc_feature (51)..(51): n is a, c, g, or t
  misc_feature (55)..(55): n is a, c, g, or t
  misc_feature (59)..(59): n is a, c, g, or t
  misc_feature (62)..(62): n is a, c, g, or t
  misc_feature (68)..(68): n is a, c, g, or t
  misc_feature (77)..(77): n is a, c, g, or t
  misc_feature (86)..(86): n is a, c, g, or t
  misc_feature (97)..(98): n is a, c, g, or t
  misc_feature (102)..(102): n is a, c, g, or t
  misc_feature (113)..(113): n is a, c, g, or t
  misc_feature (116)..(116): n is a, c, g, or t
  misc_feature (119)..(119): n is a, c, g, or t
  misc_feature (121)..(122): n is a, c, g, or t
  misc_feature (130)..(130): n is a, c, g, or t
  misc_feature (132)..(132): n is a, c, g, or t
  misc_feature (149)..(149): n is a, c, g, or t
  misc_feature (153)..(153): n is a, c, g, or t
  misc_feature (156)..(156): n is a, c, g, or t
  misc_feature (163)..(163): n is a, c, g, or t
  misc_feature (166)..(166): n is a, c, g, or t
  misc_feature (180)..(180): n is a, c, g, or t
  misc_feature (182)..(182): n is a, c, g, or t
  misc_feature (188)..(189): n is a, c, g, or t
  misc_feature (191)..(193): n is a, c, g, or t
  misc_feature (195)..(195): n is a, c, g, or t
  misc_feature (201)..(201): n is a, c, g, or t
  misc_feature (204)..(204): n is a, c, g, or t
  misc_feature (206)..(206): n is a, c, g, or t
  misc_feature (210)..(211): n is a, c, g, or t
  misc_feature (213)..(213): n is a, c, g, or t
  misc_feature (215)..(215): n is a, c, g, or t
  misc_feature (217)..(218): n is a, c, g, or t
  misc_feature (224)..(224): n is a, c, g, or t
  misc_feature (230)..(230): n is a, c, g, or t
  misc_feature (240)..(240): n is a, c, g, or t
  misc_feature (247)..(247): n is a, c, g, or t
  misc_feature (250)..(250): n is a, c, g, or t
  misc_feature (254)..(254): n is a, c, g, or t
  misc_feature (258)..(259): n is a, c, g, or t
  misc_feature (262)..(262): n is a, c, g, or t
  misc_feature (264)..(264): n is a, c, g, or t
  misc_feature (270)..(271): n is a, c, g, or t
  misc_feature (278)..(278): n is a, c, g, or t
  misc_feature (283)..(284): n is a, c, g, or t
  misc_feature (291)..(291): n is a, c, g, or t
  misc_feature (294)..(295): n is a, c, g, or t
  misc_feature (302)..(302): n is a, c, g, or t
  misc_feature (304)..(305): n is a, c, g, or t
  misc_feature (310)..(310): n is a, c, g, or t
  misc_feature (315)..(316): n is a, c, g, or t
  misc_feature (324)..(324): n is a, c, g, or t
  misc_feature (329)..(329): n is a, c, g, or t
  misc_feature (334)..(334): n is a, c, g, or t
  misc_feature (337)..(337): n is a, c, g, or t
  misc_feature (350)..(350): n is a, c, g, or t
  misc_feature (353)..(353): n is a, c, g, or t
  misc_feature (363)..(363): n is a, c, g, or t
  misc_feature (378)..(378): n is a, c, g, or t
  misc_feature (382)..(382): n is a, c, g, or t
  misc_feature (385)..(385): n is a, c, g, or t
  misc_feature (398)..(398): n is a, c, g, or t
  misc_feature (402)..(402): n is a, c, g, or t
  misc_feature (404)..(404): n is a, c, g, or t
  misc_feature (408)..(408): n is a, c, g, or t
  misc_feature (418)..(418): n is a, c, g, or t
  misc_feature (421)..(423): n is a, c, g, or t
  misc_feature (425)..(425): n is a, c, g, or t
  misc_feature (428)..(428): n is a, c, g, or t
  misc_feature (442)..(443): n is a, c, g, or t
  misc_feature (447)..(447): n is a, c, g, or t
  misc_feature (450)..(450): n is a, c, g, or t
  misc_feature (454)..(455): n is a, c, g, or t
  misc_feature (457)..(457): n is a, c, g, or t
  misc_feature (485)..(485): n is a, c, g, or t
  misc_feature (488)..(488): n is a, c, g, or t
  misc_feature (497)..(497): n is a, c, g, or t
  misc_feature (520)..(520): n is a, c, g, or t
  misc_feature (525)..(525): n is a, c, g, or t
  misc_feature (540)..(540): n is a, c, g, or t
  misc_feature (839)..(839): n is a, c, g, or t
  misc_feature (846)..(846): n is a, c, g, or t
  misc_feature (865)..(865): n is a, c, g, or t
  Probeset Number=SeqID_15315
aaataaataacanaaanacngaancatnattnanaatttaancngacnaanaaangacntanattttntatataacnagacaccgnaaaaataccannctanaaaattaaaanaanatntnnccattaantntaaaaaacacattccanaccnttngaatganttntaacaaattaaatnanacaaannannncncaccanganantctnnanangnnagactnaatcanaattcaaaanacacaanccngttncacnnctnanataaannacgcccnatcannaaagganagnnataacanannacctnagcgnncagaatancaatnaacangtntgaaaattctatncangaagtataanaaacgatgagacacnatgncanttacaattacacngagngnaagntaatgaaccnagnnnanagngcagcagcatactnncttnganccanngntgaccgagctggcacggcatggccaacnagngcggctgcnggcagtgttggcgccagcagggncatgntggcgttggcacgcnctctgtcacctggctgtgcgggcccaccagcgttggcaaaacacatttgcatgcaatcgatcgtcgcgcgcgcgagccaacgcggtcgcactggctacttcccgctcattgagctggcacctctcggcgtcgagcgttctcgatggcctgacgtctctcgattgcctctgcctcgatgacctggatcaggttgtcggccagttggattgggagaaaaccttgtttgggttgctgcgcgaaatccaggagcgcgacggcaatctggtggtgtcggccaaggcgcctccggcgttgctgcnctggtcnctgcgcgatctcggctcgncctgcagccggg

SEQ ID NO: 5537 - DNA, 1414 bp, Glycine max
  misc_feature (26)..(26): n is a, c, g, or t
  misc_feature (76)..(76): n is a, c, g, or t
  misc_feature (124)..(124): n is a, c, g, or t
  misc_feature (174)..(174): n is a, c, g, or t
  misc_feature (228)..(228): n is a, c, g, or t
  misc_feature (268)..(268): n is a, c, g, or t
  misc_feature (528)..(528): n is a, c, g, or t
  misc_feature (531)..(531): n is a, c, g, or t
  misc_feature (552)..(552): n is a, c, g, or t
  misc_feature (558)..(558): n is a, c, g, or t
  misc_feature (622)..(622): n is a, c, g, or t
  misc_feature (725)..(725): n is a, c, g, or t
  misc_feature (894)..(894): n is a, c, g, or t
  misc_feature (1009)..(1009): n is a, c, g, or t
  misc_feature (1178)..(1178): n is a, c, g, or t
  misc_feature (1195)..(1195): n is a, c, g, or t
  misc_feature (1250)..(1250): n is a, c, g, or t
  misc_feature (1283)..(1283): n is a, c, g, or t
  misc_feature (1295)..(1295): n is a, c, g, or t
  misc_feature (1335)..(1335): n is a, c, g, or t
  misc_feature (1347)..(1347): n is a, c, g, or t
  misc_feature (1369)..(1369): n is a, c, g, or t
  misc_feature (1410)..(1410): n is a, c, g, or t
  misc_feature (1414)..(1414): n is a, c, g, or t
  Peptide Sequence Number=SeqID_8356
  Probeset Number=SeqID_15316
gtgtgtgttgtgtcgtctggttgttntgttgggtgctgcctgactgtcgcccctccaacccccacgaccccactcntcacagagataggacaccacaccacagaagcgcgtaatataagaggancatatgatatacttcacttatttatttcaatgtattataaataatacaancgcagaaacacgtgcgagagagcatggtcgcactatcgcagtccacgatttgtncgtaatatatatattcttactcatgtgtcgatacgaaccnacacgtcacatcagctaaccgaacgcaatcagaacgctttgtactaacgcgcgcggcacgcgcgcgcgagcgcgcaacaagtaagaacatagtgtaaggtgtaacgtcgtagcgctaactcacgcatctacgattcacgtacgtacaaacgatcagcacaaacctgacgcagtgctcacctcccatattcatagctgcatatactgagactgatgctcgcctgcgcggcatgcagcctaagcgagcgctaatgtatgaancanatgttgctgttcattagaaangattantgtatactacagacgcacactgttgcgcgtcacactagagctcgtctatatgtagtatagtatntgtcgacctcactacgaagtgcctgtcatcattgcttgtgtgctgagacgctcatatcctataatctcctccgatctcctctctcttattcatcctcagtacnaatatcacacacagctgtatgacgacgtacgtgagacagcacgagtatggccaggagtatatatagatatgtgatgacctgtctctgtacgctgagagactcactctctcgtctgacattactgctatgatctgatctatctctagtatatatctatgtatatatatcnacaccaagccgcacggagagatacctaactcactacatcacctcacatactaagagtattgcgtcatgtatctatgatagatgtgtgtgcactgtgcgactgtgtggatagaccngcatcgcgtggacagtgtcacacactctcacgacgcgacgcgactccgcgtcgctctacatgatagcatggtactacatcaacgatagtatgcgtagcttcgagcagagagtactaccagtgtcgcacgtatcgttgtgtcgacgatcgtcttctcttactcttacacnatcgtacatcctcgganacagcgatgcattgtctattgctccctgtatcgccgtatcatcatgcactcacangacgccatagtacgacatatatatatatcagtngatacgacgccnacgacaccatcgcatccacacgatcgacatatgcatacgnctaacatagcanatccgtcgtctgctcacatctntctacatatagatagtcacgactctactgtgcagaccactngcan

SEQ ID NO: 5538 - DNA, 542 bp, Glycine max
  misc_feature (65)..(65): n is a, c, g, or t
  misc_feature (68)..(68): n is a, c, g, or t
  misc_feature (75)..(75): n is a, c, g, or t
  misc_feature (77)..(77): n is a, c, g, or t
  misc_feature (196)..(196): n is a, c, g, or t
  Probeset Number=SeqID_15317
agagttgccagtgtatccactggttcgcagtagccttagatatgccggcgtggtagtggtgttgncgncccagancntttgtaactgtcggtcccagccctccaatagtacgcgcgtgtgggcctgcatctgttgaacacagccgtctttcacacctagagacgactgcgctaacccccttgatccatagcacgantctttgtcactccaggagaaaggtataagcatctggtgatattcgtcagaatcgcttccatgcatcacgagtagcagtagcttcttcatggtggcgtaatctcccatgaactctctcttgcgatggtattcgtttgccatgttggtcgttcagcactcttcaaagcgaaataatcgtgagagagagagagagagacagagagaaataaaggggtggaggcggtattggaggaaaagatgaagattggcggaaggatcagatttatatattaatgatgagaataaaaaagagagagggggtgaggatattgtctgccgttgatgaaggaggatggtggagtatattc

SEQ ID NO: 5539 - DNA, 466 bp, Glycine max
  misc_feature (88)..(88): n is a, c, g, or t
  misc_feature (154)..(154): n is a, c, g, or t
  Peptide Sequence Number=SeqID_8357
  Probeset Number=SeqID_15318
tttggccacaccaaagcacaaccgttccaatgacgtggacggcggcgaggcgaagaagctgctgttgcagcaaggcgaggcggacccngcggcggcgctggcgaacgcacggcacaagttctgggagcacggcggggtgaacatgtcaatcaangcgtctgcaacattcaccgtgataaagccacagacaatacaacacatgttctccaaagaactcatccccgaccgcaacttcttcatctacaaccaccacttcaacccaacaatactaatcctcagtcacctcataaccaccctccataacaccaagagcagctactacaccaccaacacatatccaccatgctcccatcctgctgcatctctactatcagcacgaacacataatcgctccagaactctctactataagacgcacgcgctgcttcacactttttgcccgcacgtgcgaatatacactagctcg

SEQ ID NO: 5540 - DNA, 877 bp, Glycine max
  Peptide Sequence Number=SeqID_8358
  Probeset Number=SeqID_15319
aaggcccgagaatcgcgaacgcttgatctgtttcttcccttccttttatgacattaatcctgtcggatcctcctgctctccacacctctgaaaatggcggatgcaaatgccgaaccagccgctggttcttcgagctcaaatgagagcgttactcagatcgagccgatccggatgccaacgatagaggagatgcgagcccaagaggtttggaacaactgcgccgtcaaaagtgttgctagtggagtcatgggaggaggacttgggttgatgatgggtttgttcttgggagcattggataatcctataacgaatgataccatgactggtaggcagcagtttgtcttcactgctaaacaaatggggtctaggagttggagttcttgcaagacttttgcggttatgggtttggttttctctgctgctgaatgcattatcgagaaggcaagggcgaagcatgacacaacaaacaccgcttttgctggatgtgtgaccggtggctcaatgtctgcccgaggtgggccaaaagctgcgtgtataggttgcgctggctttgcaactttctctgtactgatagagaagttcttcgacaggcatacgtaaaccaacagtatctctaacaaacgccattgctgggaattgtttagctgtttcctttctgtgattctgatacagttcatcatcacctgagcacagggagagggaaatctagaattacatttttcaaacatagaagagtgaagcttgttttgattgaatatttgttcagttgttgtcattatttatcatagtttttggtaacactcagtgctccaatattacagtgttcctcagaaaataagggcctgtccttgcataaaagtttcaggtttcagaaatc

SEQ ID NO: 5541 - DNA, 433 bp, Glycine max
  misc_feature (332)..(332): n is a, c, g, or t
  misc_feature (372)..(372): n is a, c, g, or t
  misc_feature (409)..(409): n is a, c, g, or t
  Peptide Sequence Number=SeqID_8359
  Probeset Number=SeqID_15320
gcttctccaaaccgccgcctccaccgcttctgcttcatccctctccctcttcagccctacctccaaacctctccgttcggttcccactcgtggattggtggttcacgccgcgaaaggatccacaaaccaccacaccctaaccaacgtgatctttgaaccgttcgaaaaggtaaaaaaagagctcgatctcattcccaccattccacaagcttctctcgcccaccaaaaatacgttgacgaatcctaagccaccggtaacgaacaaatcaatgtgaagtataacatttcctacgtttaccatactatatttacatactttaatgaagacaacnttacactgaaaagtcgtactaagtgtgttaaagaatcganttaagaagatagataacatccttataaattgatagantatcataacaaacgtagtggaaga

SEQ ID NO: 5542 - DNA, 1613 bp, Glycine max
  misc_feature (11)..(11): n is a, c, g, or t
  Peptide Sequence Number=SeqID_8360
  Probeset Number=SeqID_15321
ttcttttcctnttttttttccggtgttttgattgtcccctcaccttagatattctcaaacgcaattgaggtaccgcgcccccccacctcgtagtcatgctacgataaggcacccaccccccccctttgcttgtccttccacgtgtagtcactaacgtattcggcagctctgcatcgacagcaacatcatccaccagtcagcctcaaatgctcagtacatggatattcgtctgtctgccactcttggaaccaggacacaaacaccgccagtgagcgcgcatgctttgcatctcctccctcccgccctcggacctcacttgatctatcccatctatcgttccaccgatactaacctatcgtttcgatcttggactcgctcgagtaaaacgaatgtttgagcattgcacaaaatgatgtcggaccccgcaatcgaacagctaaccccggctctactcggcgccacggctaccgctctagcatcctgcactaactcctcccgttaagcgccgccgcacaactaatgcactcgccctttagccctatatctcgactccccactcggctctaattgtcctcgccataattatttatccgaacctcctccgcgcaacaacccacccgcatgctctacgctcgtctaagtcagagatcgcttatcacgacaaacgcatgtgtcctctctctctgcacaatctgccactacagaaagacaccgccctccgctaatttattcttcgcaccatccaatccattagtcaccgctccttcatttacttcttattattctatcgccactacaccttcgacttagcctccgccgggagtcatccacccccttgttctttgtctccgaacccacgagctaatattccggaccccctatggccactctccctgtacctctcgattcttcgctacatgtgctatacataccaaatcatcgctcgttcttcgcgcgcgcactcttcgctttagtccagcgcacacgtgtgaccaaaatcgctacgcctctatctacgagcaccagatctatattcgtgcatccataccaccctgtgtattagctctatcgtaggatcgcaacacacactacactcactctcctcatatatatatcaacacgcggttagtgataaacgttcgttcacagagaactacttgcgtcaccaccgaaactcatgtctcacatacacacatcacatcatgcccacaccacacacgtgcgcgaacatctcccacactctcttaaacatctcttctcatataaatgctatcatctccctatctgtatctcgccaatcctatctcacattagaacgattcccacctccgtctcatatatatgatctcatcagatagtcgcagtatatcttgtatactctcacaactctacatactgcaatcgtcccactgcttcacaacatactctgatgctctctctccaatcacattgctcacctacccacatcaattcacctcttgtatacaacacccacctacgtcccgtgcgtcacgtccctaccctatatatcatatacatactacacatactctaccaagacaatgatcccctctcataagcacacgtcgcaactctactcatccactatacct

SEQ ID NO: 5543 - DNA, 1438 bp, Glycine max
  misc_feature (1)..(1): n is a, c, g, or t
  misc_feature (57)..(57): n is a, c, g, or t
  misc_feature (141)..(141): n is a, c, g, or t
  misc_feature (159)..(159): n is a, c, g, or t
  misc_feature (400)..(400): n is a, c, g, or t
  misc_feature (1215)..(1215): n is a, c, g, or t
  misc_feature (1219)..(1219): n is a, c, g, or t
  misc_feature (1310)..(1310): n is a, c, g, or t
  misc_feature (1313)..(1314): n is a, c, g, or t
  misc_feature (1317)..(1319): n is a, c, g, or t
  misc_feature (1392)..(1392): n is a, c, g, or t
  misc_feature (1422)..(1422): n is a, c, g, or t
  Probeset Number=SeqID_15322
ncgctcgtcgatatgatagtgtgagtgatcatctgagcgatacattacatgatgtgntgtgcacaccatccacgctctggacgcctgacgccgtgcgactgactacaagcgtgacatgattatcactcgccacttcgtgtncctatttgtatttagtcnctctctctgcttagtttacactcttatcaccatttcggctctgcgccctcagtgtgtgtcatacctgcaggcagtataggtgtcagttctccattgttagcatgcctttctctgatattcacataggagcgtactagtcgagggcacatcgacaaccagtcgctaggacagcgcccagagcagggacgagcacacacacactcttcttaccgcacagactctcgtgtgctcaccgcagcgncactcttaggatggtcgcagcgtcttccctatccgcgtcactccaccgcgacacaggacgtatggtatattgtggtgtttccgcctcatactgtggttagtgtgtgatggtaatcgttctactctcactcccatctctctcacactcctccacccttcattcaccagcctcctgcatatattctatcttgtacatttagcaatttaatatccgcgctttgcgcgcgtggcgtttatgtatgtcgccgactcacacttcttagatggcagatgattgccagcctactcttctgcaaaaaatcacgcacttttattatagagtatgccctgtccctgattcacactatccccacaactcgtccttatactatcttattggtctcagctaccgcgtaacctagcattgtcgagatgaaacaatacggtcgacgattcatgaacgggtatctcctacacactcccgctcgagtcatcatctagcgcccgactcaacagcaccactaccacgtacattctcgcttccttaacactcattctccatcagcacaccaaccaccgtccccctcactcactcgttctatattatatatcggctctgtcatgctcgacgcatgccagctcccacaacacctcgcctgtctaaatatactctccactctggcacccccggtggttctcctctattatctctctaccttcctctgtgtcgtgtgtgcggcctcataaatactaactgtgcattctcatacacttcacacacattatagtggcggtaaacatcaccctgtctcttcacctcatatacaataaaacaancaanttatatgcctgtagttctgtctgctcccttcccgtcctcttgggaagaggcgggctgctctcctttacctccatatttcagacataaaaanaanncgnnngggggggtggatattctccactcaaatctctccattctgtttttgtgtgttagtggtgttaatgtcggccgtngcatatgagacgataatgcaaatatttatnctatcctccttcctct

SEQ ID NO: 5544 - DNA, 1518 bp, Glycine max
  misc_feature (1)..(1): n is a, c, g, or t
  misc_feature (39)..(39): n is a, c, g, or t
  misc_feature (41)..(41): n is a, c, g, or t
  misc_feature (115)..(115): n is a, c, g, or t
  misc_feature (176)..(176): n is a, c, g, or t
  misc_feature (227)..(227): n is a, c, g, or t
  misc_feature (283)..(283): n is a, c, g, or t
  misc_feature (355)..(355): n is a, c, g, or t
  misc_feature (577)..(577): n is a, c, g, or t
  misc_feature (602)..(602): n is a, c, g, or t
  misc_feature (650)..(650): n is a, c, g, or t
  misc_feature (833)..(833): n is a, c, g, or t
  misc_feature (1391)..(1391): n is a, c, g, or t
  misc_feature (1395)..(1396): n is a, c, g, or t
  misc_feature (1398)..(1398): n is a, c, g, or t
  misc_feature (1401)..(1402): n is a, c, g, or t
  misc_feature (1446)..(1446): n is a, c, g, or t
  misc_feature (1482)..(1482): n is a, c, g, or t
  Peptide Sequence Number=SeqID_8361
  Probeset Number=SeqID_15323
ntggtgtgaattgctactcaggtgtgagtgatactgtantnaccggatgttgatatacgccacgctgtatgattctcgtagacgaggcatcacgcgcatcgagcaagcgggatgnatgtagtgtgcgtagaggcttcgtgttgcatatatagtatagtgagcgaggtgtggcagtnatagagctgcatcgcgttagtatgtcatcagatcatgtgtctacttgtgtnggtagtagtagggtcgttcgcgcgtgtgtagagatacgcgaatagcctagtgcgtngccgtgttgtgtgcgtatggtagattcgtcgtattgaatgtcgtgcgcgacgcatgttggtgtgccgtgtgntgtggtagatgtgtgagtgacaagggtgatagcggtagaggatatgcggcttgcgatagtgtttggcgcgtgtgagtacttagagaggtggatggtataaaacgagttcatatgtgcgcattggcttgcgcatgtgagtgtctcagtgagcattcgcgtaggtagtagagtgaatgcgactattgtaagggcgagtattgggcattatgtggtgtttatctnctctactatgtcataacatgagtcntctgtaacgagctacctcatgcttatatcttgaacagctttgtgtatngatgaagtacatctcgtgttatactgtctgtggtcagttgtgtgtgctagtgctgttgagtgtcgcgttgaccattgtgacaaagattcctgcgatgtccgtagatgtaaattgtgtcctgtgttctgcctatgttggtgaagtagactggactatgtttgtgaatagtgccataggaggagntctcagttatatattactcttgtgctggtctatactttttgtggtatatggttgttacgtgtaagtagacgatatgcgtagcgagagattaccaatatatacattctatccgcgacgctattggtgtgcagagagtgtggccacatctgcaagtgacaatccgaggggacgaggtcgtggtgtgagtcgctggtgtgtgtggcttattagtgttttatgtaggtgatgctctcaagaatcggaatgatgcactttacctgatcttgttaaagctatgtcgtgcgttgtggtatttggattgagacattctttatttatcatacatcatggttgaattcagtaagcgtacgtagtggtgtggccaattcacttacacgatcttagaagcccataccttagagtgggcggtgtgggtctctatcggccgaagaatgagctagtcatccctgcgttcagtgcggagtgaacatgacattagtgtgctgtagctgtcctaccttgaagtgagaggtggttactttgtctgtagggtggtggtggagggggcggcgggcggcncccnntnggnnataccccacaatataactacatcacataaggtgggtgttggcgngagtgtaggtggagttactgtctcggtgtagcgganatagtataattatttattttaccttcttcctgtttt

SEQ ID NO: 5545 - DNA, 862 bp, Glycine max
  misc_feature (374)..(374): n is a, c, g, or t
  misc_feature (384)..(384): n is a, c, g, or t
  misc_feature (402)..(402): n is a, c, g, or t
  misc_feature (609)..(862): n is a, c, g, or t
  Peptide Sequence Number=SeqID_8362
  Probeset Number=SeqID_15324
ctctctctctctctcaccaaccactatgttgcagagacctagacgccgttgcgagggcactgccatgggcgccatcgttctcgatctccgtcccggactcggatccagacccttctccctcgggatgcctacatgtcgatctttttctcagatagaggagccccccacccttctactagccggtccatgtccaccccctggcgtgatttacccaccagggttcgcggggggtctacgcccccctttttgggttgccttctttcccttctctccccctaacggcccggcgcccgggcgtacctttactgcaacctccggttggcaacccggaaccccggccggggccccccccgggggattagactgaccccccnaatctaccgncgagagtaggccgttaancggggagcccgcccttacccccgcgcgcccccccatcttttcgccacgttttctccctgaggaaatgttggttagggctcccgcccgcgattacccaaccccccgccttcagaggttgtttgttggcttattgccgcgcccggcccccccccggggaggggggtcccgcgggccgcgttcaacgcgcgagcgaccaacatcgcggcnnnnnnnnnnnnnnnnnnnnnnnnnnnnnnnnnnnnnnnnnnnnnnnnnnnnnnnnnnnnnnnnnnnnnnnnnnnnnnnnnnnnnnnnnnnnnnnnnnnnnnnnnnnnnnnnnnnnnnnnnnnnnnnnnnnnnnnnnnnnnnnnnnnnnnnnnnnnnnnnnnnnnnnnnnnnnnnnnnnnnnnnnnnnnnnnnnnnnnnnnnnnnnnnnnnnnnnnnnnnnnnnnnnnnnnnnnnnnnnnnnnnnnnnnnnnnn

SEQ ID NO: 5546 - DNA, 1934 bp, Glycine max
  misc_feature (1)..(1): n is a, c, g, or t
  misc_feature (52)..(52): n is a, c, g, or t
  misc_feature (262)..(262): n is a, c, g, or t
  misc_feature (412)..(412): n is a, c, g, or t
  misc_feature (480)..(480): n is a, c, g, or t
  misc_feature (530)..(530): n is a, c, g, or t
  misc_feature (557)..(557): n is a, c, g, or t
  misc_feature (613)..(613): n is a, c, g, or t
  misc_feature (634)..(634): n is a, c, g, or t
  misc_feature (655)..(655): n is a, c, g, or t
  misc_feature (847)..(847): n is a, c, g, or t
  misc_feature (894)..(894): n is a, c, g, or t
  misc_feature (908)..(908): n is a, c, g, or t
  misc_feature (946)..(946): n is a, c, g, or t
  misc_feature (952)..(952): n is a, c, g, or t
  misc_feature (970)..(970): n is a, c, g, or t
  misc_feature (1061)..(1061): n is a, c, g, or t
  misc_feature (1099)..(1099): n is a, c, g, or t
  misc_feature (1117)..(1117): n is a, c, g, or t
  misc_feature (1190)..(1190): n is a, c, g, or t
  misc_feature (1235)..(1235): n is a, c, g, or t
  misc_feature (1248)..(1248): n is a, c, g, or t
  misc_feature (1373)..(1373): n is a, c, g, or t
  misc_feature (1375)..(1375): n is a, c, g, or t
  misc_feature (1413)..(1413): n is a, c, g, or t
  misc_feature (1459)..(1459): n is a, c, g, or t
  misc_feature (1703)..(1703): n is a, c, g, or t
  misc_feature (1705)..(1705): n is a, c, g, or t
  misc_feature (1721)..(1721): n is a, c, g, or t
  misc_feature (1784)..(1784): n is a, c, g, or t
  misc_feature (1786)..(1786): n is a, c, g, or t
  misc_feature (1790)..(1791): n is a, c, g, or t
  misc_feature (1832)..(1833): n is a, c, g, or t
  misc_feature (1839)..(1839): n is a, c, g, or t
  misc_feature (1841)..(1841): n is a, c, g, or t
  misc_feature (1843)..(1846): n is a, c, g, or t
  misc_feature (1848)..(1848): n is a, c, g, or t
  misc_feature (1917)..(1917): n is a, c, g, or t
  misc_feature (1923)..(1927): n is a, c, g, or t
  Peptide Sequence Number=SeqID_8363
  Probeset Number=SeqID_15325
ncgaccggacgtcatgcacagatagtagaagagcgactacatcagagcctgncatcgtcgtatgcacgatgtcgatgagtacatacactgctcatcgccatctgcgtgcgctgcgctgtcgcagcagaggtcacgacgcagacgatgtcgagagtcgacgactcatcgcacacacatctgtagcatcacggcggtgcgcgagcggacgtcgcgcggcagattgcgcgctacacgatgatgactcacgcggcacgtgagtgangtgagcagagtgtggtgagagtacgcatagcacacgcgagcgcgggcggcgcagagcatatatctgcgtcgcgtcgtaatgatgtgtgtctcgcgctcagtacgtacacgccgcgctcgacgatgtcgtgtgtacgtacttacatatgcnagctacatcagtcgtcacgtgcctatcacgcgacgagcgtaccggcaggcaccgcgtcatccagcgcngcgtcgcgcaccgcagaggcgtgtatattgtgcgtcgacgctctgaactntcaataacgatatgatgataacagatnccactacgatacacgcacgtgacgcgctacacactctcgagcgacagtccgcgctncacacgacgtcgtgcacaatnacgagcatcacgtatgtcagntacagcacgctatgacttccgcgcatagatgacacgtcagcatcacgtgacatctcgcacgctcgcctagtacacagacatggatcacgatcacggcgacagtcacgaattgctccgagtatagggtgtgcgatgatgtacgacgtcatgatccacaagcagcgccgcacgcgtcactcggagacagagtanggagcggatgagcacagacggcgagtcacgcgcgcctgcagagcgcngcggtcgcagacgncactcagtccgtcatactgacgctatccgtcctatatnatatangcatcgtaatactatatnatagatagatacgacgcggtatgtcgtcaaggtgaggttagtgtagtgatgatcgtcagtagcataatccaccgatgcttactggcacgtngacagtgccgcgcagcgttaggctgtatcacgtcaagncatgacgtacacgtcgcnctctgtacgagtacgagcgacagagcgacgagacagagtctcgcgcagcgacgcgacgccagcatagcaacgngcgcgtcgataggtacgcaatacacacgcgtagcgcgcgataatncgcgcagacacgnccgctgatactacgccgcgcgcgtcgcgtggtgacacactaataatataaagtatcgctcctcgtcgcaccactgcgcggcgccacatgcggccacgctctatagcgcgcatcaccgtgctcgtntngcacgcacacgcccctccgctccgtcgattttgttctnctcggtatctcgctctctgcgcgctcgagtctcgctcactacatanacttttactgataaagtatataatagatcgaccataggagcgcagtgaggacgtgagaccgccggcatcggcgacgcgaactcagcatgtggcgcgacagcgactgacatatagtgcaatgtgtgctctagtgctgtggtgtcattagtcgtgcttatgatcaagtagataacctctcatcatctcactctaactggtctagcacatgtgggcggagcaacgagagtacatgcgcgatatatananccacacagccgtctcncacgcaccggtgccgtggagcgctgagctcccgatgcacactccgcggtgtaccgcaccaacncncgannacgtcaccacaagactacatcacacgagatactgcgtgtgnntttatntntnnnngngtgcgcggcgagccgccgcggtcgccgtgctctgcgctagctgcggtgacacatcagctcgctaatganggtgannnnnttttaaa

SEQ ID NO: 5547 - DNA, 1702 bp, Glycine max
  misc_feature (1)..(1): n is a, c, g, or t
  misc_feature (7)..(8): n is a, c, g, or t
  misc_feature (56)..(56): n is a, c, g, or t
  misc_feature (61)..(61): n is a, c, g, or t
  misc_feature (99)..(99): n is a, c, g, or t
  misc_feature (134)..(134): n is a, c, g, or t
  misc_feature (136)..(136): n is a, c, g, or t
  misc_feature (177)..(177): n is a, c, g, or t
  misc_feature (208)..(208): n is a, c, g, or t
  misc_feature (221)..(221): n is a, c, g, or t
  misc_feature (245)..(245): n is a, c, g, or t
  misc_feature (447)..(447): n is a, c, g, or t
  misc_feature (648)..(648): n is a, c, g, or t
  misc_feature (815)..(815): n is a, c, g, or t
  misc_feature (964)..(964): n is a, c, g, or t
  misc_feature (969)..(969): n is a, c, g, or t
  misc_feature (1074)..(1074): n is a, c, g, or t
  misc_feature (1108)..(1108): n is a, c, g, or t
  misc_feature (1134)..(1134): n is a, c, g, or t
  misc_feature (1201)..(1201): n is a, c, g, or t
  misc_feature (1242)..(1242): n is a, c, g, or t
  misc_feature (1266)..(1266): n is a, c, g, or t
  misc_feature (1356)..(1356): n is a, c, g, or t
  misc_feature (1404)..(1404): n is a, c, g, or t
  misc_feature (1412)..(1412): n is a, c, g, or t
  misc_feature (1466)..(1466): n is a, c, g, or t
  misc_feature (1551)..(1553): n is a, c, g, or t
  misc_feature (1555)..(1557): n is a, c, g, or t
  misc_feature (1560)..(1561): n is a, c, g, or t
  misc_feature (1608)..(1609): n is a, c, g, or t
  misc_feature (1620)..(1620): n is a, c, g, or t
  misc_feature (1622)..(1622): n is a, c, g, or t
  misc_feature (1626)..(1626): n is a, c, g, or t
  misc_feature (1630)..(1630): n is a, c, g, or t
  misc_feature (1632)..(1638): n is a, c, g, or t
  misc_feature (1642)..(1642): n is a, c, g, or t
  misc_feature (1644)..(1645): n is a, c, g, or t
  misc_feature (1650)..(1652): n is a, c, g, or t
  misc_feature (1655)..(1658): n is a, c, g, or t
  misc_feature (1660)..(1661): n is a, c, g, or t
  misc_feature (1664)..(1664): n is a, c, g, or t
  misc_feature (1686)..(1687): n is a, c, g, or t
  misc_feature (1689)..(1689): n is a, c, g, or t
  Probeset Number=SeqID_15326
nagaacnncgattgcgtcgttcggcgagtcatggcagcatgattgatactacgatntcagncagtgattatgcgaatacacagcaacaagcaaccaaancggagcacatcgaacaaatataaagtcatacagcnangacaccagcaatagcgtgcgaggactcatcgagtgacaatntagtgctgtgcgttgtgtagaccgtgagagnagttcaagatatnaggttgtaatggatctcatgcgtnttctagctattgactctaagtatatgtcctctagatatatgatatagatgtgtgtagcgattgaggcactgtgtatggaggtgtgtaggaggtgagtggacagttttagcgtgcactgtaggctgcagacgacgtggtatgagcatgagaggtatatagtcacgtacgagttggtcggaggcagtgtgctgcggcaggtgcnccaggctactacaatgcgctatagtgcgcagaacacgagtggaaacgtatacgagcgatgtgctgtgggtgtcggaggagagcagacgtcgtggaagtggagtcagatatgtagataacatagagcaggagatagcaacgagtgacagagtcgtgtgcctcttctcagcggcgtcgacacgtcgtcagtgagattattttnttgtggtatgtgtggtgggtgtgtctggtctaggatgaataagcgccatgtcactcgtattcactattcatatttctagtcgctagtatgtgattcgtctatgtagcaccgcgagggtaccgaccggcacatgtcgcatccagctaatatgggatgaatcgttcatnccatatataagttgtgtttgtgatattttattggtgggttcgtggtggtgttttgttctttctcttttctatttctctaccctggttgctctctatatcatctatcgtgagcacatcccacccaccaacatcagctcgcttggcagtangatanacggcgacctacgctcagcaaccgacaacaagctcgcacccgcgcgcgccgaacgcacacgacagcgagtcgcaatagtgatacgtgtaagtgtgagtgaatgcnttggtggcgaatagttggtcgtgatactatgtangtcagcgtgtggttcgcggcggtgcntagtatgacgtgagtatgtctgtatgtgggcgtaaggtacatggtagctctaagtggcacatccatnaacagctactatctactgcttcatacacctacgctctggantaagacgagtgagagtgttatatnttcttcatcatacagcgcttagttcttttctgttttgatgtttctcggtcttctgatctctgtgctgtgttagtggagtgtgattttagnagctgagagatataggaagctaagtattatgttgtgcgagttggttcngtgtgagntgtgtagtcttaaaacatgagtggttgtggggcatcacacagatacctcagagnaaaatagaatcatgacacatctccagattccatttggtgtgtttattctggaggagaggtgtgccagcagagatgggggggcggnnngnnntcnngcgacaatggaatgaccactccccaacaaacacccacacgcacaganntttccacatananaagnaaanannnnnnncccntnnccccnnnttnnnngnnttnccccccccccacacacacacannanaccaaaaaaaaaa

SEQ ID NO: 5548 - DNA, 1536 bp, Glycine max
  misc_feature (1)..(1): n is a, c, g, or t
  misc_feature (51)..(51): n is a, c, g, or t
  misc_feature (61)..(61): n is a, c, g, or t
  misc_feature (104)..(104): n is a, c, g, or t
  misc_feature (273)..(273): n is a, c, g, or t
  misc_feature (356)..(356): n is a, c, g, or t
  misc_feature (374)..(374): n is a, c, g, or t
  misc_feature (432)..(432): n is a, c, g, or t
  misc_feature (434)..(434): n is a, c, g, or t
  misc_feature (532)..(532): n is a, c, g, or t
  misc_feature (623)..(623): n is a, c, g, or t
  misc_feature (998)..(998): n is a, c, g, or t
  misc_feature (1004)..(1004): n is a, c, g, or t
  misc_feature (1086)..(1086): n is a, c, g, or t
  misc_feature (1147)..(1147): n is a, c, g, or t
  misc_feature (1189)..(1189): n is a, c, g, or t
  misc_feature (1271)..(1271): n is a, c, g, or t
  misc_feature (1278)..(1278): n is a, c, g, or t
  misc_feature (1364)..(1364): n is a, c, g, or t
  misc_feature (1466)..(1466): n is a, c, g, or t
  misc_feature (1503)..(1504): n is a, c, g, or t
  misc_feature (1506)..(1506): n is a, c, g, or t
  misc_feature (1509)..(1509): n is a, c, g, or t
  misc_feature (1513)..(1518): n is a, c, g, or t
  Peptide Sequence Number=SeqID_8364
  Probeset Number=SeqID_15327
ncgtactcgatgttgtgtgtgctgcgactaaaaaactcgccggtgtaacancatatagcanatgttggtcgtgtgctatatgaacataggactcggcttcaganggctcctctgcaataggacgggagagtcagcagcagtggtcggtgcgtcactgcgtcagatatacaatacgacgtgcgtcattacgttatatatgatggtcagaggagtctgtctacatcttcattgcgtgctgattatggtctgtagtcgagtactgtcgcatctgtntgtcttgataggagcgccgcgccttcaccatattatagagttgtggtgtgtgacatcagtcgtgtgtatgtcacgagtcgagnatgtaattcgaggcgcantcgtagtatgtgtgcggaatgcagaccaggaatatatcactaagatggcagatagtcncntgctcgagagcgtgataagtcgtttccgctatgagacaccgtgcgacgcatgatgaggatacgcagaggtgtcgtctacagtcgttgaggagtattcnggtactacgctgcaagtgtatagtctcgactctgctgtatctactggcgagagggtcatcgtagctcttgtgtcttagcgtgatgtaatgnccacgagctgctgtgtttgctatcggagacgcagctggtgagcgcagcgcgtgatagagatcacgacacgtatcgacatacgtgtccgcatgctatgatgtgcgggctccacggcactacctagacctgctgagtgaggtacgcgccatcactttctatctttcctgtacaacgcctagagtagatagagcagacatgcggactgcgggcgatgagggctaggtctatgttagatcagatactctacctggcgacacgagtacgtctctctacaggagatgctgacgcaagaaggaatgcagcacctccgcctcgctttctagcgcatgtcgtgtgtgtgagtgaggagagatagtaggtcagtgtgacggagtngtgtcnggtgttgctgtgaagcgcgggagggtgttgatgatcgcaggtgtatgagcactgaagcaagcatgagtggaactacaggganctagcgtcatcctatgatgttagtagagcagagcgcgtagcaaggatctattatataatgngaggtgttgtgtcgcaagaactctagcgtgcatctatcctancaactcagacctcgtcgcgaccttgtgctctgcagtaagtctgcataggagaagcactacgcagatagtataggactcgtcnccaatcnctccgctgttgtgctaggtggcgcgggcgagaggacggttgtagtatgatgataggtctttcttcctcctcgcgcgctcggcgcgnggtgttctcctctctcttcacttaagtaacaggccgcgcctcgcccgccgtcgcgctggcgggtcacgcttcttcgctgtctgtcgaggtgtgtgatgtagntggtcgtaatgtggtagatgattatagtagtcatgannanttnaaannnnnncccccccctccccccaac

SEQ ID NO: 5549 - DNA, 724 bp, Glycine max
  Probeset Number=SeqID_15328
agggttttggaacggtgcgtgcgtgcgtcgccattgttatctcggagtccctcccaatagaacagcttattcgatcttcttcttcgatcttcttcttcgtttctacatgtgacgtctttgagattgtgctgttatattcatcaaaagaaaatgtcgaagaagaagagtaacagtagtagttcttccatgaggaagctatcccaagctggagacaaaccttggttacagcaaaagaaacctggtaagctagggaaagagattgatgacatctttggtgggggaaagaataagaagcagctatcccaagcaggagtcaaacctgccaaaaaaactggtaaaatagggaaagagattgatgatatttttggtgggagaaagaagaagaaggtagaagtggaaacaaatgagaaagaagaggcccctgtgaataaagcaagagtggcaaagaggaagaggagcgaggttgacggattcaacagcaacccaaaaaccggaccgaggaagaggactgaagacgggttactagtgttcacggaagatgagcttggtatcaataaggccaatgctggtaatacgcctctgtgcccttttgactgccagtgttgcttctagtctcctttctctgtttgaaaaagtggatcttaagttaacgcagctttattgttcatgtttgatgagaaaaaaaacaaaacagtttactttctatccagttacttcttgattg

SEQ ID NO: 5550 - DNA, 216 bp, Glycine max
  Peptide Sequence Number=SeqID_8365
  Probeset Number=SeqID_15329
taaaatggagcaatgtcaccacaagactcagatatgtggttcagggaattagttcctttgccagtggtatgagctaccttagctatccaaacttttgctctctactacaatagtccccatccaactagatgttgttagatttagctttagtatggactagtgtaaggtgcacagtcatgagcctaataagataggcctctgcaggtcgacttagag

SEQ ID NO: 5551 - DNA, 613 bp, Glycine max
  misc_feature (1)..(13): n is a, c, g, or t
  Probeset Number=SeqID_15330
nnnnnnnnnnnnntaatttgcatagtgatagaggttatccaagaggaactctggcaaatcaagaaagaaattatcataatagaaatggaaatacttcatataacagtcttccccaagagcaagaaagagttatagtaaaagatgatattaaaggtagaggaggtgctaatagtatgaaagatgattttgctgtttcttcgatgaatgataatatgaagtcaacagagacattgataaaagaaacagaggccaaaattcaaaaattgaatttggaaaaacagaaattaatggttccagaagaaagaagacaaaaagaatatcatagtacgactcctccatgggcaaatcatgctgaccatttcaataactataaaacatcaaattgttatggaaatcattacaatagattccaacctttaggtcgacatggaaaataaggaaattataggagagtttttttagataatttatttgtaaaagaaataaatataaatgtttgtttttgacgtatatgataaatattgataagaagatttattgaagcgaaaaaagtatcaataagtatatgcgtatgatttttattactcactacactaaaaaaaaaaaaaaaaaa

SEQ ID NO: 5552 - DNA, 470 bp, Glycine max
  Peptide Sequence Number=SeqID_8366
  Probeset Number=SeqID_15331
tacttccctcggttccggcggttaaatctcacagacgattcgattatctccgtcacacgccgtcttcaccgtcgaattcttcccgccgggaacgaatggctttctggacattgataaaaggtctgctcctctttgcaaatgcgtttgcaatcctcaacgaagatcgtttcctcgctccaagaggatggacactcgaaaaactccaccaaaccggtagaagaaactctcccaaaggccaaatcatcggtctaatttacgcctgccagtacatgagattgcccctcttgctcatcaacctagtagtcatcgccatgaagattatcgccggttaaagattttgtgtataaactgcattacatatctaatgtaggaaggttctcttctacctagtcaaaagtatcccttgtagtcaagttgggtgtggatcattttacatgctgaaacaaactaatcatgcccaagagaacatg

SEQ ID NO: 5553 - DNA, 1453 bp, Glycine max
  misc_feature (936)..(936): n is a, c, g, or t
  misc_feature (1338)..(1338): n is a, c, g, or t
  misc_feature (1449)..(1449): n is a, c, g, or t
  misc_feature (1451)..(1451): n is a, c, g, or t
  misc_feature (1453)..(1453): n is a, c, g, or t
  Peptide Sequence Number=SeqID_8367
  Probeset Number=SeqID_15332
ggtgcgccccccaccagtagattatacacgcgcgccacttggtggcgcgatccgccgcaccgacgccctttcataacgcggcggggggtggtgagcctatacttatattctctgatatcggtattgatgtgcgcatcatgattacttatacaggcgcgggcagggcgtattttactgggcttataccgctccgcaaccacaatacacacttagcacctcctatatataattgttcattaccaaatcaacagaacacgatgagtcagcggcgctcatggtctagtgcgatgcacactcataccagtagcgacaccgtataaaatggctgtgttataacgagcccatgcgcacaactgcacccgaccatattattcgcattgtcgaacccgtatagattcacgcttgcgtatcgtgactcgacaaaccagacacgcgctacgtcgtgtgcgctgagccgtttctacgtcagcctcttcgtatattattgagggccgaattagtatatgacgccgaacaaggacctcagtcgcgtgcggcggcgattactgcatattgcgtgtggcggcggcggtcggatggacgttggtcgtcattcgcgcgaccggcgtgcgtacgatctgcgacgcggaatgtgagagcacacgccgcgccaggaagtcatccgtaccgcatattcgcgtatagatatccgcgcacagtatcacctaaacgatgtgctccgcggcgccacgtacatctatttcgtgcgctccgctttggttggtatgtcacatcaactatgagatagacggatagaccgcgtatgcgtgctgtcgcgaggtactagtgttgtaggaggagatgccacgtatcatatattgtagtgatgcgctggccgtaaactacaccagacgcgacgagctgcgacttgaatataactaacgagtcatgattggnacccaacgtaggtagatatacacccgccctgcatacggtcggatattcacgttgttatgtccgtgcaagagaggcacccgcgattcgagatagcgacgcacgcagcagagtctcttagcgcgcgatatgtcccgtctcatcccgcctcacgcgcgttggtgtaatatcgacacgtgtgcggtatcatgtaacttaagtaatttctgcgaccactaccttgtgtgtacataatagagcatatctcactagcgtgtagcgccggacgcgcacgctggatgggcgtcggcgacggagtataatattggggtcgacggcagcgcgtgcgggtatcaatattcaaagagagcagtggcatggcgcgttgaccgcgacctcgcggcacgagaacggagacataaatantggtaacaatacgtatggcagtcgcccgcactcgcagttccgcgcgcgctcatatgtatgttataagagcgccggctatgctaaaccgcgctaacgcgccgcgtgccatanangn

SEQ ID NO: 5554 - DNA, 555 bp, Glycine max
  Probeset Number=SeqID_15333
attgccgcgcctccttcctcctcctacttcacacgcacggaaggcagagagaggcgacccaaccgccccctccgctgcttcagttcgtccgctccatcccgtgtctattccgagtggacgccaacacacacaggcgcatatataggtagctttatttagctacggctgaagagagcctgatttacaagataggaggagcagatctttgaggagggagcatgccgacgggaaccatgaggaggatgttcgtcgagtcgtcctcgtcctcgtcctcgtcgtccgggagcggcagggaggcggagccggcggtggtgctgtgcgcgcctcgcccgcgcagggtccacgcccagccctgcagcgccgacctcatcctcggccctccccccttcctcctcaacgcctcctccgccaacaacagaaagcagagagaagggaagagcaaaacgcggcaggaggacgagtcggaggaggagggggaggggggctgggcgctgttcggcggctcgccgccggcgcgcgcagacaacccgctcgtccacgacccccacttcctgg

SEQ ID NO: 5555 - DNA, 1937 bp, Glycine max
  misc_feature (1)..(1): n is a, c, g, or t
  misc_feature (72)..(72): n is a, c, g, or t
  misc_feature (78)..(78): n is a, c, g, or t
  misc_feature (83)..(83): n is a, c, g, or t
  misc_feature (100)..(100): n is a, c, g, or t
  misc_feature (139)..(139): n is a, c, g, or t
  misc_feature (141)..(141): n is a, c, g, or t
  misc_feature (156)..(156): n is a, c, g, or t
  misc_feature (174)..(174): n is a, c, g, or t
  misc_feature (220)..(220): n is a, c, g, or t
  misc_feature (231)..(231): n is a, c, g, or t
  misc_feature (241)..(241): n is a, c, g, or t
  misc_feature (247)..(247): n is a, c, g, or t
  misc_feature (252)..(252): n is a, c, g, or t
  misc_feature (255)..(255): n is a, c, g, or t
  misc_feature (308)..(308): n is a, c, g, or t
  misc_feature (379)..(379): n is a, c, g, or t
  misc_feature (399)..(399): n is a, c, g, or t
  misc_feature (418)..(418): n is a, c, g, or t
  misc_feature (431)..(431): n is a, c, g, or t
  misc_feature (458)..(458): n is a, c, g, or t
  misc_feature (532)..(532): n is a, c, g, or t
  misc_feature (654)..(654): n is a, c, g, or t
  misc_feature (665)..(665): n is a, c, g, or t
  misc_feature (693)..(693): n is a, c, g, or t
  misc_feature (753)..(753): n is a, c, g, or t
  misc_feature (770)..(770): n is a, c, g, or t
  misc_feature (872)..(872): n is a, c, g, or t
  misc_feature (876)..(877): n is a, c, g, or t
  misc_feature (894)..(894): n is a, c, g, or t
  misc_feature (935)..(935): n is a, c, g, or t
  misc_feature (940)..(940): n is a, c, g, or t
  misc_feature (967)..(967): n is a, c, g, or t
  misc_feature (1029)..(1029): n is a, c, g, or t
  misc_feature (1051)..(1051): n is a, c, g, or t
  misc_feature (1064)..(1064): n is a, c, g, or t
  misc_feature (1108)..(1108): n is a, c, g, or t
  misc_feature (1137)..(1138): n is a, c, g, or t
  misc_feature (1172)..(1172): n is a, c, g, or t
  misc_feature (1291)..(1291): n is a, c, g, or t
  misc_feature (1296)..(1296): n is a, c, g, or t
  misc_feature (1363)..(1363): n is a, c, g, or t
  misc_feature (1431)..(1431): n is a, c, g, or t
  misc_feature (1563)..(1563): n is a, c, g, or t
  misc_feature (1590)..(1590): n is a, c, g, or t
  misc_feature (1618)..(1618): n is a, c, g, or t
  misc_feature (1637)..(1637): n is a, c, g, or t
  misc_feature (1647)..(1647): n is a, c, g, or t
  misc_feature (1748)..(1748): n is a, c, g, or t
  misc_feature (1802)..(1802): n is a, c, g, or t
  misc_feature (1813)..(1813): n is a, c, g, or t
  misc_feature (1823)..(1823): n is a, c, g, or t
  misc_feature (1830)..(1830): n is a, c, g, or t
  misc_feature (1838)..(1838): n is a, c, g, or t
  misc_feature (1891)..(1894): n is a, c, g, or t
  misc_feature (1896)..(1896): n is a, c, g, or t
  misc_feature (1899)..(1900): n is a, c, g, or t
  misc_feature (1902)..(1902): n is a, c, g, or t
  misc_feature (1906)..(1907): n is a, c, g, or t
  misc_feature (1909)..(1911): n is a, c, g, or t
  misc_feature (1919)..(1920): n is a, c, g, or t
  misc_feature (1928)..(1930): n is a, c, g, or t
  Peptide Sequence Number=SeqID_8368
  Probeset Number=SeqID_15334
ntgcacagcgccacggcagtagtagacgacgcgacgctgaaggcgacgcacgacgcgaagtgagggatcgcngatgtngtgtngccgaatacgggtcacnacaatacatgcatatgacgtagtcgcacatgatagtgangngtcgtatcatccgcncatacgtcaaggagcagnaagatatatcgtagaacttgtgtatgcacactagtgtacgcatagnagtgagcgtangaacgacgtnacacgnctagntgntggtccctagatgtctgacgtagatcagatagtacgggtgcagcgtcgctgantgagtgtttgatacgcagcgacacgaccgcatagacaatacggatcagacgacacagtgagagaggcaganagcagtcgtctaacacgtcnttcagcagactgacgaggnggaatgaatagtnatactacaccgcaccgcgcgcacgganacgatcgagatggatgtgcgatctcacatgtgatgtgtgagttgattggcaccacgaccgacagatgctcgcanggggcgttatagtgatactagtcacacgagcgatgtcgtcatatactacaatcacgacacgcccgatatatgatcagacagcgagatcgtgagctgccgcgcgcacgagcgagctgagggtnatcgcgagcangtacactgatgagtgctcgacacgagantctagcacgatagagacgacacgcgaccacacagtagtctcaccccacgacgcactatantgtgaatgttttactcncccacgactaagactccgacgtgtgggtgtggtggggcgagcagcgaactgtttatcgcatacacatatgactcagtacatattatcacgaaaacagtattntgtnncacgccagttctatatnccaagcaccatatataacgagagagatgctcttgtctttgnttctntagtgagttgcatttatctttctctcnccttctatttaaattacctatatcctcaatttatacatataatgacgaaaccactagtaganagccaccagactgtcgaggtgncagagacagcgtngtgaagtggtgtatgattcacgaccaaccacacgcccaccatantaggacactgtgtgacacgacgtcagccnnccgcatgtgatgagagaatagaagcgtccggtgngcgtatgttgaatccgcatgggagagtatatgagacacacgaataagaagagcataaacaagatcgcagaagtgtgaggttatgtcagatgaactcactactaatctcgaacgaattgntcgtntgatagacgagcccgacaatgtacgtagaggtcccaggtcgtagatccagcccatcacagaggtcancacacacacacacctgtatagactctgctcgactcagctatgacctcagctggcgctcagatacgaancgcaccctccttattgaaaacacacgtgaagctctttgttagattacatcgcacgcccatatgtatgatgagaaggagtgctgggagcggtaggcgattagtgtatgctcccacgagaagacgcgccgcgcnagagagggcgcaccagagatgaccaangacgcgctagcacatctcgtgcagaacnagaggagaacaaagagagnaaacgaaagnaaagaatgaagcgcgactctctcctctctgatctatcgcagccccaccgccgcggcggtgctgtgagcgagcgcctaacgatctgccgtcaggctaatcgngaggcgccgcgcgcctccacgcgccgagcatgtatagagagcttctccatcacnactataatctntcgattgatngtatggngacggcgncgcgcgtctcgtagcagagagagaggtatgtgcgcgaggtcagagtgagcagnnnngnggnnangagnnannnagaatggnntgccgccnnntaatatt

SEQ ID NO: 5556 - DNA, 747 bp, Glycine max
  misc_feature (8)..(8): n is a, c, g, or t
  misc_feature (136)..(137): n is a, c, g, or t
  misc_feature (465)..(465): n is a, c, g, or t
  misc_feature (529)..(530): n is a, c, g, or t
  Probeset Number=SeqID_15335
aaagcctnttgggttttccaacccccgttgggaattggtaaccccaccttttcgaaccaacttcaagtggaaccattcttcttccccttccgccggcccaaaatcattattattcttggtgggtcaaacccgaagnngggcctttaaaagaaaaccgcctttgcctttgaaagaaagggtaagccaagtgaagagccctttgccaaaggatttggcgagccaaatcttgcttcgcggagttcttccgaattgcaagaacaacttcagatcctgtgtcaggaacaaatgaatttgctcgttgctcggaggcggctcctggctgctaatgctgagcctgaggccgctgccttgcacgacggtgaataccaattaacaaagaatgagttttcaagtcttggacgtggaaaatatagtgaatgcagtactactgaatcatctgatgatattgagaagcaagagatgttnggaagtgtccgccgaagaggggatctcataccatgacaccagagagggttttacagagcctganngcaagtgtgagtgagcgggagctatgaatcaagtggacaggtgtagggaacccaacacactatacactgatacagagaacattcatcctgagaaaatggtctgcaattataagcaccctcagatagcaagacgaaaaaagcttccagatcctgttgagaaagagaagggtgtttatctttggtcaatgatcaagggcaatttgggaaaagatctaac

SEQ ID NO: 5557 - DNA, 1485 bp, Glycine max
  misc_feature (18)..(18): n is a, c, g, or t
  misc_feature (38)..(40): n is a, c, g, or t
  misc_feature (59)..(66): n is a, c, g, or t
  misc_feature (69)..(70): n is a, c, g, or t
  misc_feature (73)..(77): n is a, c, g, or t
  misc_feature (79)..(79): n is a, c, g, or t
  misc_feature (81)..(85): n is a, c, g, or t
  misc_feature (89)..(90): n is a, c, g, or t
  misc_feature (99)..(100): n is a, c, g, or t
  misc_feature (102)..(104): n is a, c, g, or t
  misc_feature (124)..(129): n is a, c, g, or t
  misc_feature (131)..(131): n is a, c, g, or t
  misc_feature (144)..(144): n is a, c, g, or t
  misc_feature (219)..(219): n is a, c, g, or t
  misc_feature (254)..(254): n is a, c, g, or t
  misc_feature (387)..(387): n is a, c, g, or t
  misc_feature (474)..(474): n is a, c, g, or t
  misc_feature (589)..(589): n is a, c, g, or t
  misc_feature (617)..(617): n is a, c, g, or t
  misc_feature (664)..(664): n is a, c, g, or t
  misc_feature (701)..(701): n is a, c, g, or t
  misc_feature (704)..(704): n is a, c, g, or t
  misc_feature (717)..(717): n is a, c, g, or t
  misc_feature (887)..(887): n is a, c, g, or t
  misc_feature (1005)..(1005): n is a, c, g, or t
  misc_feature (1027)..(1027): n is a, c, g, or t
  misc_feature (1165)..(1165): n is a, c, g, or t
  misc_feature (1190)..(1190): n is a, c, g, or t
  misc_feature (1208)..(1208): n is a, c, g, or t
  misc_feature (1307)..(1307): n is a, c, g, or t
  misc_feature (1339)..(1339): n is a, c, g, or t
  misc_feature (1485)..(1485): n is a, c, g, or t
  Peptide Sequence Number=SeqID_8369
  Probeset Number=SeqID_15336
gtggggggggtgtggggnggtgtttggtggtgtggtgnnnggtttggtttttggtgttnnnnnnnnttnngtnnnnncncnnnnncagnngacgacttnntnnngatagtgtatttattatttnnnnnnanggttgtgttttgnttcttattatattttgtgtgtgtgtcttctctttggtgggcggcgaggggggcggagcacgtcgctcagccggcntagtgtgtgttgttgtagcaggttggtccatgagntatggtggtgagtggtggtctcaacaaatatttagtttcgcggcagtagcaggcaaccagcgaggaaactcgcgcgcgaaaacgcggtggatgagttagaactattagtacgcatagaaataagtatggcatnatatatctctaataggtatctctgaaggaagtatataatataagtcataaccgcctgtaggtattatatacaatatataatataaantacaattatactaatgatactggagagcgcactgacgagagggcacaaacgcagcagcggccaagacgagcaccaacaacggagagagaacagtgagaaagagagaaagaggtanagataggataaaattataacatataaanataataattatctaatactatacacgcagagggaggtagagaggaanatgaagaagagaagtggcagagaggtaggtagctaanaanagcgagaacgaangggtattcattctttacacaatataagtgatgaagtactaatttcaatcacgtacaagatgaagacgacgcacatcactagatgcgagcgagccggacccctcccgcggacgctgacgatgaagtgtagacgacacaccacacccgccatagtccgcggagaacgggcgntgcggtgccacacgctgacggcaggaccaacaccaccccacaccgcacgcggcccgacccaccatgtgtgagaagagtctatctcgcacaccctccgcacacagcgctaccgaggcangcagagacgcacgtgagcaggngcccgctgcgactgaatgcatcctcaccactcgcacaagtgacgcgcacacgccacccaactccgatatgatagtggcgccctctcaccgcgcgcacactgcccggctcgaatacgtgcattatactgcatcaccacnaagtcacgtaacacaacctatcttnctacgtcccactctctancgcgcgtcgacacagcagcgtctcctacacatctcaccacatacactcccacacccctaggatgacaccccacgcaacgcgcacacgcgccggatgcgncgctgcacgtctcagcggacacggcgcgcgcngtgtggctggcgacgtcgtgatgcgtgggtgacctcgtcgtgcgtatagagcaattgagatcgagtgtgtgtctgtcgcggcgctgtccgactcgcgcactgactctgcgctgatgacgtgtgagcgcgtgctgtaagcggcgcan

SEQ ID NO: 5558 - DNA, 454 bp, Glycine max
  Probeset Number=SeqID_15337
aacttttcagttagacaccgccggcactaacacttgcaccatgtctgttagaacaaccaaaatgacctaccgcaccagcagcgctgccccccgctccggcggcttcagcagcttctcgtacagcggcgcccccatggcgagtagagccagcaccgcttttttcaacctggggtccagctattgaagagccttcaagttcgggagcggcttcaggagcggtttttggggcccaggtgtgggatctgccggaacacataggtcaggggaaaccggagtttctgggacccttaaacttgggaatcgacctttctttcacaaggtggaacccggggaaggggcgatacagactttttaaaccaagttggcccttttattggaaggggcggttcccgggcaccaaacacaaatgttggaccaatgtgggctctttcgaacccaaaaaccaccccgcacc

SEQ ID NO: 5559 - DNA, 676 bp, Glycine max
  misc_feature (601)..(676): n is a, c, g, or t
  Peptide Sequence Number=SeqID_8370
  Probeset Number=SeqID_15338
aaagtagcagtttcaagacttgtgtcgagtatattaatggtcacgtggttgtggtgatgatgacatggcaagaattcattcgttggtttagcggcttggactgaaaaatatctgtggagttgcatcatttttgcttgtgaataggaatataacaagaatccccacattgtcggccaggtctgttaccctatgggctgtgctgagtagcgtcaggttggtgacaaaagggttgggaaaacgaaggttgaagagagtttggtgtttgtgagtgaaatgattaatgagaatggagatttggatggaggaagatgagggtgtggggtccgagtgtgtcacaaatgtcataccttttatagtgctagtttagattttatgcaagttaatgggggttgtcagtggtcgcggatgagttaaagggttgtcaaaatcaacgcaagcatggagaaaaatcagagagaatcgtcccatgcgaggcgaggggcagcagcacagcacttaatttgtcaagactctgaacaataattccccgtattagttttacttgttaagttataatctaattaacacgatatcaagggactattcaatcttaaaaaaaaannnnnnnnnnnnnnnnnnnnnnnnnnnnnnnnnnnnnnnnnnnnnnnnnnnnnnnnnnnnnnnnnnnnnnnnnnnn

SEQ ID NO: 5560 - DNA, 1450 bp, Glycine max
  misc_feature (25)..(27): n is a, c, g, or t
  misc_feature (30)..(34): n is a, c, g, or t
  misc_feature (75)..(75): n is a, c, g, or t
  misc_feature (128)..(128): n is a, c, g, or t
  misc_feature (161)..(161): n is a, c, g, or t
  misc_feature (163)..(163): n is a, c, g, or t
  misc_feature (868)..(868): n is a, c, g, or t
  misc_feature (1184)..(1184): n is a, c, g, or t
  misc_feature (1440)..(1440): n is a, c, g, or t
  misc_feature (1450)..(1450): n is a, c, g, or t
  Probeset Number=SeqID_15339
tgtttttgtgtccgccgggccgccnnnttnnnnnttttccccgttctcttcccttccgtggggcgctgccccccnaccacgcacccacccaaaaaacacaagagtatgccactgtatatactgccccncggggccacaaccaccaaaataaacaatcacanancaagcggggtcgagacacagaaacaacgtctagtccttccattgcataaatatgtatcatagtcggtttgttctcgtggtcgtggtgggaaggggtgcatattgtaattaacacctcatagatgataactcacaccccacccaaaaagcaacccaaacccgtcccgctccccagagctgtgtcaagcgggctctggcacgcattgatattccatgacttatttgttttactgtgacgattccgctcgccgacggtctcttttgtttacgcgatattatctgtatgaaaatcatcagtgttcagaataatatctcaacaattggagaaaaaaaggaataacagataaaactagaagacacgaggcgcggggcggagcgcaccgggggggcggaagaagagcgaccaccccaccacacctgacatctcacaatctgacgtccccaccgccactctctatacaagagatagggtgcggagcagctggtcaccgcctctgatccgtgttgggtgtcgtggcgtacaatattaaaaaacaacaccacatacatcaagaaggccgctccagcagaaacgtgcggaccaagcgtaacagccagccaacgatgaccaacgcgcaccaaccgccgaggacgagtgtggtcggcgacgctcactcatccacacgcgacttatccggcgtgatacctatgtgcgctgaacagttantgtgaaacagcacccgcccaccaccaatcacataaccatatgtgctctaggactgtgcacacgagaacacagaatcccgcacactaagataccgaacactgtgccaatagaatgatgtaagaatagtgtttctgtatgtacagacgccgtatttcttgccgcggcactgcccatataagagatccacctagtaccggaagctatcgagatgtgtagcgctccaccgccagtccccgccctccggccgagtgtggcaagagaaaacataagaacggcaaacagcgcaaccgaagcacacatgagacacacctatagngccgtcagtcggtgtgtagaactaataatgagctacagaccgcgcacccgtactatctgcgatcacatggaagtagctgctacgctgcgcgagaatgtcgatggcgcgtgcccttcctgcctcgcgcgatctactcacctgcagttgctcgccgcacgctctcaatactactggacatatacacatgtatgtcgtgaagcacatcaaccggagtagcggagcgccaggcgcggaggctatcaaccacacgcgcagnagatatgtgn

SEQ ID NO: 5561 - DNA, 1401 bp, Glycine max
  misc_feature (1)..(1): n is a, c, g, or t
  misc_feature (19)..(19): n is a, c, g, or t
  misc_feature (130)..(130): n is a, c, g, or t
  misc_feature (245)..(245): n is a, c, g, or t
  misc_feature (1376)..(1376): n is a, c, g, or t
  Peptide Sequence Number=SeqID_8371
  Probeset Number=SeqID_15340
ncttctgatattgaccgtncatcaatcgcatagaatgaatatatctcatatgagtctacagtatactatattactcgtgttagtaacaaggagatattcaatcacataatagcacattgagtgagcgtanaaacgagagacacagcgtaacaacattgtaatacacgtagagagctcagtgtcgtagacgcgacgatgttattatagcacggagcgtacgtacgcgttgactaactgggtgtgancgtgatcgaacatacaataattaagatacagtacagacacatcaaagtcgagttaagaaacatgatactatatccaacgtcgcacggatgtcctgatcgagtcggaatagagtcgtgcttcgcgacggacactatgaaacacagcaaacacagacatagcgacgatctcatacattaccgtgcgtcagttcggtggaacgccgtaagcactcgattgcgagtagactagatcagctatattgtgaactaactcgcgcggcgactacacatcaccgtataaactctatatgcctaatacaagagagggtttgtagtatcagtttatatctcgtcggttatagcaaaatactatagatctgtcgcagagtgcgggaatattagcatcgaatttacatgcaatcagatagtagactatcgcgcgtgtcgcgatacagcatgattacgtactcgcactgcgatccgcctacaatacgcagcgtgacgtgacacatgcagcagtatgcaatcatatccccctcgctgttacaggcagcggtcctattcatctgttaatattgcagactcaactgtcaacttctgcaccatctcattcctcatctcctacgccctccgtccttcactatactcataatatcacgcttccatcacgactcaccccatacactctactgtcggctagaagtttccgtagtctctgacgactatgtatgacagcatcaatcaccgcactccctgttcggcgcacactggtagtagtcattatgctacaaccgcatgacaacataactaatcagacaaagagagagaataacgatcaacgacaccacacataaactcgcgctgcgcatggtgccgtcggtcgtgtcggagaagtgcagagccaacgagtgggcacaacacgacgaccgagaggcgcgcgtggtcgatatcctgtcttttctatatgcagcgtacatatatgatataaagtcgtagtaagacttcagcacccactcctcatacgcacttcatcactatcatcttatctacaaacactactactgcagcgcgccgcacggagatgcgcgcgcgactactatattagtcgagattataggtactgcgccacctgacatacattagttgacgagnatagggatgccaccccgcgcccgac

SEQ ID NO: 5562 - DNA, 664 bp, Glycine max
  misc_feature (608)..(664): n is a, c, g, or t
  Probeset Number=SeqID_15341
tcgatcagctacgtaggccccccccccaaataaaattaactcctaaatttttcaacacataaaatggaattctccttccctattcatgatgtgctctccattgaccatgaaggtttcgccatcctgaatgctgcaaccactaaatccacttcccgtctcagcgaaaccccttcctattacaagccctacaccaaaactaaagccgatcccgttaaccaaggcttaacggagatcttggatcgcatgggtgctgccagtagcaaggctcaaggactaaagcaagtgataacaaatcatataaagtttacaacaagtggtgataatagattatatataaaagcagaagagaatagagtatatgggattctcaaagtgggaaagaagaacttgttttacagagactcaagaggaactgtaaaggaacttcaacctctgtgtgtattggacttttatgtgcatgaatcttgtcaaagaagtggtctcggaaaacagatttttgagatgatgttggaaaaagagaatattgatcctagtaaaatagcttatgatcgtccttctccgaaacttattggcttcttgaagaaacactacggacttgtcagctatgnnnnnnnnnnnnnnnnnnnnnnnnnnnnnnnnnnnnnnnnnnnnnnnnnnnnnnnnn

SEQ ID NO: 5563 - DNA, 1513 bp, Glycine max
  misc_feature (5)..(5): n is a, c, g, or t
  misc_feature (233)..(233): n is a, c, g, or t
  misc_feature (235)..(235): n is a, c, g, or t
  misc_feature (238)..(238): n is a, c, g, or t
  misc_feature (246)..(246): n is a, c, g, or t
  misc_feature (260)..(260): n is a, c, g, or t
  misc_feature (323)..(323): n is a, c, g, or t
  misc_feature (422)..(422): n is a, c, g, or t
  misc_feature (448)..(448): n is a, c, g, or t
  misc_feature (661)..(661): n is a, c, g, or t
  misc_feature (663)..(664): n is a, c, g, or t
  misc_feature (668)..(668): n is a, c, g, or t
  misc_feature (670)..(671): n is a, c, g, or t
  misc_feature (684)..(685): n is a, c, g, or t
  misc_feature (690)..(692): n is a, c, g, or t
  misc_feature (698)..(700): n is a, c, g, or t
  misc_feature (778)..(778): n is a, c, g, or t
  misc_feature (812)..(812): n is a, c, g, or t
  misc_feature (826)..(826): n is a, c, g, or t
  misc_feature (850)..(850): n is a, c, g, or t
  misc_feature (852)..(854): n is a, c, g, or t
  misc_feature (878)..(878): n is a, c, g, or t
  misc_feature (951)..(951): n is a, c, g, or t
  misc_feature (977)..(977): n is a, c, g, or t
  misc_feature (1122)..(1122): n is a, c, g, or t
  misc_feature (1124)..(1124): n is a, c, g, or t
  misc_feature (1166)..(1166): n is a, c, g, or t
  misc_feature (1180)..(1181): n is a, c, g, or t
  misc_feature (1196)..(1196): n is a, c, g, or t
  misc_feature (1243)..(1243): n is a, c, g, or t
  misc_feature (1261)..(1261): n is a, c, g, or t
  misc_feature (1275)..(1275): n is a, c, g, or t
  misc_feature (1313)..(1314): n is a, c, g, or t
  misc_feature (1317)..(1317): n is a, c, g, or t
  misc_feature (1321)..(1321): n is a, c, g, or t
  misc_feature (1323)..(1324): n is a, c, g, or t
  misc_feature (1326)..(1326): n is a, c, g, or t
  misc_feature (1347)..(1347): n is a, c, g, or t
  misc_feature (1363)..(1363): n is a, c, g, or t
  misc_feature (1426)..(1427): n is a, c, g, or t
  misc_feature (1429)..(1429): n is a, c, g, or t
  misc_feature (1432)..(1432): n is a, c, g, or t
  misc_feature (1434)..(1434): n is a, c, g, or t
  misc_feature (1436)..(1436): n is a, c, g, or t
  misc_feature (1438)..(1440): n is a, c, g, or t
  misc_feature (1442)..(1442): n is a, c, g, or t
  misc_feature (1444)..(1444): n is a, c, g, or t
  misc_feature (1446)..(1450): n is a, c, g, or t
  misc_feature (1452)..(1452): n is a, c, g, or t
  misc_feature (1457)..(1457): n is a, c, g, or t
  misc_feature (1464)..(1467): n is a, c, g, or t
  misc_feature (1477)..(1478): n is a, c, g, or t
  misc_feature (1480)..(1480): n is a, c, g, or t
  misc_feature (1485)..(1488): n is a, c, g, or t
  misc_feature (1490)..(1490): n is a, c, g, or t
  Peptide Sequence Number=SeqID_8372
  Probeset Number=SeqID_15342
caggnaagagagaacgtgcaatctaagatgagagtacagagcacacacgacatcaagcacgcgagagacaacacactagatcaacaaccaacaggcacggatgcgtgagatgtgtgcgcgagagtcgtgtggtagaggagggatgagtgacagtgacacgcgtcgcggcgaatgtttccagatcgatcgtcacaggttcgcagtcactggcaggatgaatatgtttaagtatngngtngtggcggnggggaccggagccngggagagagttaggcagtggtaacagagacaagctcgcctgcagattgagaagagctggtgancgaggcatcacacacacaccacaccagcacgccgtgacaaggctcgtgtggcaggcagaggcgtcggtatcggttacagcgcacagatcgtgagtaaantactaacgcacatctccaggtagtgntggtcagcatgacagccacctgctcgtggtcgagtcgggttactcacgaagattgtgggggtgggcgggagggcacaaacacagatacataaacgagcgcggcacaacacacaacactactccacacacacagatctgtaggggagaggcggtgcggtcacacgaacaacacataagtaggagggcgagagggggggggtggcggtgttgtgntnntaantnnacatccaataatnnttttnnntttgtnnnttaaataatatcatcagtggggtggaagactgaatagatgattcttgctacttattattcatattcgggcttgtgcgnatgcgtacgagtatgtcttgagtgcaggaggcgntcgtagcgtgtttntctgcgaccaccacaactaaatangnnngcaccgcacacacacaccaccttnccccaacctccacaaatcacaatcattgtgtgtgagggagggtggataaatacatattatcattgaacgtctnttcttatacacctagctctagatatnggtagagagagagcgagagcgcgtagtcagggtgtcaagattgtctgtgtttatttattatataatagtgttcagtactggtgggcgtcgtgtctgggcacatgcggacagcacacaccgactggaccgacgagacacacaactncncaacactatagtaaattgtggatgttgtgggtggagcttctntggcgggggcgggnnggtgtgtaattaatntatgtatttgatattgggtggggtgtgggcgacgcggcggcagcaanagcgtggggcagaggagntaacgcagctggcnagagcgaaaacaaaacaacaactaaaaatcccctccgnntgncgananntnggggtgtgaggtagagacttncccttattttaattgntgtaatttggagtgggtgggggcccacacagataagagagaatatgtggattataatgttgtnngnttntntntnnntngntnnnnngngtggnggaccannnntcagagaagnngngaaannnnancacaacaccaccacaaaaaacca

SEQ ID NO: 5564 - DNA, 643 bp, Glycine max
  misc_feature (564)..(564): n is a, c, g, or t
  misc_feature (602)..(603): n is a, c, g, or t
  misc_feature (643)..(643): n is a, c, g, or t
  Probeset Number=SeqID_15343
tcgagtcagctacgtaggccccccccccccccaaatacaaataaatcaaaaagaattcaaattaacacatcttctcaaatgcaagaaatcaacgaacttaaaaatcttgtcatccaaagtcttgaaggcaacggtgtcttgggtcaaattagagctcagatcagagcctctgtcttcaaaatcatcgaaatgcaagagactactgctaaaaagaactctggtttcttctgggagaatcctctttgccaaactatctatgataataaagaaggtcaattggctttggaattaatcaatgactttttggagtttttcaagatggactatacttctagtgtttttacacatgaatccaatcttaaagatgcctcaaaaagagatgatttacaacgcaaattaggtctcaagactgagaataatagacccgttttattccaaattatcagtgctttagctgctcaaacttcttctgataaagaaaatcaatctatcagttcgactaagcctaatacaacaacttcatcagcagctcctgctaaaaatttaagtgctggtgctcaaganactggtgctggcaaaacttcttttgataatttcggaannaaataccaagtctggcttatcaaatctcgatgattctcan

SEQ ID NO: 5565 - DNA, 496 bp, Glycine max
  Peptide Sequence Number=SeqID_8373
  Probeset Number=SeqID_15344
acagaagcgctttcagaaggcattggaccttctgcataatgttgtaactgctcccatgtctaccataaatgctatagctgtagaagcttacaaaaagcatacattggtttctctcattcgtcatggacagttctctaccagtcttcctaaggattcttcttcttttgctcaaacgaacccaaagaacttatgtcagccttatgcccaattgggaaaaaaccatggcactggcaaaattgccaaaatatagcgctacagccaggccccaacaaaaaaagccgaatctgacaacaccatggactggacacaaagagggtaacatccctggaataaacggaacaaccccagagtgccccacacataaaagaccccctccccccccaaaataaacccaaacaagcgcgacaaataacccccgacagaacctgaaaagcatgggccaccacgcaaccaggacgcccgtaaaaaccccacaaatccaccccaggacggaatg

SEQ ID NO: 5566 - DNA, 1821 bp, Glycine max
  misc_feature (22)..(24): n is a, c, g, or t
  misc_feature (26)..(41): n is a, c, g, or t
  misc_feature (44)..(46): n is a, c, g, or t
  misc_feature (66)..(66): n is a, c, g, or t
  misc_feature (74)..(75): n is a, c, g, or t
  misc_feature (77)..(77): n is a, c, g, or t
  misc_feature (81)..(81): n is a, c, g, or t
  misc_feature (87)..(87): n is a, c, g, or t
  misc_feature (91)..(91): n is a, c, g, or t
  misc_feature (93)..(96): n is a, c, g, or t
  misc_feature (102)..(102): n is a, c, g, or t
  misc_feature (186)..(186): n is a, c, g, or t
  misc_feature (195)..(195): n is a, c, g, or t
  misc_feature (202)..(202): n is a, c, g, or t
  misc_feature (209)..(209): n is a, c, g, or t
  misc_feature (250)..(250): n is a, c, g, or t
  misc_feature (319)..(319): n is a, c, g, or t
  misc_feature (322)..(322): n is a, c, g, or t
  misc_feature (338)..(338): n is a, c, g, or t
  misc_feature (375)..(375): n is a, c, g, or t
  misc_feature (401)..(401): n is a, c, g, or t
  misc_feature (415)..(415): n is a, c, g, or t
  misc_feature (462)..(462): n is a, c, g, or t
  misc_feature (464)..(464): n is a, c, g, or t
  misc_feature (494)..(494): n is a, c, g, or t
  misc_feature (604)..(604): n is a, c, g, or t
  misc_feature (699)..(699): n is a, c, g, or t
  misc_feature (729)..(729): n is a, c, g, or t
  misc_feature (731)..(731): n is a, c, g, or t
  misc_feature (733)..(733): n is a, c, g, or t
  misc_feature (735)..(735): n is a, c, g, or t
  misc_feature (787)..(787): n is a, c, g, or t
  misc_feature (794)..(794): n is a, c, g, or t
  misc_feature (809)..(809): n is a, c, g, or t
  misc_feature (826)..(826): n is a, c, g, or t
  misc_feature (863)..(863): n is a, c, g, or t
  misc_feature (960)..(960): n is a, c, g, or t
  misc_feature (1028)..(1028): n is a, c, g, or t
  misc_feature (1037)..(1037): n is a, c, g, or t
  misc_feature (1056)..(1056): n is a, c, g, or t
  misc_feature (1064)..(1064): n is a, c, g, or t
  misc_feature (1083)..(1083): n is a, c, g, or t
  misc_feature (1085)..(1085): n is a, c, g, or t
  misc_feature (1087)..(1087): n is a, c, g, or t
  misc_feature (1116)..(1116): n is a, c, g, or t
  misc_feature (1125)..(1125): n is a, c, g, or t
  misc_feature (1139)..(1139): n is a, c, g, or t
  misc_feature (1141)..(1141): n is a, c, g, or t
  misc_feature (1143)..(1143): n is a, c, g, or t
  misc_feature (1204)..(1204): n is a, c, g, or t
  misc_feature (1244)..(1244): n is a, c, g, or t
  misc_feature (1248)..(1248): n is a, c, g, or t
  misc_feature (1259)..(1259): n is a, c, g, or t
  misc_feature (1276)..(1276): n is a, c, g, or t
  misc_feature (1330)..(1330): n is a, c, g, or t
  misc_feature (1360)..(1360): n is a, c, g, or t
  misc_feature (1436)..(1436): n is a, c, g, or t
  misc_feature (1450)..(1450): n is a, c, g, or t
  misc_feature (1456)..(1456): n is a, c, g, or t
  misc_feature (1460)..(1460): n is a, c, g, or t
  misc_feature (1467)..(1467): n is a, c, g, or t
  misc_feature (1471)..(1471): n is a, c, g, or t
  misc_feature (1474)..(1474): n is a, c, g, or t
  misc_feature (1494)..(1494): n is a, c, g, or t
  misc_feature (1525)..(1525): n is a, c, g, or t
  misc_feature (1542)..(1542): n is a, c, g, or t
  misc_feature (1544)..(1544): n is a, c, g, or t
  misc_feature (1628)..(1628): n is a, c, g, or t
  misc_feature (1657)..(1657): n is a, c, g, or t
  misc_feature (1660)..(1660): n is a, c, g, or t
  misc_feature (1734)..(1734): n is a, c, g, or t
  misc_feature (1781)..(1781): n is a, c, g, or t
  misc_feature (1821)..(1821): n is a, c, g, or t
  Peptide Sequence Number=SeqID_8374
  Probeset Number=SeqID_15345
tgggggggtgtgccccgccggnnnannnnnnnnnnnnnnnnacnnncaacactcctctccacctcncttgtctnngncgcnctgagntatnannnntacacnacaggtagtgtagaggaggcagttaactaatatcactaaccaagcgacggcgctagagggagtgttcctcgtatgatgtgtggnagaagaaantactatntatatanagatgtatactgtgtgttccagtaacgaatgatagaacacntcccatcctctctgctgcgtgctgcgtcatctataccacaatcttactactagtctactctgtgctacncancgcagttgtgtttatnctttcattatatatcacgagactgcaacggacgaaangagaatatgtagatactgtatatatnatatatatagtatnctcttcagtgcgtgtcggcgtcgcttcgtcgtcgacgacacgagagncntagtgatgtgctgtgcgatatactatattncatttgactacgtgtcgtgtcttcgtcgccactctgccagtgatatacacatgatatgacactcagcaatagagagatgattagacagcgcgacacgcgaagtcacgcanagagagacatggtatatatagaaagatatatcatatacaacctctctcactatgatgtagaggcctgcgggcgcgagcatgggtccacgcgcgcncgcgtccgcctccgcatcgtcgtccacccncncnancattctttgttaagattattatatatatgttgtgagtgtataagtatgaganagtttanaattatagtatgtanataagactagagcgacncaagcgccgcatctctatctacactagcatcacatanagatacgactactctccacacagcagtagagagacgacgagtaatgcatactcctgtctgcgatgctgatcgtgtgctgtgttgtctgtgtctgtantgtttggtgcgagtagttgatgacaatctaactaagatgagagacgtacttactatatcagtatctantatctatancaatactgtcgtcctccanccacccanctctaccaccccactcccncncnacacgttcgatgtgatgtgtgctctcgtnagtatctanggctgctctacagnananactcgtgcgaggtgcggcagcgcgtggcactgtagcgcgctgacgcgtgtgtgtgctgaancgtaggtgtaatggtcgtgatcgcgtggtagcggtgtgcngccngcacgtgcgcnagcggatgtgcgtgtgnagtgatagatatatgacatgacgtgagtagtgagtgagagacatacgcagcgtnacacactgtatatagtacagcgagagtgancggagcacgcacgacggctactgtgaagacgagcatctgtactgtctcatgattgtacacgacgcgctgggcagantgacggacctgcgntgaganatcncacaganctancgngtgctagctgtcgtgtcgcngactatcgacgtacggaacgtacagtcgtgnagactggtcgcgctganangtatactatatacacattaatatgctcccagtgctgctatctctctcacgatacgtagatacagtcatactgcggtcatcatantcgagtagtgatgtatagattgtgtgtantcntcaatgtcttcgcgccactgcacgttgctcatgtgtatgtgtgctcttgtcattatgtttgctgtatatctatnatatctctgtcttacttctctctactcttcgtctctttccgtacccnccctgtctcgtgtagtgccttcatgatgcgcgcgctgctn

SEQ ID NO: 5567 - DNA, 503 bp, Glycine max
  Probeset Number=SeqID_15346
aacacacctttctgtatgctgcagccgtcttcgtctctgagataacaaaggcacttttagtttaaaaggcatttcaaagagacaaacatgtcgggtgatgaggctgctgctccagttgttgttcctcccgttgctgctgagccagcggctataatcccagaggatatggatttgttgactgcattggagttgactcttaggaaggctcgtgctcatggtggtgttgttcgtggtctccatgagagcgctaagcttatcgagaagcgtgttgctcagctctgtgttttggctgaagactgtaaccagccagattacgtcaagcttgttaaggctctatgtgctgatcacaacatcaacttgcttactgttccaagtgccaagaccctcggcgaatgggctggtctctgcaagattgactctgagggtaatgctagaaaggttgttggatgctcctgtcttgtggtcaaggactacggtgaggatacgactgcactcaacatcgt

SEQ ID NO: 5568 - DNA, 2124 bp, Glycine max
  misc_feature (4)..(4): n is a, c, g, or t
  misc_feature (38)..(38): n is a, c, g, or t
  misc_feature (116)..(116): n is a, c, g, or t
  misc_feature (120)..(120): n is a, c, g, or t
  misc_feature (196)..(196): n is a, c, g, or t
  misc_feature (277)..(277): n is a, c, g, or t
  misc_feature (316)..(316): n is a, c, g, or t
  misc_feature (347)..(347): n is a, c, g, or t
  misc_feature (355)..(355): n is a, c, g, or t
  misc_feature (426)..(426): n is a, c, g, or t
  misc_feature (457)..(457): n is a, c, g, or t
  misc_feature (459)..(459): n is a, c, g, or t
  misc_feature (537)..(537): n is a, c, g, or t
  misc_feature (544)..(544): n is a, c, g, or t
  misc_feature (613)..(613): n is a, c, g, or t
  misc_feature (655)..(655): n is a, c, g, or t
  misc_feature (728)..(728): n is a, c, g, or t
  misc_feature (730)..(730): n is a, c, g, or t
  misc_feature (759)..(759): n is a, c, g, or t
  misc_feature (784)..(784): n is a, c, g, or t
  misc_feature (807)..(807): n is a, c, g, or t
  misc_feature (854)..(854): n is a, c, g, or t
  misc_feature (919)..(919): n is a, c, g, or t
  misc_feature (956)..(956): n is a, c, g, or t
  misc_feature (969)..(969): n is a, c, g, or t
  misc_feature (1184)..(1184): n is a, c, g, or t
  misc_feature (1238)..(1238): n is a, c, g, or t
  misc_feature (1274)..(1274): n is a, c, g, or t
  misc_feature (1295)..(1295): n is a, c, g, or t
  misc_feature (1373)..(1373): n is a, c, g, or t
  misc_feature (1464)..(1464): n is a, c, g, or t
  misc_feature (1499)..(1499): n is a, c, g, or t
  misc_feature (1680)..(1680): n is a, c, g, or t
  misc_feature (1865)..(1865): n is a, c, g, or t
  misc_feature (1871)..(1871): n is a, c, g, or t
  misc_feature (2025)..(2025): n is a, c, g, or t
  misc_feature (2048)..(2048): n is a, c, g, or t
  misc_feature (2077)..(2077): n is a, c, g, or t
  misc_feature (2084)..(2085): n is a, c, g, or t
  misc_feature (2087)..(2087): n is a, c, g, or t
  misc_feature (2089)..(2089): n is a, c, g, or t
  misc_feature (2091)..(2091): n is a, c, g, or t
  misc_feature (2102)..(2102): n is a, c, g, or t
  misc_feature (2104)..(2104): n is a, c, g, or t
  Peptide Sequence Number=SeqID_8375
  Probeset Number=SeqID_15347
ccgntactactttccatacgctcactgctactcgtgtncgtagaattatcctcacaacaaataaactgcctacttcctctttcgtaatgattcactgcgtgtgactgcaagatcanacgngaacagtgagctgctacgtcatacgcatgcgttatgtgatagtgtagatatacagtgcatgtagacatatgctcgncacatacaatcgtgtagcacataaccatcgagtgaggacgttaaggactagcgccgtcagcgtctatgtgatatatatgantcttagtaagatacatctcagtttaggttatacttagtnattcgatacatcgattgtaggcatcataatnacatatantatctaagaagtgcaccgacgctatgtgtgtgcgacgtgcgctagcgcaagtacgagcgcggcatcctacncagcgcgatagtgatgaagagcgcgcgcagngnaatccagcacagcatctgtagtcgtgcacgacgctccgtccgtgcactagagcacgtcgacgatcacagtatcatgcnagtactnagccaatccgcgtcgtacatctcggtcgacacgttacgcgcatgacgtgtactggaggagtatagtagncacgactcgcgctctatcttcacacaagataactgtcgtgtntacgagatactgcatgtctggtgccgcacctacgtccaataatgacacgtctcacccgcgctatatcacatcnantctatcgcgcatccgtatctcaacacatngcgcgcgtgcgagacgcagtaacanggatcggtagatatagtagtgangagcaagcgcgtgtcggtcactgacgtctctgcatgtacagtacgtntcgctaacattctttagtcatgagatgtgatcgaatttcagcgactcgcgatatatcagcagtcngtcgcgcgacacagcgagatgcagatgtggagctgcngtgagaggattgnatggtgtgcgtagtcatgacacgtagatataatagtcgtgatcggtctgtgagctgtaccgcgccagtgcaataaccatctcgtgcatgtggtacattaaatctcacgcgggaccgcgaccgaggagcagtacgcgagatatcagcaacacagcgtgcagatgcatggctttgtgtacattacgatgtcatatataatacttgtgtctcgtactntgtatcattcgcacacgcagactcggcagagatacgcactctcgggagcgcagngagccgagctgacattatcgcgcatggtcggtgcgngcgtcgagctacgtcagtctnagactctcgcaacatgcgtcgagagacactctgcatcatgctatcatcactacacgtcgatgcggtcgcagagacatntagcacatccacactatctcatataaacatatatgtattagccttttattagagacagatagcatcacagagaactatatctatgaactcntcagtgtatcaagtacgctgatgacatctggtagngatgtgtgatttgagtcgagtcacatattctgatactatttattatagactaccagatatgttgatcatggtatcaacgtaatatacatccgatacacagcgccgtagtacatctgtggcagtagcgacgcgagtgagaacagagaggcgcgtacagcgagtggagcgcatgacgagagangggagccgatgtgcgagacgatgagagaggcgagacaacacaatatcaatagaagtcgtataaagagacgcatgaactctctgcagctaggtgaaatataataaatgtatcttagacgttgaaatatatttttcatcgcttcgcggcggagcgtactactaccctaccacacgacgcgcgccacncgcgcngcgtcttgtgcgtatgacagaacatcatatgactattaaatcatgacattggaagtagcgagacaacatgagggagggatcctcggcctcagttctgggatacgtaccgcccgtcgtgtgcgcatctattcgttaaagagaagttgtataacancagtaaaatgtataaaagtgacnagtgggtttaaatacgcaaatgaacaaantcagggnnanananataaaaaaaananaaaaaaaaaaaaaaaaaaaa

SEQ ID NO: 5569 - DNA, 180 bp, Glycine max
  Peptide Sequence Number=SeqID_8376
  Probeset Number=SeqID_15348
tgagtagtcgtctaaccaggctggatcgttccatcacaacattctgactggaataaccgtgtcactacccaactaaatcgccatgcactacattcactttttgtcagcagtcgtaaaccctaatatgtccgctccgaacgaccttaccaacggcaccgcacccttaatggtaattggcgc

SEQ ID NO: 5570 - DNA, 1888 bp, Glycine max
  misc_feature (10)..(10): n is a, c, g, or t
  misc_feature (36)..(36): n is a, c, g, or t
  misc_feature (63)..(63): n is a, c, g, or t
  misc_feature (74)..(74): n is a, c, g, or t
  misc_feature (78)..(78): n is a, c, g, or t
  misc_feature (100)..(101): n is a, c, g, or t
  misc_feature (103)..(103): n is a, c, g, or t
  misc_feature (106)..(106): n is a, c, g, or t
  misc_feature (116)..(116): n is a, c, g, or t
  misc_feature (120)..(120): n is a, c, g, or t
  misc_feature (122)..(122): n is a, c, g, or t
  misc_feature (138)..(138): n is a, c, g, or t
  misc_feature (140)..(140): n is a, c, g, or t
  misc_feature (157)..(157): n is a, c, g, or t
  misc_feature (189)..(189): n is a, c, g, or t
  misc_feature (218)..(218): n is a, c, g, or t
  misc_feature (258)..(258): n is a, c, g, or t
  misc_feature (276)..(276): n is a, c, g, or t
  misc_feature (295)..(295): n is a, c, g, or t
  misc_feature (391)..(391): n is a, c, g, or t
  misc_feature (445)..(445): n is a, c, g, or t
  misc_feature (447)..(447): n is a, c, g, or t
  misc_feature (507)..(507): n is a, c, g, or t
  misc_feature (518)..(518): n is a, c, g, or t
  misc_feature (581)..(581): n is a, c, g, or t
  misc_feature (606)..(606): n is a, c, g, or t
  misc_feature (613)..(613): n is a, c, g, or t
  misc_feature (621)..(621): n is a, c, g, or t
  misc_feature (716)..(716): n is a, c, g, or t
  misc_feature (730)..(730): n is a, c, g, or t
  misc_feature (804)..(804): n is a, c, g, or t
  misc_feature (882)..(882): n is a, c, g, or t
  misc_feature (896)..(896): n is a, c, g, or t
  misc_feature (906)..(906): n is a, c, g, or t
  misc_feature (913)..(913): n is a, c, g, or t
  misc_feature (916)..(916): n is a, c, g, or t
  misc_feature (918)..(918): n is a, c, g, or t
  misc_feature (939)..(939): n is a, c, g, or t
  misc_feature (948)..(948): n is a, c, g, or t
  misc_feature (979)..(979): n is a, c, g, or t
  misc_feature (1020)..(1020): n is a, c, g, or t
  misc_feature (1022)..(1022): n is a, c, g, or t
  misc_feature (1054)..(1054): n is a, c, g, or t
  misc_feature (1093)..(1093): n is a, c, g, or t
  misc_feature (1107)..(1107): n is a, c, g, or t
  misc_feature (1142)..(1142): n is a, c, g, or t
  misc_feature (1148)..(1148): n is a, c, g, or t
  misc_feature (1150)..(1150): n is a, c, g, or t
  misc_feature (1220)..(1220): n is a, c, g, or t
  misc_feature (1282)..(1282): n is a, c, g, or t
  misc_feature (1344)..(1344): n is a, c, g, or t
  misc_feature (1347)..(1347): n is a, c, g, or t
  misc_feature (1393)..(1393): n is a, c, g, or t
  misc_feature (1445)..(1445): n is a, c, g, or t
  misc_feature (1492)..(1492): n is a, c, g, or t
  misc_feature (1633)..(1633): n is a, c, g, or t
  misc_feature (1644)..(1644): n is a, c, g, or t
  misc_feature (1703)..(1703): n is a, c, g, or t
  misc_feature (1774)..(1774): n is a, c, g, or t
  misc_feature (1825)..(1825): n is a, c, g, or t
  misc_feature (1843)..(1843): n is a, c, g, or t
  Probeset Number=SeqID_15349
cgaacagcancggactgtctgatgacgactataatntgcgccgtcgaagcatcgatcacgtcngtgtagtgacngtgntagtagtatgatgattgaatanntntanagccacggcnacgnantcacttggtggacgcnantacacgatccgcgcgantatcgtgaatcgatatgcgacgtcgagcacgnacgagcgacgcaggctatatgatgagatnatgacgacgtacgtcgtcgggcgtacagcgagtgtcatanctgttcaatgcgtctcgngcgtacgtaatactgtatntatccatgatacagcgcatagacatatgtcacgccgacacgccgctgcagcgcgcgcatataaataatgacgtatagcacgtatcgatctcgccgncgcaacgccgactacatccgaaagattatcataattatagcgagacagtcatgnantagcgcgcgataatcgacgtacgcgactgcaccgcactcgcgcgcgctcacgtagatcanacgacacgagngatatagtcgcaatagtgagcgtttcagtcgcatacgagtcgcttactctctacacgcttcgncgtaatgctcacgacagatacgtanattgtcnaatcatcnacaacagcacgatcagtcgtcgcggcattattagtagtgttgtgtcgtcttacaccacgcgcgacactgtggtatagagcgtgtactgcgtcggncatatagaatcatngactctcagcgtctacatatagatatacgagacgaccgtcgacgactgactagagcgcaggagattataagtantgtcgcacggcgctgtgtgggtgtgtgagtattatagtgtccatattatacaacaatctaaacaagtacacgtagagncacgcgtgtcgcanttgtcatcgnacacgcnatnanaatccatacgccgtatactcnatagtgatntcgcacgccagtgcgcggtcactgcgtgacncacgaagacgtatcagaatgtatatagatccatatctgcgntnctgatgcgatcgccattcataatacggacggncgtagctgacagcgcaatacatgagtggaacagtcaccnagcgacgagacgcngcgtttacctacgttctcgcacagctatactacgnttaacntnatgtgtctaccgttcgctcactgtatggcgttcggtccggtagtgtatgtgagtgcgatgtgcgcgcgcntgtaacttcactctaatcggtattaatatcggcatcactaataatatacttagttgtacgtnagatatgacgcagtacagattacgatagagtagctacgcacgcgagtcggatcgcgagagtntgntattgataatcactatctgatctatcacacagcacatgtatgcagnttgcagatgttagtgagtgtgagttgtagtgagagcacacgacgagatgacngagtatgatgtagtcatctaagaagatcagctcatgcatatatctgntgaagatatatctctcgtactgagagcttatctatagtcgccatctcgcaacgcacacgactcggccgagacgatatgtactagcatcgtgagtcatctataataataagtagctgatacgacgagccgagcgcgaagtcntacatctactnacatatacacacagcacatagacgtacagtaaacagacacagatacagcgcattcactntatcactcacacacagaagacgtcatactattgatatagtaaatgtatttgatgattatattgttagtgtngtcgtgtgagcgggaatgatgtggtggctagtgctctactcgatgcatctngcttgtatgtacgtcgtnaactatccagcattcacttacgtagtagtgggcagcgctctctac

SEQ ID NO: 5571 - DNA, 498 bp, Glycine max
  Peptide Sequence Number=SeqID_8377
  Probeset Number=SeqID_15350
cgctgttggggtcggcttcggtgcggaagagcagggcggcgtccttctgtcgcctgagcggtggcaagctcgctggatggcgaggacggccatggaccgtgtgaagatctacgaggagaagccggacatcctgcgggccttcgccgtcattgttatctccgcgacggtgaccggccgcagcggagacatcgccgccttatccaaaatccactcggcgaagcagtgggtggcgacgcacatgaaacgcttgtagcctgagaccaaagttaattacatcctcgtcgggtgtgaggttttccactggggcgacaccaacatgatccgcgggctacgacgtgccatgagaacccttgactcagccctcctagccgagggcatatccgacagtaaggctaaccactggctgactctctgatgataatgccgacattgataccaccaagaatgggcaggttcaggcccggatacgcatagcaaggtgttggtcctaatgctgaa

SEQ ID NO: 5572 - DNA, 1842 bp, Glycine max
  misc_feature (1)..(1): n is a, c, g, or t
  misc_feature (114)..(114): n is a, c, g, or t
  misc_feature (124)..(124): n is a, c, g, or t
  misc_feature (212)..(212): n is a, c, g, or t
  misc_feature (216)..(216): n is a, c, g, or t
  misc_feature (287)..(287): n is a, c, g, or t
  misc_feature (289)..(289): n is a, c, g, or t
  misc_feature (294)..(294): n is a, c, g, or t
  misc_feature (383)..(383): n is a, c, g, or t
  misc_feature (449)..(449): n is a, c, g, or t
  misc_feature (474)..(474): n is a, c, g, or t
  misc_feature (483)..(483): n is a, c, g, or t
  misc_feature (626)..(626): n is a, c, g, or t
  misc_feature (656)..(656): n is a, c, g, or t
  misc_feature (710)..(710): n is a, c, g, or t
  misc_feature (712)..(712): n is a, c, g, or t
  misc_feature (836)..(836): n is a, c, g, or t
  misc_feature (891)..(891): n is a, c, g, or t
  misc_feature (1017)..(1017): n is a, c, g, or t
  misc_feature (1127)..(1127): n is a, c, g, or t
  misc_feature (1129)..(1129): n is a, c, g, or t
  misc_feature (1140)..(1140): n is a, c, g, or t
  misc_feature (1157)..(1157): n is a, c, g, or t
  misc_feature (1280)..(1280): n is a, c, g, or t
  misc_feature (1468)..(1468): n is a, c, g, or t
  misc_feature (1554)..(1554): n is a, c, g, or t
  misc_feature (1587)..(1587): n is a, c, g, or t
  misc_feature (1613)..(1613): n is a, c, g, or t
  misc_feature (1763)..(1763): n is a, c, g, or t
  misc_feature (1815)..(1815): n is a, c, g, or t
  misc_feature (1817)..(1817): n is a, c, g, or t
  Peptide Sequence Number=SeqID_8378
  Probeset Number=SeqID_15351
nagagtgagcacaagcgtcttatagatgcaccgtgcgcgactacacgagcgacgtatcaagtagtacttcatcgagtacgtgagtacgaggaggcagcacgcacatagcgtatntggacacgantagacacagagatgagcggcacgcacagatcacactagtgtagacgtatctctatctgataagcatagacgaatcatcttgtacgctnacgnctgccgcctggacgcgagtgacgaatgctcgtacttactgcagttgcatgtattgctatgtactcatgagnangtcanttgcattattgctgtgatatacattccatgcatataccatagtgtggacgcgagatgtgtgacagtcagcataagtcagctatgatgangacgacgatgcgtctaagcatcatacagagcatatagcagctgagttcgacactatacatctattncatctgacgcgtgtgtatgatccantacatatcngtcgcgatcagtgaatacgcagtgtacatcatagtaatacgcttatctagtgtattgacgatgtgacacccgacgcgctatacttgacgatccggcgagtcgacgacgtatatagcgaatgtgtacaccacagagcacgtctntactcgatagtagaggtagtgattcatgtnaagctgtcggacgcgctgatcgtggatagagacaagcgacaccgcgtcagcagnanagactcgatcgcaagtcactagtagagtgttcgtgtgcgcgtatctgatcacaatgtctagtcggcgtagatgtatacgtaagtatggatcgtcgaatcaggtaacaacgtagttgtatggtgncggcgcgtgcgcacacaataagcggacgtgggatgatagcaatatgaacatgcgngacgccgtctgcgtcgtgtgcgctgaatgttgatatatgacagataaacttgactcacttccgagcggcatatctagtccgccgactacggcgggcgccgatacatcaaagatagagaagagagcncgtgcgacactctacgtatggactagaagaaagaagatagcgtgacgagcagcacaatgtgtagtaatcaatgtatgtaagcacctaatgtagtagtgataaaatataanancgcagacatgnggtgacgcggcacagcngcagcatttaaattatacatcagaccgatgcactagcactacctctgactactgtcggcgagacaatcatactgattgcatactccgaaataacatactggctcgtgcatatgccaatgtatnagatgtctgatgctcatgtttactgtagtggcgaatgcgccagcgatacaaagtgtgcatgcgtcatcgctaagtcagcgctctaaacctaggactgagctgtacaagagtgatgtgtgatgtagaagtatgatggtgacatataaacagatgacacatctcttacgatgcgagagcatactgatgangactcagcgactcagaaggcatggtggcgggcggagcagtgaggctcatcctagcgactcggtagagtacgcatctaccgatgctntaactcaatgattgacaaacatgcgaataaggnagacagcaagaggagatatgtgggtnctgcatcaggtgttacactttcacactctgtacgtgtggtgtgtcttctatttacgcacgtattgctccgtcttcctcacactatcacaactctcgcgtgagcgtgttcctggtactctctctcataatagcaatcagtataaagagtgnggaactggacagcatacgtaaactagcgccgaagcagcactgcgcgcgcaananacgtgtaaggagcaggaggggcggg

SEQ ID NO: 5573 - DNA, 539 bp, Glycine max
  Probeset Number=SeqID_15352
cattttctccttccccctcccccccgccgccccctcggatcggcctcgccgcagacgagccagcgcggggcgggcccaaaccaacccctcccacgatggtgctgcaggacgacaaccacctgctccccccgccggcggggggggagcagaaaaaccaaaagaagaagcgcctcctcccgccccccccctccttcttctttgacggcaggtaagggggctgcttcatcaaaaactactttgttcatccacccacccacggtcgtggtgtgggcccccggccgccaaacggtctcccacccgccaaggggggggaaggcccggaccgaggggggttcctccttccgcccgaagggccaaaaaaaggtaaagtattaaaaaaaggcagccgttgttgaattctttttctgttgtggtggtgttagtctgaaattttgtcaagttaattgaatccatctttggttatttgatatcttgcctagctcgagcaatattactatgacactgtactatgttgtagtacctgccaggtaatatggtgg

SEQ ID NO: 5574 - DNA, 1542 bp, Glycine max
  misc_feature (1)..(19): n is a, c, g, or t
  misc_feature (27)..(28): n is a, c, g, or t
  misc_feature (35)..(36): n is a, c, g, or t
  misc_feature (49)..(49): n is a, c, g, or t
  misc_feature (64)..(65): n is a, c, g, or t
  misc_feature (72)..(72): n is a, c, g, or t
  misc_feature (78)..(79): n is a, c, g, or t
  misc_feature (326)..(327): n is a, c, g, or t
  misc_feature (338)..(338): n is a, c, g, or t
  misc_feature (399)..(399): n is a, c, g, or t
  misc_feature (453)..(453): n is a, c, g, or t
  misc_feature (536)..(536): n is a, c, g, or t
  misc_feature (591)..(591): n is a, c, g, or t
  misc_feature (596)..(596): n is a, c, g, or t
  misc_feature (659)..(659): n is a, c, g, or t
  misc_feature (663)..(664): n is a, c, g, or t
  misc_feature (697)..(697): n is a, c, g, or t
  misc_feature (721)..(721): n is a, c, g, or t
  misc_feature (732)..(732): n is a, c, g, or t
  misc_feature (740)..(740): n is a, c, g, or t
  misc_feature (752)..(752): n is a, c, g, or t
  misc_feature (755)..(755): n is a, c, g, or t
  misc_feature (758)..(758): n is a, c, g, or t
  misc_feature (777)..(777): n is a, c, g, or t
  misc_feature (828)..(828): n is a, c, g, or t
  misc_feature (831)..(831): n is a, c, g, or t
  misc_feature (833)..(833): n is a, c, g, or t
  misc_feature (838)..(838): n is a, c, g, or t
  misc_feature (845)..(845): n is a, c, g, or t
  misc_feature (899)..(899): n is a, c, g, or t
  misc_feature (967)..(967): n is a, c, g, or t
  misc_feature (981)..(981): n is a, c, g, or t
  misc_feature (998)..(998): n is a, c, g, or t
  misc_feature (1035)..(1035): n is a, c, g, or t
  misc_feature (1054)..(1054): n is a, c, g, or t
  misc_feature (1056)..(1056): n is a, c, g, or t
  misc_feature (1074)..(1074): n is a, c, g, or t
  misc_feature (1079)..(1079): n is a, c, g, or t
  misc_feature (1088)..(1088): n is a, c, g, or t
  misc_feature (1100)..(1100): n is a, c, g, or t
  misc_feature (1106)..(1106): n is a, c, g, or t
  misc_feature (1154)..(1154): n is a, c, g, or t
  misc_feature (1170)..(1170): n is a, c, g, or t
  misc_feature (1178)..(1178): n is a, c, g, or t
  misc_feature (1191)..(1191): n is a, c, g, or t
  misc_feature (1197)..(1197): n is a, c, g, or t
  misc_feature (1199)..(1199): n is a, c, g, or t
  misc_feature (1213)..(1213): n is a, c, g, or t
  misc_feature (1247)..(1247): n is a, c, g, or t
  misc_feature (1274)..(1274): n is a, c, g, or t
  misc_feature (1306)..(1306): n is a, c, g, or t
  misc_feature (1312)..(1312): n is a, c, g, or t
  misc_feature (1335)..(1335): n is a, c, g, or t
  misc_feature (1363)..(1363): n is a, c, g, or t
  misc_feature (1403)..(1403): n is a, c, g, or t
  misc_feature (1425)..(1425): n is a, c, g, or t
  misc_feature (1432)..(1433): n is a, c, g, or t
  misc_feature (1468)..(1468): n is a, c, g, or t
  misc_feature (1507)..(1507): n is a, c, g, or t
  misc_feature (1538)..(1538): n is a, c, g, or t
  Peptide Sequence Number=SeqID_8379
  Probeset Number=SeqID_15353
nnnnnnnnnnnnnnnnnnnggcccccnnggggggnncccataaaccacntcgccgggcgctccnnacccacnccgcgnnaggatgataaaaaaagggtattgacaccatcctccacgggaggggtgcggagggagacgctttatcttatcataataagggtggcccttctccgcgcgcgcgaggcaagcgggagaaaggtgacaaccgcatacactctatcttatctcatcactaaagaaatgaactcacatgaaggtgtggaagtcttatatctgcgtgtcaagaccacagttatacaacatgcagatatacacgctgagaggtnngtgttcatacnggttctcggtctcggtcgatgctactgtataatgtcgtatgctgaggtaatatgaagtagntgtggtaggggtgagtctggcgccccgcattgcataactccatgaggtgaaggntatgctgatagacgagtgtggttcacatcttccctacactattctgcgctgctttgtattattatctcccttacctctccccnatctctctccctgcttgtactttgtctcatgttgtacatctagtatatgttattnacctntcccttctcatctcttggcgtgcgcgagagacagtatgatgccgatcgcgttcgggccgtggngcgnnagtccaaggataactatcaaagcatagagtgtntgagatgtgtggtgtgaattgtgntattgtattgnttgtattntggtatatatanagnagnaggagaggtagaagtagantgagagaatggaaatatgggttacgtcgttcgctgcgtcatgacgcatctntgngntgttncccgacnatgggagcacactcaggactctatacattatatatagttatagatgtgagtacnatctctagcgacgacttgttatggtagaggacaacaagcacgcgagcgtggtcgtccgtctctcacanacctcgtctgagangtcgacccaactccacnacacaccatatgctcgccatgacatagtatgaaagcnagcgcactacgcagagtgncntatcgccacctcactcgngatgntatcacacntgccacaccaancaaatntgatatgcacgacgacgagcacactcataatcgagacggacaacgaanatccagcgcatggcgntcagcgcntatcaagagaccnatacgngnaagtgagcagtccnaggatcaacacgcgactcattgcgacacatcgcntgcgatcgttagtgcgtctccgaagcntagagacacgcgccagagagccacgcaagagntccgcnacaaacgcgcgaatagctgtaanagaagatagtatacagtatatgagcgtntgtagcactggtgtacgtctacgtaagtatcgcgtcgtgntcacttcgatcgacgatcacgnccgaggnngcggtgttacagatacactagttacctctcctatntacgcttaaataagacaggagtactagtacaagtctgtnggatgtgttgtcactatatggattgctgctntgtg

SEQ ID NO: 5575 - DNA, 449 bp, Glycine max
  Probeset Number=SeqID_15354
gcgtattaacatcaacaggcctcgctttgagaaatcagacggcggagagaatgggtttatcactcttacggtgggttctgccgctgactctgttgctcacctgcgccctatgtttccaatcggacgagcttctcctcgacgacgaagagttcggcatcgaaggaggacgaacctcctttgattccgattcgcatccaccttccaccacctccacctctatgaataggctttccgactcctcctcctattccaatatccactagcctctccaacactctttcaaggactgcgatttctgctacacctactacatctccactcaactctatactatcagcctctacacccatacgctgagcgaagtgcgatataatcataatcttcgcactaacattcagcataacaaatgggggatactacggcgagaatataatttctatataattaga

SEQ ID NO: 5576 - DNA, 1781 bp, Glycine max
  misc_feature (1)..(1): n is a, c, g, or t
  misc_feature (29)..(29): n is a, c, g, or t
  misc_feature (55)..(55): n is a, c, g, or t
  misc_feature (107)..(107): n is a, c, g, or t
  misc_feature (164)..(164): n is a, c, g, or t
  misc_feature (179)..(179): n is a, c, g, or t
  misc_feature (198)..(198): n is a, c, g, or t
  misc_feature (200)..(200): n is a, c, g, or t
  misc_feature (222)..(222): n is a, c, g, or t
  misc_feature (235)..(235): n is a, c, g, or t
  misc_feature (266)..(266): n is a, c, g, or t
  misc_feature (279)..(279): n is a, c, g, or t
  misc_feature (296)..(296): n is a, c, g, or t
  misc_feature (321)..(321): n is a, c, g, or t
  misc_feature (400)..(400): n is a, c, g, or t
  misc_feature (417)..(417): n is a, c, g, or t
  misc_feature (469)..(469): n is a, c, g, or t
  misc_feature (592)..(592): n is a, c, g, or t
  misc_feature (626)..(626): n is a, c, g, or t
  misc_feature (646)..(646): n is a, c, g, or t
  misc_feature (654)..(654): n is a, c, g, or t
  misc_feature (680)..(680): n is a, c, g, or t
  misc_feature (708)..(708): n is a, c, g, or t
  misc_feature (733)..(733): n is a, c, g, or t
  misc_feature (755)..(755): n is a, c, g, or t
  misc_feature (806)..(806): n is a, c, g, or t
  misc_feature (850)..(850): n is a, c, g, or t
  misc_feature (857)..(857): n is a, c, g, or t
  misc_feature (884)..(884): n is a, c, g, or t
  misc_feature (1022)..(1022): n is a, c, g, or t
  misc_feature (1028)..(1028): n is a, c, g, or t
  misc_feature (1052)..(1052): n is a, c, g, or t
  misc_feature (1068)..(1068): n is a, c, g, or t
  misc_feature (1183)..(1183): n is a, c, g, or t
  misc_feature (1285)..(1285): n is a, c, g, or t
  misc_feature (1310)..(1310): n is a, c, g, or t
  misc_feature (1347)..(1347): n is a, c, g, or t
  misc_feature (1525)..(1525): n is a, c, g, or t
  misc_feature (1611)..(1611): n is a, c, g, or t
  misc_feature (1696)..(1696): n is a, c, g, or t
  Peptide Sequence Number=SeqID_8380
  Probeset Number=SeqID_15355
ncgccgacagcgcagcgacgggcgtgaangcagtgatatatgatgatatggtatnagctgttgcgcgctctcgtacgacacatcgtgcgtctattgatatataatcncagattcgacgccacgacacatgatcatcagtacacacgcgcgtagagctgctgtanatttgtatcagtgangagtgttactaatatgcgncngcggtagtagatatatagccancaacgcacatcgncagcattacatgataatacgtcgagcagatntagtgattagtantcgacgcaccacgtgtntgtgagcatatacagcgctcgcgcnctgctgcaacgtcgtcattattatatgattattatcagtcgtagcgtggcgaaggcgcgcagcgtccgtaggagcaatntcgcgactgatgtttantgagctcgcggtacactagtagagatatattttatatgatggttcggtagcngagggagacgatgagactgtgagatagataatcacatcatatacggaccacgcgtgtaatgtattcgagcgtcagcgactagtgacgtcgtataatcagtagttcatgctgtatctagtttantaatatactgtcctcgagctgtgactcacgtgtngtgttgtgggggcgcggcgntgtgcggngacgcggatatcggtagatatgtaanacacgacgcgcgcggcactcgctacacnctcaacgagtcagtgtaatacactncattatgttgtggtgttgagtngggggggtgggtgtggtggcgtcactgtcgtgagcactctctactccaatncacatctgtaataataagcatgagatatgatgtggttgagtgantcttagntgttctcctcacaacagcaatatatcnactacgatctgtcgacctcatcttcacacacattatacctcctagactatccatgatatctgcatatactagagatcagtagttgtcagcgcggcacggccagcgagtctgtatatttgatctcgcagtcatcattgnagtcancaccctacatacgtctggcctctnattcacactctatgtnactcatcataatcgtacttcgagtttattagtgtatgttagacgagggcagatctcatgtatatatagatcatcaagataattattgtgttcaaagccatatacctactacaatngcaacgtatgatgcacagcgtaggctatacgcgtgtgaggttgcttgccactctcttcatcgtgtacgcaccacttagcattacgctatatagttcgcacgnccgccgcgcgcctctgtacgacgtnacatctcatcgcttcctgccgtgcgctgcagagctangatgcataattatgaatgattgaacagcaacgcgtcatatcctactcgcgcatggctgtcgtcgggcgccgcttctactctgtctctcgagggcacgtatatatgtatctatactctatatacggccgctgccctaccctcgcgtcttcttcctctatcatagtaacggtacgagtangtgcttatatactgcatcatctctccttccctgtcgtcttctcttggtaggaggatagataagacttaccgtcacctctcgtatantgagcgttttcggtgcgctcttcactgcgagatgagaggtacgctctatgcttctatatatatctttctacgtgctcgtagtatnacggtggcggtgtagagcgacggcgcgtcagatatataatgatgatacgcggctcgaattgtagtggtgtgggcgacaccactac

SEQ ID NO: 5577 - DNA, 278 bp, Glycine max
  Probeset Number=SeqID_15356
attacgtggagtcctgttatctagatgccagatcaagtcggacaaagcttgcgagagccttgttcaatgtacaatgatcatctctgcagctgttatcatagtattcccgcatgattgccacactctcaacttctatgaagcatgtctcctccattttctctcagatggtgctgcaggatttcaatatctccatagatcatcaggatcagatgaacaatgagtcccagataaggcacctcaggttcattggagaactttgcaggatcataatgtgcccc

SEQ ID NO: 5578 - DNA, 1384 bp, Glycine max
  misc_feature (42)..(46): n is a, c, g, or t
  misc_feature (48)..(50): n is a, c, g, or t
  misc_feature (1177)..(1177): n is a, c, g, or t
  Peptide Sequence Number=SeqID_8381
  Probeset Number=SeqID_15357
cccttccttccttccaaaggtgagcgcgcagttccccgttannnnnannntggcgaattgaggtgccgcggttctccccctcgaggcagattagggagaggcgccgccgcccccgcgcatctgtgtgttcccttgacagaaggactatgggcatggggcatatacggcggtgcgcggcctgcgcaagcccagttattttttgctccccgattcagtagtctgaagcgtgcaattctggaccccatctttctgcacccatgggcgggatgagttgttgtgaatcaatttgcttgagtcttacaagactggtgacatcttcctgtggctccgccctatatgacgtcacttcctaccgaatcatagcctgatgcgtcctcaaaccgtgtccgtaggagtcccctgacctgatcagtgaggggagaggctactaggatcgatgctctttagtccagttcccccgccagctccactaccatgtgcgccaataacagactccgcaaatagtacgaacatacgagaggtactcaaatgaccctctgcgcggtcactggggacagactaagatcttctgtgaatgtataccttggtctcgccataggaactggatcctttctctctctggcgctggcttatggaagtagctaccacgacacatgctaccactcattgcataggctctggccaccccctacctagtataccaacccatttagtctggcaataacccggatgttgagagatgtatcttcataattgggatggaatcctcgcgtccgcgcttggtcaatcgcggccgtgggacacttcaggagcactgatgcgtgcgtacaccccctcaactggatctattagcaagtaagaactctcagttgaattccgagttatctgagctatcggagtcttacggcgctaataacactcaagacacgaggatgagagggagtaacaccaacaaccgacatacgctcgacgtgggcgccgcgcattatggtgcttacctgcagcaccacaatcctcctgagaagttccgcgtgattcagactaactccatcttaatctttctcccatcctcaccactcccctctatctcttgatcgtactatatcggatgtccaactacagttctgcttataaccacttgatcacctgttctctcgtcatactgacaaaagctatntcgcataccgcctcgttctttacggaccactggagtcgtataccatactcactctgatgccttgacatcttgtatgttcttataactgacatcatgacaatatacctatataatacacgcttcactgttctttttctgtgcgcccatatcgctacgtgcttgtagatctgtccgccccctctttgtgtacttctctccgcccgtccg

SEQ ID NO: 5579 - DNA, 2085 bp, Glycine max
  misc_feature (16)..(20): n is a, c, g, or t
  misc_feature (32)..(32): n is a, c, g, or t
  misc_feature (42)..(42): n is a, c, g, or t
  misc_feature (63)..(63): n is a, c, g, or t
  misc_feature (77)..(80): n is a, c, g, or t
  misc_feature (82)..(82): n is a, c, g, or t
  misc_feature (85)..(86): n is a, c, g, or t
  misc_feature (98)..(98): n is a, c, g, or t
  misc_feature (100)..(100): n is a, c, g, or t
  misc_feature (104)..(104): n is a, c, g, or t
  misc_feature (116)..(120): n is a, c, g, or t
  misc_feature (122)..(124): n is a, c, g, or t
  misc_feature (126)..(130): n is a, c, g, or t
  misc_feature (134)..(134): n is a, c, g, or t
  misc_feature (140)..(140): n is a, c, g, or t
  misc_feature (150)..(150): n is a, c, g, or t
  misc_feature (152)..(152): n is a, c, g, or t
  misc_feature (180)..(180): n is a, c, g, or t
  misc_feature (192)..(192): n is a, c, g, or t
  misc_feature (204)..(205): n is a, c, g, or t
  misc_feature (209)..(209): n is a, c, g, or t
  misc_feature (223)..(223): n is a, c, g, or t
  misc_feature (252)..(252): n is a, c, g, or t
  misc_feature (301)..(301): n is a, c, g, or t
  misc_feature (416)..(416): n is a, c, g, or t
  misc_feature (428)..(428): n is a, c, g, or t
  misc_feature (442)..(442): n is a, c, g, or t
  misc_feature (448)..(448): n is a, c, g, or t
  misc_feature (472)..(473): n is a, c, g, or t
  misc_feature (547)..(547): n is a, c, g, or t
  misc_feature (570)..(570): n is a, c, g, or t
  misc_feature (581)..(581): n is a, c, g, or t
  misc_feature (628)..(628): n is a, c, g, or t
  misc_feature (643)..(643): n is a, c, g, or t
  misc_feature (676)..(676): n is a, c, g, or t
  misc_feature (692)..(692): n is a, c, g, or t
  misc_feature (814)..(814): n is a, c, g, or t
  misc_feature (821)..(821): n is a, c, g, or t
  misc_feature (908)..(908): n is a, c, g, or t
  misc_feature (1028)..(1028): n is a, c, g, or t
  misc_feature (1139)..(1139): n is a, c, g, or t
  misc_feature (1236)..(1236): n is a, c, g, or t
  misc_feature (1266)..(1266): n is a, c, g, or t
  misc_feature (1295)..(1295): n is a, c, g, or t
  misc_feature (1299)..(1299): n is a, c, g, or t
  misc_feature (1350)..(1350): n is a, c, g, or t
  misc_feature (1429)..(1429): n is a, c, g, or t
  misc_feature (1450)..(1450): n is a, c, g, or t
  misc_feature (1456)..(1457): n is a, c, g, or t
  misc_feature (1465)..(1465): n is a, c, g, or t
  misc_feature (1471)..(1471): n is a, c, g, or t
  misc_feature (1488)..(1488): n is a, c, g, or t
  misc_feature (1568)..(1568): n is a, c, g, or t
  misc_feature (1589)..(1589): n is a, c, g, or t
  misc_feature (1667)..(1667): n is a, c, g, or t
  misc_feature (1678)..(1678): n is a, c, g, or t
  misc_feature (1680)..(1680): n is a, c, g, or t
  misc_feature (1683)..(1683): n is a, c, g, or t
  misc_feature (1734)..(1734): n is a, c, g, or t
  misc_feature (1749)..(1749): n is a, c, g, or t
  misc_feature (1754)..(1754): n is a, c, g, or t
  misc_feature (1771)..(1771): n is a, c, g, or t
  misc_feature (1815)..(1815): n is a, c, g, or t
  misc_feature (1840)..(1840): n is a, c, g, or t
  misc_feature (1872)..(1872): n is a, c, g, or t
  misc_feature (1878)..(1878): n is a, c, g, or t
  misc_feature (1891)..(1891): n is a, c, g, or t
  misc_feature (1905)..(1905): n is a, c, g, or t
  misc_feature (1907)..(1907): n is a, c, g, or t
  misc_feature (1914)..(1914): n is a, c, g, or t
  misc_feature (1977)..(1977): n is a, c, g, or t
  misc_feature (2003)..(2003): n is a, c, g, or t
  misc_feature (2013)..(2013): n is a, c, g, or t
  misc_feature (2021)..(2022): n is a, c, g, or t
  misc_feature (2027)..(2027): n is a, c, g, or t
  misc_feature (2077)..(2077): n is a, c, g, or t
  Probeset Number=SeqID_15358
gtttgtgtttggtttnnnnnttgggggggggnggggtgctgntggttgtgtcgcgtgtgcgcncctttccgtgtttnnnncntcnncccccctttgcncncggncccccccccccnnnnncnnngnnnnnaaangaggcnagggggagangncggcggatgtgggctcgttgtgatctcntcgtcgtcgcgnggggctgggcgnntatnattctctctttgtntcgtatcttctcccctctttcttgtgtgncggtgggcaacagggagaagagaggcgcttcactttcatctttcatctntttttataatctcctatctctatgtaccggccggctcgcccggctgtgtgctactctctgcccctcttgtatggtggttagatggctccgccgcgttgtcgcttggtgtgatcgnttctctctgcgncgtgtctctctgcnatctgncgtccgtctcgccggctctgccgnnagtgggttattattctacggcttgtctgctattgtcggtttcgctcttcatctttcttgcgatgtgttgttatntctctattcgttgtcttccactnggctggtgganagtgcgagagaggtggccgatgtggaagtcgtcgtggtggcgtgtgncgcgaggcgccgagngcgtgaggacacacccggtgcgcccgccgccgncctgagtgccagtacntctgaatgcactcgggcacgattatctaagcgtctattattatatataatcatcaagctatcatatcgtatgtatatatattaagtatacacccacatagtaacgctcggtcttatggaagnatgtctnacgatgcacactgatcaaaactcttacaggtatctgagactgctaagtggaagataaagacagtacatcaatagtatgtcacaccancacccaaccactgcacacagcagcgtgcgacagacggacacagtacatctaccacattatcactttctcacatattacagcaatagacaaatctatattactatcagattgtcataatangcttctcactgagacccatgcacgacacatgagtgttagtgctgatatctctgaagcttcatacgtatcatacgtagttgaacgctatagtatgacgatgacgagaaaaanatggtatgtgaatacgcatatcgctgttattgaagatcatacatacagcacacacgactccagaccagtggtgtagcgatcatcagcagcaccctcncacaccacacaacttgtcgcacacgctcgntactatactcaactatatatgcaactgtncatnctacgctctactgtcaatgcttacatactgatcataatgatatgcgcagantactccggatgatgcgacatcgccatcgacatactgtagtatgacgtcgaagtgtggttatagcggtgtcattacatgnacgacagatgcgcgtacacanacacanncgactagnactcanctacccatgcacgaganacaccgatgattgtgaaataggactcgcagtgcgggaggtagtacactactataggatctaacgccgtagagagcagtgnctcacgtacggatgacatacnatgaccatgcgtacatgcgctgagcttcccgactgtactgtatcgcccagcacgcgtttgtggcgcttctagtattcntatctcatctncnccntcatcttactatcttagatctccactgcagtgactaggcaccgcggagaangatcgctgatggtanctgcngtgtacgagcgattccnatatacagatgatgtcgagtcgtgctctctactacgtcattttnctccttcccttatacatgtcgtgcngctagtgcgctacgctgacggctcgatgcacntatacngctacgacgcctncgcgtctgcttctngntctactncgactcctcgtatgagcgtctaccgtgcactccgaccgacgccgtcactcgatcatatcgaancaccatccaactactcgataccgcancattatcttnctatcatnncactnactcaccagccctgatgcgatgtcatgtgagcacacacgtcttgcacgantgtgaacg

SEQ ID NO: 5580 - DNA, 1392 bp, Glycine max
  misc_feature (30)..(31): n is a, c, g, or t
  misc_feature (42)..(42): n is a, c, g, or t
  misc_feature (50)..(50): n is a, c, g, or t
  misc_feature (54)..(54): n is a, c, g, or t
  misc_feature (101)..(101): n is a, c, g, or t
  misc_feature (496)..(496): n is a, c, g, or t
  misc_feature (777)..(777): n is a, c, g, or t
  misc_feature (1172)..(1172): n is a, c, g, or t
  misc_feature (1336)..(1336): n is a, c, g, or t
  Peptide Sequence Number=SeqID_8382
  Probeset Number=SeqID_15359
tcaacccgactccgcccgcgcgcgcccccnncccccccctanaccctttngatntgttttaatatggatgaaaacggtgaggtctcccgcggcgtgggggnggcggcgtccttacacagtcaggaggccccccacccgcgctgtgtcagcgtttcccggcctcgagaattttttatttaggaattagtccttatgcatgatattgttcatccttactataccggctcttgtatggctaatgtctgtgtgtctctcgactacaaacgcataccaccacgcacggtggggacacgcgcacgcacgccggcacctagcaactaccacgccagcgaccccgacccacctcctccctctctcttcttcctctctcctattctatcattattttttcttttaatatctgtctattacgtatatctcacatagagaaaacgcaaagcacggccgagaacagcgtggccgcaggggtctacaaggggcatgaagtcgggcgatntgagacacctcctctgatggctgcggctctatgaggtgagggggcggagtactctgagagaggtaggtctatgacgtctagagtgagttcgctcatcacacacaaacccagcggagcaacagaccagaggacgcggcgccggtcaccaacgcactagcgagcaggagcgccacgcacccgcgacaatcgaccagagtcacaatttacacatgcttcgcctgtgcacatcatcctcttgtacactagggtcgctacttacattagaatagaggttgagtggntaacactcaacggtattccatagctgtcctccatcatcgcgcgacatccacccccaaccacatctcagggcacttgcaacctatggaatgcgacatcgtaacatagatatgccaaagattacatatttaaatgcatgataatcacgcgtctatcgctgtcaaccctagacccccgcctgacttagatctcggtccaatacgcctactttgtgttggagagttatagaatatgtacacatagaagtatactaaacgaggtcattcctcgcacacccatctctagctcgagccgcaactcataaatattttatagctagagtaatgcactactttacagatatcgccgcgacccacgagctcacattcagtcttatcatatattacatatctgtacnaatatcgtatcatctggacatgatgtttatatatctctctaatcacatgtcttgtatgtataccaatatatattgaatgtttttgtgattatctgcgaaatagaatataaacaggatgagaatagacgcgctgatacatcacacaacgtacgcaacaactctancagcgacgacgtcaacattcacacacgagctctcagtgctgagccttgcgagtata

SEQ ID NO: 5581 - DNA, 1651 bp, Glycine max
  misc_feature (1)..(1): n is a, c, g, or t
  misc_feature (20)..(20): n is a, c, g, or t
  misc_feature (25)..(27): n is a, c, g, or t
  misc_feature (32)..(32): n is a, c, g, or t
  misc_feature (45)..(45): n is a, c, g, or t
  misc_feature (50)..(50): n is a, c, g, or t
  misc_feature (86)..(87): n is a, c, g, or t
  misc_feature (149)..(149): n is a, c, g, or t
  misc_feature (187)..(187): n is a, c, g, or t
  misc_feature (199)..(199): n is a, c, g, or t
  misc_feature (203)..(203): n is a, c, g, or t
  misc_feature (235)..(235): n is a, c, g, or t
  misc_feature (239)..(239): n is a, c, g, or t
  misc_feature (361)..(361): n is a, c, g, or t
  misc_feature (430)..(430): n is a, c, g, or t
  misc_feature (535)..(535): n is a, c, g, or t
  misc_feature (679)..(679): n is a, c, g, or t
  misc_feature (784)..(784): n is a, c, g, or t
  misc_feature (786)..(786): n is a, c, g, or t
  misc_feature (788)..(788): n is a, c, g, or t
  misc_feature (799)..(799): n is a, c, g, or t
  misc_feature (802)..(802): n is a, c, g, or t
  misc_feature (810)..(810): n is a, c, g, or t
  misc_feature (929)..(929): n is a, c, g, or t
  misc_feature (932)..(932): n is a, c, g, or t
  misc_feature (934)..(934): n is a, c, g, or t
  misc_feature (950)..(950): n is a, c, g, or t
  misc_feature (972)..(972): n is a, c, g, or t
  misc_feature (976)..(976): n is a, c, g, or t
  misc_feature (1134)..(1134): n is a, c, g, or t
  misc_feature (1180)..(1180): n is a, c, g, or t
  misc_feature (1227)..(1227): n is a, c, g, or t
  misc_feature (1253)..(1253): n is a, c, g, or t
  misc_feature (1318)..(1318): n is a, c, g, or t
  misc_feature (1344)..(1344): n is a, c, g, or t
  misc_feature (1349)..(1349): n is a, c, g, or t
  misc_feature (1429)..(1429): n is a, c, g, or t
  misc_feature (1440)..(1440): n is a, c, g, or t
  misc_feature (1490)..(1490): n is a, c, g, or t
  misc_feature (1529)..(1529): n is a, c, g, or t
  misc_feature (1545)..(1545): n is a, c, g, or t
  misc_feature (1549)..(1549): n is a, c, g, or t
  misc_feature (1584)..(1584): n is a, c, g, or t
  misc_feature (1588)..(1588): n is a, c, g, or t
  misc_feature (1645)..(1645): n is a, c, g, or t
  Peptide Sequence Number=SeqID_8383
  Probeset Number=SeqID_15360
ntttttttttttcccgcccnttctnnnttctnttcttacgtgtancccancctctaacgcccactaactcataaattaagtatatnncctctctcgaactatgtattttattagtggcctctcgcactacggcaggtctgcgagatgtngaagagaaaaaccgtcatctaaagtctgtggatagatnccggcgctctcnatcntcactccttataattatgttattgtgtgttgnatgncacatggtggtgacctaagcctctatctgcgtatactatacatcgtcgtgggtatttatcccctacactcgcgctctatatatatccatcagagtagcggagggtaatgtgcgcgggtggangccgcgtctggtgagagtgtctatctcttctcgaacgcacagcgagcagcatgtgctggcgcgggcggnattgtttatgtaatcgcgaggcagaccttcgcgccgcgtacctgtggctgctgtggtctaacctgcgtatacactcacatactcataaagaagaacacgagagantagatatatagatacttctgttggagggatcctcacatcgcgcatacgtactctgcagacgactacttcttgactatgcacgcccgaccactcccgccactatgttaaggtcggtgacagcagtatcgctcgttagtgctcgtnatttattctcaacatatctcttatcgatacatacggtgtcagcggcgtagcactgtgtataagatagagttgtgttgtagagagtgaggttgtgtaattattatnananttgggtgtaanacnatgttagnaaaaaaaagaataaataaaaaacagactatgtacgcaccttgtctcacgcatgattctcggctgttgtgggatgaggacgagcgtgcgtgcggtatacgcatagcgccagagagatttntangngatagtaacagagatnattacacgaccgaccgcaacancccnccccgcgagagagcatagaggtaggatgagcgagtacgcaatgattgatagctactgtatcacgcgatattaagtatacctatctgtcttcaaaagcggctccacgtatgccacagtctacgacatcatgctctcccaacgtatgcttggcgcattcncattcattgtgctagctgtcttgctaccatcactgctcctctactngtattgtgagatgctagagtgaatgtgtgagcgtgcataatccaggntacgtcgctgctgatgtgccgatagncagtgtgcgacgctgtgtgatgtatattatatagttatagcgctctatcatgtgcgcgcgtgctntgtacgatccgcacttcagtcagtancgctngtacgcatatatctcttcaccgctcatgtctgtcggtgagagtgagcatgtatactacacgcggtctatcactccctcancactactcaancagtctggcagaagataggatggagagacagtgcgcgtggtgagtgatangtgcgcgtgacgcgtagagtggctggtgtcggtgcgatnagatagtgatataatntggntgtatgatgagtgaggcgatatgtgtgtcgatgtngtantcgcagtacttcattcatgagagtgtgtcgatgatttgacgatgctctactcatgcntcactc

SEQ ID NO: 5582 - DNA, 1357 bp, Glycine max
  misc_feature (1)..(1): n is a, c, g, or t
  misc_feature (182)..(182): n is a, c, g, or t
  misc_feature (429)..(429): n is a, c, g, or t
  misc_feature (443)..(443): n is a, c, g, or t
  misc_feature (1008)..(1008): n is a, c, g, or t
  misc_feature (1107)..(1107): n is a, c, g, or t
  misc_feature (1110)..(1110): n is a, c, g, or t
  misc_feature (1179)..(1179): n is a, c, g, or t
  misc_feature (1237)..(1237): n is a, c, g, or t
  misc_feature (1285)..(1285): n is a, c, g, or t
  misc_feature (1291)..(1291): n is a, c, g, or t
  misc_feature (1295)..(1295): n is a, c, g, or t
  misc_feature (1299)..(1299): n is a, c, g, or t
  misc_feature (1303)..(1303): n is a, c, g, or t
  misc_feature (1310)..(1310): n is a, c, g, or t
  misc_feature (1330)..(1331): n is a, c, g, or t
  Probeset Number=SeqID_15361
ngtagcgagtcgtgctgagcagcgaggagggtcgtgccatcgtcgaggtatgcgtcaggggtcgaggcgttagccaactcacgacacggcgtcatcccacacgcagcacgacatagctggtcgctagcaacaatacagcgccactgacatggcggcggacgcatacgacaaacacgacgatnccgccgcggccgcacccgcgccagttccgtgcattgttcatatatgctggtgtctttagagcgctccttctttcaaatctcttgcgctgtcaaatcgtactagcggagaagagagaagtgagagttataggtggtgatgacttgtagtggcaggttcgtggcggtggccgagtctgtgttggtggtgtcattctctcattgatgtactcctgcgcctcgggtaccacgtgttattctatgtgcgctnctcactgttcgganctcgtagtatcatacagcgcagatatcagaaggagcaagatcctccatgaccatcccgtagcgcgcgaccgacgcgagctcatctggacatgcatgctaacatacgcgttgcgcgggtggggtgggttgacatagtcatacgactctactacaatatcacacacctaccgctctctcctcacgaatttcccatcagtattataagattatatgcttctcactagtcttctcgatcaccaggcgagagagcgtgcgatcacacagcgcatgcggtgatcatgagcgagcaaagacagaatatattctgtatcaggtattatgttatttgtagtgtatagggtatatatacgtatctaggttgatccatcatctcttactacatctttcatctcgtgcaacacacacatactataaaacgaacacgtccgcccgagagcagacatcgaagctacgagcgcgctcggggcgaccagaataccctatacgacggcgaaaacaattagaaaatagaagagggagcgtgagaaggagggaacgacgcgccgggcgccactgggtgttgcgntgtgtcccagtctgtatgactgctctcctccactcgtggctatgcttctcccttctgcacttacgcccactcacgtacgcgactacacctacaatatantanccgcccacgacccccgcgagctcccccatcatcgcccgtctccgtccggcacacacccaccaggaaaanaaataattaaaattaacaaataacagcatcacctctccctctcctcctgggcggctcnttgtgggagaggggtggggggagggctcagcgtctcctcacgccccanggcgtntatnttgntgtnccatagnggggagcagggaaaaagagnncccccaccaccgcgggggggcgcccc

SEQ ID NO: 5583 - DNA, 505 bp, Glycine max
  Peptide Sequence Number=SeqID_8384
  Probeset Number=SeqID_15362
gtgattttgaatgttcgattagaatgatttaggagatagaggaaactttctattgcgcgtgtcccattctcttctccatacctctcttcagtctaaaagatggaggtcaagttgtggaacgataagcgtgagagagaaatgtacgagaacttcgctgagctctacgctatcatcaaagccaccgagaagctcgagaaggcttacatccgtgacctcatctccccatccgaatacgaaaccgagtgtcagaagctcatcgtccacttcaagacgctctccgccacgctcaaggacttggtccctaacatcgagcggttcgccgagacgtacaagatggactgctcggctgctgtgtaccgtcttgtgacctctggcgtcccggctaccgtggagcatagggctgctgctatggcgtctacttcgagctctgcttccgttgttgccgagtgtgttcagaacttcatcacttcaatggattctctcaagctcaacatggtggctgttg

SEQ ID NO: 5584 - DNA, 1782 bp, Glycine max
  misc_feature (1)..(1): n is a, c, g, or t
  misc_feature (4)..(4): n is a, c, g, or t
  misc_feature (25)..(25): n is a, c, g, or t
  misc_feature (27)..(27): n is a, c, g, or t
  misc_feature (30)..(30): n is a, c, g, or t
  misc_feature (32)..(32): n is a, c, g, or t
  misc_feature (65)..(65): n is a, c, g, or t
  misc_feature (77)..(77): n is a, c, g, or t
  misc_feature (81)..(81): n is a, c, g, or t
  misc_feature (107)..(107): n is a, c, g, or t
  misc_feature (115)..(115): n is a, c, g, or t
  misc_feature (119)..(119): n is a, c, g, or t
  misc_feature (145)..(145): n is a, c, g, or t
  misc_feature (222)..(222): n is a, c, g, or t
  misc_feature (262)..(262): n is a, c, g, or t
  misc_feature (354)..(354): n is a, c, g, or t
  misc_feature (363)..(363): n is a, c, g, or t
  misc_feature (476)..(476): n is a, c, g, or t
  misc_feature (519)..(519): n is a, c, g, or t
  misc_feature (646)..(646): n is a, c, g, or t
  misc_feature (687)..(687): n is a, c, g, or t
  misc_feature (705)..(705): n is a, c, g, or t
  misc_feature (714)..(714): n is a, c, g, or t
  misc_feature (759)..(759): n is a, c, g, or t
  misc_feature (792)..(792): n is a, c, g, or t
  misc_feature (873)..(874): n is a, c, g, or t
  misc_feature (895)..(895): n is a, c, g, or t
  misc_feature (916)..(916): n is a, c, g, or t
  misc_feature (1090)..(1090): n is a, c, g, or t
  misc_feature (1139)..(1139): n is a, c, g, or t
  misc_feature (1244)..(1244): n is a, c, g, or t
  misc_feature (1287)..(1287): n is a, c, g, or t
  misc_feature (1350)..(1350): n is a, c, g, or t
  misc_feature (1471)..(1471): n is a, c, g, or t
  misc_feature (1490)..(1490): n is a, c, g, or t
  misc_feature (1521)..(1521): n is a, c, g, or t
  misc_feature (1524)..(1524): n is a, c, g, or t
  misc_feature (1542)..(1542): n is a, c, g, or t
  misc_feature (1549)..(1549): n is a, c, g, or t
  misc_feature (1571)..(1572): n is a, c, g, or t
  misc_feature (1610)..(1611): n is a, c, g, or t
  misc_feature (1619)..(1619): n is a, c, g, or t
  misc_feature (1632)..(1632): n is a, c, g, or t
  misc_feature (1649)..(1649): n is a, c, g, or t
  misc_feature (1651)..(1653): n is a, c, g, or t
  misc_feature (1664)..(1667): n is a, c, g, or t
  misc_feature (1674)..(1674): n is a, c, g, or t
  misc_feature (1684)..(1684): n is a, c, g, or t
  misc_feature (1692)..(1692): n is a, c, g, or t
  misc_feature (1708)..(1708): n is a, c, g, or t
  misc_feature (1752)..(1752): n is a, c, g, or t
  misc_feature (1765)..(1766): n is a, c, g, or t
  misc_feature (1773)..(1773): n is a, c, g, or t
  Peptide Sequence Number=SeqID_8385
  Probeset Number=SeqID_15363
ntgngatcattgatacagatcatancngtnancagtaggtgatggtagtttctaggtacgtatgnactctagtcgangcgntgcgtagcgagttgagtgtcatcagncgacgtangggnatgatgctgtgagagtcacgctactngcgtatatacggatagagtagctgtacggagcaggtgtagagtggagtcgtcacagctagcatatcgactacggacntcactacatacaactaatcactaattctctcatttcatancgtcatcagtgcgagttgggagcatgctatatcgatgtatatgcagggtgataataagtagaatagagtcaatgatcgacatatcaaacgtngagacagangtagcgatgagagatgagatgtgagatgagagacgagcagaatagagagaggatgtatatacagtagtgagtatagagagtatgtggtggatgatctgatacgatgagatatngagtatagacgcatcacatgaagtcgtagtatggagatgacgnaagatcatgagtgaggcagaagatagaagagacgacatgagcagagcaatgagtgttggatagttgtgtgtcgtgcagcgtgtggtttgcacatcggtgcgctagacgtagtagtcaaggatgcatncatatcacagatatatagtgatatcagacaatatgctatgnataatatactacaatacncatccaccntagcgcgtcgtcgtgcgtgcgtatcgcggccgtgtcggtgtctgncgacgtgctctcttatgtgtctgtgttatcgtngctcgtcgtagtgtgtgtggtcggagttagtgtgtgtgatctcgtggttctgcgcttggtgtgtgctactatgaagatgtnngagagatgcgcgtgtagtgangggacgcatacgtgaaatacntatgactagatacataacgacgcgtcggacactgtggtgtatatggatgttggtttatgcgatgtgtatgagtgttagtagtgtagattatgtgtctgtgcgtcgtgagagtgtacgttgtctcaccttctcacaacacgaacatccgatagcatcactctgcatcaagataantacacggcacaatcaacagcatatcaataaagatcattacaaacacacnccgagagaagagacattatgagtataaagtgttattgatgttacggtagacaattttaataatattattatactaatttgtatgtgttacttcttagtacatatntttggtaaatgtcatatgtttgtgaactaatttttgtattgtntctcatctctccttccgtctagcacacagcgacaacatcgtcatatgaactagcatcaatatnttcatgctataggctgtcacacacgagaccgaacaggatagggagcgcgaaggacgataacagtgtgcgagaagttgcggatgttcacatcacgagatagattatatagtatagatatacntagatgtcagtatatgagnggctactgcacgtcttagtggagggagcggnggntgtgggcgtgggtgaatngctgcanagcattgatatgtatcgtgagnnatagaagagagcaaatagtgtttacgagcgtgacctannaattgtanattatacatcatnactcacacaataatatnannngagagtggaannnnaaccacnccccccaccnctcttctncactctctcagcgcgngttagacggtcagtgtagtctgtggcctatgagggttggggtgnttgggggggttgnngttgttnttttcataa

SEQ ID NO: 5585 - DNA, 1424 bp, Glycine max
  misc_feature (1)..(1): n is a, c, g, or t
  misc_feature (97)..(97): n is a, c, g, or t
  misc_feature (230)..(230): n is a, c, g, or t
  misc_feature (779)..(779): n is a, c, g, or t
  misc_feature (1169)..(1169): n is a, c, g, or t
  misc_feature (1189)..(1189): n is a, c, g, or t
  misc_feature (1298)..(1298): n is a, c, g, or t
  misc_feature (1367)..(1368): n is a, c, g, or t
  misc_feature (1398)..(1398): n is a, c, g, or t
  misc_feature (1400)..(1401): n is a, c, g, or t
  misc_feature (1411)..(1412): n is a, c, g, or t
  Probeset Number=SeqID_15364
ngggtatggtttgtcggtataggtggagttgttggagtgtagacacgagatatcgacgatatggttgtgcgtatacatgatgcttgtcgaatggtanagaggtgtgagtagatagtgtgcggttgttgagagtgttgagagatatgagagtgcagagtgtgcatggtatgagaatgaacaggaaagaatacgagagtgagggtcgagggtatcaagtagaggtaggatgncgtgagaaagtaagagcgtagaggtagaggacgaggttggagtgtgacgtgctggaagaggtattgtgaagagatggtggagtgtcgcgtcagatatactatgtctgcgcggtgttgtgatctgacgcagagcaccgacacggagcacatatagtgagcatcagcgcttgatcggagtgtcatatccatcgttggtcgtcgtctacatagcgttcaatagtatgcgaacacagcgacaatgagcgccgagccaggaacgcgcagagacacgccatcgacggctggcaaagacgtaggaaaagatatgaaatatatatacatgttatagattgttctgtcttgtggggtgttgagtattatattatgttatggagccgatgtatgagttagtttgtgatgtgtcggattggtgtgttaatgtgttatgtgtgtcgtcgcgccgtgtgttgtactatacatcgtcttgtatatcttcattcttcctcgtatatcgctgttttgctgtttgcatcattgcgcgtgtgtgcacactatgttacacgtccacanacgattgtgtacgcaggatggtgtagtatttgacctgtgcagagatgtgtctgacagtttgtattcgcggtggcatacgagtcgcgagcgcgcttagtatcttatgcagcattcacaaccacaccgcgccaaccgccagaccacgctatacagacggagacctgcactagcgcgaaatcaagaaaagcacaagacaccgagacactgtaagcctgcgcacacacaacggagacggacgccggacgctcaggtgccagacgcgaggcgcgaactcactgcatcagtaccgatcaggaggagggtaagcacaacgcatcggacgacacacaagggatcgcaaagcaaaatctacatcacaacaatcaaccatcataactacgaagatatctnccatcgaacaccaccccaancccccaccggcgagcgagttttgtgtgtgttgtcgtgtgggttctatgcgtcgctcgtcctttgtacgcgggctgtgcgtcgcatgagtattaattaatacactattcnattctattatatagaggagagttaattacttctacataattgaaatataaatagttctatatatataannataataaaactatggatatatagagagaanannaagagagaanntaaaaaaaaaaa

SEQ ID NO: 5586 - DNA, 533 bp, Glycine max
  misc_feature (319)..(319): n is a, c, g, or t
  misc_feature (480)..(480): n is a, c, g, or t
  Peptide Sequence Number=SeqID_8386
  Probeset Number=SeqID_15365
acaaatctcataccactctctacaacaacaacatcaatctaacacgtctaatcgattttgtcgcaatggaaaccaccggaaaagtgaagaaggctttcggaggaaggaaagcgggtggccccaagaccaaatccgtctcgaaatcgatcaaagccggtctccagtttccggtggggagaatcactcgtttcctgaagaagggacggtacgcacagaggctcggcggtggagctccggtttacatggccgccgttctcgagtacctcgccgcagaagttctggagcttgctggtaacgctgcgagagacaacaagaagtngagaatcatcccgaggcatcttctgttggcgattaggaacgatgaagagttggggaaacttctcagtggagttacgatcgctcacggtggtgtcttgccaaacattaactctgttcttttgcctaagaagtctgctaagtcgtccgaggatgctgcacccnagtcgcctggcaaatctcccaagaaggcttaatcatctcgacgttacttgaat

SEQ ID NO: 5587 - DNA, 1212 bp, Glycine max
  misc_feature (1159)..(1159): n is a, c, g, or t
  Peptide Sequence Number=SeqID_8387
  Probeset Number=SeqID_15366
acacaaacaacaaaaagaaaacaaataaatatatttattctaataatattgtaattaataatatttattatttattttaattaatgaaaactataattatatttgttttatttttcattgctttggcattagctgatgtgtctcacttcacttccaaaaaaaatgcaagagatgaagctgcagccgcagagaattattggacatccgaaaatttattaaatgctattcccttggatgatcaatcagtgcccttcgatgagccccaggtcatcaggccccacgaggccagaaatgctactgaagagagagttccccaaagcagcgaaggccacgattctctctttttcccctccacccccgaagaaatcgaatctgtgagtattaacagtaataaaagaattggccaatttgcccctgtggattcttataccgtttatccctggagaactgttggaaagattttcttttccaagggaggactcaactacgtttgcagtggctctgtcattaaaagaaacgtcatttctactgcaggtcactgtgtgtatgatggtgctgctggtggctgggttaccaatttcattttcgtccctggataccatgtgtcaggaggagtagccatgagaccctacggtacctggtacgcaagacaactccgcactactgctaactgggcaaatactggattattttgccaagattatggatttgctgtgatttgggacaacagtggtgctgctttgggtgatgtcgttggtacccttggatggagcatcaacagagacgccccaaataccgtctggacctctctcggatatccccaagcatctccctacgatggaactcaaaacttctactcgacttctgcctatgctggctcagctgctccaggatgcacacctaataccattggtttgtacacctcagccacccctggttctagtggtggtccctgggtaattgattttggttccaataactatctcaatggactcaacagctacaaatatgataattatcccgatatcatgtttggcccttattttgataataattggctcaatgctttgaatgaagccgaagctatcagcccttaaattattatatttataatatattattatcatttttataattatttgatattcttgtatattgnaattatttcaatgatgttgtagaaaaaaaatataaatgttgctttttatattt

SEQ ID NO: 5588 - DNA, 406 bp, Glycine max
  Peptide Sequence Number=SeqID_8388
  Probeset Number=SeqID_15367
gtttttcgtttcgagtttccgagaaaaacccagattcgggtgctttgcatcatcttctccaatggctactccgacacagagcagcgaaaccaaacccttctctgtccttttcgtctgtctgggtaacatttgtcggagcccagcagctgaaggcgtcttcagagatatcgtcaaaaagagaggcctcgactccaaattcatcattgattccgccggaaccatcgattatcacgaggggaatatggcagatccaaggatgagaagtgctgcgaaacggcgtggagttgagataacatcattatctagaccaataaaggcatctgatttcagggagtttgatctcattctcgccatggatgagcagaacaaagaggacatattgaaggcttacaatgtgtggaaagcc

SEQ ID NO: 5589 - DNA, 1590 bp, Glycine max
  misc_feature (62)..(62): n is a, c, g, or t
  misc_feature (164)..(164): n is a, c, g, or t
  misc_feature (192)..(192): n is a, c, g, or t
  misc_feature (419)..(419): n is a, c, g, or t
  misc_feature (524)..(524): n is a, c, g, or t
  misc_feature (663)..(663): n is a, c, g, or t
  misc_feature (1018)..(1018): n is a, c, g, or t
  misc_feature (1164)..(1164): n is a, c, g, or t
  misc_feature (1232)..(1232): n is a, c, g, or t
  misc_feature (1293)..(1293): n is a, c, g, or t
  misc_feature (1297)..(1297): n is a, c, g, or t
  misc_feature (1338)..(1338): n is a, c, g, or t
  misc_feature (1401)..(1401): n is a, c, g, or t
  misc_feature (1418)..(1418): n is a, c, g, or t
  misc_feature (1439)..(1440): n is a, c, g, or t
  misc_feature (1446)..(1448): n is a, c, g, or t
  misc_feature (1497)..(1498): n is a, c, g, or t
  misc_feature (1500)..(1500): n is a, c, g, or t
  misc_feature (1515)..(1515): n is a, c, g, or t
  misc_feature (1524)..(1526): n is a, c, g, or t
  misc_feature (1534)..(1534): n is a, c, g, or t
  misc_feature (1538)..(1538): n is a, c, g, or t
  misc_feature (1557)..(1557): n is a, c, g, or t
  misc_feature (1569)..(1569): n is a, c, g, or t
  misc_feature (1575)..(1575): n is a, c, g, or t
  misc_feature (1584)..(1590): n is a, c, g, or t
  Peptide Sequence Number=SeqID_8389
  Probeset Number=SeqID_15368
agagtcggcgacggagggatagaggcggaggtgtggaaggatgtgttatattattaaggcancggatgtggacaaggtataatgagatagagatgagaaataaagtaagagtgtacgcaacacgcgtacggcgacgataggtacgagcgacgcgcgaagcgggnacggggtggcgttcacgacgcaggacanaatcagagtgggagggagaggagagtggagactgtgagcgttatgatggaggagagggaggctgagtgagatacgcattcgtatcacgcgagatcggcggcgtcgaagcagtgatagagaatatataaggaggcgtaggcaatggttagtagatattaatatgataggcagaagtgagagagggtaggtgaggttggtataaacatagaggtggagggtgatgtggnagtgtggagggaagggtcagtggaggggtgatggagggaagtgtttggttgatggacgagtccagtcattgttggcggcgcgtgtacgctagtacgtgtggacgncacagaacgattattgggatcgcagtgtggagagaggaagacgagtggtgtggtgagtgtatgtttatggtattaacgtcaatacatgacgacgagtcatacacacgaagcaatatgtatggatgtgtatgagagaccncaaataaatgatatggtgtctgtttatttataatttattttagagtagtgaggatctggagttctatacgtgaaccgcgctgcggtatagtgagtatggagtggtgtagagtgtggtgatgattctgttgtggttggtgtatatctgtacagtggatgattgatgtactaataatattgagagtgtagtagtttattgtgtgttgtggtgctgtggtgcttgctatgtgatggtccgagtagcgacaggtgtcaggtatcgtcggtgttgtcacgaggagtggtttatttaatgctgagtgtgtgagagatgaatggtatagtgggtggccaggaggtgagtgatgtgcggttgngtgcttcgtccgctcaagctgcccatcggcgtcagtgtgataggtaccggaggagatgaggaggatgatggcgtgtgttagtgtcgccctccatccgtgtgagctggcggtgtgtgccgggtggtatggtgagggtgtgggcgtgntggaggagagagagttggtaggtggaggtgaggagtgtgtgggggtgagagaggaaggagtagagtangtgtgtgaggtaagggtgagagagcctgacgtcgacaaaggggacagggagagtaagcgcnttgngaggaggaggagaagagccaatcgcagttgtataagtgcgnaacataattccaaactaaaacaaggaggggagtagatggagcgccccatgctctgtgattgcncggggtgggtgatgtgncaatgtcagtagtgtagtganngagggnnnggcgtggcacagagtgagcagcaggtataataaggtaagagagaagtgnngnggggggtgggggggnagagaagannnaaacagancaancaaagaaaagaccaaaccncacaaaaaaacncaaaanccaacaaannnnnnn

SEQ ID NO: 5590 - DNA, 470 bp, Glycine max
  Probeset Number=SeqID_15369
atcatggagcctcccgcttcttcttccatgggactcgcacgggccttggcggtgctggttctcatatgctcttccacggcggctcaaggtaaagtagctactctccggccggtcgtatctactcttttttctcctcgagaagcacgcagtaatattaatccaaggcccggctggccggcttgcttgcatgtagctgactcgggtcaatggcccggaacacgtgtgccacgaagccctccgccgccggttgcaccgggcggccccggtatgtttatcaagtgcgcggactgccgctccggtgccactccgacggccggccctgcaggcgttcccggacgtcgacagtgagacgcttgcgcgtgaagcaaaactatgcggcgacctcgctggagttctttgttgctggttctgtgttcccatgtgtttttcgtcattttgcttagtctcagcgtctgctagctggttgctca

SEQ ID NO: 5591 - DNA, 1454 bp, Glycine max
  misc_feature (46)..(46): n is a, c, g, or t
  misc_feature (921)..(921): n is a, c, g, or t
  misc_feature (1078)..(1078): n is a, c, g, or t
  misc_feature (1135)..(1135): n is a, c, g, or t
  misc_feature (1167)..(1167): n is a, c, g, or t
  misc_feature (1290)..(1290): n is a, c, g, or t
  misc_feature (1437)..(1437): n is a, c, g, or t
  misc_feature (1451)..(1451): n is a, c, g, or t
  misc_feature (1454)..(1454): n is a, c, g, or t
  Peptide Sequence Number=SeqID_8398
  Probeset Number=SeqID_15370
agggtggcccgctctctcataggtgggggtaaacaatggagatgancgaatcgggcgtgaaaagaaaactcacgcatacaaagtgagggggaataaccatcgcctgcggacacaaatacccatcgtaaccccctccctattccgatcaaagcgggacgaaatagatgtagatatgatcatgtacggacaaatatcgatgttaaatatgtggcgacggtgaccgccgttaatttgtcattaccgcaacaagacctgttattatacagaagggcaaacacagggggctatccggtaaggcggttatggtaaaccatatagatcgaatgggactctccgcgcactcccattataattcgttaaaccgtcaaatcgattttatattatatggagtgaatagaaaaaacagcgcaacagcacctataccacaggctgtttgtcgacatatgtgctcaactacaaacctacaatcccgcaacggagcgaaggatatttattatacaaccaatagcgtttcgtgcagagccttgatttcgaatttatactagatatcgtgtgtgggcatataacagccgcggcgtctattttttcaaccatccacgataaacacacagaagaccgtgtaagtgcacgccgcgcgcgcgtatatgttaacacctcctccggcgtgttcgtccccttttgtttttcattgttttactgacagccgcacatagtactatgtgttgtttgtatttataccacacctctagattattctccgctgcaccttatattatttttctgccattggtgcggtaagaatagcggcgaatctatgactcgcgcgtgtgtatatgtattcttcttatccgacgctgcgcgcgaattgagccgttgcccgaaccgccgtctaatagtcataatatgcgcgcagaacgaatnaatcttccctatattcgcttcttgcacacaatgcgcccgcattgtatatattatatcaccgatataacacgtgtgcgcgcgcttaatgtatgctgcacgccgctctattatataatataatatgttaccacaattcttttgcgccgaacacgccgcnacacatgtatacgcgcctcacgaccccgcgccgatagcaacagtcagatatatctanatcgcgtcggcacgacgcacaactgaagtatncggccatatactctagtctcgcggctgttcttataatgcgcgtgtaaaccaggtatcgctgcgtgtatatcgaaatactataccgccacggagcaacggcgcggcgagtacgatacacactanatggtcacgcacagagcagtgtattgtccgatgctatatcatactcgcacatgtacatgcctagatacgtcttcgctgctgtgcacagctgagttacgagtgcacaactgggtgtctggtgcactattaattgacgccagtcgacgnattatatcgctgtntan

SEQ ID NO: 5592 - DNA, 655 bp, Glycine max
  Probeset Number=SeqID_15371
tttccgggaggaatggaaggtaatctgctccgacgaggctggttctaaagggctgtgttacctactcttgaagatgcagagatccgaagctagggtattagtctatccattgaacattcactgcatcttgatcattacgcttgtgggaatctgtactctatgattatcccatgctgtggtgacctaacaggattgaagggcggtcacttcctcaggactgtacggataagtgcaaacgcagggtaatgttttctcagtgaatacacggtagatgaaccgtgttgtttacccccaagaaatataaccttccatttacccagtgtttcatccagagaagaactaaggtccccctcctttgaggagctccttaaatccttctgggatgcaaaatctccgaaacatgcaaatggtgatgttagatacattggggcatatgcaccccccccacccgtaagagattccagagttcctcttgtagccattgactagagcagtcaaaaactctgtaaatagcttattgctcaaatgtaattccatacaaagcacatattcatttattgtttattttggaaagagaaaagaagaaaaaacaaagtatctatgtggaggcagaaatatgtaaaagattacccttttttaattcaaaaaaaaaaaa

SEQ ID NO: 5593 - DNA, 677 bp, Glycine max
  misc_feature (570)..(570): n is a, c, g, or t
  misc_feature (587)..(587): n is a, c, g, or t
  misc_feature (634)..(634): n is a, c, g, or t
  misc_feature (637)..(637): n is a, c, g, or t
  misc_feature (664)..(664): n is a, c, g, or t
  misc_feature (677)..(677): n is a, c, g, or t
  Peptide Sequence Number=SeqID_8399
  Probeset Number=SeqID_15372
tcagctacgtaggccccccccccagatcaaacattcgatcgctgattacaatagtctaaacacaatcatctggctaaacattttctggtttttccttttaactgtgaattgtttccttgcaatatttgcatctaataacgcactagagctaccattttatctagtcacattcagtttccttgtgaattcggtttatctattcacaggttattgcttgttgaacagtagagttagatataatataagaactattttaagaagactacaaaataagagcatgtctaatgaaagtcttaatcaaacgaaaacatccgttttaatgcataatagtaagagctatatgtcacaaacactttcttcgccaactaccactaaacagcttgatctagttgatcaagcatttcctggttctaatttgcaaacaaagttttcaaattcacaacagcaaatcagcggctctagaatgttgaacaaatcagcagcgtacgatttttcaaccaatttcgactcatcaactaccacaacgacaagtcattcgaatatgagtaaacatcatcatagacgaagacntagaaagaagagcagtntgaatgatttgaatagcacaatggataattatatagatccatatggnggnattgattatgataatgatgaacaaaantgatgatatctan

SEQ ID NO: 5594 - DNA, 1797 bp, Glycine max
  misc_feature (17)..(17): n is a, c, g, or t
  misc_feature (24)..(24): n is a, c, g, or t
  misc_feature (35)..(35): n is a, c, g, or t
  misc_feature (90)..(90): n is a, c, g, or t
  misc_feature (217)..(217): n is a, c, g, or t
  misc_feature (226)..(226): n is a, c, g, or t
  misc_feature (240)..(240): n is a, c, g, or t
  misc_feature (301)..(301): n is a, c, g, or t
  misc_feature (363)..(363): n is a, c, g, or t
  misc_feature (422)..(422): n is a, c, g, or t
  misc_feature (453)..(453): n is a, c, g, or t
  misc_feature (550)..(550): n is a, c, g, or t
  misc_feature (791)..(791): n is a, c, g, or t
  misc_feature (1301)..(1301): n is a, c, g, or t
  misc_feature (1438)..(1438): n is a, c, g, or t
  misc_feature (1520)..(1520): n is a, c, g, or t
  misc_feature (1667)..(1667): n is a, c, g, or t
  misc_feature (1717)..(1717): n is a, c, g, or t
  misc_feature (1762)..(1762): n is a, c, g, or t
  Probeset Number=SeqID_15373
ccaaggtaagcatactngctaacncgtatacgtgnataccatttcgcacggttcatatcctcggtactcgtgggcgcagtcgcacatcantacatgctatatatgctcgccatctttgacacgtcgaatgcatagtacagatcgttagtgatacatctatcagctcttgatcacatggactacgatacgttacgtgccaccggccaattgcgttagnacgtcccgncatatgtccgcgtnctctgtatcgtcgacgtaccgactgatctatgtcaatagtagtctgtggcttaatacgganatatgcgtgtatgttatgacatattctgcacgatgtgtctatgagatctcgcgttatatacngcgtcggagagacgcacacgagacaccagatatgtggatcgtctgtcacagtacgcgcnttcaatatgaactatgatgtatctgtctctngtattatgttcttaaatatatagcgagaagacagtgggtgataatattataatatatattaatgatgagcatatcgatagttaactcatagatgtgngatgcgcacaccgtctcatcgcgtatacaaataatctcgcacgcattcatacgtcggtagcactcgtcattacgcgctaatctactcccgcatgtaatgaattgatgatcgatcactgagcgatacactcgtgatgtggcagtgatatagcgcgtagtgacactcgatcactacctaactactctgtattagatgtcacgagtcgtgtccgcgatatcacacatcaatatatatgctacantcatctgatgcggcatgtctgcgaatgtggtgatagtgtttactgttctgcgcgacgtcgatgcgcggattacttattggcacgattagatatctcgcataccgtgcgagagtctcaatactctatcgccggatataacatacatatcatatatattatgctgtcgcaatgtcgtgtacaatgtgatctacttcatcgctcaatcgcactgcacggtgggcttattacctactgtaatttacgtacttcactcaccggccgcgtgtctcgcgcgatgacgtatagtgtcgcatggtttatattctttgctataatgtgatagtgtagatatgtagatcggtgtcgtgtaggctgctcgggtcgattatatagatattagttatatgggtagtatctgcgctgggtgtgctggttcagcgtgatgcgcctttatatatagcttgtagagatacagtatggataatagcatacttcgcaaggcgccgagagtggtagagtgtattacggtangtaagtatagctgcgagagccgcggataaatgattcatcgttcttgtataaatagagaacacgagtgtggttatctctcaagttagcccatagctctatacagtaccttataacaggtcatcgcccctctccacagnacaactataaatatatattccgacatcccaagttccgtgacgagctgttattctttgcggagtgcgatatacacaatacctntacatatctctgtctgtgcgagtgtagtggcaactcgcggtcttagtctgtgctctatatactgtacttgttgataccgtggaagatatacgctctgttagtccacagtactactccgcgatctgtgatggcggaaaatgagatcanaatactcgctgccgcgcggccaaattaattttaggtttgtcgacggtttnatatttttctgttatatttgtaatattaagcctgtcgcagacganatcatacataccgcaatatctgttatttctgtgtc

SEQ ID NO: 5595 - DNA, 1772 bp, Glycine max
  misc_feature (12)..(14): n is a, c, g, or t
  misc_feature (16)..(20): n is a, c, g, or t
  misc_feature (31)..(31): n is a, c, g, or t
  misc_feature (53)..(53): n is a, c, g, or t
  misc_feature (73)..(73): n is a, c, g, or t
  misc_feature (102)..(102): n is a, c, g, or t
  misc_feature (380)..(380): n is a, c, g, or t
  misc_feature (396)..(396): n is a, c, g, or t
  misc_feature (507)..(507): n is a, c, g, or t
  misc_feature (673)..(673): n is a, c, g, or t
  misc_feature (688)..(689): n is a, c, g, or t
  misc_feature (752)..(752): n is a, c, g, or t
  misc_feature (851)..(851): n is a, c, g, or t
  misc_feature (923)..(923): n is a, c, g, or t
  misc_feature (1144)..(1144): n is a, c, g, or t
  misc_feature (1161)..(1161): n is a, c, g, or t
  misc_feature (1197)..(1197): n is a, c, g, or t
  misc_feature (1295)..(1295): n is a, c, g, or t
  misc_feature (1307)..(1307): n is a, c, g, or t
  misc_feature (1330)..(1330): n is a, c, g, or t
  misc_feature (1449)..(1449): n is a, c, g, or t
  misc_feature (1497)..(1497): n is a, c, g, or t
  misc_feature (1533)..(1533): n is a, c, g, or t
  misc_feature (1550)..(1550): n is a, c, g, or t
  misc_feature (1597)..(1597): n is a, c, g, or t
  misc_feature (1619)..(1619): n is a, c, g, or t
  misc_feature (1631)..(1631): n is a, c, g, or t
  misc_feature (1638)..(1638): n is a, c, g, or t
  misc_feature (1664)..(1664): n is a, c, g, or t
  misc_feature (1667)..(1667): n is a, c, g, or t
  misc_feature (1698)..(1698): n is a, c, g, or t
  misc_feature (1731)..(1731): n is a, c, g, or t
  misc_feature (1772)..(1772): n is a, c, g, or t
  Peptide Sequence Number=SeqID_8400
  Probeset Number=SeqID_15374
ttttttttattnnntnnnnnttttttttcgnactttttgtgcttccgtgctcncctgctgtcgctgccgagcngccgcggccgagtagatccgcgggtgtgngcgcgacgattatgacgtgtgctgtgtggtactgtgcgagtagcacctcgaacccaacatgtagcgtctgagacaacgacgacgcgcacgagacgaagagcgagctaccctttctgcgacgcccgcgccggaggcgggggcgacaacgctgacaccatagcgagcgcgcaggcgatgcgcgagtgacagaatgtcaagtgcgcggcgtctgacagagtggcatgtggtgaatggacagaatcacactcgcttatatgtctatcgctcgatgtgtattnctagagttacgaatanagagtaattacactagcagcccgtatattcgaccacacatggatggcacacacacgatcatcccatgtatccacactatcaccaacatacacacctcagcgtgttatacanaccacagacatatcgactacacaacatcaacacgatatacatataatattcatgcatatacatattatatccatcctatgtatctatcatatactcatatcaatctatacgttatatcattcactcaactcattactcttctatcctcccactcaccaatctacancgtcatcacctcctnnccctcttccgcaccagacttacacccacgatatgactacagcgtgtctcgccgcgcactgccncagctcatctcgacatacacatgttgttctactgtatcggtgccgtctgactcgtcataatctacatgagtgagctaccatcgggcgcgcttagcatcntaccacatcgcatgatcagtcagtatgacagcgtgagcgccgtgtatctacgtgacgtaagagtcaccaccnctctctcaattaaccactcgcagatgcgagctcgttatcgctgcgtgactgcgtcactcaaatgccacgactacgcacactacactcgcgccgggcgcactctatatcacatatatatgctatattacgtctgtcagcatctcgtgcctgcgcgcgacatgccggcgcctcgtactactactcatcgcactctgtactatatatgtatgttgtaccgcacncgctacatattaccacnccgcgtgacacgcgcgctagtcgtacgtcgtgcgangttagtatcatacataaccggcgcatactcatatctcctaaatagtatctcgaaatatcatctatcatccacgtaccggtgccacgctgacgagcganacatactatgcnagatgatggaagtgattaccctncacgacgagatgacacaatgtatacacgaacactaaatgtctactgacattatatctacctacccaccgctacatagacgctggttgtcgcggctcatgctatcacatcatcactacgntagcacgattagcgaccacgccagcacactccatatatcgagaagctngcttcgcgctaccaacactgcactccgtcctcgctncacgtctgcgtatactngtcgtgtcccacacacgactcattctacactacagtactattctctncatgcagatcacctgctgatancgtgatcagtanctcgtgntacacgagtacgttagcggcagatantgntgtctgacgcgagtgatatgtagtcgtacangatgctactacctatccctacgtcgcgagtaancgtatatactacgactatccactacgtcacataactaacgn

SEQ ID NO: 5596 - DNA, 1584 bp, Glycine max
  misc_feature (118)..(118): n is a, c, g, or t
  misc_feature (158)..(158): n is a, c, g, or t
  misc_feature (195)..(195): n is a, c, g, or t
  misc_feature (213)..(213): n is a, c, g, or t
  misc_feature (266)..(266): n is a, c, g, or t
  misc_feature (301)..(301): n is a, c, g, or t
  misc_feature (311)..(311): n is a, c, g, or t
  misc_feature (315)..(315): n is a, c, g, or t
  misc_feature (586)..(586): n is a, c, g, or t
  misc_feature (652)..(652): n is a, c, g, or t
  misc_feature (915)..(915): n is a, c, g, or t
  Probeset Number=SeqID_15375
cgcgcaggcgaatatgatgtagctatactcacgctacggctggtgtgtgtacagatgacgcgcgctcacttctatactcgcgcggacgtgagtaggctcgtgcttcgactgactatancgcgacgcatgtgatgacgagtataatacgtagtagctanggcgacttctccgaactatagtacaccgtgctacacngcatctcgacgtctagancgtcgtgttataattcgcacacggttgtgtgtctatcatagacgcatgagtgngagatgtgtgtcataccctatcagtgtgtttgtgntattaacatntcgnacgatacgtgtatatcactctctatgatatgcattcccgtttgagacgctatatttcgaatgtgtatatatatagcggcagtgaaggtatatatagatacgcgagacaaacgtcgtgtgcgcttaggtcgtgatctatacataccacattatgacgcagaacgttatttgagcacgagtctcgttgcgacggaggtcattatggcagacggcgtgaaggactactctagtacacaatagattacgtactgaattgtgagagaaatgcgatnggtcttctacgcggatgtgacggagacgaatatgaggagacagctattaaccggcgatgaatacantagttctagcacaagaagatgatatctcggtgtggtggtgggtcgtacacataataatatgcaatcataatgcggatgagccgcactagtcaacacataatataccgtacgtatagcgcgagtttacaaattaaaagcagcatatacccatgacaacactccgatcatacgcgatacacaatgtgaccagggaaggtgggtatactatataagagtgtatcccgaaggcgacagcatactatatatgtgatgcgctcatttantatctatttcgtgctatgcggccacctaaccgctctcgctatttatgggtggatgttgttatattccacgaggtatacattagggaactgaaggatccagtgcataatgtctcaccaacatctgtatttagctatcctcccaatagatagaaacagttcgagtagtacaacgcgagaggtagcagtgcgagatagcattagctgctgttatgattgtaatatgctgacgtaggcgcggcctaggtaaatatatactaattatatccatgaccgtccgcgtctgtcgcgctagttctcgcttaggtatagttgcgtacctataatgcaataactcttactcgaccgtccaggacgcgatgcagtccattccgtggagtgtcgccgggacgacgccgtcgcaacgacgctcgtcctcatgtcatcaaactacactaagttttctatgcggatctctgatgttcgtttacgtccatctctcctcacagtatctattggtgggagcgagggcaaccacacacgtagacatcatgctcccagctgagaagggggggcggcctctatcgtcctcaatcttattgtcggtagagtgatatattagcgctgatagagcaatgagcgaagatatatatagaagagaaggacgcgctaagtcgatgcggtcgcgtactc

SEQ ID NO: 5597 - DNA, 1530 bp, Glycine max
  misc_feature (15)..(15): n is a, c, g, or t
  misc_feature (62)..(69): n is a, c, g, or t
  misc_feature (74)..(74): n is a, c, g, or t
  misc_feature (76)..(76): n is a, c, g, or t
  misc_feature (79)..(80): n is a, c, g, or t
  misc_feature (89)..(89): n is a, c, g, or t
  misc_feature (103)..(103): n is a, c, g, or t
  misc_feature (105)..(106): n is a, c, g, or t
  misc_feature (108)..(109): n is a, c, g, or t
  misc_feature (113)..(114): n is a, c, g, or t
  misc_feature (120)..(120): n is a, c, g, or t
  misc_feature (337)..(337): n is a, c, g, or t
  misc_feature (511)..(511): n is a, c, g, or t
  misc_feature (749)..(749): n is a, c, g, or t
  misc_feature (874)..(874): n is a, c, g, or t
  misc_feature (877)..(877): n is a, c, g, or t
  misc_feature (882)..(882): n is a, c, g, or t
  misc_feature (953)..(953): n is a, c, g, or t
  misc_feature (981)..(981): n is a, c, g, or t
  misc_feature (1106)..(1106): n is a, c, g, or t
  misc_feature (1130)..(1130): n is a, c, g, or t
  misc_feature (1149)..(1149): n is a, c, g, or t
  misc_feature (1243)..(1243): n is a, c, g, or t
  misc_feature (1303)..(1303): n is a, c, g, or t
  misc_feature (1435)..(1435): n is a, c, g, or t
  misc_feature (1446)..(1446): n is a, c, g, or t
  Peptide Sequence Number=SeqID_8401
  Probeset Number=SeqID_15376
tttttgttttgtttngtgctctgtttgtcgtggcgtgctgcgcgtccggccgccgcccgaannnnnnnngtgtntnttnnccccccccnccccgtgacattcncnncnnaagnnataatncacctctacccaagcttgcgtggctgcctcgctcatccacaagaaatatgagagtagtgagatgcccacccgcgacgaggacgagaggagggagagagaggctatgctatagtgtattggtttattcgcttctgttactcagctctcggcagcgtatcagatcaagatgatctgctggctgtcgtttttgcgctccgactctgccttgtagtagccngttgtggggagcgctctcgcgggcgggcgctgcctctatattctctctatcattctcatctctacactctggctgctcgcgcctcccactccgtcagaccgctccgctcaccctctcggagcggtcatgtgtgggtgcggctatctactgcgtgtgtggtaggtgtgtcgtgcngcgtgccagccgtagtggcttgactgtatagttcattgtacatatctatgcattatgtagccttcatagttcagtgtgggctgtcactcccaacccacgctgcttcccttcgtagcgtgctctacctacagtagcgctccctcctgcacgcctgtgtgctactatatgactacatcggacggaccctaccataagataattattatgtgatacaaattcacaatactacactactagngaaaatgaaataatacaggcgacatatctatcgatgacttacacgtcctcttctacttatcacattccactataggctatacaaatactaacactgatagctctgaggggtcggtgatgtggagnaanacgcngctacgcagtggtacagtcttgttgtgcgccatgtctggtggcggagaatggcatgctgttggtaatcacncaccccacccccaccgctcgccgcgcgngacgctagccgacggagcgaacacactataccgcactccaatcacacaccgcggagccgctacctcacacatcctccgagcactctcgctcgtctccactgctcatcctcctctctctgcggcgncctgtcgctaccatctcactatcnctcgtcacctcaacatcanactatctaggacgtgtgtgagcacacctaccgcactccaccgccagcgcgcgggccggaggcagatgatccgcctccatccacaatagagcctntgtgggcgatgagctatcccgactcactcacttgctcggctcgtcttgatatcgatgctntgatctgagtgtcgggcctgtgcgcaggtgctgtccgtctaccagctcgacatacggtgtcaacatttctgtgaagcatgtcactgtgttgtagtgttcttgttatcatgcacgaggattagctcgcgcgtnctcgcccgctngctcgtgaactctacgtaccgccgtatgacagcgcgcactctatcgtctctgctatcagcgctgtgaatgttgcccgtacagtg

SEQ ID NO: 5598 - DNA, 1666 bp, Glycine max
  misc_feature (22)..(23): n is a, c, g, or t
  misc_feature (26)..(26): n is a, c, g, or t
  misc_feature (28)..(29): n is a, c, g, or t
  misc_feature (33)..(33): n is a, c, g, or t
  misc_feature (35)..(35): n is a, c, g, or t
  misc_feature (67)..(68): n is a, c, g, or t
  misc_feature (73)..(73): n is a, c, g, or t
  misc_feature (75)..(75): n is a, c, g, or t
  misc_feature (77)..(80): n is a, c, g, or t
  misc_feature (84)..(84): n is a, c, g, or t
  misc_feature (86)..(86): n is a, c, g, or t
  misc_feature (89)..(91): n is a, c, g, or t
  misc_feature (93)..(94): n is a, c, g, or t
  misc_feature (114)..(114): n is a, c, g, or t
  misc_feature (170)..(170): n is a, c, g, or t
  misc_feature (189)..(189): n is a, c, g, or t
  misc_feature (193)..(193): n is a, c, g, or t
  misc_feature (234)..(234): n is a, c, g, or t
  misc_feature (252)..(252): n is a, c, g, or t
  misc_feature (298)..(298): n is a, c, g, or t
  misc_feature (347)..(347): n is a, c, g, or t
  misc_feature (350)..(350): n is a, c, g, or t
  misc_feature (360)..(360): n is a, c, g, or t
  misc_feature (369)..(369): n is a, c, g, or t
  misc_feature (391)..(391): n is a, c, g, or t
  misc_feature (397)..(397): n is a, c, g, or t
  misc_feature (400)..(400): n is a, c, g, or t
  misc_feature (424)..(425): n is a, c, g, or t
  misc_feature (433)..(433): n is a, c, g, or t
  misc_feature (554)..(554): n is a, c, g, or t
  misc_feature (618)..(618): n is a, c, g, or t
  misc_feature (640)..(640): n is a, c, g, or t
  misc_feature (654)..(654): n is a, c, g, or t
  misc_feature (658)..(658): n is a, c, g, or t
  misc_feature (660)..(660): n is a, c, g, or t
  misc_feature (703)..(703): n is a, c, g, or t
  misc_feature (854)..(854): n is a, c, g, or t
  misc_feature (893)..(893): n is a, c, g, or t
  misc_feature (975)..(975): n is a, c, g, or t
  misc_feature (1197)..(1197): n is a, c, g, or t
  misc_feature (1231)..(1231): n is a, c, g, or t
  misc_feature (1260)..(1260): n is a, c, g, or t
  misc_feature (1282)..(1282): n is a, c, g, or t
  misc_feature (1329)..(1329): n is a, c, g, or t
  misc_feature (1333)..(1333): n is a, c, g, or t
  misc_feature (1414)..(1414): n is a, c, g, or t
  misc_feature (1519)..(1519): n is a, c, g, or t
  misc_feature (1533)..(1533): n is a, c, g, or t
  misc_feature (1578)..(1578): n is a, c, g, or t
  misc_feature (1592)..(1592): n is a, c, g, or t
  misc_feature (1602)..(1602): n is a, c, g, or t
  misc_feature (1608)..(1608): n is a, c, g, or t
  Probeset Number=SeqID_15377
tatgtgttgttgggcttccctnnttncnncctntnctctgtcggtagtcgtcgctgtcttcctgccnntttgngnannnngggngngcnnnanntctacctacagagaggaggngtaatcatagtagtgctcccctctctactctatagacgcgcgatagagtgataatnagatatatgggtctctctnaccnctctcatcgtatctctggcagtccgcatctataacacactnacaccccacacaagagcntgtctatctcatcctcacttcgctagctgcgccagacacatcacanatcgtagctagattccaagctatattaatttagtaatcttaatagtccntanctattaattnattatatcnagatgataataatacagtaatntagctncantcccggttagtgtgtctgtctagnntgtcgtgnttttttactgcagaacactcgacatatcatcagcagaacagaacatcgacatctatatagatcagtatattctgttatgtttgatagatttatctataaatttacattaatgtatatgaangagcagaacaagccgacttcagtagtcgacgtagtgcattggagtccacgtcctgcagcactcncccaagcctccccaagccacgncacgctcgccgcgncgantnccacgcgtatgtacccgttgctcgacttagccgtcatgttctngacataatgctgtaaccataccaacctattattcacctcatagcaattagagaatcgcgtcgcacgacctaagctcgatactgccatatactcctgctgtccgaggctctgttagtgagatatggcgacgcagcaccaaccgactgtctanttcctgagttacttctcatagtcatgtgtaagtgatcgncttcagatcatactcctcttgcagtctatagtgtgtctattcgcccgctacctcagactttcggtgtgcgcgcgttacgagngggtgacactgctctcccctcgactgctgcgctgatggtcctccgtaggcatcggcactcctgcgcgcgcatctctcgtcgcatgtggtattttaatgtatcatctctcatctcaccgcgcgcgcagagtgtgtgtatagcgcgtcgcgtgcgatcactaagatgctctggtagcagcgaactctgacacgtacgctcgctacgtgctccggctcctcgacncgacacacccacaccacagcccaactctcaccantgccttaagcacaacgcgacacacgacanaggtcattctcacgtatctatnacctctcacgcgacacgactcctctctctgtgcgtagttagtgtctnactnctatcatagatcccatacggctactgcacgagagctacgtacctacgagcgcgcgcgcgcacgcagctgagcagtatgatncatatagtctatcgtgcccttatgaccactatctctctctctctgtgtccctgtgcgctctagtactacgctctgacccttctctcacacaccgcacatcagcancttcgcgccgtacncttcgctggcactgtctaccgtcgatcatgtgatatcagtaatgnctctgtacagtgtngatcagcccnaccctnaccactactcatcatcatcatcatctagctattactcttctacttcgatctctcactg

SEQ ID NO: 5599 - DNA, 374 bp, Glycine max
  misc_feature (344)..(344): n is a, c, g, or t
  Peptide Sequence Number=SeqID_8402
  Probeset Number=SeqID_15378
ggggggggtgtgtctttttgctctcggtatgtttggcgatgacggggtgtggtactaagagggcccaacattctcttcaatacatcgtattctccaacgatcaccaggaatccgtgcctcctccggccgctgtaaaatgaggcgcgttggctctcctctctgtcatcggtatctcactcgcgattacgtgcagcggacccccccccccagaaaaaaaattgtccagcgcctcaggggcaggccaaggtgtgtctctgggagtgctcaatctggcaagtgtcataccccagatggtggtgtctgtgataagtgggccatgggatgctctatttggaggtggtaanttttcagcgcccctgacagtggggtgaaag

SEQ ID NO: 5600 - DNA, 456 bp, Glycine max
  Peptide Sequence Number=SeqID_8403
  Probeset Number=SeqID_15379
acactcccctgcgagcctcgtcctggacaagtgcatcctctcccgcggacctctccctctccggctcgtctccagcaacatgttcgcaaaggcgctggtactagccgccgcggtctgcggcgcgctctccttccccctcgagtacccgggcgccctgtactcgcagtaccacgcgcaggacgagctgggccagtacaccttcggctactccgggccgggcgccaccaagcacgagaccaagacggcggacggcgtcacccgcggctcgtactcgtacgtcgacgccaacggtcagctgcagacacggacctacacggcggacgacgtccacggattccgcgtggccgctagcgacctccccgttgggccctcctccgcgtcctacccgtcgtaccagtccccccagctgccgtccgcgcagctgccgtcctggcagcacgctgcccccgccagata

SEQ ID NO: 5601 - DNA, 1533 bp, Glycine max
  misc_feature (17)..(17): n is a, c, g, or t
  misc_feature (47)..(47): n is a, c, g, or t
  misc_feature (53)..(54): n is a, c, g, or t
  misc_feature (178)..(178): n is a, c, g, or t
  misc_feature (567)..(567): n is a, c, g, or t
  misc_feature (1107)..(1107): n is a, c, g, or t
  misc_feature (1143)..(1143): n is a, c, g, or t
  misc_feature (1485)..(1485): n is a, c, g, or t
  misc_feature (1533)..(1533): n is a, c, g, or t
  Peptide Sequence Number=SeqID_8404
  Probeset Number=SeqID_15380
ctcttaccctcaccctncctctttacgccccttatcttaataattantatttnncctctcatatccgatatatgggttaccgcgctctcccccactcgtaggtatgtattacgcaacgactcacacccccgccatactatttctatctttctctccctgtcccccgccatcacatggncaggcaccacgcctctacctcgcccttccgtcgctcctgacattgttattcaccacttgcagagcacccagcatcccctgtgaagtctcatctacctatacccgctagtatcgctagaaacatctgcacgcagagcgcaaaaatccttccctcgacaattatattcgaatttctctttccgctataaataatcgtcaccactcttctgtagtgtagtagcaccatcgtccatgtacctctaccatacaccgttactcggtacgcactactgaaccgcgtactctctgtcccccatcgctctgccaactcttacttatcctctgtgctcctccactcccagatacttgttctttctcccctatctgcgtatccacttttcatgtcgctcnaatactattctgaatacacatattatactacactctaataacacactgcgactcacttcccctccccgtcttccacttactagcaactctccactagccattctttgtcctttatattttggatactcgctacctaccctcctactatagaatgcgctagccgctacccctaggtaccgccaacaaactccgggctcatttatatacttccccgagtaccacttcggatattaatctcttcttacataccggcttttattctaatcggcctactctcaatatcactcttctatgcccacaactaatgttcacttgtcattttttggttcctcacaccccaccccatacgcacactccggaaacctaattctcgcgcactcacttcttctgttcatatgagcctttcttaactactctcagcatctcctcctacaaatatactccttccttcacaccgcgactttcagcgcaccacacccctctctttctcttttacagtattcttctactctctcccttagtcataatctcctcattatnctctacacttctccatactttacaacacgcaactcngccaccatatatgattctatcatatctctctgctcgcgctcccttctcatatggcttcctctctggtaccacgcccacactgtgtgcggttctcttgttatgtagcacgcctctccccgctacatcgcttgctcctcaacttcgagcgtcgttgtacactatctctcactccacgatattgcccaccgcactcatgacttgacggcatcacatgattcacttatccactcacacgcccctattattatatatcgtgcgctctgttccaatacagtggtgcgcagttatcatcttctctcacatctcacacacacaatgcgtcactgtgcattcactatcaantgtcctgtctctatcacactatctaacttctcatatcctgctcaactn

SEQ ID NO: 5602 - DNA, 2164 bp, Glycine max
  misc_feature (8)..(8): n is a, c, g, or t
  misc_feature (16)..(17): n is a, c, g, or t
  misc_feature (22)..(24): n is a, c, g, or t
  misc_feature (36)..(36): n is a, c, g, or t
  misc_feature (38)..(39): n is a, c, g, or t
  misc_feature (42)..(61): n is a, c, g, or t
  misc_feature (63)..(63): n is a, c, g, or t
  misc_feature (66)..(66): n is a, c, g, or t
  misc_feature (70)..(71): n is a, c, g, or t
  misc_feature (80)..(82): n is a, c, g, or t
  misc_feature (84)..(85): n is a, c, g, or t
  misc_feature (90)..(93): n is a, c, g, or t
  misc_feature (95)..(97): n is a, c, g, or t
  misc_feature (99)..(103): n is a, c, g, or t
  misc_feature (105)..(107): n is a, c, g, or t
  misc_feature (127)..(127): n is a, c, g, or t
  misc_feature (129)..(129): n is a, c, g, or t
  misc_feature (136)..(139): n is a, c, g, or t
  misc_feature (141)..(142): n is a, c, g, or t
  misc_feature (150)..(150): n is a, c, g, or t
  misc_feature (157)..(157): n is a, c, g, or t
  misc_feature (171)..(172): n is a, c, g, or t
  misc_feature (205)..(205): n is a, c, g, or t
  misc_feature (210)..(210): n is a, c, g, or t
  misc_feature (218)..(218): n is a, c, g, or t
  misc_feature (255)..(255): n is a, c, g, or t
  misc_feature (257)..(257): n is a, c, g, or t
  misc_feature (264)..(264): n is a, c, g, or t
  misc_feature (268)..(268): n is a, c, g, or t
  misc_feature (270)..(271): n is a, c, g, or t
  misc_feature (296)..(296): n is a, c, g, or t
  misc_feature (300)..(300): n is a, c, g, or t
  misc_feature (306)..(307): n is a, c, g, or t
  misc_feature (316)..(317): n is a, c, g, or t
  misc_feature (323)..(323): n is a, c, g, or t
  misc_feature (326)..(327): n is a, c, g, or t
  misc_feature (329)..(329): n is a, c, g, or t
  misc_feature (361)..(361): n is a, c, g, or t
  misc_feature (366)..(366): n is a, c, g, or t
  misc_feature (427)..(427): n is a, c, g, or t
  misc_feature (431)..(431): n is a, c, g, or t
  misc_feature (434)..(434): n is a, c, g, or t
  misc_feature (437)..(438): n is a, c, g, or t
  misc_feature (440)..(440): n is a, c, g, or t
  misc_feature (442)..(442): n is a, c, g, or t
  misc_feature (454)..(454): n is a, c, g, or t
  misc_feature (467)..(467): n is a, c, g, or t
  misc_feature (469)..(469): n is a, c, g, or t
  misc_feature (480)..(480): n is a, c, g, or t
  misc_feature (482)..(483): n is a, c, g, or t
  misc_feature (486)..(486): n is a, c, g, or t
  misc_feature (525)..(525): n is a, c, g, or t
  misc_feature (541)..(541): n is a, c, g, or t
  misc_feature (555)..(555): n is a, c, g, or t
  misc_feature (558)..(558): n is a, c, g, or t
  misc_feature (585)..(585): n is a, c, g, or t
  misc_feature (592)..(592): n is a, c, g, or t
  misc_feature (607)..(607): n is a, c, g, or t
  misc_feature (609)..(609): n is a, c, g, or t
  misc_feature (615)..(615): n is a, c, g, or t
  misc_feature (632)..(632): n is a, c, g, or t
  misc_feature (650)..(650): n is a, c, g, or t
  misc_feature (658)..(658): n is a, c, g, or t
  misc_feature (662)..(662): n is a, c, g, or t
  misc_feature (710)..(710): n is a, c, g, or t
  misc_feature (715)..(715): n is a, c, g, or t
  misc_feature (720)..(720): n is a, c, g, or t
  misc_feature (737)..(737): n is a, c, g, or t
  misc_feature (745)..(745): n is a, c, g, or t
  misc_feature (894)..(894): n is a, c, g, or t
  misc_feature (905)..(905): n is a, c, g, or t
  misc_feature (965)..(965): n is a, c, g, or t
  misc_feature (980)..(980): n is a, c, g, or t
  misc_feature (982)..(983): n is a, c, g, or t
  misc_feature (1039)..(1039): n is a, c, g, or t
  misc_feature (1072)..(1072): n is a, c, g, or t
  misc_feature (1114)..(1114): n is a, c, g, or t
  misc_feature (1124)..(1124): n is a, c, g, or t
  misc_feature (1126)..(1126): n is a, c, g, or t
  misc_feature (1128)..(1128): n is a, c, g, or t
  misc_feature (1184)..(1184): n is a, c, g, or t
  misc_feature (1271)..(1271): n is a, c, g, or t
  misc_feature (1299)..(1299): n is a, c, g, or t
  misc_feature (1307)..(1307): n is a, c, g, or t
  misc_feature (1312)..(1312): n is a, c, g, or t
  misc_feature (1328)..(1328): n is a, c, g, or t
  misc_feature (1374)..(1374): n is a, c, g, or t
  misc_feature (1429)..(1429): n is a, c, g, or t
  misc_feature (1460)..(1460): n is a, c, g, or t
  misc_feature (1464)..(1464): n is a, c, g, or t
  misc_feature (1486)..(1486): n is a, c, g, or t
  misc_feature (1599)..(1599): n is a, c, g, or t
  misc_feature (1667)..(1667): n is a, c, g, or t
  misc_feature (1681)..(1681): n is a, c, g, or t
  misc_feature (1762)..(1762): n is a, c, g, or t
  misc_feature (1833)..(1833): n is a, c, g, or t
  misc_feature (1835)..(1835): n is a, c, g, or t
  misc_feature (1850)..(1850): n is a, c, g, or t
  misc_feature (1858)..(1858): n is a, c, g, or t
  misc_feature (1884)..(1884): n is a, c, g, or t
  misc_feature (1898)..(1898): n is a, c, g, or t
  misc_feature (1981)..(1981): n is a, c, g, or t
  misc_feature (1996)..(1997): n is a, c, g, or t
  misc_feature (2036)..(2036): n is a, c, g, or t
  misc_feature (2071)..(2071): n is a, c, g, or t
  misc_feature (2081)..(2081): n is a, c, g, or t
  misc_feature (2101)..(2101): n is a, c, g, or t
  misc_feature (2104)..(2105): n is a, c, g, or t
  misc_feature (2122)..(2122): n is a, c, g, or t
  Probeset Number=SeqID_15381
tttttttncccctccnnccccnnncccccccccccncnnccnnnnnnnnnnnnnnnnnnnngntantttnnttgggtttnnntnngacannnncnnncnnnnntnnnaacccacaccccccgccacnangtcgacnnnnannatacgaangcgaganctgggattgacacnngttgtctagctgcatatcgtgaggaagcgccgnccgcnggcgcacncacgatgcacctacaacaccgacgcacaccccctcancncctcagnagangnngaatggaggaggagaggagagagtngacnacgaanncaaacgggnngtcganacnnangcaacacacacgccagcgacgcagcgcgaagngatgnatgtatgtgtgagtgcgatgccgtgcgacagggaatagcactgctgggcgatgtcacgtanctcncanctnncncntcgtcctcttgntttctatctctcncnctatatcactntnnctntttataccccccgctcctcattcattactgtttttgcantgctattactttcatnatataagtatgtanctntatacttattatatataacgtaatacntgtcatngttatgcgtactgantnaagaantttactctctcatacangacaccacgacgaggagngagaaagnaaanttaagatgctcagagactgcacttctgtctctcgtgctaatcactccncgcgnagctntcgtattagcactgcantactgttntctatagtcttgtagagtctctatttatcttgatgcgctcaccacttctccatatgatgtatgtgcgcttattgcatgctgtgctgctgtgcgtacacgttatgtctactacctcatcactctgtgtgcatcactgcgtctctctgatncggcatcaccnccgctcttgtctcgtctgtgtcgtgtactcttatttattaatagtatactgtaatgattntatgatatttcattnannttatgttagcgtgtctgtactacatctctgactagagattcatacatatactacantgacagaatactaactattctctatttgttctncatgttatctcgatggtgccagatctagcctgtcactagtangtgatgtgtncnanagaggagtagagcgagagaatcgaaggagacgctcagagtgtggatatcagtgagnctcgagtacagtaccaccatgatgacgatcgtacgcgaatgcatgacattgcgcatgctggaccgaacgcgagaccgcgcgacctcnactgcatccctatctggtgactacatangtcgcacncgcgncatcgacacgaatagnagcgatgaacacacgcacgacacaactgacggtgtaggtgaacggnagatatgatgtaatagaaatctatcgatgtgtgctacctacattctgatcgctanacacacacgactattatgtggataatactanatgnatagataatgaactaggtagangcatagagcacactatacgaggtacgtcgctcgtatgagttctgtcgtcatagtcgtgcgttgtgatatgactacagtgtatgcgtcgtactactcgctacatagagcactcncgcacatggcgtgcatcgaactgcacatgtgacgagctatgagtatatgatgtgcgaccgtctgactnagcttctgtctgtnatgtctcgttatctgcacactacacttctcgtcctcgtactgcatctacatgtctctctgtgtagacgtgctagaacgacncgtacgagatgagagtctatacacgcatcaatcgagcgcacaaccgattatctctactatactacatctgngngatggtttatagacntgatttcncagatacacatgctatctatgtgtancatcagataatcantatcactaatgatgctgcgtattcaatcattgatacgtattactctctatgtcgtctcatgaactttacacgactgatgattngatcacgacgcgaanntcatgcgaatatatatgatcacacgacgcagtagccccnaccacacgcagctgcacgatacgcacgacaccccnactacactangtgagccacgtctacgaagnctnnacaaagtagaacaaaantacatattcgataactacaacatcgactaatcgacactacat

SEQ ID NO: 5603 - DNA, 1755 bp, Glycine max
  misc_feature (50)..(50): n is a, c, g, or t
  misc_feature (98)..(98): n is a, c, g, or t
  misc_feature (181)..(181): n is a, c, g, or t
  misc_feature (507)..(507): n is a, c, g, or t
  misc_feature (633)..(633): n is a, c, g, or t
  misc_feature (669)..(669): n is a, c, g, or t
  misc_feature (717)..(717): n is a, c, g, or t
  misc_feature (772)..(772): n is a, c, g, or t
  misc_feature (857)..(857): n is a, c, g, or t
  misc_feature (890)..(890): n is a, c, g, or t
  misc_feature (918)..(918): n is a, c, g, or t
  misc_feature (925)..(925): n is a, c, g, or t
  misc_feature (975)..(975): n is a, c, g, or t
  misc_feature (984)..(984): n is a, c, g, or t
  misc_feature (988)..(988): n is a, c, g, or t
  misc_feature (1023)..(1023): n is a, c, g, or t
  misc_feature (1062)..(1062): n is a, c, g, or t
  misc_feature (1066)..(1066): n is a, c, g, or t
  misc_feature (1090)..(1090): n is a, c, g, or t
  misc_feature (1099)..(1099): n is a, c, g, or t
  misc_feature (1107)..(1107): n is a, c, g, or t
  misc_feature (1134)..(1134): n is a, c, g, or t
  misc_feature (1198)..(1202): n is a, c, g, or t
  misc_feature (1242)..(1242): n is a, c, g, or t
  misc_feature (1270)..(1270): n is a, c, g, or t
  misc_feature (1364)..(1364): n is a, c, g, or t
  misc_feature (1430)..(1430): n is a, c, g, or t
  misc_feature (1485)..(1485): n is a, c, g, or t
  misc_feature (1559)..(1559): n is a, c, g, or t
  misc_feature (1571)..(1571): n is a, c, g, or t
  misc_feature (1580)..(1580): n is a, c, g, or t
  misc_feature (1585)..(1585): n is a, c, g, or t
  misc_feature (1589)..(1590): n is a, c, g, or t
  misc_feature (1605)..(1605): n is a, c, g, or t
  misc_feature (1614)..(1614): n is a, c, g, or t
  misc_feature (1654)..(1656): n is a, c, g, or t
  misc_feature (1668)..(1669): n is a, c, g, or t
  misc_feature (1672)..(1674): n is a, c, g, or t
  misc_feature (1677)..(1680): n is a, c, g, or t
  misc_feature (1690)..(1690): n is a, c, g, or t
  misc_feature (1692)..(1692): n is a, c, g, or t
  misc_feature (1713)..(1713): n is a, c, g, or t
  misc_feature (1715)..(1716): n is a, c, g, or t
  misc_feature (1718)..(1729): n is a, c, g, or t
  misc_feature (1731)..(1733): n is a, c, g, or t
  misc_feature (1739)..(1739): n is a, c, g, or t
  misc_feature (1742)..(1742): n is a, c, g, or t
  Peptide Sequence Number=SeqID_8405
  Probeset Number=SeqID_15382
ctctgactataccactcatctcatctatttattgtagtgacgtgacagtngactatgagcagataacgatcgtgatactctgtcgtcagatagcatcnagacgtctcactcgtgtcctcacaccctctctatctactatcgtcagtgtagtatttcatgtcgatgcttcgtagagagagangtgtgcccgtcagcctctgtatccacatatccttcatctcatatatatcttgagtaacatatctctctcgtgcgccaagacactgtgtagttgcgatgtgctgtagaggtgcgcggtgtgatatgcgcataccgacttgtctatcgtggtattcgtgatggttggcgacgtgatcacctatctctatctcgacatctactactgctctccgtctatagtaccagttctgtatctgtctcgtgtctgcttgacgatgtgacaccatctgtcggcgtcgagagtcggagtgtcgacagcgcgacacctaactatcttcagtataactncgcatccacacctgctcagtcgtcgctatacatatcacagtggcatgtgtctcgcgacgtatacctccgagtcacgttgtcacctgtgcggcagcgcgacgcgagactagttggtgagtgcgcacnggcagtgatgtgcggtcgtcggtggtgagcacgcgngcgatatctacagagtgctagagagcgcgcagtcggtagtacggtganggggatgggtgagtgtgtgtgtgtgttagctactatgatataggtaagtatgatnatacctatatcatttttcttatcacacacagagtggcactcactaagtagttagtgctgtgctctatgtgtcagagatgttgcgncgcatcgtaggtagtgagcagtgagtgttgtgnttgctggtcggtattatgtgatatttcncctctanactctatacatattacataagtatctcacgcgtccatagagacgccgtangatacacanccancgccgctgtcatctggtatctcacacagcgtcagnacagtgttgacgcgatgacgcgatcgagccggcacaacnagcncgacagcgcaagacgaaacatganggagcgagngcacgcanctactacacacacacaccagcgacctncgacagaggggggcggattgcgtccagctgtctgctgtgaccagacggaattcgcagggtggannnnntgcggacactgcgcccagtatgaagtggtactatctctcnacaatatcctacaaaaacaaataagtgnatctgctcgtctgcacctcagctttattcagacgactcgatggatctaaaggttgtctgtagcagataattacctccgtaatgagagagaaagngccagagtggcgacccagagtttccgctgataagagccatgaatccgccgtagtgtaatctgttgntgttgtcgcgtctgtgagacgatacagtcgtatatgactgttggacgcaaagagnccagaagactatattgtatgtgtttattgctcctaacattcagtgatatcgtatacgtaccgtactgaattatnagcccaaatctntgttgcatnaaatntcannaatgcgcatgtgtgntgtgtgagnacacacgagagcgactatttgtcgattctgctgttggtgnnnagtgtgggtganngtnnnttnnnnaaccacactnanacacactcacacacaccaatnannannnnnnnnnnnnannnccacanaanccacccccccccc

SEQ ID NO: 5604 - DNA, 381 bp, Glycine max
  Probeset Number=SeqID_15383
acattcaaaactatcatcacaatgccaacctaataaataagaaaattaaaaattttaaaaaaataaacaaattgaaaaaatacgaaatggaagagtggaatcctctcagacaaatgcctcgcatttgtcgtcagaattgttaagaatggatcggactcgtcatcattatttgatcatcaccgagaaaaccacaccttcgtatgttcaacaaaatcgatccataaaaagcactatcaatcaaatcaaatacacataagaaaaaagaaagtagaaaaagatgaaaagactaaaaggaattatagagatgaaacagttgcaacgctccctgcgccgtgaattgaaaacccaaaatcccccgtttcagttttcctcgtgctcgag

SEQ ID NO: 5605 - DNA, 2000 bp, Glycine max
  misc_feature (1)..(1): n is a, c, g, or t
  misc_feature (17)..(18): n is a, c, g, or t
  misc_feature (25)..(26): n is a, c, g, or t
  misc_feature (29)..(29): n is a, c, g, or t
  misc_feature (33)..(33): n is a, c, g, or t
  misc_feature (35)..(36): n is a, c, g, or t
  misc_feature (52)..(52): n is a, c, g, or t
  misc_feature (91)..(91): n is a, c, g, or t
  misc_feature (178)..(178): n is a, c, g, or t
  misc_feature (229)..(229): n is a, c, g, or t
  misc_feature (270)..(270): n is a, c, g, or t
  misc_feature (317)..(317): n is a, c, g, or t
  misc_feature (352)..(352): n is a, c, g, or t
  misc_feature (388)..(388): n is a, c, g, or t
  misc_feature (556)..(556): n is a, c, g, or t
  misc_feature (822)..(822): n is a, c, g, or t
  misc_feature (842)..(842): n is a, c, g, or t
  misc_feature (944)..(944): n is a, c, g, or t
  misc_feature (1076)..(1076): n is a, c, g, or t
  misc_feature (1087)..(1087): n is a, c, g, or t
  misc_feature (1097)..(1097): n is a, c, g, or t
  misc_feature (1246)..(1246): n is a, c, g, or t
  misc_feature (1265)..(1265): n is a, c, g, or t
  misc_feature (1326)..(1326): n is a, c, g, or t
  misc_feature (1404)..(1404): n is a, c, g, or t
  misc_feature (1406)..(1406): n is a, c, g, or t
  misc_feature (1418)..(1418): n is a, c, g, or t
  misc_feature (1433)..(1433): n is a, c, g, or t
  misc_feature (1454)..(1454): n is a, c, g, or t
  misc_feature (1459)..(1459): n is a, c, g, or t
  misc_feature (1463)..(1463): n is a, c, g, or t
  misc_feature (1481)..(1481): n is a, c, g, or t
  misc_feature (1509)..(1509): n is a, c, g, or t
  misc_feature (1511)..(1511): n is a, c, g, or t
  misc_feature (1567)..(1567): n is a, c, g, or t
  misc_feature (1637)..(1637): n is a, c, g, or t
  misc_feature (1643)..(1643): n is a, c, g, or t
  misc_feature (1668)..(1668): n is a, c, g, or t
  misc_feature (1676)..(1676): n is a, c, g, or t
  misc_feature (1688)..(1688): n is a, c, g, or t
  misc_feature (1696)..(1696): n is a, c, g, or t
  misc_feature (1702)..(1702): n is a, c, g, or t
  misc_feature (1706)..(1706): n is a, c, g, or t
  misc_feature (1717)..(1717): n is a, c, g, or t
  misc_feature (1720)..(1720): n is a, c, g, or t
  misc_feature (1791)..(1791): n is a, c, g, or t
  misc_feature (1799)..(1799): n is a, c, g, or t
  misc_feature (1821)..(1821): n is a, c, g, or t
  misc_feature (1827)..(1827): n is a, c, g, or t
  misc_feature (1838)..(1838): n is a, c, g, or t
  misc_feature (1846)..(1846): n is a, c, g, or t
  misc_feature (1857)..(1857): n is a, c, g, or t
  misc_feature (1889)..(1889): n is a, c, g, or t
  misc_feature (1907)..(1907): n is a, c, g, or t
  misc_feature (1909)..(1909): n is a, c, g, or t
  misc_feature (1935)..(1935): n is a, c, g, or t
  misc_feature (1943)..(1943): n is a, c, g, or t
  misc_feature (1946)..(1946): n is a, c, g, or t
  misc_feature (2000)..(2000): n is a, c, g, or t
  Peptide Sequence Number=SeqID_8413
  Probeset Number=SeqID_15384
nccccccggcccccgtnnaccaccnngcncgcncnncccgctcgcgcgaggngcgctcgcgcggtcgcgcacgcccgcagccaatgtgagncgcggatattatatatataaagatatggttgacatcgtacgtcaattctctactgagttacataatataccacgcggtccaatcganatatgattaatatatcgagacctgcataaatgcctgaaacgcatcacgctnaatcgttgtcctagagcactctcacagcatcttaattatanatcacatagtgatcagacgcttcattatattatgaagatatacacanagggtagatggagagcgaccaccggcccgcactgngcgatcaagatgcgtactcatcgtctactaatgaancagccactatcacactatcaatataagcaagtgacaaatacatacgagccacacacgcgacacaggcacactacgatacacacgactcaaacaccgcgcgaccgctgcacacgacaatcaatatccaacggcatcgtcatgatgacgaacacgatgcacacatacaancaacaacacacagatatacacaacaataatatcatgatactggagattaattagagcgagagacgacacgagaaggagtcaggagcttgagatgagtgagagaaggtgagacgacggaacgcagaggtatgactgtatacgtagctagtagcgggatagtgggcagcatgagcagtatgtaacactgacgactaacgtatgagtgtagtgaactgatgtgtatgtgtgatgagtcgtgactcgtctgtagatgatgtacaccatangatcacgaataagtcatgtntctagacatataatgagctgtgatatgcgaatacttagctagtacgtatctgacactgaccgtacttaagcgctgatcatatagatggttagtatacgtgtnacggaagtaatcatagtagtaccgatagtgtgaactttacgtctactatcggatcgcttcgtcgtagtggtatctgatgatggaggtcgtcgaacgataggaggagagcgagacgcgagcagaagatagatncgtgacgcganagcacagccnaggcatcgtagatcatgcatatattgctgtgctggactatgatgtgcgcgacgcgagtgcgacatgctaaccgcgctgatcacgctgagtctgtggtcttcgtctgttactgctatccgtatatgaatagaatagacgcgagatcacgngtgtgagtgagtgtgtctncatacagctcaaatatcatgttcatgcgttcgtcatattgtgtgtatcgatcagagctgcngtgctgacgtatagtacgtaacgtgtacatgattgtgagcatcgatatgacgtactctgtcacgaagagtaattgtgntntatcaatatacntatatatatagtagnacaacatacacatactagatntatgnactntagtcagccatactattnatatactgacgtaggacgcagccagcantncgtatgatgccgcgcgcatgcgactatgaacatagtactatagtaatctgatctantgacttgtcgacagatgtacgtagagatgtgtggtcacatgcgctatcgttgttgagttgcgactgcgtncttcgntatgctatcgctggcgctgaatgcngactcgcngatatcgcttantctgagcntgatgnagcncgatcttaggncangtatatgctgctacgacgttactgtgtgctactatgaatgatatgatactactaaatggtctactcgatantgatgatnatgaatgaatgatcatatctgntcgtgntttgctgacgncgcagtgnttacaatatancgacgcgcacacgagcagcgatggtgaacganatctgtaatcatgagcgngnacgtgtgcagtgcactaggtcggtgncgatgaanacnggacgccagccgtatgcagacgatcgtgttagacgattagtcgtagaacgtcgn

SEQ ID NO: 5606 - DNA, 559 bp, Glycine max
  Probeset Number=SeqID_15385
tggctcccatgacataatatctctaaggaattcttaccatgggaatggtggtggaacaatagggaccacagctcaaagcatttggaaatataatgttatacagagtagtattcatcatacgataaatccagacccttatcaagaccttttcgattctaataaagagaagtatgtgagagatgttcaagaaatcattaattttaaaactgtccaaaatattgcagctttcatatctaaaacaatacgaaaaatagaaaacatcagtgaactaactcctagttacttacctactacctacgatattggtagaaaagctagaaatctttacattaccaacgaaattcagacaaaaattactcacaccggtagccatttctaggaatttagaacccatagtatggtacctgacatagtaacagtagcagagagcattggagaacacattcctcttgatactggtgtgacaactcctgagattacaaagacatgggctcgccggagttactgcgacacctgtggtaagaatgctctttgcactagtgcgagattaactgtttta

SEQ ID NO: 5607 - DNA, 540 bp, Glycine max
  misc_feature (153)..(153): n is a, c, g, or t
  Peptide Sequence Number=SeqID_8414
  Probeset Number=SeqID_15386
gcacgaggctcgtgaaattttcagggtgatagagaaaacctttgaaacatttcaaaatggaatcaaaagtcaggttttgatttttaatttattttttatgagaaaattcgatttagtatcttcatagtgataatatgatcgtatgtttgagtnatctagatagtgtgaagatcgatttttagaaaaaagttcttgaacagaaatttagagtttaatgcgtttagcatctaagtctatgggatatttgacgctctgttttttcaaagtcaattttcccataaaactgatttttcttttcatgaaatttttgctcctgtattgatttgctccaagaatacgatcatagtatcagatgaaagatattgctttcgattttctttttataaaaagtataattttataaatctagttgaaaagtcaaaacctgacggaatcgttattgaaatgtttcagaagttttttctattcctcaataagtgagttaaaattaaactttagattcacattctgattccaaagcttcagcattgtttcgagatt

SEQ ID NO: 5608 - DNA, 1628 bp, Glycine max
  misc_feature (28)..(32): n is a, c, g, or t
  misc_feature (44)..(44): n is a, c, g, or t
  misc_feature (54)..(54): n is a, c, g, or t
  misc_feature (57)..(57): n is a, c, g, or t
  misc_feature (67)..(67): n is a, c, g, or t
  misc_feature (75)..(75): n is a, c, g, or t
  misc_feature (90)..(90): n is a, c, g, or t
  misc_feature (118)..(118): n is a, c, g, or t
  misc_feature (188)..(188): n is a, c, g, or t
  misc_feature (380)..(380): n is a, c, g, or t
  misc_feature (397)..(397): n is a, c, g, or t
  misc_feature (420)..(421): n is a, c, g, or t
  misc_feature (427)..(427): n is a, c, g, or t
  misc_feature (585)..(585): n is a, c, g, or t
  misc_feature (646)..(646): n is a, c, g, or t
  misc_feature (657)..(657): n is a, c, g, or t
  misc_feature (682)..(682): n is a, c, g, or t
  misc_feature (893)..(893): n is a, c, g, or t
  misc_feature (969)..(969): n is a, c, g, or t
  misc_feature (971)..(971): n is a, c, g, or t
  misc_feature (975)..(975): n is a, c, g, or t
  misc_feature (1092)..(1092): n is a, c, g, or t
  misc_feature (1157)..(1157): n is a, c, g, or t
  misc_feature (1254)..(1254): n is a, c, g, or t
  misc_feature (1383)..(1383): n is a, c, g, or t
  misc_feature (1408)..(1408): n is a, c, g, or t
  misc_feature (1456)..(1456): n is a, c, g, or t
  misc_feature (1541)..(1541): n is a, c, g, or t
  misc_feature (1553)..(1553): n is a, c, g, or t
  misc_feature (1597)..(1597): n is a, c, g, or t
  misc_feature (1600)..(1600): n is a, c, g, or t
  misc_feature (1620)..(1620): n is a, c, g, or t
  misc_feature (1628)..(1628): n is a, c, g, or t
  Probeset Number=SeqID_15387
ttttttatctgtgggtgtgtgtgccccnnnnnccccccctaaantttagttttntangtattttttnctcttctncgcgccgtcttatanatctccccctccacacaacataaaatanacaatacgagagcaccacctcccccccttaaccgctctcctcctttttctctccacgcaacccgccttanaatattgtattttattatatctcttcttctaacagtcatctcaccctcaactcatacacaccatatattatttattaactatcttaaagaacagacagtgtgtgtgtggtgagaggagcggtaagagagaggggtgccgccaactcaatccagctatcaggtattaaagatattattccttctcactcaggncttccccctcacctccntcagctcttcaattcttgttatnnttttcnctctttctgccgcttgctcgctgcctctatctttctctcagactcttctatcctccacccctacagtattgataattgtagtagcacttatttctactcttaacataagttatccctaccaacccctcaacatatttctacgactatttagtacaatngtcgtgttcacctcctcgctacccaccgccacccacccgccccgcccaacgcatccgtgtncgtctcgcgcntacgaatccgcgcgcgcgcctcagnggctcgtctcacgcctccgcctcttgatgtctcctcgtcgtccataatctcgatgacagtaagcatatatcctccacactagcctacgctatctacttctccgccaaaccaccccaaaaataacaacacactcgtccgacacatctatccgcaatactcctcccactcacctcaccatgctacaaataagttagatagtgctaatagtacngcaatactaaatactgccctcgctcccgatctattgtattactctacgtacacccgctcctgcaatgtataattantncatnagctctcctcgctctctacattctcatatataatgaacatatattcacccgtcattctcactctcatagctctacgatcacctcctactcccgataaaccagcatcccgctactatnacatgacgcaccatcagccataccgatgtctctctcatagtctatatcacatatatctctctttncttgatcttctatctgtgtggttatgtgtatgtacctctcacctcatcacacctgcgtactctcctccgcgactcactctcgcttcttcccgctccngcactctcgtcgccacgtgcccggccgcgcaactctatctcacatcataccttcgcaccctgccctatagcactacacaccatcctctcaactcattttaactcgtacactactcactctgaccacatntgtctctgtctcatgtgctctactncgactgtacgctatcagatactctcgcttcactctcgagcgcccaccnacagatatatctctctatgccatagtctctcatgcggagtcatcccatacccatatacaccacaatcacacgcaccaatgtaccnctctgtgcacangcaccagcagtcaacagcccactacgtgagatactcgctatgcntgncaagccaacgctcacacacnatccacgn

SEQ ID NO: 5609 - DNA, 1365 bp, Glycine max
  misc_feature (1)..(1): n is a, c, g, or t
  misc_feature (422)..(422): n is a, c, g, or t
  misc_feature (448)..(448): n is a, c, g, or t
  misc_feature (572)..(572): n is a, c, g, or t
  misc_feature (931)..(931): n is a, c, g, or t
  misc_feature (1312)..(1312): n is a, c, g, or t
  Peptide Sequence Number=SeqID_8415
  Probeset Number=SeqID_15388
ntgcgcgatatcgtatctctcgctccagactgtcgctctccactattgttgtcttatcgtcggtgctcagctcgcactattgtgttctactccaatcccgtgttatataggccgttcaagtgtgccgtgttggtgataaagtgtggtataatatgcgccgcgacgcgcgcgtggttattctctttaacatacgacgttactcggtaaatgtataaaggtagcggcccgccacacatatatcgcgcacattgtccatagttcgcagcggactatcatataatgtatggctgacatcggcgtagcggatcgccgcggcataatattgttggccgcgtgtagtacgaagaaaatatttggcggtagtaattatatataatcatcgcgcgggcgtgtcaccgcaagaaaaccggcgccaattgtgntatgcatgtataataataatataganggcggtgtatcgctggtgagtaagtgataaaagggcatgtgttggattgtctgccgctcaatattgtatatgcgacgcggcgcgcgcgaatcgcgagtttcgtgtaaacgctggggttcacaancaccattattaactcggcgcgtgtactttgcgtccctcttgtcgtccattcacgctcaacactaatatagtgtggcgacgagaagaacacgggtgggaaacaacaacaacacaccgcgctctgccggggtggacacgataaaaacgacacattggggtcggagtgggggcagatgccggaacataacacacgggctgtgatatcggcgttggagggataacgagtcgtcgcaaaactcaggccgcggccatagtgcacccacggatctgtttaaattgatatatttcggctcacgaacgggcgtgctgtcgttcattcgagatcgtccggcgcagaagtaccgacctcctcccaatccncacacacaggatgtgtgacgtcgcggcgacattctactctccacaatctatatacaaaacgactcccgcgcaccgaagactggcgcgggcggggaagcgataatttctataatgttaagcaattcgctaacaccactttgattcggcttgtgctggcgcgtaagataggattggatggcgatataactcattaacggcgcgcggcgtggcgcccatactgacaaacactaatataacgtgcggcgacgacgagaacactcttctaccgcccgcgccccactctctcatgtcggagagactgcctccgcgcgaccgccccgcctcgcggctgggtagtttaggacaaaatcttttacgacagcgtatattactcgcgcgggngccgttggtgcctcttgaatataaccgcaccgaccacccgcgcggcgccccac

SEQ ID NO: 5610 - DNA, 1687 bp, Glycine max
  misc_feature (8)..(8): n is a, c, g, or t
  misc_feature (51)..(51): n is a, c, g, or t
  misc_feature (183)..(183): n is a, c, g, or t
  misc_feature (223)..(223): n is a, c, g, or t
  misc_feature (315)..(315): n is a, c, g, or t
  misc_feature (329)..(329): n is a, c, g, or t
  misc_feature (564)..(564): n is a, c, g, or t
  misc_feature (593)..(593): n is a, c, g, or t
  misc_feature (701)..(701): n is a, c, g, or t
  misc_feature (703)..(703): n is a, c, g, or t
  misc_feature (709)..(709): n is a, c, g, or t
  misc_feature (829)..(829): n is a, c, g, or t
  misc_feature (879)..(879): n is a, c, g, or t
  misc_feature (925)..(925): n is a, c, g, or t
  misc_feature (1486)..(1486): n is a, c, g, or t
  misc_feature (1603)..(1603): n is a, c, g, or t
  misc_feature (1628)..(1628): n is a, c, g, or t
  Probeset Number=SeqID_15389
ccacgtcntgtgtgtacgtagtgagagactccagagactcgagaatcgtanagactatatacatctatatatagatagcacaatggcattaaaatagatcatatctttagttattagtcgtgtatctacgaactcactatctcagtgcttcgacgccatcgctgtatactctctcgcacaatncgctactgatattctcatgttctccgtctctcagatcgtncagacagtacgcatatatagtattagttctatcatatcacatatgaattacagcatcactatcctcagctttcacattgcatgattgttgtncgttcatcggatcnagcgtcgtcttgccggcgcgtcatcgtctatacgtcgctcgttgtctattcagtcgcttagcactgtattcgctcactccattccactcttagactactgcacagtatcatctatcatatcatagtactgtacacatccaaacatatatacgcataatagcggtagagtacgagcaggtgtctgatactcgacaatatgttatacatggttatctatgatctataatctgtacantatcgctactcactcatcatattctgagnacactatctaggcatattctgtacacgttgatcttcgttcatgaatacagataccatgcattacaatctgtcagagtcttaactctacgcaacatactcacgtaatcnancatacntccatgtagtaggttggcagttaatgtaatatgctcacgacgatccgacacataccatatcgcatcgtgctcagtcagtacattactctgcagctacgctatattattgaagtctgcgtntgcagcggcgtgtaactctagcagtcacaccaatcaacgcaatactgggncggtgcgctctgcagcgcgcgcgcatcactgtcgtgagtatgaccnatcatcaagaaatcccgccggacgctagaaacatctatacatgtagtataatattatgatgtcctgatagcctccttatatacacagaatattatagtgcgctatatcgttattctgtgttacatgtgtcatgaggtgatatgatgatattaatagttggttctgatataggtatattatttgagtactattatataattgtgaccgtcggttctaactatttttgcacatatactactgatactagctttgttgccatcttctacacctacacaatatataatacagaatactttgatgtgtgatatatgcaatagatctgtgatgtctttctatcgactgtctacataactctatccttcactatcttacagctacgctcttcatgcctctttcaccttttggcatccgtctaatatctgtcggcgcggtgtgggatctcgcagtgagtcccgcacgagcataggacacagcacatataaaaccacgtaagagagaaatgtgatctatagtctatgatgacaataatagatatccgatggcgactctcctctcatgtgntagagagggcagatgcagcacacacttcacactattagctgatacgccgatcgccaacctctcgtcatgggtgatattattactctctcgattactacctagatttcttgcatgtcnacagatcatcacagcgtctctgtancaatgatcagagattacatgagtgcgagagagtgagggtgtagttgaccagaccgccac

SEQ ID NO: 5611 - DNA, 1596 bp, Glycine max
  misc_feature (11)..(12): n is a, c, g, or t
  misc_feature (18)..(18): n is a, c, g, or t
  misc_feature (26)..(26): n is a, c, g, or t
  misc_feature (45)..(45): n is a, c, g, or t
  misc_feature (58)..(58): n is a, c, g, or t
  misc_feature (450)..(450): n is a, c, g, or t
  misc_feature (465)..(465): n is a, c, g, or t
  misc_feature (487)..(487): n is a, c, g, or t
  misc_feature (489)..(489): n is a, c, g, or t
  misc_feature (636)..(636): n is a, c, g, or t
  misc_feature (676)..(676): n is a, c, g, or t
  misc_feature (730)..(730): n is a, c, g, or t
  misc_feature (819)..(819): n is a, c, g, or t
  misc_feature (853)..(853): n is a, c, g, or t
  misc_feature (864)..(864): n is a, c, g, or t
  misc_feature (872)..(873): n is a, c, g, or t
  misc_feature (883)..(883): n is a, c, g, or t
  misc_feature (886)..(886): n is a, c, g, or t
  misc_feature (919)..(919): n is a, c, g, or t
  misc_feature (1011)..(1011): n is a, c, g, or t
  misc_feature (1064)..(1064): n is a, c, g, or t
  misc_feature (1167)..(1167): n is a, c, g, or t
  misc_feature (1173)..(1173): n is a, c, g, or t
  misc_feature (1180)..(1180): n is a, c, g, or t
  misc_feature (1197)..(1197): n is a, c, g, or t
  misc_feature (1275)..(1275): n is a, c, g, or t
  misc_feature (1447)..(1447): n is a, c, g, or t
  misc_feature (1473)..(1473): n is a, c, g, or t
  misc_feature (1533)..(1533): n is a, c, g, or t
  misc_feature (1577)..(1577): n is a, c, g, or t
  misc_feature (1584)..(1584): n is a, c, g, or t
  misc_feature (1596)..(1596): n is a, c, g, or t
  Peptide Sequence Number=SeqID_8416
  Probeset Number=SeqID_15390
gtgttgttggnngaggancggctctntcgttctcttcaattgtcncgcacgatcggcncaccaccgacgcacagcgcgcgcgccaataaataggaaggattcttacatcccgccagaggggggcggcgccaccatcccaaggtgaggtaggtgagtcaccctcctccgggtggcctagcggaggtagagtcccgttctgctctattttgcttctttcttcgatagaatagaatatatacagctcagcaatctcgccagctcctcgtcactctctcttcgccgggcatgtcgtggctgtgttacaccgcgtgttatgtgagtgagagctgctcatatacatatatcataattagatatgactattagtcggctgcactctcctacctagcctcagcacgcagggtactacgctcctgccggagtctgcgagcgcgtttgtgtcgcggcgtncagtgacgctccttnctctcacagatagcgctatcantntcagaagactgcggctggtccacatctcatcctcggatgctactgtcgtctcttctctctcatctgaggcaggactagcagtatagagagtgatgcacaacacacaatacgtgaggcgcgtaactaccgggcatactcattgtaccnatccatatggtagctatagtgtgtggtagcgtgagtcctntgtgtgcgtccagtctccgcgcgtgtctatgtctgcgcagctgcggcgctgtgncgagggtggttaactaacacgcgtagaagcacggtatcacatcgtggtctatgtattgtgtgaggtgtgagtatgatgtgggtgtgtgnagaatgattaatagatattaagcttaagtatacnaattatggganattaatanncaactttaantcnagaacccaccctccgccacacacccaccaccancatagagcgtctgagaggatggtccttactccgctctatcaaaatagtagctgaagtaagaaatagcgtctctgtcatgtagtgtagaactnctgagcatcccagtggcgcgtcgtagtgtctctagactctaacagtcggttgntagtactagagtgtctctctatacctacgcatactcatcctcacatctttgtcacacagacgcagcgcagcgagctggaggccagatgttgcgactgcggacntctacncggaggnatgagtggatgcgtcantgtgcgatctgtgtaggcctacgctatatcttgtgtctgtgcgtcgatgtgtgcttctctcgtacacacgcgacgagnggctaaactcgcagcctgctgcgcacgacgaagacgaggagtatccggagctcgtgtggcggacgtcgtgagtgctgctgatcctgtgggcgcgcgctgatcgtgtcgcagatcgtctgttcgcgcagtgtgctgatgtctctggtagttgtgcgtatgatgagacagagangttcttgatcatgcggctgtgctcangctactgcatgggcgactcaccgcgacgtgctctctgacaggacgcggcacgcggagtgntactacgtgcgtcatccatcggagtacattcagcactgtacctnacacacncgctgcatctgn

SEQ ID NO: 5612 - DNA, 967 bp, Glycine max
  Probeset Number=SeqID_15391
cgacacccaagacggtatatagtgtcagagataaagggcccgataaagaggtctctgacacgctagaaggttgtgagaaaggcacacatatataataaaggaggttgtttgggggcaaaaaccggttaaacgttttttttcaaaaccgggggtagagaaaaactttttgtttggtggagaaaagaaaaaaaccctaacggtatccgtaaaaaggcctttgaagaagaattttttataaactgagcgggggggcggtatcaaaggtggatagaaagggttctttcctttatttatgagaaacgggtttggaaatttggaaaggcgccccaggagaaaggaaaatattgaataaacgctcggccgaaaagagaatattagaaatggggttgtgtttcaaaattttgggcgtggaaggacccccaaaaggttaaaaagggaattaggggaaacttgaagcccaaaaagtaacccagggacttggatgggccgtgccttccttaaccctttttggaggaggggtccaagagtttgaccggccaggaattttaccccccaattcaaaactacttgcctgggcttaatttttaactgggtttgattcggccaacaaacaacattgttttgggctctttcattacctttcaaataatcgggaaagtccttaaaataaggcaatccccgaatttaggcacacaaaattgggagtgaaaaaaattgtagaggaaatcagacttaaaaaaagctagaatatctccaatctatcatcaaaggaaacattacgttggtaaccagctgcaccacttaatgtgccacacgagtccttagaagattgcaccgtgggtggatatcatgtaccaactggcacgcgtctgttgactaatatttcaaaacttcaacgagacccttcattataccctaatccattagaattttggccagagagattcttgacaacccacaaggatgt

SEQ ID NO: 5613 - DNA, 505 bp, Glycine max
  Peptide Sequence Number=SeqID_8417
  Probeset Number=SeqID_15392
tggaactgttccaatgcccatgcaccaagatcctatggctgctgctgaaaaacaaattgtaaacttgtaaagcctctgtaaacaccctgaagaatatctttcttatgatgaaaattgaagtgattccacattttattctttgtcaagatcactaggttgtactgttggggagatatcaacatggccacgtgccaataatggcattccaggccaagttacatataccggggatatacgagcgatagatgaccttggacgtgaagctgctatctatgatatatcgaaacaaatttaccaaatatgggaacagcgaacagtttcctgcattattgaacacaagcatgatgcaagtgctgtgatttgtgattccgacctaagtacacaactcacgtgagcgacttatactgcactcaaaaaaatggagggcgacagtcacgaaagaagcgcccaacatcatcgaacggagccgggccatgaagccagtgcgcaaaaatcccacctcaca

SEQ ID NO: 5614 - DNA, 1395 bp, Glycine max
  misc_feature (1)..(1): n is a, c, g, or t
  misc_feature (21)..(21): n is a, c, g, or t
  misc_feature (99)..(99): n is a, c, g, or t
  misc_feature (144)..(144): n is a, c, g, or t
  misc_feature (157)..(157): n is a, c, g, or t
  misc_feature (165)..(165): n is a, c, g, or t
  misc_feature (185)..(185): n is a, c, g, or t
  misc_feature (239)..(239): n is a, c, g, or t
  misc_feature (327)..(327): n is a, c, g, or t
  misc_feature (349)..(349): n is a, c, g, or t
  misc_feature (383)..(383): n is a, c, g, or t
  misc_feature (420)..(420): n is a, c, g, or t
  misc_feature (585)..(585): n is a, c, g, or t
  misc_feature (877)..(877): n is a, c, g, or t
  misc_feature (1371)..(1371): n is a, c, g, or t
  misc_feature (1380)..(1380): n is a, c, g, or t
  Peptide Sequence Number=SeqID_8418
  Probeset Number=SeqID_15393
ntatacaaatcacataatganatatattatatcagtcactatgtatagagcagtatgagataggagaagtatgagagtagatcagtctaataggcagcnaacaatgcggacaacacgaccaatcaacgctatgtgtctatatgncacgatatatcangcattatnacacaagaccactaataatngcgtggcaggtgtgccgcagagtactgcgtgtattcagtcagatatcagagaanatgaaacatgacatgcaggcgctccatcgcgccatacgctcatgttcagatatattacagactggtgatgtcgcgatacgatacgccnataattatgcatataatatatnggatgataacacgatgtgcgcacatcgacctcgntgcagctcatatgtggtcgtcgaggcagtgcagacantagagcaacacccacacaacaagcaactcgcacttagtacaacataattctcatcgtatttcgaccagcgtgcgaccgcgtcgaccacagatgcctccacaacacaaagaagtcaacagtctacgtgcatgcgtcgtggacgcacgacgaatgtatccgcacaancaggccaccatatatacgtgcacgctgttgcgtaacgctatagaagaagaaaagagaagtatagacaaatagaataatggtggacacatagacacagacagcacagacgcgcgccgtacaactacacgctcggaatgacacatccatcattattacaatacaaaccgtcttgcggtctcacatcaaaggctcactactccacacgagacaacacagaaaatcgacacatacacaggacagagaagtacgttaaaaaagagcgagaaagagcaacagacaaaggtgagcgcanagcgctaagtacgggagtcgcacgaagcgtgaccgctcacgcgcggaggggctgctacgtctacagcgcccgccgccccccccgcgggcccgcccgcccgcgcccatcgctcgccctcctcccacagcgtcctaccctcgcgggcaacaggtaccacgcgtaggatcattggattcttcgtgcgagatcgctagcgtactctcgaccacgacaggcaagcgttagcgtaactttatctaagcataagttgtaggatgtggcggcagtcgcgagtgtatatcgggtatcatagatgataatgagaaggagaattcgtgggcagtaacagtgaaggaggcacgcacacgcgctttctgcttcgcgtaatctccctcgcatatgccgcgcgcgatggctaagaggtactggtagcgcgaataccacacacagctcagaacactagagacatgttattacacgttccctgcttcggccaccttttcatccaaggtttntgttaatanggtgtggtgtgaaat

SEQ ID NO: 5615 - DNA, 1719 bp, Glycine max
  misc_feature (1)..(1): n is a, c, g, or t
  misc_feature (9)..(9): n is a, c, g, or t
  misc_feature (41)..(41): n is a, c, g, or t
  misc_feature (62)..(62): n is a, c, g, or t
  misc_feature (81)..(81): n is a, c, g, or t
  misc_feature (121)..(121): n is a, c, g, or t
  misc_feature (180)..(180): n is a, c, g, or t
  misc_feature (211)..(211): n is a, c, g, or t
  misc_feature (219)..(219): n is a, c, g, or t
  misc_feature (261)..(261): n is a, c, g, or t
  misc_feature (265)..(265): n is a, c, g, or t
  misc_feature (298)..(298): n is a, c, g, or t
  misc_feature (315)..(315): n is a, c, g, or t
  misc_feature (1105)..(1105): n is a, c, g, or t
  misc_feature (1367)..(1367): n is a, c, g, or t
  misc_feature (1466)..(1466): n is a, c, g, or t
  misc_feature (1585)..(1585): n is a, c, g, or t
  misc_feature (1598)..(1598): n is a, c, g, or t
  misc_feature (1623)..(1623): n is a, c, g, or t
  misc_feature (1637)..(1637): n is a, c, g, or t
  misc_feature (1691)..(1691): n is a, c, g, or t
  misc_feature (1694)..(1703): n is a, c, g, or t
  misc_feature (1706)..(1706): n is a, c, g, or t
  misc_feature (1719)..(1719): n is a, c, g, or t
  Probeset Number=SeqID_15394
nctattgtncgacacatgtggagtgtacaatacgattcagntcacatagtatatcagtagcntttgatagagacggatgcnctccggcgcgacgcgtaccgtcgtgcgcggcagaagcgcnctacacccgagacgagacggagctgggctgcggagacagacaaatcagcgtgtcgtgangcgacgagtaagtagtgctaccatacgtcgncacatatnttcagtgcatcaaatagcaatcgtcttttctctcactacctntgcngagcgactctcatgacatacacatatcgtctgngaggtggtgctgcgcgngcatgtcatagtactcgctctgatgctatgacttgtcatcttgtgtatcgttagctaatgtcatatagtatgtcctacgctaggatcacatatactcgccatcgtatacatagaaaactagatgtctcagaagacacgcgcctatcagacgcaacacaatacacaacctatatagacagagctcgcgtgcatatcaatcacactgttatcttcccatgttccattcctcattcactcgcatatatacgcctgtcatcacacatgcggcgatgaccggacgcgccgcacacagagcactcggcgtgagcgcacgtcaagctactacactcgcacggcgacgctcggcgtgcctgatcgcgtcggctgcgcgcgtctcagctctccatcctcccgcatcgcccggctatactccatcatccgttagtctggttgtcacctcgccgcatatctataatcctactgcccattctcgcagctcatatatatcgctgcacgtcgcggtccttcaggtggtgtgttagatattatacatgtggtgaacagtctacacggttgcgtcgtaacagatacatgtatcatctcaccacacgcaccattgcggttcacagacgcgaccctcctctcggcctccaccataggtgtggtatacgaatcggcgccgggcggccaatagtgcgtcgtgaacgatacgaggcgagcgctgtcacgactctgccaacaccacagaactgcgagattaattggcttatctatcgcttattctcttatatacaacacagcgttgcatcanatacagtcgcgagaagagagatatatcagacgcgcgtcatgtgttgccaacatctagtatatgtttaagttattgatgtatatagtaagatgaagatcacatgatacatccagagatgatacagatcggcggcgctagataagaagcagtacagcaggcggcgacttttaatatccataatatatagagaggaaaaggaaacacatgatactatcacgaagaatagattaatataacagtcgatctcaactatatacactcntcataatataaatataaactatagagacgtgagagctgagagatcctaagaacgaagagaataaatcttatatacaagcggatcgaattcatgaacgantcttcctcacaacactcttcactcacactacctagtccgcgctgtactgggcgccgaggggtgcgggcgaattaatatattatattgtagaatcaatttagaaatgttaaggtatggtngtttttcttttcntatttatttttttattttttatttntttttttgtttttnttattttattatttaatgtaaattaatattttaatatataattataaattattnaannnnnnnnnnaantttttaaaaaaan

SEQ ID NO: 5616 - DNA, 687 bp, Glycine max
  misc_feature (599)..(599): n is a, c, g, or t
  misc_feature (601)..(687): n is a, c, g, or t
  Peptide Sequence Number=SeqID_8419
  Probeset Number=SeqID_15395
actgaaacgacttgtctaagagaaccctcaccccctactccctcactcgcactcctgcagccaccctcatcttctctgtttatatggttctttacccgtcacagtggctgcaatattagtggcttacattcctattctgtgttgcacttttgagggtcacagtccaaacttaccttaacgtttgcactgacagactacaatacactcttcacttatacattccatgactgtggtacacctttgtgcactccttccgtcttgcactacattacatgcttcaaacctttttccaataaaatccgcttgtggcaatctaaaaagttccgggttagccttgggttatgccaaaaaagagattttcccgtgcggggggaaaacccccggagggttttgagggggaggcccttcaaaacaaaatttttcaaaaaaattccggatttgcagaaaggggcgccaacaaaggcttttcccccccgcggttttttgccaaaaggggggccacacccctttaaaaaaaaaaacaaaaaagggggggggtggttttctccccccccccgaagaataataaaaaaaaaaaaagcttttttatttgggtgttntnnnnnnnnnnnnnnnnnnnnnnnnnnnnnnnnnnnnnnnnnnnnnnnnnnnnnnnnnnnnnnnnnnnnnnnnnnnnnnnnnnnnnnn

SEQ ID NO: 5617 - DNA, 737 bp, Glycine max
  Peptide Sequence Number=SeqID_8420
  Probeset Number=SeqID_15396
gtcttgagatgctctgagtttgccctgtccttcaatagagtgccatgccgtaggaggaagaaaatgcacaaggggaaggcactgcctcgctcttcattcgggataaatccggtcacatagttaccaattatcatgctgatgctaaactggctactgacacaagtggtttacaacgttgcgatcctagctgatgccccatggaatagctctgtcaggggagggaagataattggggttgaaccacgctgatctactgtctagacgtggcgtgatgattcaatgaagccgttgtcttggccggtctaacgatttacgtgttggccagaggtgctttcccatggggaatccttatcgctgcgagaatactctctcaacaagggtggtcagtggtttaggccgccagataccttccccaaatggaggggccgttagaggagctatttaaactgatgcagcaattaatgcaggaaattcaggtgggccattgattgacttgtatggccatgttgttggagtaaacacagctaccttccctaaaaaaaggactggggtgtcatcaggtgtgaactttgcaattcccatcgacacagttgttagaactgtaccatacctcattgtttgcggaaccccctatagtaataggttttgatttttcttggtacattctataaactcaaactttgaatatccttttttcattcaagttggacatgaaaaaccatgtctatttttgctgg

SEQ ID NO: 5618 - DNA, 1509 bp, Glycine max
  misc_feature (16)..(16): n is a, c, g, or t
  misc_feature (23)..(23): n is a, c, g, or t
  misc_feature (31)..(31): n is a, c, g, or t
  misc_feature (34)..(34): n is a, c, g, or t
  misc_feature (41)..(41): n is a, c, g, or t
  misc_feature (43)..(44): n is a, c, g, or t
  misc_feature (56)..(56): n is a, c, g, or t
  misc_feature (59)..(59): n is a, c, g, or t
  misc_feature (69)..(70): n is a, c, g, or t
  misc_feature (72)..(72): n is a, c, g, or t
  misc_feature (76)..(76): n is a, c, g, or t
  misc_feature (80)..(80): n is a, c, g, or t
  misc_feature (83)..(83): n is a, c, g, or t
  misc_feature (96)..(96): n is a, c, g, or t
  misc_feature (100)..(100): n is a, c, g, or t
  misc_feature (108)..(108): n is a, c, g, or t
  misc_feature (114)..(114): n is a, c, g, or t
  misc_feature (126)..(126): n is a, c, g, or t
  misc_feature (128)..(128): n is a, c, g, or t
  misc_feature (130)..(130): n is a, c, g, or t
  misc_feature (133)..(133): n is a, c, g, or t
  misc_feature (138)..(138): n is a, c, g, or t
  misc_feature (159)..(159): n is a, c, g, or t
  misc_feature (167)..(167): n is a, c, g, or t
  misc_feature (169)..(169): n is a, c, g, or t
  misc_feature (176)..(177): n is a, c, g, or t
  misc_feature (183)..(183): n is a, c, g, or t
  misc_feature (185)..(186): n is a, c, g, or t
  misc_feature (194)..(196): n is a, c, g, or t
  misc_feature (199)..(199): n is a, c, g, or t
  misc_feature (204)..(205): n is a, c, g, or t
  misc_feature (211)..(211): n is a, c, g, or t
  misc_feature (217)..(217): n is a, c, g, or t
  misc_feature (220)..(220): n is a, c, g, or t
  misc_feature (222)..(222): n is a, c, g, or t
  misc_feature (229)..(229): n is a, c, g, or t
  misc_feature (243)..(243): n is a, c, g, or t
  misc_feature (246)..(246): n is a, c, g, or t
  misc_feature (248)..(248): n is a, c, g, or t
  misc_feature (256)..(256): n is a, c, g, or t
  misc_feature (278)..(278): n is a, c, g, or t
  misc_feature (286)..(286): n is a, c, g, or t
  misc_feature (301)..(301): n is a, c, g, or t
  misc_feature (304)..(304): n is a, c, g, or t
  misc_feature (332)..(332): n is a, c, g, or t
  misc_feature (341)..(341): n is a, c, g, or t
  misc_feature (363)..(363): n is a, c, g, or t
  misc_feature (366)..(366): n is a, c, g, or t
  misc_feature (368)..(368): n is a, c, g, or t
  misc_feature (373)..(373): n is a, c, g, or t
  misc_feature (375)..(375): n is a, c, g, or t
  misc_feature (378)..(378): n is a, c, g, or t
  misc_feature (389)..(389): n is a, c, g, or t
  misc_feature (419)..(419): n is a, c, g, or t
  misc_feature (432)..(432): n is a, c, g, or t
  misc_feature (434)..(434): n is a, c, g, or t
  misc_feature (443)..(443): n is a, c, g, or t
  misc_feature (447)..(447): n is a, c, g, or t
  misc_feature (449)..(449): n is a, c, g, or t
  misc_feature (462)..(463): n is a, c, g, or t
  misc_feature (469)..(469): n is a, c, g, or t
  misc_feature (491)..(491): n is a, c, g, or t
  misc_feature (497)..(497): n is a, c, g, or t
  misc_feature (501)..(501): n is a, c, g, or t
  misc_feature (521)..(521): n is a, c, g, or t
  misc_feature (527)..(527): n is a, c, g, or t
  misc_feature (538)..(538): n is a, c, g, or t
  misc_feature (546)..(546): n is a, c, g, or t
  misc_feature (550)..(550): n is a, c, g, or t
  misc_feature (552)..(552): n is a, c, g, or t
  misc_feature (559)..(559): n is a, c, g, or t
  misc_feature (561)..(565): n is a, c, g, or t
  misc_feature (569)..(569): n is a, c, g, or t
  misc_feature (575)..(578): n is a, c, g, or t
  misc_feature (580)..(581): n is a, c, g, or t
  misc_feature (586)..(586): n is a, c, g, or t
  misc_feature (589)..(589): n is a, c, g, or t
  misc_feature (592)..(597): n is a, c, g, or t
  misc_feature (599)..(600): n is a, c, g, or t
  misc_feature (604)..(612): n is a, c, g, or t
  misc_feature (617)..(618): n is a, c, g, or t
  misc_feature (620)..(620): n is a, c, g, or t
  misc_feature (622)..(622): n is a, c, g, or t
  misc_feature (624)..(624): n is a, c, g, or t
  misc_feature (628)..(628): n is a, c, g, or t
  misc_feature (655)..(655): n is a, c, g, or t
  misc_feature (657)..(657): n is a, c, g, or t
  misc_feature (691)..(691): n is a, c, g, or t
  misc_feature (696)..(696): n is a, c, g, or t
  misc_feature (698)..(699): n is a, c, g, or t
  misc_feature (703)..(703): n is a, c, g, or t
  misc_feature (714)..(714): n is a, c, g, or t
  misc_feature (721)..(722): n is a, c, g, or t
  misc_feature (726)..(728): n is a, c, g, or t
  misc_feature (736)..(736): n is a, c, g, or t
  misc_feature (741)..(742): n is a, c, g, or t
  misc_feature (744)..(744): n is a, c, g, or t
  misc_feature (747)..(747): n is a, c, g, or t
  misc_feature (749)..(749): n is a, c, g, or t
  misc_feature (754)..(754): n is a, c, g, or t
  misc_feature (758)..(759): n is a, c, g, or t
  misc_feature (768)..(768): n is a, c, g, or t
  misc_feature (775)..(776): n is a, c, g, or t
  misc_feature (779)..(780): n is a, c, g, or t
  misc_feature (783)..(783): n is a, c, g, or t
  misc_feature (786)..(787): n is a, c, g, or t
  misc_feature (790)..(791): n is a, c, g, or t
  misc_feature (797)..(797): n is a, c, g, or t
  misc_feature (801)..(808): n is a, c, g, or t
  misc_feature (813)..(818): n is a, c, g, or t
  misc_feature (825)..(836): n is a, c, g, or t
  misc_feature (838)..(838): n is a, c, g, or t
  misc_feature (840)..(845): n is a, c, g, or t
  misc_feature (847)..(850): n is a, c, g, or t
  misc_feature (853)..(855): n is a, c, g, or t
  misc_feature (859)..(862): n is a, c, g, or t
  misc_feature (864)..(865): n is a, c, g, or t
  misc_feature (867)..(867): n is a, c, g, or t
  misc_feature (869)..(873): n is a, c, g, or t
  misc_feature (875)..(881): n is a, c, g, or t
  misc_feature (883)..(883): n is a, c, g, or t
  misc_feature (885)..(891): n is a, c, g, or t
  misc_feature (897)..(897): n is a, c, g, or t
  misc_feature (900)..(905): n is a, c, g, or t
  misc_feature (912)..(912): n is a, c, g, or t
  misc_feature (914)..(918): n is a, c, g, or t
  misc_feature (921)..(929): n is a, c, g, or t
  misc_feature (933)..(949): n is a, c, g, or t
  misc_feature (954)..(955): n is a, c, g, or t
  misc_feature (957)..(957): n is a, c, g, or t
  misc_feature (959)..(959): n is a, c, g, or t
  misc_feature (963)..(969): n is a, c, g, or t
  misc_feature (974)..(975): n is a, c, g, or t
  misc_feature (980)..(984): n is a, c, g, or t
  misc_feature (988)..(989): n is a, c, g, or t
  misc_feature (991)..(998): n is a, c, g, or t
  misc_feature (1002)..(1002): n is a, c, g, or t
  misc_feature (1004)..(1004): n is a, c, g, or t
  misc_feature (1012)..(1013): n is a, c, g, or t
  misc_feature (1017)..(1018): n is a, c, g, or t
  misc_feature (1021)..(1026): n is a, c, g, or t
  misc_feature (1029)..(1031): n is a, c, g, or t
  misc_feature (1033)..(1035): n is a, c, g, or t
  misc_feature (1038)..(1038): n is a, c, g, or t
  misc_feature (1041)..(1042): n is a, c, g, or t
  misc_feature (1044)..(1044): n is a, c, g, or t
  misc_feature (1071)..(1072): n is a, c, g, or t
  misc_feature (1081)..(1085): n is a, c, g, or t
  misc_feature (1110)..(1110): n is a, c, g, or t
  misc_feature (1164)..(1164): n is a, c, g, or t
  misc_feature (1376)..(1376): n is a, c, g, or t
  misc_feature (1378)..(1378): n is a, c, g, or t
  misc_feature (1429)..(1430): n is a, c, g, or t
  misc_feature (1435)..(1435): n is a, c, g, or t
  misc_feature (1477)..(1477): n is a, c, g, or t
  misc_feature (1481)..(1481): n is a, c, g, or t
  misc_feature (1490)..(1490): n is a, c, g, or t
  Peptide Sequence Number=SeqID_8421
  Probeset Number=SeqID_15397
ctctcgccgctagtanggcgtanctatatcnatnttcactntnntgtgtaatggcngtntgactcgcgnngntcgngcgntanacatcacactgcngcgncactgatntcagangtgctctactgncntncancttantctcacgacatgagcgtggtnccgccgcngncgcacanngtcagngnntcaagtcnnnttngtgtnntcggtngttgcncgngnctctcgnggtccgtgctctangtncnctctgctntgcgtggtgggtttggggttgntggcagangcgcacgtatgtatngtncgcgcccgcacccgcagccagccgggtnttgaggcgncgcgcgcgctctctcttccatnctntntatantnatnacaaacacagncgagaccctcatgtactccgtccgcgcgcnggcccgcgcgtcntngtgcgcgcncggngngcgtcgccgactnngtggtnctctccgacatcgcgcgcgcgntggaancgtngactgtaatggctgctcctnctcganctctggctccnctcgtccnctcncnccggcanannnnncgcnccccgnnnncnnccgtncgnccnnnnnngnngggnnnnnnnnncgggnncncncntcanctcaccccacacacaccacaacgcgantncccccaccaccacccccccaccccctttcctccnccttncnnccanccacacccaancacccanncatnnncccccccncacanncnacncnacacncccnnccccccccnccccccnnccnnccnccnnccnncccccncccnnnnnnnnccccnnnnnncccccgnnnnnnnnnnnncncnnnnnncnnnnccnnncccnnnntnncncnnnnntnnnnnnnancnnnnnnncgccanccnnnnnnccccccncnnnnnccnnnnnnnnncccnnnnnnnnnnnnnnnnnccccnncncnggannnnnnnccctnnttttnnnnnccgnncnnnnnnnnaatncnccccccannttcnnctnnnnnntannncnnnctnccnncnccccccctcctctgcacaccgttctannggcccaacnnnnnccccctgtcatgacacacttacctngcccctccccacccacttcacagcggcccggaaatcccaccgagattacactcncctccccctcgtgcgacgtacactcggaaacggagtgcctctgccttgcgcgagataatgtccgttgcgcgttgcttacatgtggagtggcgctgtctgtccgattcgtgttccgcgtcgcgagagaagagaagagaagagaagaatataacgcaatctgccctcgccacggcgcgcgtggcgtgcatactcacctgatgtttgctagggangncgcgccccgcctcagctcgggcggtgggagccttcctcagtcttttgaaannggggntgcgtccgtcgttgttcgttcttcctctccgtctcgctccgntaangtagggggngtgagggcgggcggcaccc

SEQ ID NO: 5619 - DNA, 1799 bp, Glycine max
  misc_feature (14)..(14): n is a, c, g, or t
  misc_feature (20)..(20): n is a, c, g, or t
  misc_feature (33)..(33): n is a, c, g, or t
  misc_feature (68)..(71): n is a, c, g, or t
  misc_feature (73)..(73): n is a, c, g, or t
  misc_feature (110)..(110): n is a, c, g, or t
  misc_feature (123)..(123): n is a, c, g, or t
  misc_feature (147)..(147): n is a, c, g, or t
  misc_feature (157)..(157): n is a, c, g, or t
  misc_feature (170)..(170): n is a, c, g, or t
  misc_feature (307)..(307): n is a, c, g, or t
  misc_feature (534)..(534): n is a, c, g, or t
  misc_feature (813)..(813): n is a, c, g, or t
  misc_feature (1134)..(1134): n is a, c, g, or t
  misc_feature (1212)..(1212): n is a, c, g, or t
  misc_feature (1281)..(1281): n is a, c, g, or t
  misc_feature (1292)..(1292): n is a, c, g, or t
  misc_feature (1383)..(1383): n is a, c, g, or t
  misc_feature (1423)..(1423): n is a, c, g, or t
  misc_feature (1481)..(1481): n is a, c, g, or t
  misc_feature (1539)..(1539): n is a, c, g, or t
  misc_feature (1545)..(1545): n is a, c, g, or t
  misc_feature (1560)..(1560): n is a, c, g, or t
  misc_feature (1607)..(1607): n is a, c, g, or t
  misc_feature (1631)..(1631): n is a, c, g, or t
  misc_feature (1647)..(1647): n is a, c, g, or t
  misc_feature (1663)..(1663): n is a, c, g, or t
  misc_feature (1682)..(1682): n is a, c, g, or t
  misc_feature (1692)..(1692): n is a, c, g, or t
  misc_feature (1712)..(1712): n is a, c, g, or t
  misc_feature (1745)..(1745): n is a, c, g, or t
  misc_feature (1748)..(1748): n is a, c, g, or t
  misc_feature (1768)..(1768): n is a, c, g, or t
  Probeset Number=SeqID_15398
gccctatcgacccnaattgntgatgacgtgagntcctgatgctcacagctttaacgcggcacgatatnnnnanctctaaatttggaggttacacgaggaacgcacctcgntacgcaagggggngtttgtttccatgagccactacgncctcccaatnatatattgtttantctctcttgagtcccccagccgatcgacagacgcattctacgccgcacagccatcatcttgtctctccgtagcagctagctcgcctccgcacaacggcatgcgatagtgtttttcactcctccagcgacatatatancgcactgtgtttggttgttgcccccaaagataacgaactctgcatgacattcttctctacgcaaatctgtaaacagagaagccgccagcggctatatgagatttatacacacttagattatgtacttattgccataaagaggtacaccgtagatcgctaagcaatatagtatacaagctcacacgacctgggcgagtgtcttgtgacttggaggatcgacgctgatncgagaataatctcttctgcactatatactcctctacccgctccaactgctgacccggagttattatgggacctctggtcactctccactacagggacacgcaccaactaatcgcttgtccggccatacttcgctagacatggatcaggtttagctttcgtacgacacgcgactcacccctctgcgcaaatcagtccttaaatccgattgaacaccgcggtgcaattgccattcccatatccggactagatattaaattctcagacatgcctctcttatncctccgcaaagcaacacctcaatagtcggttttgcagtacctcgtgtgttaatactcttccgagacatcggagaatagatctctcgcatctcttaaagaaattatagccctccgatcgtactcctatatgtagaacggccccttctcaccttgctttgttcatccgacggcgtattatgcagtgccaactcccagggtgactaagttctaaaatcctactgcggcgcgcacgtcttctttctgcgattaaaatatttctgcttgcggtcgaacctgccatatctcatcttctttgtctacgtacgttcatcgcacatctgntcatacacggcgtttaatagtcgatattagtcatatcgcatcagccatcgaacaatgctgactctagtgacattgctnaagttatagagatcagttgtctttgttgctctgctgtccacatgcgattgtaggctacacatgtcagcnctcattaagancatcaccaacgcgctaggtcttagaactcctttatgcgacctcgcgcagtgacgaatacgtatcgtgagctacataccaccagctagatanctcgactcagctgctgcagcctcaacatcttactttagantccgcgctacactatctatctacacacgaccagcggctatttggtgaggacagtgagntcaatgttctatgtgctatgaagagctctgagatgtcgctcatcgcgcactatagaancgaatnctataagactatagngtactcaactttactggcacatcctgacatgatgagagatgcgcatnctctgacgatcctccaaccacatngaatagcacgatacangtatctatactagcangatgaacaggagactaganctaaatatgnaaagtgtttgcgtagggctnctctctatcgcgcagacggcgctcatacatcantancggccagcaccgacgataantccggattatcatgcctactctattgtcgac

SEQ ID NO: 5620 - DNA, 291 bp, Glycine max
  Peptide Sequence Number=SeqID_8422
  Probeset Number=SeqID_15399
aatctcccacttcggctcgtggctttaagtagcgacagaagggcattatacatattgcatgtatatattcaatgtacattaattggaattcttcaactcttgcggtcgtcgtggcgtctttatacaggcctggaaagaacatggaatataatgtagttgccagaaaaaagaactggtggaatgtgattcacatgcatgtgttgtggtccggtttgttagtacttatgtcttagctcgatctcgagatatggatgttgatttacagttgaaaatatgataataaatttaacg

SEQ ID NO: 5621 - DNA, 750 bp, Glycine max
  misc_feature (83)..(83): n is a, c, g, or t
  misc_feature (391)..(391): n is a, c, g, or t
  misc_feature (448)..(448): n is a, c, g, or t
  misc_feature (463)..(463): n is a, c, g, or t
  misc_feature (494)..(494): n is a, c, g, or t
  misc_feature (533)..(533): n is a, c, g, or t
  misc_feature (543)..(544): n is a, c, g, or t
  misc_feature (562)..(562): n is a, c, g, or t
  misc_feature (579)..(579): n is a, c, g, or t
  misc_feature (582)..(582): n is a, c, g, or t
  misc_feature (599)..(599): n is a, c, g, or t
  misc_feature (602)..(602): n is a, c, g, or t
  misc_feature (604)..(604): n is a, c, g, or t
  misc_feature (606)..(606): n is a, c, g, or t
  misc_feature (612)..(613): n is a, c, g, or t
  misc_feature (625)..(625): n is a, c, g, or t
  misc_feature (637)..(637): n is a, c, g, or t
  misc_feature (650)..(651): n is a, c, g, or t
  misc_feature (658)..(658): n is a, c, g, or t
  misc_feature (669)..(669): n is a, c, g, or t
  misc_feature (672)..(672): n is a, c, g, or t
  misc_feature (677)..(677): n is a, c, g, or t
  misc_feature (682)..(682): n is a, c, g, or t
  misc_feature (684)..(684): n is a, c, g, or t
  misc_feature (701)..(701): n is a, c, g, or t
  misc_feature (706)..(706): n is a, c, g, or t
  misc_feature (725)..(725): n is a, c, g, or t
  misc_feature (732)..(732): n is a, c, g, or t
  misc_feature (736)..(750): n is a, c, g, or t
  Probeset Number=SeqID_15400
tcagattaccgatcgaagtattactgactgttcatgtcctttctgtaaattacctgatctcaatgcgtctgaaatgacggaanacgatgccttggagtatttctccaatttggacattttactaaaaaatattatagaaacggatgtacatgagctatttcaacgaaaactgcgagaccgaacgctgttgcaagatccaaactttaaatggtgtattcagtgttcatctggcttctttgctcgcccccgccaaaagcgactcatttgcccagattgtggcagtgtaacgtgtgctcaatgtagaaagacttgggaagaccaacacgaaggaatcacttgtgaccaattttccgaatggcaagagatgaacgatccagacaaacaaatgganggagtctctcagcacttacaactgcaccggaatctcttgtccaaagtgcaaatttangtattcacttgcagnaggtggatgcatgcattttacctgtcgcagncaaatatgaattttgaatggatgtaacaaacctttaaantgggagcaannggggactcttcgatctgngcaacttggttacatcncanatccaaaatggtttttnctncngncaaagnncagggactccancttgttaaaacnattccatcacccnngctgganggtttcggccnacnaaagngcaangntttaatttgcttccaanaaaanaccaaggtggtcctggttnaggaatntaannnnnnnnnnnnnnn

SEQ ID NO: 5622 - DNA, 1785 bp, Glycine max
  misc_feature (1)..(1): n is a, c, g, or t
  misc_feature (45)..(45): n is a, c, g, or t
  misc_feature (137)..(137): n is a, c, g, or t
  misc_feature (311)..(311): n is a, c, g, or t
  misc_feature (333)..(333): n is a, c, g, or t
  misc_feature (381)..(381): n is a, c, g, or t
  misc_feature (418)..(418): n is a, c, g, or t
  misc_feature (443)..(443): n is a, c, g, or t
  misc_feature (445)..(445): n is a, c, g, or t
  misc_feature (448)..(448): n is a, c, g, or t
  misc_feature (463)..(463): n is a, c, g, or t
  misc_feature (494)..(494): n is a, c, g, or t
  misc_feature (561)..(561): n is a, c, g, or t
  misc_feature (616)..(616): n is a, c, g, or t
  misc_feature (631)..(631): n is a, c, g, or t
  misc_feature (638)..(638): n is a, c, g, or t
  misc_feature (685)..(685): n is a, c, g, or t
  misc_feature (752)..(752): n is a, c, g, or t
  misc_feature (1009)..(1009): n is a, c, g, or t
  misc_feature (1028)..(1028): n is a, c, g, or t
  misc_feature (1219)..(1219): n is a, c, g, or t
  misc_feature (1233)..(1233): n is a, c, g, or t
  misc_feature (1298)..(1298): n is a, c, g, or t
  misc_feature (1324)..(1324): n is a, c, g, or t
  misc_feature (1353)..(1353): n is a, c, g, or t
  misc_feature (1361)..(1361): n is a, c, g, or t
  misc_feature (1372)..(1372): n is a, c, g, or t
  misc_feature (1442)..(1442): n is a, c, g, or t
  misc_feature (1536)..(1536): n is a, c, g, or t
  misc_feature (1576)..(1576): n is a, c, g, or t
  misc_feature (1645)..(1645): n is a, c, g, or t
  misc_feature (1671)..(1671): n is a, c, g, or t
  misc_feature (1692)..(1692): n is a, c, g, or t
  misc_feature (1715)..(1716): n is a, c, g, or t
  misc_feature (1718)..(1718): n is a, c, g, or t
  misc_feature (1721)..(1722): n is a, c, g, or t
  misc_feature (1729)..(1730): n is a, c, g, or t
  misc_feature (1737)..(1737): n is a, c, g, or t
  misc_feature (1759)..(1759): n is a, c, g, or t
  misc_feature (1769)..(1770): n is a, c, g, or t
  misc_feature (1772)..(1772): n is a, c, g, or t
  Peptide Sequence Number=SeqID_8423
  Probeset Number=SeqID_15401
ngaggtgaggatgatagatcatgagagtcttgtactcatgtatgngtgaatcgtattctagtgcacgcgctcgtatgtgtgtgtgtgcagtaggtcgtgagctggttgtgctctatgtcattatatcacgctcatantgtgttgtcgcgaatgtggtgttgacggttagagttagatcgtgtcgttgagtgtgcatacacactatatgagatggtcatgtgttatcgagatatgtatataatgtcattacgatgtctgtgtctatggtgaatgcattgtgtatgtggactatacagttgagatccagcatnttgatgcggtgtgtgtgacgangtctgtagtaatgataggtatgctatgcatataataaaatagggatgnggatgtggatgaatagtacgtagatggtcgtgggtgnagacgcgggcgctgtgtttactgangntgnggtggtgcatctcantgcattcagcatcatcgtgcgcatcagatanatgtcaatgatgtcgcagagggcatgagtctgtaagcacgagcataacagacttgctgttcgtgtanacctgcacgccgtgtagcgctaatcgagcgcgtctcctgcgtgcgagttttatcntgagcgcctgattantgcatgncactactgtcatattatagcacactctgcagttcgcgctcatggagnctagcgtactactcgagtgtcagtattgacacgtctcgttatgaacaggtattgtacgtcgtgtagnagactgctttgagctatatcataagtagtagacatgtgtgacaggcacgatgtgagtcatgcactgtactagggcatgtgagtgagccatttgcgcagttaagtgtatgtcattctcatcactttgctcataggcatgtcgatatgtttatgtacgacttgattacattatcgtgaggcgattagatagataccgtgatgctggtgggcggctcagggctgcgcgtctgcaacattagtatcgtcgtctgcacaaanatattcacatacattagtntagagagattgtattctttcaactctcttcatcaagggcctcggtcatcttactacgcatccgcgctcgcatgactcgctcatgcgccgcgtctaccaggcagagatagcgaggagcagagagcacaagtcgggctgtcaacagcacatctatactagatctcgagatgacaacagagcagcagcagacancgcagggctacacncagacctcatcacatctatgtgtgattgatatgacgttgacatagatgttagagattgtcagatnctacagatgatgtggattaatgaaanatataatatgccgacaccccgtagagtanacacacanatcacacacanacttcatgaagtaatcgtgcatatacagatatcatacacatagacatattgcgagagagtgtagtggcanattatttatacatctgcttatcatactccgtgcacagtatacttcctctcttcctatcacatacacatcaaccttaccgacattgctgtactangacatcattaagatagatagatatatacacagatagacancaatcaatacatattcgatcatactgtttgtcttatctccccgccgcggcgccgcggggtggggggtgnggtcccccccctggtcttcttcacanctcacccaccacacaagatancgtcccgccaccgctccccgccnnanccnntcggttnnggggcgngtttgtattatttttcttctcnctactctacnncntctactttatttt

SEQ ID NO: 5623 - DNA, 4756 bp, Glycine max
  misc_feature (1)..(1): n is a, c, g, or t
  misc_feature (4428)..(4756): n is a, c, g, or t
  Probeset Number=SeqID_15402
ngtccggattaccgcgtcgacccacgcgtccgcctcttttaaagaaaaaaacttaaatcaaaatacttaatagcatggcgatacatttatacaaaacttctaccccaagcacacgcaatggagccgtagacagtcaagtaaaatccaatccacgaaatcatttgatctatggacagcatcgttgtggtaaaggccgtaatgccagaggaatcattaccgcagggcatagagggggaggtcataagcgtctataccgtaaaattgattttcgacggaatgaaaaaaacatatatggtagaatcgtaaccatagaatatgaccctaatcgaaatgcatacatttgtctcatacactatggggatggtgagaaaaaatatattttacaccccagaggggctataattggagataccattgtttctggtacagaagttcctataaaaatgggaaatgccctacctttgagtgcggtttgaactattgatttacgtaattggaagtaaccaactaggtttacggcgaaacctagaaatcgatcactgatccaattggagtacctctacaggatagacctcaacagaaaactgaagagtaacggcagcaagtgattgagttcagtagttcctcatataaaattattgactctcgagatatagtaatatggagaagacaaaattgtttcaagcaccgacagaaccggaagcaccctttgtttcaaagtttcaaagaggggaggacgggttattcacatttcatttgatggtcagaggcgaattgaaagctaagctgtggtaattctaaggattccccccgggaaaaatagagatgtctcctacgttacccgtaccatgtggaagtagcgacgtaatttcatagagtcattcagtctgaatgctacatgaagaacataagccagatgaaggaacgggaagacctaggatgtagaagatcataacatgagtgattcggcagatttggattcctatatacccactcgtgcggtacttcattgtatgatctatatctatatatctatatctatatatctatctatagatatatagatatataagatccatctgtatagatatcatcatctacatccagaaagccgtatgctttgtaagaagcttgtacagtttgggaagaggttttgattgatcaaaaagaagaatctacttcaaccgatatgcccttaggcacggcaatacataacatagaaatcacactcggaaagggtggacaattagctagagcagcaggtgctgtagcgaaactaattgcaaaagaggggaaatcggccacattaaaattaccttctggggaggtccgtttgatatccaaaaactgctcggcaacagtcggacaagtgggaaatgttggagtaaaccagaaaaatttaagtagagccggatctaaatgttggctaggtaagcgtcctgtagtaagaggagtagttatgaaccccgtagaccatccgcatgggggtggtgaagggagggccccaattggtagaaaaaaacccgcaactccttggggttttcctgcacttggaagaagaagtagaaaaaggaagaaatatagtgataatttgattcttcgtcgtcgtactaaatagtagagaaaatagaaattgtttcttcgtctttacaagaaaaaggagtaattaactgtgacacgttcactaaaaaaaaatccttttgtagcgaatcatttattaagaaaaataaataaacttaacacaaaagcggaaaaagatataataataacttggtccagagcatctaccattatacctacaatgattggccataccattgctatccacaacggaaaagagcatttacctatttatataacagatcgtatggtaggccataaattaggagaattttcacctactctaaatttccgaggacatgcgaaaaatgataatagatctcgtcgttaacgttaattttaacataaatttttaaatcgtaatttataactaaatattacaaaatggaattcttattaaaatgaaattcaaatcatttcttttataaaaaaaaaaaaaattatttaattaaatatttaatgaaattaaatatttaaattaataaaattagtcgtgttttattcgattttttgaattggtttttttttacagtagctaatgctagtcaccgaacttagtcaatgagctagaatgggttataaagatatctatagatatatatagatatatttatctatagatatctttagaaaaaaaaaaaagaaaataaacaaataagacgtatcattttatgtatagtagtggggaattatgggacaaaaaataaatccgcttggtttcagacttggtacaactcaaagtcatgattctatttggtttgctcaaccaacaaattattccgagaatatacaagaagataaaaaaatacgagattgtatcaaaaattatatacaaaaaaatataagaatatcctctggtgttgagggaattggacagataaagattcaaaaaagaattgatcttattcaagttataatatatatgggatttccaaagtttttaatagagggtaagtctcaaaaaatcgaagaattacagacgaatatgcaaaaaaaactgaattgtgtgaatcgaaaactaaacattgctattgtaaaagttgcaaatgcttataaacaccctaatattattgcagaatttatagctggacaattaaagaatagagtttcgtttcgtaaagcaatgaaaaaagctattgaattaactgaacaggcgggtacaaaaggagttcaagtacaaattgcaggacgtatcgacggaaaagaaattgcacgtgttgaatggatcagagaaggtagagttcctctacaaaccattcgagcgaaaatcgattattgttgctatacagttcgaactatttatggggttttagggatcaaagtttggatattttctaaataaagaaaaatatattattctttatcttaaatgtgctatattttatcttaaatgtgctatatttttttttagaaaacaaaaaatgaaaaattactcgatttttatttctccaaaatgatcaattttataagattgaatcgactaaaaaatgaaatgaatcatttcatattgatagtattgctatgcttagtgtgcgactcgttagttttttagaacggttccaatttaacaaatttataaaccggttcatcgtataaatgaattaaaaaagaactaataaccaacgcatcgcttcggattatctagatctaaagaactagtcaaaacaaaaaaaaatataaaaaaagatatattatagcaactgaactattgtgaagcataaaagaacaaaaatcttatttagttgtaaagcaataaaaatatacagataaatgaagaggtgaaagaaagagagaaaaaaaatcaatgatatagaattctaatatgtaaaggtctatgggttatctcataaaaggtagtgtaataaagcatcaatctaaatcaattcatatctatttatatatgaattaatttataacgtaaacaaattaagagctctgaatcaataaaaactgagaatattgattcacgaaaaaacaaatcaatattcgaaaaaaaaaaagattattaattttaagatatgagaaaggctccattgtcgaattcagacctaaccattaatcgagaagtgatgggaacgacgaaacctgcaaatacttaagattttattaaaaacaaatcttaatgattcattaggtgggatggcggaagaaaccaaaaagcaatcctttttttaggagttgtgccctacattacatctgaatttgattgataataaaagagtaaatattcgcccgcgataattttgattttattgaattttttttttatttttgccaattctatttattctttctaataataaaaaatattctaataactaataataaaaaggaaaataaagattcattagaatattataaaataacaaataatagaacaaaacaagattctttagttatatatgtaaaaaaaaaatggtttatttataagaatacatattccattctatatcaaaacaaaatataaaaatttggaatagattctatgaaatctcaaaaaatcccgctattcaattattcattaaacatatgaatattagtgcatattattttatcgattagattaaatagatcatgcatagttacatgaaattttcctctcatacggctctctttcgaaggaagcaattcagagagatatctatcaatatatatagataatctaagtaatctaatcgataaaataatatgcactaatattcatatgtttaatgaataattgaatagcgggattttttgagattccatagaatctattccaaatttttatattttgttctgatatagaatggaatatgtattcttatnnnnnnnnnnnnnnnnnnnnnnnnnnnnnnnnnnnnnnnnnnnnnnnnnnnnnnnnnnnnnnnnnnnnnnnnnnnnnnnnnnnnnnnnnnnnnnnnnnnnnnnnnnnnnnnnnnnnnnnnnnnnnnnnnnnnnnnnnnnnnnnnnnnnnnnnnnnnnnnnnnnnnnnnnnnnnnnnnnnnnnnnnnnnnnnnnnnnnnnnnnnnnnnnnnnnnnnnnnnnnnnnnnnnnnnnnnnnnnnnnnnnnnnnnnnnnnnnnnnnnnnnnnnnnnnnnnnnnnnnnnnnnnnnnnnnnnnnnnnnnnnnnnnnnnnnnnnnnnnnnnnnnnnnn

SEQ ID NO: 5624 - DNA, 1506 bp, Glycine max
  misc_feature (18)..(18): n is a, c, g, or t
  misc_feature (20)..(20): n is a, c, g, or t
  misc_feature (24)..(27): n is a, c, g, or t
  misc_feature (72)..(72): n is a, c, g, or t
  misc_feature (76)..(76): n is a, c, g, or t
  misc_feature (119)..(120): n is a, c, g, or t
  misc_feature (164)..(164): n is a, c, g, or t
  misc_feature (168)..(168): n is a, c, g, or t
  misc_feature (225)..(225): n is a, c, g, or t
  misc_feature (400)..(400): n is a, c, g, or t
  misc_feature (498)..(498): n is a, c, g, or t
  misc_feature (589)..(589): n is a, c, g, or t
  misc_feature (710)..(710): n is a, c, g, or t
  misc_feature (751)..(751): n is a, c, g, or t
  misc_feature (1001)..(1001): n is a, c, g, or t
  misc_feature (1245)..(1245): n is a, c, g, or t
  misc_feature (1341)..(1341): n is a, c, g, or t
  misc_feature (1378)..(1378): n is a, c, g, or t
  misc_feature (1483)..(1483): n is a, c, g, or t
  misc_feature (1489)..(1489): n is a, c, g, or t
  Peptide Sequence Number=SeqID_8424
  Probeset Number=SeqID_15403
gggggagtgggccggtgntnttgnnnntggttttcggcgtccctccctctcccaccccccccgccacctacncctngggacggggacatccatgctgagagagtcacgaagaaagcacnnacgagtgaggggcggggagaggagagagtggggaggagtgtggngganaatatttgtgaatgtgatgtggtgaaggcggtgagggccccacccaaacgcacttcngactgcgagaaccatgaatggcaaacagccagcgcggcgggaggcgcggggtaggcgagccagctaccgacagtccgttaagatggggtttcgctgtgtgtgatacgacagttagccagagagatgaggatgctggtagctctacaaagacctcagctcaatgggtaaaatatanaaaattaagagagtgcagggatatagggcgcgctggttgaggggtgaagtcgggtggtgggtgaggcgggcggggcggcgtggtgtgggggttgtganggaaggtaggcgagagagcacgcgtggctgcgtcacgcggtctggtatcctgcacgccgttaatgcagtcatcccttcatatatgtagtgntgatgtagatagctttaataaagaatatctaattaaatcaatataatccttctaacactacatgtcttcacacataggtcttcgctagcatctggagcgattcggatcttggctgcgtgancgagagtgtgtgtgatagtgataatctatatgggagacagnacagccaccacaccggcgtgtgtaggattaactctagtattacgcatgcgcgctccaagatcttgctcttcactcaggagatcccctatcatatactataacatggccacactctatgaggatcgctatcgctgtagctcagcgcgccgtatgtgcgcgtgtgactagatctatctctgatctacggagagtatagtagagacgcgccgtcattggcgcagagtcacgtgcgagcgctcgccgcgcgcgncgcggcgccgatggactcgtgctagagagtgtatgcgttgcgcctatctcgcagcgaccagcatgctcatcgcagaagaacgagcgacgagtgcctgactcgaaccagcacggtgcggtactcaccgtgtcaggatgcacatgatccactacccaggaccgcgatgtcgcgcggcgtagagacgtgcgtgcggcgtgcctgtgtacatcagcaggtgtgcccgccgcgcatatgtctagcaccntacagcgatccaccaacgatcctcatctatctgatctaatctctgacgtgttctcccattacatgtcgatggtgtacacgcatatctgcatcagtnctaggctgcgtatcatgtatactctctcacatctctngtagatgtcgtatggcatcatcccctcgacatgcagacgttcatgtgatcatgacctctgaatggcgagaatgccacgagaacccatcacactcagagcatccancactanttgacatctgcactctg

SEQ ID NO: 5625 - DNA, 780 bp, Glycine max
  misc_feature (1)..(142): n is a, c, g, or t
  misc_feature (780)..(780): n is a, c, g, or t
  Probeset Number=SeqID_15404
nnnnnnnnnnnnnnnnnnnnnnnnnnnnnnnnnnnnnnnnnnnnnnnnnnnnnnnnnnnnnnnnnnnnnnnnnnnnnnnnnnnnnnnnnnnnnnnnnnnnnnnnnnnnnnnnnnnnnnnnnnnnnnnnnnnnnnnnnnnnnntcagctacgtaggcccccccccccttgaagtttggtgagtcgacaaactgtgttcgagtttcattgaacatcacggatgatgccattagtgtctcttgcacggacgctgggcagggcatagcttcggactttattcgccattcgatttttgatccgttttctcaagaaaatcctgtcaccgagggtactggtcttggactttctatagtcaagcagacggtcactatgtttgatggcgatgtacagatcgagtcgagcaagaagcaaggttctactttcaccgttagactcccatcgactcaattgctgcaccgcccactggatagtgcagcagagtacatcgacactcaatctagtactgctgagttgcctcagctagtgatcagtcttttcaccccaagacggtgggagacgggcgatggagtgagagaccaacggcgacttggattactactagattcgcttacgcaaggtctaagacggtggtttcatatcacggtcattccttgggagattgcaagcatgaattcgcagtcgcggctgcttatcgctttgaaagaagacgaagagagcgcaaaactgacctacggtggcacgtacagcgacgctgagcgtatcttgctttatccagatatgcn

SEQ ID NO: 5626 - DNA, 1837 bp, Glycine max
  misc_feature (1)..(1): n is a, c, g, or t
  misc_feature (70)..(70): n is a, c, g, or t
  misc_feature (233)..(233): n is a, c, g, or t
  misc_feature (287)..(287): n is a, c, g, or t
  misc_feature (393)..(393): n is a, c, g, or t
  misc_feature (451)..(451): n is a, c, g, or t
  misc_feature (541)..(541): n is a, c, g, or t
  misc_feature (616)..(616): n is a, c, g, or t
  misc_feature (628)..(628): n is a, c, g, or t
  misc_feature (652)..(652): n is a, c, g, or t
  misc_feature (654)..(654): n is a, c, g, or t
  misc_feature (700)..(700): n is a, c, g, or t
  misc_feature (737)..(737): n is a, c, g, or t
  misc_feature (740)..(740): n is a, c, g, or t
  misc_feature (771)..(771): n is a, c, g, or t
  misc_feature (790)..(790): n is a, c, g, or t
  misc_feature (837)..(837): n is a, c, g, or t
  misc_feature (852)..(852): n is a, c, g, or t
  misc_feature (983)..(983): n is a, c, g, or t
  misc_feature (1030)..(1030): n is a, c, g, or t
  misc_feature (1192)..(1192): n is a, c, g, or t
  misc_feature (1227)..(1227): n is a, c, g, or t
  misc_feature (1255)..(1255): n is a, c, g, or t
  misc_feature (1260)..(1260): n is a, c, g, or t
  misc_feature (1288)..(1288): n is a, c, g, or t
  misc_feature (1297)..(1297): n is a, c, g, or t
  misc_feature (1301)..(1301): n is a, c, g, or t
  misc_feature (1336)..(1336): n is a, c, g, or t
  misc_feature (1410)..(1410): n is a, c, g, or t
  misc_feature (1414)..(1414): n is a, c, g, or t
  misc_feature (1482)..(1482): n is a, c, g, or t
  misc_feature (1488)..(1488): n is a, c, g, or t
  misc_feature (1519)..(1519): n is a, c, g, or t
  misc_feature (1534)..(1534): n is a, c, g, or t
  misc_feature (1621)..(1621): n is a, c, g, or t
  misc_feature (1638)..(1639): n is a, c, g, or t
  misc_feature (1654)..(1654): n is a, c, g, or t
  misc_feature (1691)..(1692): n is a, c, g, or t
  misc_feature (1697)..(1698): n is a, c, g, or t
  misc_feature (1702)..(1702): n is a, c, g, or t
  misc_feature (1730)..(1731): n is a, c, g, or t
  misc_feature (1733)..(1733): n is a, c, g, or t
  misc_feature (1736)..(1736): n is a, c, g, or t
  misc_feature (1746)..(1747): n is a, c, g, or t
  misc_feature (1758)..(1759): n is a, c, g, or t
  misc_feature (1761)..(1761): n is a, c, g, or t
  misc_feature (1776)..(1778): n is a, c, g, or t
  misc_feature (1799)..(1799): n is a, c, g, or t
  misc_feature (1801)..(1802): n is a, c, g, or t
  misc_feature (1811)..(1812): n is a, c, g, or t
  misc_feature (1815)..(1815): n is a, c, g, or t
  misc_feature (1823)..(1823): n is a, c, g, or t
  Peptide Sequence Number=SeqID_8425
  Probeset Number=SeqID_15405
ntgtatctagtggaccatagtctgtaggtgatagtagtgtgcggtaggtctgtatctacgtgactcttantcgactctacgagcacgtgtcagcagcaggatatcgcgactaggacaggcagcagcaatcgtcactcgtcgcgggtgctgtgcgccctgcactctacacgcgtcacgcgtcgacagagtcgcctctgagtcgtgtatcgcagagcgttgatatatgtagtctnttgcccataccgtcatgctcgcacgccgagcagcgcgcagccgctgcggacgantgacacgaggagagacacagagagtgctgtcgccgggcgagagcgggcatgcgcgcgtccggcgcaccgcagcgcgccagcagccggacgcaggatctggcacgcntgtggaggctcgtcgaggcacagctataagcagtgctcgcgatagccacgtgatggantgtcgcgggagcagcgcgacagcgatgcctggactctgcagtagtaagcgcgcaggcaagcacagcagccgctcgggagcaggagcaganacagagagcgcacacacagcacgcgcggcgagcatgtcagaggcaggcgagacgtgccgtcgcactgcatgcatngcaagaacgaancagcacatcacacacagctacagngncagcgatcaggacagcaggttattagcaatagtaggaggtccgagngttcgtgtcctctccagctccgctctctcacatcgcnagnagctctccttcggtgtatgtgaatattgacnatgacaacgtacacacganacgacacacgatcatagaagtcgcacccgaagacgtgcagatgtgantgcgtcgtgtgatanagccgacagagcagttgagtgtaggactattaggagtagggatcgtctctcactataagatgcgcttgtgtgttgcggacgtgtgtcgaggccgtagatgatggaagtgtatattgtacattacatctgcngaagctgcaggtctagactctctacgcgcgcgaagacgatatacctntccacgtgtaggagctgggacccagagatacgtcgtacgagaagctagtgtatactctcatcgggtgtgtgtctagtctatctgttatatttgattcgtctctaacacaaacagtgcctccgcaatgtcactctgtatcatgtttgtcgatccttctactantcttccaatatatatggaaagatatatatggaganagtggtcctgacacgtgcaggtagagtntgtgnatggcgttggcgccagatcctgtcgcanacatcgctntacnggcattgccactacacgagaaatagagaggctganggacgacacagggtgagacatactagatatatatagttgtatgtcagagtatcactagctagatcagctcatcncccngtcactacctctcatcacaacgagacagagcacccgcgggcgatgcgcgcgtgttgttatttttagcnctatcntattcgtgtggtgcgttcggcccacagatgnctagtaaatgagatncaatgatctactgaagcgtgaaggaatagagattggaaaaaacataaacacagcgtgcggacatggagaaagagaaaaggaagatgnggccgcgccaccctacnntatacaaacataacntggagtgagagagacgcgggtcgagaaaaccaaatannaaaanngagngagaagaacaagatatataagaagaaannanaanacaacaacanntagcgcgcggnncnggcgggacggggggnnnacgcgcgaacaccacacacananncagacgagnnccncacaacgnaacaaaaaacaaaa

SEQ ID NO: 5627 - DNA, 562 bp, Glycine max
  Probeset Number=SeqID_15406
gagagagaggcgccgccaatgtggcggaatctagctcttctcctctcagaaattttcctctttctccgcgatctaggcgctctgcagcgctctctcaaacaaatactctcagggggtgtggggcgaccgctactatagcggcgatgtgtacatctaccccatataaaacctctgtggctctcgcgccctctaagacttttacctctacacccaatcttgtggggtgaacgtgcagacctattctgggtctccggggaaattttccgcctataccgccgtgctctacccccacaacagcatcttgtgggtatatatctcctctgggggggacctctcacacgggtattatacctctgggggagagaaaatatctcccacctctatttacttctagagactctcttacacggtgaactctcccaccgggtatatctactataacagcttgtgaaagaaagacctatacttttcgcgacaactcttattctgtggtgggagagcgtaccctctcgattgtgactatacacatttctcgggaatctctgatatgtgcggagaattg

SEQ ID NO: 5628 - DNA, 630 bp, Glycine max
  Peptide Sequence Number=SeqID_8426
  Probeset Number=SeqID_15407
gactcaagggtgagctaaagggaagggactgcacaacctatgtctctacgggtttgattgtccctggtggcagctacggcctctgtttgcacggtcaataaaatctgctacttgctactaccactgtgggaatctcgatccaaagcgctttccgtgagatgcctcactattatcacgagaactgcgtcctaggagtctctctgcaggcttcgtgggtggcggaatctggagtcaacgatacgagtcttgaacactgggttgatgagctttgatatctacatcctgactatcacgcaggaagacacaatgcaacacttacccagaacgcacaatgtactacatgtatcgatctcgacctttaccggattaggcataccttgtgctatcggcggcccaatagggacagcgctccaggctcttgagtctcgcctaacactcgcggtgagtggagggagattcaagaggaaagaaaatccttggattgacgaggctgatcagagagatgccctggatcaccttctgaggatagcctgcataaacgacgactatctctcgataatgcccgatgatgctgagactccaagcgcgcacactatcctcctctagacgaggagcgatggcatccctcca

SEQ ID NO: 5629 - DNA, 1512 bp, Glycine max
  misc_feature (1)..(1): n is a, c, g, or t
  misc_feature (19)..(19): n is a, c, g, or t
  misc_feature (54)..(54): n is a, c, g, or t
  misc_feature (128)..(128): n is a, c, g, or t
  misc_feature (324)..(324): n is a, c, g, or t
  misc_feature (348)..(348): n is a, c, g, or t
  misc_feature (392)..(392): n is a, c, g, or t
  misc_feature (417)..(417): n is a, c, g, or t
  misc_feature (523)..(523): n is a, c, g, or t
  misc_feature (580)..(580): n is a, c, g, or t
  misc_feature (661)..(661): n is a, c, g, or t
  misc_feature (673)..(673): n is a, c, g, or t
  misc_feature (680)..(680): n is a, c, g, or t
  misc_feature (736)..(736): n is a, c, g, or t
  misc_feature (1112)..(1112): n is a, c, g, or t
  misc_feature (1133)..(1133): n is a, c, g, or t
  misc_feature (1146)..(1146): n is a, c, g, or t
  misc_feature (1313)..(1313): n is a, c, g, or t
  misc_feature (1467)..(1467): n is a, c, g, or t
  misc_feature (1487)..(1491): n is a, c, g, or t
  misc_feature (1507)..(1512): n is a, c, g, or t
  Peptide Sequence Number=SeqID_8427
  Probeset Number=SeqID_15408
nccttcacctgatgacacnttcgcatacattatgcgatcagcgctcgtccgtcnattggtcgtgcgtcgcgtctggctgccctatgacactcacgtggtagcctcacagacacacgctcaccacatcncacatcatgctagattctatcatttatgctatcgccgtcgcgtcttatctgcgtctatcaatcatgtgtacatactcgatatgctaattatctaagccattactcgtcgatctttgcctcttgtctatcctacacgcacatgtatgacgagcactgacacagcataccggccgctactcacgttcgcagatagtgngtctattgcagagaagtgtgtatngtgtgatcaggtggacgtctgatgtatccaccgacgccgctcgnggtgagactggtggtgtcactcgcnctatgtgcggccgacgcggcgcgtatcgcgctcttctgtgacgccgtctgttactagcacgctgaacactagcacacaccttcagcgtcacatctcatcaccagtnatgacatcactagctgcatagcgtatatgctgttctactgcgcgcgtctcacatgtntcgatctctgctgtgtttcgttctataattattgtcgtctacatgtgctaatcacggtctgtcgcgctctctgtgatgtcntatcgcgcatgnatgtacntgatcagtcctcctagcagtagcgatctgtcgcggcgcagcagaaagtagagtgangttgtaggaagagccgacatccgttgcgtcgctcgctcgttggacgctgtcatgtatcgtctattcgcatacctagacttccttcttactcgtcgctctcatatacatccaaccctcagcccgcgaccactcagattgtaaacacgagatgcgagataataggaggtgagtcgtagcctctagactcaagtgagggcgagatgagggccgcggactgtggtcgcgtcgtctacttgaggaaagcatgattactcgttctattatcatatctgtgatcgttgtgtttgtatattattcatcatacgttacttgtgcgcttgtggtgcttgttgtgcgggtcttgtgtgcggtttccgtccttgatcgtttgtgtcgnacctttctcgtgcgtcctcantctgacgcaagancgcgacacacgccggggcagatgggtgcgcattgagcgcggcgttgttcatgacccagccacctaaaataacccacgaacaactcattctgcagtcagcgcgtgacacgcaccctctatttcgtcagtgttcttgctgatgccgtagatccattattgtgttagacnatatcttcttgtgttcgctctggtcgctataaatgaagaagagggaagagagaagttgggattctgtatacgcacgccgacacatcgaagggaggaggcccctcggtaacgctcattcttggtatggctactgtcgcgtacggtggaggagtcntgtgttctgtcttcggggcnnnnntaatccaccaaatttnnnnnn

SEQ ID NO: 5630 - DNA, 855 bp, Glycine max
  misc_feature (635)..(635): n is a, c, g, or t
  Probeset Number=SeqID_15409
acttatggataagaggaaatggaagtgagtggaaggagctgtggcgttttgggcctcccttattgtgtacctgtgagaaaaaatggaaggaggtttgtgacaactttggctaaaaggaatgagtctcaagagaagagtgagggaccctctttcacactgagggtttccaagtcaactatcgctcgtggtgccattggactgtttggattggggttcgtcgatgccgggtacagcggagactggtcgaggatcggagtgataacaccgcagactgaggatttgcttaagcttgcagcttttctcgtggttcccttgtgtatttttctaattttttttctgcccagcgagcaaaattcttgaattcttctactggaatttattgagtttggttgaatatcttgtatacttggggtttaaaactcaatggaatacaatagtcgttctaaatcccgaaaaaaaaaaaaaaaaaggcagcaagcggaaaagtgaagaggggcgtcttaacatctcgcccacacagctttccttttacttttattcctcccccctaatttttacctcctacccatgggttattcggtgaacccgttcctctctcctcttcctccgcgcacctcagtagatcctccttattnaaaaataaccgaggggaaattctcaaacacccataagcgggagaaaataaaacctcacctgtcccgcccgctgaaaggtcaccacctctcctctgaaaacccccccacccctcagcgccaccttctctttcgggggcgatctggggtgtgcctcccccacgccagcaagcaatcgcgacctccccaaaatgggccggccctctcctctctttcccatctt

SEQ ID NO: 5631 - DNA, 1509 bp, Glycine max
  misc_feature (53)..(53): n is a, c, g, or t
  misc_feature (127)..(127): n is a, c, g, or t
  misc_feature (217)..(217): n is a, c, g, or t
  misc_feature (232)..(232): n is a, c, g, or t
  misc_feature (234)..(234): n is a, c, g, or t
  misc_feature (367)..(367): n is a, c, g, or t
  misc_feature (436)..(436): n is a, c, g, or t
  misc_feature (439)..(439): n is a, c, g, or t
  misc_feature (492)..(493): n is a, c, g, or t
  misc_feature (822)..(822): n is a, c, g, or t
  misc_feature (942)..(942): n is a, c, g, or t
  misc_feature (1006)..(1006): n is a, c, g, or t
  misc_feature (1406)..(1406): n is a, c, g, or t
  misc_feature (1414)..(1414): n is a, c, g, or t
  misc_feature (1485)..(1485): n is a, c, g, or t
  misc_feature (1488)..(1488): n is a, c, g, or t
  misc_feature (1509)..(1509): n is a, c, g, or t
  Peptide Sequence Number=SeqID_8428
  Probeset Number=SeqID_15410
cccgcggcgcggtgcagagctcagagagcagacggcgcgtgcgcgcgtcgcancatgtgctttgcgtcgtcgcgccgatgtgtgtgtggtgtgcgcgtcgcgcggtgacgacgcatatatagagatncggatgcagtcagcatgcgtgcgagcgggacgcatcacatcgctacacacttcgtcgttgctgtcgcgcgctgcgcgagtgactccgcgncgtgcactcacgatncntctgtggtagcgcagtagcattcatcgactcctctgtcagcagagatggtgggcgagcatcgcgcgcgcagcgcgacgtcgcgtgtcggcgcggacgcaggtcgcgcacatgatctctcgcgcgtgctgagtngtgaatgctctctgatgcgccgtagtcgtactgcaatcttagtatagtcgctgtctgtcgtggaggtantgnggtgacgtgaggtcgtactcgctgcgcgtacacaatgcgagagcagtcagggnntggtctactctcgtctcgtgcgatcttctgacagaccgagcacgagcgcttccgtatgcctgtcgtgttggtagtcatagttggtacgtatgagagtagatactcaactcactcacataactgacactgtagatagtgtctcgagcagactcacggtgcatgtcgtaagcgcgacgtagcgactgtctagtcgcgcgcacgtgatcgcgaatcgagtagaaccagcaaagctcagtatatgtagctggtgtgtagtgagagacgcaaaggtgatgaactgtcggtctgactaatgtcgtgagatatgcatattaggcgaaggtagatangggtccatactactcatttaaattatgaattctataacgagtatcacgcgcataacgtcactaaactcaatgtagaataagtgtggtatgttcgcaggagtggtttgtgtgtgcactctnctggttctgatagtcatatacaagatgcagagagtaaaccaaatcaggatagtgagaacggggnacaagtataatgagtagaggcagaagtgcgacgtatgccatcagacgagagtaacgagcggcatagatggcgaagcgggcagaggccactgttggtggcggcggctggcgaggagctatgcgcgacagatggtattccatcattattcccaactagcgggcataattcttgtgctgtatgttcggtcgtgaatctgtatggcaggacgaaggaggtagaggaggcagtgagatcagaagagacaaaagataacgctgtagcgcggtagtgttgttcgtcctgctgtgggtgtgtgagactcctagcgaggcgtggacgccacgctcgtatcgtgccaccgcctcacgtcctatgaccgtattctctctccgtcgccctcgtgtgtccatgtgcggacacnccgatgtntataaatatagacatctctggtggagtcgtccaggggtgagttgagactcgcggtcgttgcgagattaganaanaggaagacaagaagagggaan

SEQ ID NO: 5632 - DNA, 2124 bp, Glycine max
  misc_feature (1)..(18): n is a, c, g, or t
  misc_feature (23)..(43): n is a, c, g, or t
  misc_feature (47)..(48): n is a, c, g, or t
  misc_feature (56)..(56): n is a, c, g, or t
  misc_feature (72)..(72): n is a, c, g, or t
  misc_feature (74)..(74): n is a, c, g, or t
  misc_feature (85)..(85): n is a, c, g, or t
  misc_feature (108)..(108): n is a, c, g, or t
  misc_feature (121)..(121): n is a, c, g, or t
  misc_feature (211)..(211): n is a, c, g, or t
  misc_feature (214)..(214): n is a, c, g, or t
  misc_feature (226)..(226): n is a, c, g, or t
  misc_feature (270)..(270): n is a, c, g, or t
  misc_feature (279)..(279): n is a, c, g, or t
  misc_feature (306)..(306): n is a, c, g, or t
  misc_feature (365)..(365): n is a, c, g, or t
  misc_feature (498)..(498): n is a, c, g, or t
  misc_feature (625)..(625): n is a, c, g, or t
  misc_feature (657)..(657): n is a, c, g, or t
  misc_feature (698)..(698): n is a, c, g, or t
  misc_feature (944)..(944): n is a, c, g, or t
  misc_feature (1143)..(1143): n is a, c, g, or t
  misc_feature (1171)..(1171): n is a, c, g, or t
  misc_feature (1237)..(1237): n is a, c, g, or t
  misc_feature (1357)..(1357): n is a, c, g, or t
  misc_feature (1374)..(1374): n is a, c, g, or t
  misc_feature (1380)..(1380): n is a, c, g, or t
  misc_feature (1382)..(1382): n is a, c, g, or t
  misc_feature (1459)..(1459): n is a, c, g, or t
  misc_feature (1544)..(1544): n is a, c, g, or t
  misc_feature (1566)..(1566): n is a, c, g, or t
  misc_feature (1604)..(1604): n is a, c, g, or t
  misc_feature (1647)..(1647): n is a, c, g, or t
  misc_feature (1653)..(1653): n is a, c, g, or t
  misc_feature (1705)..(1705): n is a, c, g, or t
  misc_feature (1716)..(1716): n is a, c, g, or t
  misc_feature (1722)..(1722): n is a, c, g, or t
  misc_feature (1802)..(1802): n is a, c, g, or t
  misc_feature (1909)..(1909): n is a, c, g, or t
  misc_feature (1978)..(1978): n is a, c, g, or t
  misc_feature (2066)..(2066): n is a, c, g, or t
  misc_feature (2069)..(2069): n is a, c, g, or t
  misc_feature (2074)..(2074): n is a, c, g, or t
  misc_feature (2098)..(2098): n is a, c, g, or t
  Probeset Number=SeqID_15411
nnnnnnnnnnnnnnnnnnaaaannnnnnnnnnnnnnnnnnnnnaaannccccaaanggtgcagaataacgangncgcgtagaatnagagttgtgaagcaacgataatnatagcagtgaggnagatacagagtatagatagtagtgagactcgtcagagcgcaaactcgccaggaacctgtattctctccacaaacaaacagagacatagtnatncgccgcggcgcngcggagacgcggtcggtgtggtcgcccgctcacagaagagcagnagtcgtcgntcaggcgtgcgtgtgtagtatatcatntgatcatccactgtatctctcataactactctaccacattcgtcctatctgtcctatantattattttctcgccgcaccactctacatacgtaatatcatgcgccctgatatactatactatcggtccgatgtatatgtttgatatatatctatgatataagagtcatttatatctatatgtaatatataanatgtatatctcatatgtcgtgtttgtctccggtgtccctactgtgcgcgctctctcgtcaatctgtgtctactcttgtctccatctctaacctgctctccgcttatactgcctctcctatctctacnctcggcgaacgatctatctactacccacctcncctctcgtgcgctatctcctttctcgcaccggaacactctnacctctctaatcagctgtacgatctatcctcacccggcgagcacacggtatgctgcagcgtcgcgtgcgcgcggcacgtatggcgtgcatcgggtgatgtgtgctctcattcctcggacgaagacagcgccagtgatctcgtgtaatgtattgtagatgtgttatcagtatataacactactatctgagtagaagcgatgcgtaggacgagtagaatacggtgacggagagagaaatgataggtgnatcataatcacatctatcacacacctacagtgcactctaccatgcgctctgtcgcgatgcgctcgctatgatgtgtatcactgtcgtgtatgatgtgagacacgcgagcactgccgcgtcgtggcctcgtgtgtccacatctgctcagctgacgtccgctcgtacgagacactataattatatatatatatatatatcnatatagcacactggtataatatgatatntaattatgtctgcaatgattgtacatcgatagactatacatctctcgtccgtgtcgctctcaccgnatcgtgacgtagtgcgtagttgtcatgtcagaacatgctgaatgcatcgaagagtgactgtcgcgcaccgattgtaggctgatactaatgctagtcgtgggtgtgcgtcgagtgttgatngatgtgagtggtgatgnacgctngnagcatatagtagttcgtgtctgtgcatgatcgagtgacgtctcacagttcagtgatttaatcgtgctgcgagcgcgnatcgtcctacactccctactcatccgcgcacgatgtgtgctatcgcggcactgcactgccggcgcgtgagctggacgatgcgtgngcgatgtcactcgactcgccgncgcgcgtgacgcgcagcagcgcagacacgctcgttcantcatcactgctcatagctgacgcgtacacacagcttctattancatctngtgcagatgtacgctgggacgcttcactcattgtctcgatatgtctactgcnacacttctgcnactcantaatcgctgtatacagacggcgcgtcgacctcacatcttatgtgtctcaactcgcgtcgactctcgatgtcaacatagcnatcaccttctgcgactcatcgcagacacgagcgtgaggagagaactgcgtcgatgtatcaccgtgtgagcactacgcgcgctcttcgcgcgtcatacgcgactgctncgatgctccgtgtcgtggtatctgacgacgatgcatctcgtcgagagctctctctccctctctatttcngcatcgtggtactgcatgtgcgacaccacgacgatagccgcaatgacctctgcacccaaggtacggacgtatacgtatgcagaggacnacntgcgngtcccccatcaacttcgtcccctnatccgcagcacactcgctacaaatgc

SEQ ID NO: 5633 - DNA, 468 bp, Glycine max
  Peptide Sequence Number=SeqID_8429
  Probeset Number=SeqID_15412
gtgtctagctagatagcactgttctaacttttcttattgattattatccatctatctacgactttggtctaatttatgatcaagcaaaaaaagggccaaagcccctaaacgaacaataaattagattatagcatagtgaagaatggcagatcatttgctgttaaggatgagatattctgcttgctcgagggggctctaaacaatctgtgcatcctgagacaacagtatggactgaccaagtcaggcaatgaagtggttttggtgattgaggcttacaaagctttacgtgatcgagcaccataccctgacaatcatgatgaatgccatctcagtgagagctatgctttcatagaccctgacaagaccacttctacactttttgcgacttctgatcaagctggtaaggttcctctttataggggaatcacagctgatggatatatagcatttgctgatgatgcatatttg

SEQ ID NO: 5634 - DNA, 419 bp, Glycine max
  misc_feature (345)..(345): n is a, c, g, or t
  misc_feature (355)..(355): n is a, c, g, or t
  Peptide Sequence Number=SeqID_8430
  Probeset Number=SeqID_15413
gaccgatgctgtggtgaaatcgaggcccaaggtgaacccctttggggatgccaagcctagagaggctgtgctgggcgagcgaggcatggattggaggaaaattgatcttgaattggagcatcgctctgttgacaggcctgacacaatggaggaaaaattattaaaacaagaaattgataatttaaagaaacaacttgagaaagagtctactatacattcaaacaaggaatctgtggatgaggctggtggagacccaaccatgtctacatgcactatcactacaacaatgaaaggaaactgatcttcttatcagtgatttgcacgacaaattagttttagacatantgtcatttantggctactatcattatatgtattattttttctttttttattcacttctatttctatcttatttt

SEQ ID NO: 5635 - DNA, 1750 bp, Glycine max
  misc_feature (1)..(1): n is a, c, g, or t
  misc_feature (1735)..(1750): n is a, c, g, or t
  Peptide Sequence Number=SeqID_8431
  Probeset Number=SeqID_15414
ntaccgggccccccctcgagtcagctacgtaggccccccccccaagaaaatctatcaaaatagttttggcccgaccttaaataaagctcaagacatgtactattaaatcatacattatacttctttctatgccaactaaatcaagcacaaaggaatcaccccaaccagaaccgatccctgaaggtaacggttacaaactctacaagtatcgttatgttaccggagttatttttgctttagcagcaatccaaaatattctcatgtggcttatattctctccgatccaactccagttaactcatatttatgacctatctttggtcgttgtgaactttgcaacaatcctcatttctaatgtctcttatattcctgcttattttgttgcttcttacttcattgatacttatggactcagatttggcataattacaggcggtatccttaccacaataggcctttggataagatgtctctgtaaagaaggattcatctatctttttattggacagtgctttgctgggattgctcaacctttcttctacagcgttcctcaaaaaatctccaatgtttggtttggagctgaagaaagaactatggctacttctgtgattgctatttctctcactcttggcaatgcccttggagcttttctcccgcaattttttatcaatcttaaagaaagcgatacaggtatactacttgatcaaatacaaaatatgatgttttggactgctgttattggaagcattttcctggcaatcacaattctcatgttcaaagcaaaaccgccaacaccgccaagcaaagcagctgcagcacaaaagcacaattttcgtctgtcattaaaattacttatcaaagataaaaataccatgctattcttaatctcaagtgctgccgtagctggctcatttatcacttttccttctgttattcaagctactgctgatccttatggaatcaattcagatcaaattggaaacatcatgtttgctgcaatcttatttggattcttgggagctgtaattggaggcttctacgtcaatagaacgaaaaaatataaaaaatcagtcttgttctgctctacatcctctctcgcgcttcttgttgtcgtttatttttgcgctaccacagaaaatgtctttatttttggtgcagcctcttgcgtattcgcgacatttattagtccactcttgccattgtctatggaaactctagttgaatactcgttccctgttgctgaagctacttcaggaggtttctggtttgtgtttaatcaattcttgtcgactgttgaatctttgggtgttgatgctatctttagcaaagaaccaacaaaatcagaaggaagaatcgcgtttattattatgattgtgtatcaagccgtcgcagtgcttttaatggcgtttgttaaagaaaatctccagcggaccaaattcgaaaaagaaggtttgctggttttggatgaaattctcgatccaaataagaaaaacaaggaacagtccatacatcaacattctgttgatcgacaatattatccatagttccatacgtattttattttaaagaactttctgatgataaaaataagcctaaaatatgtttaaataagattgagttcatttgagaatatattattaataatctaaaacctctagtaaaaagtaatgaaattatagacttaactaacctgccaaagaaaaaaaaacctatcacaataaagtctacctcgacnnnnnnnnnnnnnnnn

SEQ ID NO: 5636 - DNA, 1437 bp, Glycine max
  misc_feature (23)..(23): n is a, c, g, or t
  misc_feature (29)..(29): n is a, c, g, or t
  misc_feature (70)..(70): n is a, c, g, or t
  misc_feature (83)..(83): n is a, c, g, or t
  misc_feature (127)..(127): n is a, c, g, or t
  misc_feature (345)..(345): n is a, c, g, or t
  misc_feature (405)..(405): n is a, c, g, or t
  misc_feature (1026)..(1026): n is a, c, g, or t
  Peptide Sequence Number=SeqID_8432
  Probeset Number=SeqID_15415
tgacgctcacagcatacagcaanagtcgnggcgtatataatgggtgtacaaacaacacacacacacagtntagtatcatgtcncggtcgtctactcgagcgcaccatgccatacatagagcagtatncatattcgttgggcgcgccggccacgaatgaagaaatatcacagtgcgaacatatcaacgcgcagtgagcgatataaccgcgcagcaggcggacgtaaaggagtggtgtttacgccattacgccgaccaacacatacgcgagcctatatattattatgtgaggcggacccgaagacgagaccgagagtgaatttttttatacaacatattattgttgntgtataatatatcgcacccgcggagcgcgtatacgcgcaatatataaacagataacgttntatcgcgacagtcggcgccgagatatatatacaccgcccgcgtttatttatttatatagaaatatgagggcggagaaagaatcgagcgaggcgccataacaataagcgcgagactgacggcgcccgacatatcaggcggaatgacaattcagtggagataaataagcagcgcgagagatgggagaatataccaccatacacaagtacaaatagtggaaaagaaggccgactgacaaaaacaacgtgactctgcaacacacagaaccgcggtatagtgagtaataatacatgtgggtggcgtcgacacgagtcactattccgtaaatcgatatatacccacccccacacacttcatcaatttcacgccgcgaacaatataaattacaaaatcggccatgggaaaaaaccgcgaggataaaaaaacccccccacacggatataagggcgggcgcgccacctataatcaaataaatacaaaaaaaaacacggcggagaaaaacagaacgaacctcgaggggtaccgggtcatctaacggagacaataaataacaaccggcgcgcgcgatgccaaggggcaaaaatagcaccaagggacgcaaaaatcgactgtggtgttttttnggggccgggggcgagaggaggggggcggtttttattcgccgcctcagcacccacaggagacaaccggtggggaaaaaaaatacaaccgcaagaagatgtatatggaaaaaaaagggcgagaaaaaacgggagggggcgggagaggtaacaattcaagccggagaaaagatcgcagcgcgcgaccaggggggaaaaacccaggggggtcaacagcacagggtggggggcgcgggaaagggaaaaaaccattatttaaataaaatcctgcatgaaagcgcaacaaatatacatcatgcgtaatagaaaggggaaaactggaagggaaaaaatacgggaaaaaagccaagccgaataacggcgggattcaactccacaggagagaggggagccaccccaaaaacgacaaaaaat

SEQ ID NO: 5637 - DNA, 729 bp, Glycine max
  misc_feature (110)..(110): n is a, c, g, or t
  misc_feature (116)..(116): n is a, c, g, or t
  misc_feature (118)..(119): n is a, c, g, or t
  misc_feature (123)..(123): n is a, c, g, or t
  misc_feature (126)..(126): n is a, c, g, or t
  misc_feature (137)..(138): n is a, c, g, or t
  misc_feature (145)..(145): n is a, c, g, or t
  misc_feature (152)..(152): n is a, c, g, or t
  misc_feature (225)..(225): n is a, c, g, or t
  misc_feature (603)..(603): n is a, c, g, or t
  Probeset Number=SeqID_15416
attaggcctcttcagcaattagcagcaatcaaatctgtaacctttcagaactcaaaaccccctttcaatttcatcatgtccggctaatccaacagccctccagctacagntacggngnngcgncgncgcccaaaccnntacgtgnccatcgncatcgcaatcatacggggctcctccgcatcgcaatatacgggggttcttcggcaaccgaaccctaaggggggncggcgcccggtcagccttaattcggctccccctaagcccaaacggtcggggccctaagccggccccctaaaaaaaaccccccgaaagaaaaagttccccctccccacgggggaaggaaaaaaaagggggggttacccgggtcccggggtaaacgaagccccgtttcgggggttggtggcatcaggggttccctcccgaggaaaaaacccaaaaaggggggggggggttcccaaagggggggccacgaagggggggggggttttttcaccgaccaaggagaagggggggagaggttttttttcttataatcaaaaatttttggccctcaaaaaggggaatccttttccgggggcacctttccccaaattcccccggggnaaaaaatagggccccaaaggggttttccttttctcttttttaaagggttttccaaaaggggggggcccattttttttggaaaaattttaaaaaagacaaaagaggggaaaaatccgtttttttggg

SEQ ID NO: 5638 - DNA, 1540 bp, Glycine max
  misc_feature (1)..(1): n is a, c, g, or t
  misc_feature (114)..(114): n is a, c, g, or t
  misc_feature (166)..(166): n is a, c, g, or t
  misc_feature (261)..(261): n is a, c, g, or t
  misc_feature (357)..(357): n is a, c, g, or t
  misc_feature (894)..(894): n is a, c, g, or t
  misc_feature (1219)..(1219): n is a, c, g, or t
  misc_feature (1323)..(1323): n is a, c, g, or t
  misc_feature (1366)..(1366): n is a, c, g, or t
  misc_feature (1373)..(1373): n is a, c, g, or t
  misc_feature (1436)..(1436): n is a, c, g, or t
  misc_feature (1445)..(1446): n is a, c, g, or t
  misc_feature (1472)..(1472): n is a, c, g, or t
  misc_feature (1488)..(1490): n is a, c, g, or t
  misc_feature (1492)..(1492): n is a, c, g, or t
  misc_feature (1502)..(1504): n is a, c, g, or t
  misc_feature (1509)..(1509): n is a, c, g, or t
  misc_feature (1540)..(1540): n is a, c, g, or t
  Peptide Sequence Number=SeqID_8433
  Probeset Number=SeqID_15417
ntcgttactgatgtcatgggcgcaccatctacgacactaccgttgtgtagtaatagcggctcaacacctacacaatagagcgagcagtatcgagtttgtggtctgcaacgaganggcttcagtagttggcacggctcaccgatgatcagcgacacgacagtatatngatagtgtttcggtgtgtcgtccgttcggcactcggaggtgcggtggcaccagccgcgactcgcgagtgctgctagtcgattatgtgtactctancctctcatctcgctctatgtgtagttccgtcttgagttgtgagtgaaggtatatgaggatgtagcagaacaatacacacagtatcgagagtggagngagatatagtagagaagcagagaagtacgagactgatgttgctgtagtacataccacatagagagcatggtggtggggaccactcggagagtagagtgctatgtgagcaccgacgagcgtgggtgcacgcgagcagtcgcgccgcggtgtggtggtgtgggagggtggtcagtaagcggtgtatacggcgtgatggttagtgttgcgacgcagtgtgtcgcatagtcactgcgattagtcgagagaagatggattgtgtgaatagcagttagagtaacatcgtcacttcaataaaagaccgatcgtcacagacaggtgtctatagagagtggtgcaatacgccggaccgcaggagggattctgatctccgctgtatttatgttgtgtcttccaccctgccggtacgattaagtcatacaccggaaatgtgccgacgcgcgtgataatgtatatattgagtgccagttagtaggtgacgtatgagatacagtgtagtacgggtctgtacgccggtaccgcgcatggataattaagcgntcacagacaggacacaggagagaggaggacgcggagcgcgacccctgtgtgcgtctgtggtgttgtgagtgtggtcatgtgatagtggtgtgttgtgtgtgtcttgttgcagaatgtttggttgtgccaagagtcgtgtcgtcgttgtgtttccttgtgttgaggcgcgtgggttgtccttgttggtagtcgatgccgcgcggttagaatggagataaaagaagagatagaggagaagagctgaacgagggaaataaaggaagctttcacgatagtaaataggagagcataagaagtgaagggagagagatagacgagaaggagngcgaatatatggattgtatgtgagagtctgtttataatatctgtgatgtaggccgagccgaacatgttgtaggtttgacgtgtgctctcacattccatattcantgtattgtgtctctctctctttgatttcccgttctccctttcnctattantgatcgtctcacatccacacgtttcttatctcaccaatcaccacgctctcatcttctcttttnttctttttnngtaacccaaaatataatatatatctnataaaaatatatgtannntnatataaaaannnaaaanaaccaaccacctaaaaaccacaccccaaaan

SEQ ID NO: 5639 - DNA, 678 bp, Glycine max
  misc_feature (7)..(8): n is a, c, g, or t
  misc_feature (10)..(11): n is a, c, g, or t
  misc_feature (15)..(18): n is a, c, g, or t
  misc_feature (20)..(20): n is a, c, g, or t
  misc_feature (23)..(23): n is a, c, g, or t
  misc_feature (28)..(30): n is a, c, g, or t
  misc_feature (34)..(35): n is a, c, g, or t
  misc_feature (38)..(38): n is a, c, g, or t
  misc_feature (55)..(55): n is a, c, g, or t
  misc_feature (141)..(141): n is a, c, g, or t
  misc_feature (144)..(144): n is a, c, g, or t
  misc_feature (288)..(288): n is a, c, g, or t
  misc_feature (311)..(311): n is a, c, g, or t
  misc_feature (313)..(313): n is a, c, g, or t
  misc_feature (325)..(325): n is a, c, g, or t
  misc_feature (337)..(337): n is a, c, g, or t
  misc_feature (344)..(344): n is a, c, g, or t
  misc_feature (358)..(358): n is a, c, g, or t
  misc_feature (367)..(367): n is a, c, g, or t
  misc_feature (373)..(373): n is a, c, g, or t
  misc_feature (382)..(382): n is a, c, g, or t
  misc_feature (384)..(384): n is a, c, g, or t
  misc_feature (399)..(399): n is a, c, g, or t
  misc_feature (410)..(410): n is a, c, g, or t
  misc_feature (420)..(420): n is a, c, g, or t
  misc_feature (435)..(435): n is a, c, g, or t
  misc_feature (438)..(438): n is a, c, g, or t
  misc_feature (448)..(448): n is a, c, g, or t
  misc_feature (450)..(450): n is a, c, g, or t
  misc_feature (452)..(452): n is a, c, g, or t
  misc_feature (455)..(455): n is a, c, g, or t
  misc_feature (460)..(460): n is a, c, g, or t
  misc_feature (465)..(465): n is a, c, g, or t
  misc_feature (474)..(474): n is a, c, g, or t
  misc_feature (478)..(479): n is a, c, g, or t
  misc_feature (490)..(490): n is a, c, g, or t
  misc_feature (493)..(493): n is a, c, g, or t
  misc_feature (500)..(500): n is a, c, g, or t
  misc_feature (504)..(504): n is a, c, g, or t
  misc_feature (510)..(510): n is a, c, g, or t
  misc_feature (512)..(512): n is a, c, g, or t
  misc_feature (520)..(520): n is a, c, g, or t
  misc_feature (525)..(525): n is a, c, g, or t
  misc_feature (530)..(530): n is a, c, g, or t
  misc_feature (533)..(533): n is a, c, g, or t
  misc_feature (536)..(536): n is a, c, g, or t
  misc_feature (540)..(540): n is a, c, g, or t
  misc_feature (542)..(543): n is a, c, g, or t
  misc_feature (545)..(545): n is a, c, g, or t
  misc_feature (549)..(549): n is a, c, g, or t
  misc_feature (553)..(555): n is a, c, g, or t
  misc_feature (559)..(559): n is a, c, g, or t
  misc_feature (561)..(562): n is a, c, g, or t
  misc_feature (569)..(569): n is a, c, g, or t
  misc_feature (571)..(573): n is a, c, g, or t
  misc_feature (576)..(577): n is a, c, g, or t
  misc_feature (583)..(583): n is a, c, g, or t
  misc_feature (586)..(586): n is a, c, g, or t
  misc_feature (588)..(589): n is a, c, g, or t
  misc_feature (592)..(594): n is a, c, g, or t
  misc_feature (601)..(601): n is a, c, g, or t
  misc_feature (607)..(607): n is a, c, g, or t
  misc_feature (610)..(610): n is a, c, g, or t
  misc_feature (613)..(614): n is a, c, g, or t
  misc_feature (616)..(616): n is a, c, g, or t
  misc_feature (620)..(620): n is a, c, g, or t
  misc_feature (622)..(622): n is a, c, g, or t
  misc_feature (626)..(626): n is a, c, g, or t
  misc_feature (631)..(633): n is a, c, g, or t
  misc_feature (635)..(635): n is a, c, g, or t
  misc_feature (639)..(639): n is a, c, g, or t
  misc_feature (642)..(642): n is a, c, g, or t
  misc_feature (644)..(644): n is a, c, g, or t
  misc_feature (649)..(650): n is a, c, g, or t
  misc_feature (653)..(654): n is a, c, g, or t
  misc_feature (660)..(660): n is a, c, g, or t
  misc_feature (663)..(663): n is a, c, g, or t
  misc_feature (665)..(665): n is a, c, g, or t
  misc_feature (669)..(670): n is a, c, g, or t
  misc_feature (673)..(674): n is a, c, g, or t
  misc_feature (676)..(677): n is a, c, g, or t
  Probeset Number=SeqID_15418
tttaagnntnntctnnnngntgnatttnnngcgnntgngtaccggacccccctcnagtcagctcgtaggccccccccccggttttcactcgcgtcgaattgaggaattgtgagcgatggatttctcttcggtgagggctgngtnggattctaagtcatactacaaggtctgcggatgtgttctacaactcgatgcttcaggttgcacggtgagggcattgcttatcaggacgattggccctacacaatgcacctcctctctcacatttatgttcacgacatcaatagngctgcgctttctttggaagacantnccttcctcaatnaaagagagccancctgaantcaccgtggtttgnaaaattggncaaaanctctggttncngtgactatgccgganttgcacgaggnaatcctgggntttgattggattcanganctccataccntngnatnttgantatcngaactttanacannggagatgtttnttntgtattntctntagatntncgagatantctantaaanacnctnggtntnntnctgnggtnnnatgnannattaatntnnnaanntttttncanannatnnntgaattntatccntcnttnnangtcnantggnaaatnnnancttnggntngattnnaanntcatgnttntnaacnntcnngnng

SEQ ID NO: 5640 - DNA, 385 bp, Glycine max
  misc_feature (293)..(293): n is a, c, g, or t
  misc_feature (332)..(332): n is a, c, g, or t
  misc_feature (334)..(334): n is a, c, g, or t
  Peptide Sequence Number=SeqID_8434
  Probeset Number=SeqID_15419
gatttctctcccacttccaccaccaccgccatggccgccgccccccatatccgccgtgcggccgccactcctctccggcgagccgccgcctccgtctgcaccaggcctcttgcccaactctgccaccgcgcctcgtcccacaccactcgccgccccctctgtgacggggcgcctgcacagatcccacccaagatccggcgtgagatcaccagggtcgagttggccggcatttccttccaccgtgagctcgccaaggagcttaggcagctcagcatgagggttacccgaggccnaggtgcggcgagggtgaacacggcggacgccgccatgcngntcggggtggtttcgtggcgtgtctgcgcagccgtggttgccgtgacggtgg

SEQ ID NO: 5641 - DNA, 182 bp, Glycine max
  Peptide Sequence Number=SeqID_8435
  Probeset Number=SeqID_15420
tgagtatgataaaattaattttaattaaaattgattttaaattgatgtgatttatatttagggagaaggtagagaacaaatggtcacgatttgtgctgattatatggttctttgtggtactcatcataacgcaaagttacactgcaagtttagcttcaattctcacggtacagaaactgcag

SEQ ID NO: 5642 - DNA, 1935 bp, Glycine max
  misc_feature (29)..(29): n is a, c, g, or t
  misc_feature (31)..(31): n is a, c, g, or t
  misc_feature (36)..(36): n is a, c, g, or t
  misc_feature (76)..(76): n is a, c, g, or t
  misc_feature (94)..(94): n is a, c, g, or t
  misc_feature (103)..(103): n is a, c, g, or t
  misc_feature (124)..(124): n is a, c, g, or t
  misc_feature (224)..(224): n is a, c, g, or t
  misc_feature (259)..(259): n is a, c, g, or t
  misc_feature (295)..(295): n is a, c, g, or t
  misc_feature (320)..(320): n is a, c, g, or t
  misc_feature (322)..(322): n is a, c, g, or t
  misc_feature (369)..(369): n is a, c, g, or t
  misc_feature (387)..(387): n is a, c, g, or t
  misc_feature (392)..(392): n is a, c, g, or t
  misc_feature (399)..(399): n is a, c, g, or t
  misc_feature (482)..(482): n is a, c, g, or t
  misc_feature (484)..(484): n is a, c, g, or t
  misc_feature (489)..(489): n is a, c, g, or t
  misc_feature (538)..(538): n is a, c, g, or t
  misc_feature (573)..(573): n is a, c, g, or t
  misc_feature (580)..(580): n is a, c, g, or t
  misc_feature (585)..(585): n is a, c, g, or t
  misc_feature (643)..(643): n is a, c, g, or t
  misc_feature (653)..(653): n is a, c, g, or t
  misc_feature (687)..(687): n is a, c, g, or t
  misc_feature (689)..(689): n is a, c, g, or t
  misc_feature (695)..(695): n is a, c, g, or t
  misc_feature (708)..(708): n is a, c, g, or t
  misc_feature (711)..(711): n is a, c, g, or t
  misc_feature (756)..(756): n is a, c, g, or t
  misc_feature (760)..(760): n is a, c, g, or t
  misc_feature (869)..(869): n is a, c, g, or t
  misc_feature (877)..(877): n is a, c, g, or t
  misc_feature (1022)..(1022): n is a, c, g, or t
  misc_feature (1040)..(1040): n is a, c, g, or t
  misc_feature (1250)..(1250): n is a, c, g, or t
  misc_feature (1264)..(1264): n is a, c, g, or t
  misc_feature (1307)..(1307): n is a, c, g, or t
  misc_feature (1322)..(1322): n is a, c, g, or t
  misc_feature (1642)..(1642): n is a, c, g, or t
  misc_feature (1712)..(1712): n is a, c, g, or t
  misc_feature (1721)..(1721): n is a, c, g, or t
  misc_feature (1867)..(1867): n is a, c, g, or t
  misc_feature (1913)..(1913): n is a, c, g, or t
  Probeset Number=SeqID_15421
cgatgcagagagatacacagcagcgcgcnancacancgcgtgacgcgcagaacgatcgcatcgtagtactctatanccatgcagtacactcccncgcgcgatnaggactacctactatgacagnagcgagccgtactaatccagactgaacgcacatgccgcacagtaaacgcgacgtctcgctcacagcgcactcacgacgctctacgcatacagtcgacgcncgtcgacatcagatcacgcagcgacgctgtgagangatacgcactcacacgcacgctcagcatatattagnatatgacacgactgtcgatcgtcgntngagactgcgtagggtagctctgctcggtcggtctcagaccaggcctncctgcatgagtcgatctngctantgtatcnctaatacgtcgatcgcgttgcatatgagacgtacgcgacaggctgtctagatggcgcacacgacgtacacagatcactcatanancttantatcataatagtcctgctcatcgcatgctcgacactcagtgatcactcngcgtgtcgtgtcgtggtatatgtagtgtgagatantattcantatangattagcgtacgctgtgcagtcgacctcgtcctatagagcgctatgatacatgtgacncgtcacatgncgcgtgctctcgctcgcggttgacgacggcgagncnaaccancagcgtgacgacnggnttcgagcgcggcgagatgcggtgagcgagtgatagtgcagagacnagtnacagtatgcatcgtcacagtcgcgcgcgtccactgcacgcatgatctgcacgtgcgccatgcagtgatgatcgtgtacatcagcgtatatgcgcataataatagacgtnagtgcacnctgtctccatcatgttaggtgcacatcacgtcggtctatctcactccacccatacatctacgccgctctgaggcgaacagtgcggtcgacgatgagcgcatgctgcaccagtcgggaggtcgcatctgtccgtactcatctcganaccacaactatccagacntgcatgataggagctgacgcgtgcggtgcgcgcgtcatacgcgcgcatatatcttcagaattgatagataggagctgcacgtcatctgtgcagatatgtgagcgcgcaatgcctctaccatgagtgatagcgtctgtgctctcgttaccggagcgaggctcacgacctcaaggctcatacagtacatctgtacatgcgacattccgacgngccgcacgacagcncgcccgcgtcagtgtagaccgcacggccacgtcgactcgagcngcactcgacgtacgngcgctccgtcacatcatgatgttatgtttcgtgtctatgtgttagctagtatagagacgtgcagataatagcggatcattgcatgctgacttcgcactctcatgagcgattctagcgacatatgtggaagagtcagggcggcgacggatctagaagcctacatattgacacactacgacctctgtcctcgaccgacaagtcagaagcagacgcgagaaccgtcgctccaccaccttcatcagttactatcgtaatcgtagtagcgcggtcgctgtcgttaggagtcaacatgcgacagcgaagcacagcgcagaaacgcnacatcaccgatgtagaagagaagacgaagagatcatagcgctagctacagcagatcgcacgggcagaganatagtcacnctaccgccatcaacctcaccgacagagactcggcggagggacggatgcgcaggcacagacgtgataggcgagggccgcgacccgcggcctcagtaccggagcgggcggcgcgtgtgtgcgcgcggctgtgtgggcctcgcgtctgncgtcccggcgtcccacgctacgacatgacacgatgagaggacaganagagcggcgcagagagcgacgc

SEQ ID NO: 5643 - DNA, 1687 bp, Glycine max
  misc_feature (319)..(319): n is a, c, g, or t
  misc_feature (326)..(326): n is a, c, g, or t
  misc_feature (427)..(427): n is a, c, g, or t
  misc_feature (747)..(747): n is a, c, g, or t
  misc_feature (1237)..(1237): n is a, c, g, or t
  misc_feature (1251)..(1251): n is a, c, g, or t
  misc_feature (1261)..(1261): n is a, c, g, or t
  misc_feature (1263)..(1263): n is a, c, g, or t
  misc_feature (1267)..(1267): n is a, c, g, or t
  misc_feature (1337)..(1337): n is a, c, g, or t
  misc_feature (1344)..(1344): n is a, c, g, or t
  misc_feature (1352)..(1352): n is a, c, g, or t
  misc_feature (1361)..(1361): n is a, c, g, or t
  misc_feature (1369)..(1369): n is a, c, g, or t
  misc_feature (1504)..(1504): n is a, c, g, or t
  misc_feature (1506)..(1506): n is a, c, g, or t
  misc_feature (1517)..(1517): n is a, c, g, or t
  misc_feature (1529)..(1529): n is a, c, g, or t
  misc_feature (1552)..(1552): n is a, c, g, or t
  misc_feature (1585)..(1585): n is a, c, g, or t
  misc_feature (1613)..(1613): n is a, c, g, or t
  misc_feature (1616)..(1616): n is a, c, g, or t
  misc_feature (1637)..(1637): n is a, c, g, or t
  misc_feature (1640)..(1640): n is a, c, g, or t
  misc_feature (1676)..(1676): n is a, c, g, or t
  misc_feature (1687)..(1687): n is a, c, g, or t
  Peptide Sequence Number=SeqID_8436
  Probeset Number=SeqID_15422
tgtggagtaagacacctacaagtataatcgtcacgcgcagaaccgcatatatagtcacgcgacggccgatggacgtgttagatacaggtgtgcggtgcgcgccgggtggtatgcacggcggtgtcggaggaggagtccgtcttctggacgagtgtgggccgctccgcacgtctagtatcgatggtaggtgggtctcggtggcgctgtatgcgcagactacacagagaatactgctctgacataggttattgaagatcggagacatggagactacacactgatgtatataatcacacttaacgtcaatatatcacatctnaggattntaatatgctgatctctcttcttgatgcgtaggcgtagtggtatagaatgaagacagagtggaccgtgagggtcgcgcgccgctgcacgagcgtgcgtattntgtgcgcggcggtggtgctacggacgtgctcggtgacgcgcggatcgagcgcggcgtaagcatacggggtagacgttgtcacctctatcatcccgcgagtcgcgtccgtagctgtcgtcgtgcggtatagacgcgtcgagacgaaatgagagagggtaggagcagtggtaggaacaacgtacgcgatcagcgtgtcaatgtatgtgttgcgtagcgaccgagagcgctgctcgactctatcacgacagacggcgcacgacagtctcagataccgacgtatagccgtgtatgcgaccacgttctccagctcgcgctcgtcnggagatccccacgcgatgggcgcagagcgcagcggcgcatcgttcggacgccattcaactcagatctgcgccgctctcgtgcggtcgcgtcgacgtgtgcagtgatgatagctaccagttatcgtgtgctgagcgcgcgtactacagctcccgctgcgctgtgctgactgcgtgctgatgcgcgaactgagacgccgaggcgcactctatagcctcgttcgctccatcgatgcctgtgcgcgcggcgtacttaccagtgtgcaggcgtcgtcgttctgctctcggcgaatgccttcagcgactgcggtggtgagagatctagtgactatgcagcgtccgcgtcgcgacagtcaccaggcgcgttcagtcttgtacgacgcgtctcgtcagtatgatgagttcttcgacgcgcgacggtcgtaagtgatgcgcgctcgtcttcgctctcgttgtcatctatgcgcacacgcgatctatctctgctctcttngccgaggccgactnctagtgttancntcgnggatcgtacgttacagacaccttctgtatcgtcgatcgccgcacgatatactcgcggcgcgacgcacgantatcgtntacgcatntcgactcanttgtcgantggccgtgtccgtcgtccgtcttctgctagtgatgtgcagtgagtgacatgcgagcgactcacgcgtccgtcgtcgtcggtgtcgacgaccgcgatcgcgcgcgtcagtccgtatgaagagtacgcgagctgcgnantgcgtacagcnacggcatatcgnatagacagtagatgctacgtagncgtcgtcatgacgtcggacgactcatagacagnattgtagtttatcgagtcgatcatcgantantctgtgcgctcgtgtcgcagngtnaggtagtgatgcgtcagcagcgcagtagacagtagncgtcgcgatgn

SEQ ID NO: 5644 - DNA, 763 bp, Glycine max
  Probeset Number=SeqID_15423
gaagtgggtccaagcagcggaagttaatcctcttttatttggacttctttcaacattttcaatttcttttatatttggagaattttctgcttcttccaccgaattgctttgtgcgtcattagcaacttgttgtgtttctaatggagcaatactattaacagatggatcaataggcatacccattttctgtacgcgcggggtacgagagtggatagctagaatggagggcatcacatgtttggattttctatggtgcaaatggtcagaacacatgctagtaaactcgatcagcctttaagagagaccgttcttcacctttataaaccttttaaatggacgccatgctttcttcatcgttttttcgaaggcagactgaagaagaaaaagaaacttcgtgtgatcattgaatttaaggaaggtgcagctgaagcagagattcaaagcacaaaacagctcatgaaaaaaagcagaaaaacaaatataaaacgacatttctcacatatcaattgctgcgctgctgatctaacacctgctgccttagaggatttattagcaaacggtgagcatattcgcaaaatttatttagaccggaaagttcatgcgctgctagatgtagccacacaagcaagtcatgctgaagaagtcatccgaaacgggacaactttaaccggggaaggcattacggtcgctgtcattgacacgggaatctatccgcatgaagatttagatggaagaattcgtgattttgtggatttagtcaaac

SEQ ID NO: 5645 - DNA, 367 bp, Glycine max
  misc_feature (351)..(351): n is a, c, g, or t
  Peptide Sequence Number=SeqID_8437
  Probeset Number=SeqID_15424
gtcgaatacgcctacctaggccataatctactattataaggacagccaacagacttggaccaggcaaaagcaaagtccactctcgaccgctctgatgatctctctacacccttgctttctcgaagtctcagcttgccttgtcggaactccctcctgttccggccatcacacttctttctctggtcacgtccctcagattcaccctctctagctagttcccaacaacaaactccacggttccacacttcatactaccctgtaaccggaaaaccagaaaaggtgtcgctgtagggaatcacattatggggcatttttcctcaatgttcaatgggttggcacggtcttttcaantgtaagaaaggaggaa

SEQ ID NO: 5646 - DNA, 1414 bp, Glycine max
  misc_feature (34)..(34): n is a, c, g, or t
  misc_feature (87)..(88): n is a, c, g, or t
  misc_feature (114)..(114): n is a, c, g, or t
  misc_feature (148)..(148): n is a, c, g, or t
  misc_feature (170)..(170): n is a, c, g, or t
  misc_feature (172)..(172): n is a, c, g, or t
  misc_feature (182)..(182): n is a, c, g, or t
  misc_feature (282)..(282): n is a, c, g, or t
  misc_feature (303)..(303): n is a, c, g, or t
  misc_feature (317)..(317): n is a, c, g, or t
  misc_feature (325)..(325): n is a, c, g, or t
  misc_feature (344)..(344): n is a, c, g, or t
  misc_feature (355)..(355): n is a, c, g, or t
  misc_feature (363)..(363): n is a, c, g, or t
  misc_feature (457)..(458): n is a, c, g, or t
  misc_feature (473)..(473): n is a, c, g, or t
  misc_feature (477)..(477): n is a, c, g, or t
  misc_feature (483)..(483): n is a, c, g, or t
  misc_feature (495)..(495): n is a, c, g, or t
  misc_feature (507)..(508): n is a, c, g, or t
  misc_feature (511)..(511): n is a, c, g, or t
  misc_feature (535)..(535): n is a, c, g, or t
  misc_feature (568)..(568): n is a, c, g, or t
  misc_feature (574)..(574): n is a, c, g, or t
  misc_feature (577)..(577): n is a, c, g, or t
  misc_feature (619)..(619): n is a, c, g, or t
  misc_feature (621)..(621): n is a, c, g, or t
  misc_feature (664)..(664): n is a, c, g, or t
  misc_feature (690)..(690): n is a, c, g, or t
  misc_feature (702)..(702): n is a, c, g, or t
  misc_feature (783)..(783): n is a, c, g, or t
  misc_feature (902)..(902): n is a, c, g, or t
  misc_feature (914)..(914): n is a, c, g, or t
  misc_feature (953)..(953): n is a, c, g, or t
  misc_feature (1014)..(1014): n is a, c, g, or t
  misc_feature (1100)..(1100): n is a, c, g, or t
  misc_feature (1222)..(1222): n is a, c, g, or t
  misc_feature (1235)..(1235): n is a, c, g, or t
  misc_feature (1370)..(1370): n is a, c, g, or t
  Probeset Number=SeqID_15425
tcttaaccacccacatcaccttcacctaatactnctcaccgcactctacaccatccactttgctcatatcgcaccaatcccacagcnnaaccgctgcaaacccagccatggtcntaccctcacgctagccatatcatgcaccattagncacgcacacgctctccctctcntnctcccccttnatcacactctcacctctgaagtgagtcacctctcgcagcacacactaggcctacgtgacatgtcactcgcttgccgcagcagacacgcatatctcacacntatcatgattatacacattanacgaataccagtcnactgatcntgtcttcaagacatcactngcaaccgactntcgctctnacgcacacaccacacggcagcacacgcgctcctacgtctcgcttccactctccgctcgattcgtcctcttccttctccaccacgccccgtcgcnncacacccgtgcgccnaccncccccntcccacgccccnccagttgtccgnncgnccgcccccacccacgaagaggagngggccggagaaccgcactgcgcttgatctcatnctctantantcacgcttactacctccagtctcactctcatcctctctacancnaccctcgctctcctccacacactctactgctacccctccaccncttcatctcccactacccattcggcngctcgctattantggcttcctcccgccgtttgtctcgctggagctgtacgatatatttattgaccatatatattgtgtctgcatccacgtcgntgtatgctcgtcctgtcattctcctctgcccgctgactaccaccttgttcacgtattactcttctttcctttcttcatcatcgctcatcttgcgcttcataccctaccctgacgacggnacccgtcccacnctcacttcaccccgcacacccactccgctaccctcttcntatattctatttccttactctcacttcaccctactcacatcctgctcacactacacgtccncaccctcgctatattttttatacactcccacttcgcttctatcattctctcccctctccctcccgactcatcctcgcaccatacgnccctataattgcagcttgttactgcacgtctctgtgcgttcgcacgaccgcacccagcagctcccgccacacacattcgtcgagcgcccacacacttaattctcccccttcgagttctcacntctttcgacactnctcgaacaacatcgtatatattcccagtcctactccacccctacatgttcatttattgtcattatactcatctcctcaacctcaaccgctaccctctcaggtctctcattctcactcactacctcaccagccgtntcatcgactccgccatatacactcggctcaccatacgcatatac

SEQ ID NO: 5647 - DNA, 405 bp, Glycine max
  Peptide Sequence Number=SeqID_8438
  Probeset Number=SeqID_15426
ttttttctctgccccctagccgccgccgccgcctcctcttcggattgccgctgctggagaccagagagcgcggttcccgagcaaaccctagcctcccacgatggtgctgcagaacgacatcgacctgctgaacccgccggcggagctcgagaagctcaagcacaagaagaagcgcctcgtccagtcccccaattccttcttcatggacgtcaagtgccagggctgcttcaacatgtaatttttcttcaccatttgtcttctttgcaactgcatagttcagtaggttcatttgctactggttagccttagatgttcatttgataacaagacatagtcgtcatgctttaaaaacgttcttgctatttctgtaagtaaactggtaatatgagacatgtgcctagttta

SEQ ID NO: 5648 - DNA, 1724 bp, Glycine max
  misc_feature (81)..(81): n is a, c, g, or t
  misc_feature (656)..(656): n is a, c, g, or t
  misc_feature (700)..(700): n is a, c, g, or t
  misc_feature (803)..(803): n is a, c, g, or t
  misc_feature (1283)..(1283): n is a, c, g, or t
  misc_feature (1366)..(1366): n is a, c, g, or t
  misc_feature (1392)..(1392): n is a, c, g, or t
  misc_feature (1445)..(1445): n is a, c, g, or t
  misc_feature (1500)..(1500): n is a, c, g, or t
  misc_feature (1535)..(1535): n is a, c, g, or t
  misc_feature (1541)..(1541): n is a, c, g, or t
  misc_feature (1724)..(1724): n is a, c, g, or t
  Peptide Sequence Number=SeqID_8439
  Probeset Number=SeqID_15427
tgtataatacctattatttccataacgccacgataaataccaagatagtaattcacatatacaacatatgatattaatgcntcggcgcttggtggcgggcgggatgatagaaccgcgacatgttgatactgcccgccgcttctttctacgctaatgtaatagggaagcactgagaatactcgttgcaagagttgtatctcacaagatctatagcgtcgacatcaccgctcaatatattcatcgtgacacccttccaacaaagttatgagcggcagtgctatctaatctatccctccacatcgagtaaagataatattcttagtgttttttaatgccgcccgcgatcgccagcatatgatatgccagcgtctttgtgagttaacccgctgcgcttagatatatgtggtctgttgtgcaactaacaacgcacgcccccatgctatgtcacttattttgacctctaacaaaaataagccaggtatacccatactagtacaatgtcaagcgggacgcaagccaaagaaatatgaagaactgtctggtgatagacacttgtctgtccgattcattatggggtttatacagatggatcatgttaactatatctatctgatcacctaccgcgcacctcactcatgcaggcgaccatgaaccanacgatggaatacagatgacatctctcaacaagcctctatgagantaaagatcatacggttagcaaacgcgtgcgagcacatatttgcgcagcctactggtcaactcaaatttaagtatcacttactctgccctcgccgcagcacganattctagaaatttaacagccggtctctgtggagtcactcccgaatatataaactagcatcgttatcaggcggcacatgcacgctgtaattaagctagacagtctttatactcgtgcaacgaattgcttcaatacggtattcatcacgatcgtgcgcccgcaggagtcttattatcttatcctcgcacgacatcttatttgacttaagtatgcagacactattagtgtaacataactagcattacacattcctccgatacatcatcttgagtctttatcagtctaactccgcgcacgattacagatatattcaagatatgcacacagcgaattctaatatctggcaacgatgctcggcatcgcgcgaatgactccgataccctggtaacgtgctgtactccgtcgacagaattaatactcatcgccgtgctaagagatataaggataagtggcgcgcactatcctcggaccacacacacanacactatctcttataagagatggacgctaacgctcactcatgctctaagtgagtgtcataagcgacacactcgcggtagatancagtagatagtgtattatagtgtagntaatagagcgccagacttcagccgcgcgtaaccgcaccagtgacacctaatcntgacgaatatctaagactcttctctctcagcggctgttgtgagcctacgctcatntcatatgtggactctccttctgcgcgcaccgcgangccgancattatgctacgacgaagtcgcacggctcacactttatctatcacatgactagcatcacggcgagtcacatagctctgtcacacggacacttgtcccatacacagctctatgcgtcgcgacacgcgcgatgaatatatacacatgactgtgatctatgactattctatacgccgttcctacgn

SEQ ID NO: 5649 - DNA, 2340 bp, Glycine max
  misc_feature (1)..(1): n is a, c, g, or t
  misc_feature (12)..(12): n is a, c, g, or t
  misc_feature (22)..(22): n is a, c, g, or t
  misc_feature (42)..(42): n is a, c, g, or t
  misc_feature (96)..(96): n is a, c, g, or t
  misc_feature (102)..(102): n is a, c, g, or t
  misc_feature (139)..(139): n is a, c, g, or t
  misc_feature (154)..(154): n is a, c, g, or t
  misc_feature (166)..(166): n is a, c, g, or t
  misc_feature (223)..(223): n is a, c, g, or t
  misc_feature (282)..(282): n is a, c, g, or t
  misc_feature (284)..(284): n is a, c, g, or t
  misc_feature (303)..(303): n is a, c, g, or t
  misc_feature (314)..(315): n is a, c, g, or t
  misc_feature (323)..(323): n is a, c, g, or t
  misc_feature (331)..(331): n is a, c, g, or t
  misc_feature (359)..(360): n is a, c, g, or t
  misc_feature (390)..(390): n is a, c, g, or t
  misc_feature (476)..(476): n is a, c, g, or t
  misc_feature (571)..(571): n is a, c, g, or t
  misc_feature (700)..(700): n is a, c, g, or t
  misc_feature (704)..(704): n is a, c, g, or t
  misc_feature (786)..(786): n is a, c, g, or t
  misc_feature (788)..(788): n is a, c, g, or t
  misc_feature (795)..(795): n is a, c, g, or t
  misc_feature (824)..(824): n is a, c, g, or t
  misc_feature (847)..(847): n is a, c, g, or t
  misc_feature (888)..(888): n is a, c, g, or t
  misc_feature (901)..(901): n is a, c, g, or t
  misc_feature (904)..(904): n is a, c, g, or t
  misc_feature (906)..(907): n is a, c, g, or t
  misc_feature (920)..(920): n is a, c, g, or t
  misc_feature (1007)..(1007): n is a, c, g, or t
  misc_feature (1040)..(1040): n is a, c, g, or t
  misc_feature (1217)..(1217): n is a, c, g, or t
  misc_feature (1238)..(1238): n is a, c, g, or t
  misc_feature (1319)..(1319): n is a, c, g, or t
  misc_feature (1330)..(1330): n is a, c, g, or t
  misc_feature (1403)..(1403): n is a, c, g, or t
  misc_feature (1408)..(1408): n is a, c, g, or t
  misc_feature (1417)..(1417): n is a, c, g, or t
  misc_feature (1469)..(1469): n is a, c, g, or t
  misc_feature (1494)..(1494): n is a, c, g, or t
  misc_feature (1535)..(1535): n is a, c, g, or t
  misc_feature (1805)..(1805): n is a, c, g, or t
  misc_feature (1807)..(1807): n is a, c, g, or t
  misc_feature (1814)..(1814): n is a, c, g, or t
  misc_feature (1879)..(1879): n is a, c, g, or t
  misc_feature (1911)..(1911): n is a, c, g, or t
  misc_feature (1971)..(1971): n is a, c, g, or t
  misc_feature (2068)..(2068): n is a, c, g, or t
  misc_feature (2071)..(2071): n is a, c, g, or t
  misc_feature (2102)..(2102): n is a, c, g, or t
  misc_feature (2116)..(2116): n is a, c, g, or t
  misc_feature (2202)..(2203): n is a, c, g, or t
  misc_feature (2214)..(2214): n is a, c, g, or t
  misc_feature (2258)..(2258): n is a, c, g, or t
  misc_feature (2269)..(2269): n is a, c, g, or t
  misc_feature (2272)..(2272): n is a, c, g, or t
  misc_feature (2279)..(2279): n is a, c, g, or t
  misc_feature (2305)..(2317): n is a, c, g, or t
  misc_feature (2322)..(2322): n is a, c, g, or t
  misc_feature (2327)..(2333): n is a, c, g, or t
  misc_feature (2338)..(2340): n is a, c, g, or t
  Probeset Number=SeqID_15428
natatacttagnagcttacagntggtatatcgtcgttcgtcntgttggatgtatatgagtaatctcaatcgtgatcaattatctcttctgtcgtgngtgtcnccagtgtgatcattctgtggtgtacgtttatatcctntctcaacgtctgctnttactagttctnctgttcgactagcatagtactcggtctatgtattactgtggtcattgacagagttgnagtctgcggtcgttggtggacgagatgacaacactcttaagagatcagacactacagangnaattgtcggcagggcgctngaggtgatganntgagtagngagacgangtgagtgtggttatcgccgtgtgacgannaccaagtgtagcgcgagagcgggagtaagnatgtgtatgagaggtaggagtgggtaaacatctcattagagagaggagttaggatagcacttatacatatcttgtcagatgtcganatcagagatataagtcgacagatgtagcaaggtatggatagagtagcgatgtacgtgagcgagcatgatagcacttcgctgcgtgaaggagcgcntggatgagagtattagtatatactacatagactatagacactcgagttatcagaccgtgtgagagtggactcgcgttcgcgttcactcgtcgtacgtgtagagtagcaggcaccgccgagatctcaacntatntgtgtgtagacatcgtgatagtcattattactataatacagaatatcatgaacgagcgtcgcatgaaacatcacgtcatcgnanaagtagntatagagctgttgtagagagacacactanagtactgagagctatgatcgacnaatgttaataatacatagagtacatcatgatattcgagcangcagtaatatgantantnnttcagcagcaatntatagctatgtgtgtagagacacatataatcgtagagttgtagtggtcatcgtcacatacgcttatgatcagtagtacacatcgacncatggtgctcgtgctatactcactctctatcanctacacgtgtcgcgctcgagccatcaagacgagcgtctgtctcatcgtgacagtgactgctacacgtacgctatacatatatagatggtagtgtagtatagcgtcacacatataatgtcatatcgtatcgtgaatacaacgagcgcgtctagcactacgagcgcgctactgcaagantgatataagcagtgtaatatnttgtgtctaggagccgacgttgacggagacgcgataccgcgcgctagtagatcactaaccgcgtgtcgtgccgtggtgtangctattaccgnttttggtcatcaacatgacgacgtgtatcagtcgcgcgatcgcgtgagtacgcgcactgtggccaggcgtacntcgcngcgccgcgngcggcatcatccgagcgatcctggcgacgatctcagtgcgtgcgcgtcatgnatgagtactcatagatatcagtatntaagtgtatatagtgtagatagagagaatagatagtcacgnatgctaagcagcaatcatgtcgcgtatgcagcagatctacaggatggagtcatactatcatcatgtcattagaaatacctcatctctcataattatgatatatcacagtaacgtgagaggttagaacattattctataactatcatataatcgtatatctacatctacgtcgaatcaatacactcactgtcgatgtatgcaatagtgagctcaaacgacgtgcgacaatatgagatctaatataatagcgtctactagaggtacgatgtngnttaaatntcatttgtatcaaaattagacagacaaattaatcatatatcgcactgctaaatcttcgagcatcncacacaatacatactacagctcccagcagcanatatacgactgcacagagtacaacgcgactatacgagttctgctcgccgtctcttttgcnctcatcgccgacgcctctgcacactctctagcttgtatacatcttaactgcctctccgcgtcgtttcctgctgtctatctccatcctatcatatctnacnactccacaccgtgacacatgagagcaatcantacgtaattgacangatcaaatagtaatgatgtataacgggaacaaatgagcgcgaggtaacgatgaattagatataaaagagaggaaaaaaacacaganntgcataagtanctagacagatcaaataagacagaggacagacgaaagaaataaantaaataaaganaanaaaagtnaataaaaaaaaaaaatagaaaaaaannnnnnnnnnnnnaaaanaaaannnnnnnaaaannn

SEQ ID NO: 5650 - DNA, 1361 bp, Glycine max
  Peptide Sequence Number=SeqID_8440
  Probeset Number=SeqID_15429
acaacaaaaagagggtcaatctcttcattccgatattcaacaaatttacacgtctagtcgataacattccatatacttaaaaatatgagcaaccaaatcgttgacatcctcggcaatggcaaagtcataaaagaaatcctcagagaaggaactggcgacgagcatccacaatcgggtttaaatgttcacgttcattacgtcggtacattaaccaatggaaagaaattcgattcatcacgcgacagagatgaaccatttacattcaaattaaacgccgggcaagttataaaaggttgggacgttggtgtctcatccatgaaacgcggtgagcttgcaaagttcactcttcaaccagattatgcttacggagcaactggtgctggaagagatattccaccaaatgctactttgatctttgaagttgaactactcgattgggaagacgaagaagacattagtgacgcacgtaatgaatccataaaaatgaaatcattaaacagaactggtcaatccacagttgatgtaggtgatcgcgtcactgttaagatcatcgctcgtgttttaactgttgatgatcaaaacaaacccagtgttgaatcagaaatcgaaacagcagaactcactttcactattgatgacgaagaagtacttccagcagtagaaaagtcagttaaagaattaggaaatggagataaagcaagattccgtatcgaagcaggagatgcagcattaaaagtaccaaaagaaactacatatttgaaacattcagagactttcttaaatgcagtaaagaatttgaataatcaaagagatcgcaaacttgaacttgagattgagattttaaatgtagaagcatataaaggaaagagtgcagaatcaccaaaagaaaaattagaagctgcaaaatcacttaaagatgaaggtaataaactatttcaacaaggtcgttatggtattgcaaaaagaaaatataaacgtgcgactgatttgtgtgattatttagattcttttgaaaaagatgagatcgcagcgtcaaaagatgtgcaattgccagtgtacttgaatttggcagctgttgatttgaaagagaaagattataaatctgcgatcgataacagcacaaaagcgttagcaattgatgcaaagaacgtaaagggattgtatagaagagcacaagcacatcaaggattaggtgatttggaacaagcaaaaacagatcttgctgctgcgttagttgcagaaccttcaaacgctgctgtgcaaacgttattgaataaaatcaaacaakatattgtaaatgcaaaaacaaaagaaaaacaattgtatggtcgtatgttcaaataaattaattattactattg

SEQ ID NO: 5651 - DNA, 1826 bp, Glycine max
  misc_feature (32)..(32): n is a, c, g, or t
  misc_feature (93)..(93): n is a, c, g, or t
  misc_feature (130)..(130): n is a, c, g, or t
  misc_feature (150)..(150): n is a, c, g, or t
  misc_feature (167)..(167): n is a, c, g, or t
  misc_feature (175)..(175): n is a, c, g, or t
  misc_feature (209)..(210): n is a, c, g, or t
  misc_feature (292)..(292): n is a, c, g, or t
  misc_feature (294)..(294): n is a, c, g, or t
  misc_feature (462)..(462): n is a, c, g, or t
  misc_feature (586)..(586): n is a, c, g, or t
  misc_feature (633)..(633): n is a, c, g, or t
  misc_feature (732)..(732): n is a, c, g, or t
  misc_feature (838)..(838): n is a, c, g, or t
  misc_feature (922)..(922): n is a, c, g, or t
  misc_feature (934)..(934): n is a, c, g, or t
  misc_feature (936)..(936): n is a, c, g, or t
  misc_feature (982)..(982): n is a, c, g, or t
  misc_feature (1025)..(1025): n is a, c, g, or t
  misc_feature (1032)..(1032): n is a, c, g, or t
  misc_feature (1061)..(1061): n is a, c, g, or t
  misc_feature (1079)..(1079): n is a, c, g, or t
  misc_feature (1100)..(1100): n is a, c, g, or t
  misc_feature (1106)..(1106): n is a, c, g, or t
  misc_feature (1127)..(1127): n is a, c, g, or t
  misc_feature (1135)..(1135): n is a, c, g, or t
  misc_feature (1149)..(1149): n is a, c, g, or t
  misc_feature (1168)..(1168): n is a, c, g, or t
  misc_feature (1185)..(1185): n is a, c, g, or t
  misc_feature (1201)..(1201): n is a, c, g, or t
  misc_feature (1228)..(1228): n is a, c, g, or t
  misc_feature (1237)..(1237): n is a, c, g, or t
  misc_feature (1261)..(1261): n is a, c, g, or t
  misc_feature (1266)..(1266): n is a, c, g, or t
  misc_feature (1311)..(1311): n is a, c, g, or t
  misc_feature (1321)..(1321): n is a, c, g, or t
  misc_feature (1326)..(1326): n is a, c, g, or t
  misc_feature (1357)..(1357): n is a, c, g, or t
  misc_feature (1362)..(1362): n is a, c, g, or t
  misc_feature (1375)..(1375): n is a, c, g, or t
  misc_feature (1400)..(1400): n is a, c, g, or t
  misc_feature (1410)..(1410): n is a, c, g, or t
  misc_feature (1418)..(1418): n is a, c, g, or t
  misc_feature (1432)..(1432): n is a, c, g, or t
  misc_feature (1482)..(1482): n is a, c, g, or t
  misc_feature (1484)..(1484): n is a, c, g, or t
  misc_feature (1490)..(1490): n is a, c, g, or t
  misc_feature (1514)..(1514): n is a, c, g, or t
  misc_feature (1535)..(1535): n is a, c, g, or t
  misc_feature (1544)..(1544): n is a, c, g, or t
  misc_feature (1552)..(1552): n is a, c, g, or t
  misc_feature (1569)..(1569): n is a, c, g, or t
  misc_feature (1606)..(1606): n is a, c, g, or t
  misc_feature (1610)..(1610): n is a, c, g, or t
  misc_feature (1631)..(1631): n is a, c, g, or t
  misc_feature (1646)..(1646): n is a, c, g, or t
  misc_feature (1663)..(1663): n is a, c, g, or t
  misc_feature (1736)..(1736): n is a, c, g, or t
  Peptide Sequence Number=SeqID_8441
  Probeset Number=SeqID_15430
gggggtgttgttggtgtggtgtgtggtgggtngtgaacaacaaatgtgtatgagagcagagatgcgaagaccgaaccgcaagacgcacgatanagagaattaagacaaaagagaccgaaaacagaacgantaggaagataatgaacgaanaacaagcaccgagacancacatcanagggaatagatatgggtggctatcggcgcctgtnntatcgtatattactcgcagaccactgtgactgtgtatcgcagcgagaaggtctaggaggatgcaggggtgcagacgagagangngcagagtgcgagcgatcggcacgcgaggagagagaacgacaaaatcacgtacaacggatggtagagcgccacgtgcgcacggtggtatatcgttgcttcgggcgtgtgagcgagaccgtacagacagaagtaaatgacacacacgagaatcaacacagcacgctactncagacgacaactcaatagaaaattgcgatcaatacacacacacgaaactcctcccacgcatcacaccatcagaatgaggacacagagagaggacagcagcgaggagtgcgcgcatagccggtcnggatgtgaagcagaccacggaggtatctacacatgcatgacacaccncgcgcatgcaggatgagataacaagaatacgaacgatagtgaagacgcgcaggtgatatgaacaacatatagacagcgtgcgacgctctactgaatgtncgtaggggggagtgtatatatatgcgctgcgcatcttgcgtatctcactgagcgtcacgtactccactcgacaccgcgcagacacatatgtgatgatgtgttaagngcgtgatagattaatataaatagtgcgtcagacgctatcatgccgactacgactacaccttgtgatacagatgacggatgattnatattcatatantnagaggagagagtatcaataggcacatcataggattagatatatctnctcacccccccactacccgaccttgctcgctgctgatagactntgatgangacagatacatggtaggagcagcagatgncagcgatggttcaacatnagagcgcgctactgctgacantgtatngtacggcgtcttctgacgttnaggacacncgacgctagctcgncactcacactactactcgnacgtcctgcgctctgantcgatcatgcatcgtnacactgacgtatgagctaaacatgtanagctagcangcttgcagctacagacatcgacgnatgcngacatatatgacgcatcgatcgatcacacagctgtgtaacagtantccgactgcntcgtncgtgtcgcgcgctgagtgtcgacgctgacgngtgcngtggcgtcgaccnatacagatcgatatgtactatgcgnacgattgctnggtgtgtntggtatgagcactnctagagcgtagtcgcgtctcaaaacgaatccagggacctgacactgagantntattcncgtcgtcgacaacagatacgtatncgcgcgtcgtaggcgcgttancgtgcggtngacgatanccactgatgagacgtanacacgtgtggacaatgatagaagtgactacacgatangcgngagatagacacaccgagacangagtagaactaaaantatacaatgccacaganagacgacatacctgagtcacacctgtcttgagcgtggctgtcggtgtaggcatcacacagtatcacatatcanatcgcaagctgaccgacatctcatcatactcactgcgacatcagtcactatacatcatacatgggacgaacatgcaatcgatctagaacg

SEQ ID NO: 5652 - DNA, 1671 bp, Glycine max
  misc_feature (1)..(11): n is a, c, g, or t
  misc_feature (1299)..(1299): n is a, c, g, or t
  Probeset Number=SeqID_15431
nnnnnnnnnnnaccaaacaaagccctagcatgaaatcatccttcgaagaaaaataattccaatcaatcctagaatccaatccctcccctttgaatttgatgcctcctcgcattcaattccacgctctggtggcatcatcatcatggatcgtggtaataacaacaataacggcgttgttgttgttgtcgtttgggtgcgaacggggacacgctctgaaggtgccgtttagagtaaacgacgtgctccccgtgctgccgcgcgagatctcgtggccggttctgaacaacctgcacagcgccgtcgacctgctcccttatttcgttgggtccctcactcctgccaatgcctccgtcaagtggaaaggggcatgcttcttcgataacaccgccaagattgagttcgcaccctctttggagggtgccactctctatctcaagacagaggctgcacatagctggaccgccctgtaatgctagcagcggggtagaattaatgaatcagttccattgaatacctcaccagccacacattccactgtataatcctctaagtaccaactcccaccaccaccaccactctcccacttcaaaattcatgtctccctcttccctccacgcgctcctcatcatactcttccatccttccgcgaaaacgctcaacaatccctcctgagtcacagtccctctccttggtctttctcgcctactctcccatccaattccaacctctggctgcatctgtcatcatggaccggccttactaccccccccctccggcttaggatatgtctttcgattgtgtgcaaacccgcatccgcttcgaagctgccgcttagagtaaacgacctcctccccgtgctgccgcgcgatagctcgtggatggatctgtatgtttttgccacagccgacaggattacatgggactactacttctcttcccgagatcatactttgaagtttgactcgtgggaagagcctgcagtgttggaagtatgtcaagcttcatggggtttctgtgtttctcatgccatccgggatgcttggaacgctgctttctctagttgatgttttgcctttgttctctaacactgcatggggtcagaatgccatcctagattttcttacgaatcttctgggagatatattgtgaagcgcaaccagctttgacgtgcatctgtagttcaagtagatgttcattcaagagattttttaactgtgtcaaagatccgtggtaggtggggaggttttgagacactagaaaagtgggtaactggtgcatttgctggtcatacagcagttngcttgaaggatgaaattggaaatttatgggttggtgaatctgggcatgagaatgaaaagggtgaagaaataatagtggtaattccctggcatgaatggtggacattagctcttaaagataattccaacccacagatagccttgcttcccctgtcatccagagctgcgtgcaagattcaactcgactgctgcatgggaatatgcacggagcatgtctggcaagccatatggttatcataatatgatattcagctgcatggtccctggtgctgacaacttgcctccgcctcgcgatgcccccttggtgccttctgccatctcgatggggtcttggccgccgcccgctactgctgatgatatgccttctacatgt

SEQ ID NO: 5653 - DNA, 1731 bp, Glycine max
  misc_feature (28)..(29): n is a, c, g, or t
  misc_feature (33)..(35): n is a, c, g, or t
  misc_feature (37)..(37): n is a, c, g, or t
  misc_feature (40)..(42): n is a, c, g, or t
  misc_feature (101)..(101): n is a, c, g, or t
  misc_feature (112)..(112): n is a, c, g, or t
  misc_feature (226)..(231): n is a, c, g, or t
  misc_feature (233)..(234): n is a, c, g, or t
  misc_feature (236)..(236): n is a, c, g, or t
  misc_feature (257)..(257): n is a, c, g, or t
  misc_feature (273)..(273): n is a, c, g, or t
  misc_feature (278)..(278): n is a, c, g, or t
  misc_feature (292)..(292): n is a, c, g, or t
  misc_feature (298)..(298): n is a, c, g, or t
  misc_feature (319)..(319): n is a, c, g, or t
  misc_feature (326)..(326): n is a, c, g, or t
  misc_feature (430)..(430): n is a, c, g, or t
  misc_feature (517)..(517): n is a, c, g, or t
  misc_feature (545)..(545): n is a, c, g, or t
  misc_feature (554)..(554): n is a, c, g, or t
  misc_feature (616)..(616): n is a, c, g, or t
  misc_feature (776)..(776): n is a, c, g, or t
  misc_feature (816)..(816): n is a, c, g, or t
  misc_feature (933)..(933): n is a, c, g, or t
  misc_feature (984)..(984): n is a, c, g, or t
  misc_feature (1202)..(1202): n is a, c, g, or t
  misc_feature (1218)..(1218): n is a, c, g, or t
  misc_feature (1221)..(1221): n is a, c, g, or t
  misc_feature (1230)..(1230): n is a, c, g, or t
  misc_feature (1244)..(1244): n is a, c, g, or t
  misc_feature (1317)..(1317): n is a, c, g, or t
  misc_feature (1357)..(1357): n is a, c, g, or t
  misc_feature (1448)..(1448): n is a, c, g, or t
  misc_feature (1451)..(1451): n is a, c, g, or t
  misc_feature (1453)..(1453): n is a, c, g, or t
  misc_feature (1458)..(1458): n is a, c, g, or t
  misc_feature (1499)..(1499): n is a, c, g, or t
  misc_feature (1673)..(1673): n is a, c, g, or t
  misc_feature (1701)..(1701): n is a, c, g, or t
  misc_feature (1703)..(1703): n is a, c, g, or t
  misc_feature (1731)..(1731): n is a, c, g, or t
  Peptide Sequence Number=SeqID_8442
  Probeset Number=SeqID_15432
aaaaaaaaattgccccccccccgctgtnncccnnncnccnnngaaatgatatagatagataaggaggtgaggttggcccccaccccccgcgcccacccacncaacacaaccncaaaggagaggggagcgcgtgtaggcaaaaggagtatatgtatttgatgtgtgttgaaacacaaaaaacacaatataaataataagtagggagagcaatatatattaaaaaaannnnnnannantatgtgatgtagggtggtgangggagggggaggtggnttaantgggatttactctnctacancccacaccacaaccaacacanttatatntagagattttatgtagtgacacccgaccacactacaaggcaatactctatttatatattgtgggtgatgtgtgtatgtacgcaacaccacaaacaaaaagtatntgatagttttttttatttacctattatatagaaataaaagagatagaggaaccaataaatgatattacattatacataatatatagnaatgaaaaactgaatataatatatgaantaaaaatanatactatatataaaaattacaacactacaacactacacaaaccacacatataatagtatatnattataaatcatataagttcttgttggtaattgttgtagtatgatgatataacatttgtgtatggtgaaatcaagacatcttctgtctgtactttaatgtgatatgtgatgatttgtgatagagaatgatagtagaagaacaagaatataaaaagatgantatatacatacacatctatagcatagtgtggagatgtagngcaaatcagaatatagaacaaacacatcatcattcatatactatctcagcacgagtgtgatgatgtgagatgaatgttgagttacagatatatgtatgagacatgtctctgccatanaacacaatagaataatatgatctatatccaatatcttactacgacgtcatnagtgagatgagatgataaaataagtagtgtcaataacggtaaagagagtttcttctactaacatcctcctatctactaggcatagctttgactgtaacttagagttgtatactattgtatgtgtaagtatactattaactctaatattaattacaatatcatagccaactactagtatatgatagaatgtataatacaagttgtattgatattgtaanaccaatagatacaaanaancacatacanatactatatatcanttatatgtatacttatgtgataagaagagtacgctgtgtgtgttgccatgtgagtatgctatcgatattaganatttcattagttcagtgtcagagtacaaatataatagtanagtaatatgtacgtatgatgatgtatgttgacaagcacacatacaccattataatgataaggtgatgagagaattatatgtataaataaanaananataangacaataaaggtgtgtatagtcatattgcattatagccatnaacgtctcatatagaaatatgactacaagacattactcgagtgctatatccgttatgcacaccccacactaccagatctatcacggtcattgtgatattgtttataggcgcaactcttccacacaactccaacacgaggacacgtgtacatatatgcagatgtatgatatgaanaggagaagatatagcacatcaccacatnanatcttagtgtagataggatgtaacatan

SEQ ID NO: 5654 - DNA, 277 bp, Glycine max
  misc_feature (73)..(73): n is a, c, g, or t
  Probeset Number=SeqID_15433
ccagcttgccttgcttcgtgttgctaaggtcaccggcggggcacctaacaagctctgtaagatcaacgtggtnaggttgaacattgcccacgttctgacggtgatttttcagaagcatatggctccgcttttggatgcctactaaaacacgaaatacttgcctctggattctcgacctaaaaagaccagtgcctattgcaggaggcttactacacaccatgcatcatttaagacacagagggagaagaagaaagatgtatatttcccactgaggaaa

SEQ ID NO: 5655 - DNA, 1790 bp, Glycine max
  misc_feature (22)..(22): n is a, c, g, or t
  misc_feature (25)..(25): n is a, c, g, or t
  misc_feature (37)..(37): n is a, c, g, or t
  misc_feature (43)..(43): n is a, c, g, or t
  misc_feature (45)..(45): n is a, c, g, or t
  misc_feature (54)..(54): n is a, c, g, or t
  misc_feature (62)..(63): n is a, c, g, or t
  misc_feature (66)..(72): n is a, c, g, or t
  misc_feature (78)..(78): n is a, c, g, or t
  misc_feature (82)..(83): n is a, c, g, or t
  misc_feature (90)..(95): n is a, c, g, or t
  misc_feature (108)..(108): n is a, c, g, or t
  misc_feature (120)..(120): n is a, c, g, or t
  misc_feature (124)..(124): n is a, c, g, or t
  misc_feature (129)..(129): n is a, c, g, or t
  misc_feature (190)..(190): n is a, c, g, or t
  misc_feature (265)..(268): n is a, c, g, or t
  misc_feature (270)..(271): n is a, c, g, or t
  misc_feature (331)..(331): n is a, c, g, or t
  misc_feature (345)..(345): n is a, c, g, or t
  misc_feature (373)..(373): n is a, c, g, or t
  misc_feature (375)..(375): n is a, c, g, or t
  misc_feature (453)..(453): n is a, c, g, or t
  misc_feature (466)..(466): n is a, c, g, or t
  misc_feature (478)..(478): n is a, c, g, or t
  misc_feature (568)..(568): n is a, c, g, or t
  misc_feature (635)..(635): n is a, c, g, or t
  misc_feature (669)..(669): n is a, c, g, or t
  misc_feature (725)..(725): n is a, c, g, or t
  misc_feature (947)..(947): n is a, c, g, or t
  misc_feature (1004)..(1004): n is a, c, g, or t
  misc_feature (1027)..(1027): n is a, c, g, or t
  misc_feature (1164)..(1164): n is a, c, g, or t
  misc_feature (1172)..(1172): n is a, c, g, or t
  misc_feature (1215)..(1215): n is a, c, g, or t
  misc_feature (1227)..(1227): n is a, c, g, or t
  misc_feature (1249)..(1249): n is a, c, g, or t
  misc_feature (1282)..(1282): n is a, c, g, or t
  misc_feature (1287)..(1287): n is a, c, g, or t
  misc_feature (1373)..(1373): n is a, c, g, or t
  misc_feature (1383)..(1383): n is a, c, g, or t
  misc_feature (1388)..(1388): n is a, c, g, or t
  misc_feature (1392)..(1392): n is a, c, g, or t
  misc_feature (1428)..(1428): n is a, c, g, or t
  misc_feature (1441)..(1441): n is a, c, g, or t
  misc_feature (1444)..(1444): n is a, c, g, or t
  misc_feature (1469)..(1469): n is a, c, g, or t
  misc_feature (1523)..(1523): n is a, c, g, or t
  misc_feature (1602)..(1602): n is a, c, g, or t
  misc_feature (1676)..(1676): n is a, c, g, or t
  misc_feature (1750)..(1750): n is a, c, g, or t
  misc_feature (1756)..(1756): n is a, c, g, or t
  misc_feature (1758)..(1758): n is a, c, g, or t
  misc_feature (1765)..(1765): n is a, c, g, or t
  misc_feature (1790)..(1790): n is a, c, g, or t
  Peptide Sequence Number=SeqID_8443
  Probeset Number=SeqID_15434
ttggtgtggtgtgtgttgtggngtntgtgtttgtggngtgtgncncatctctangggggctnnacnnnnnnncccccncacnncatcccnnnnnnattctctagaatntaattcgtgtantccngaaantgtaaattttatgatatgtgaatcattgataatatacacaatcctctcaacatactactancatctactcatactctatctcgtaactgctatatagcagcagtcgcatgaactatatatgccagccgcgggcgcnnnngnnagtgtcgcgatcgcggacatcgagcgacacccaacaagcagcctgccgcactccacaganacgacgacgaccgncacgcagagagctcacgcgcccccacgnantattatacgagcatgagcacacgcacacactcgtagatctcaacacgctcacgctacaacccacactcaactcccacntttccataatccntcactcaaatanacttgtcaccacaacgcatataagagggttataagtatatctatctacgtaggggatcgggtggcgcgaaacgatgttgacacaggccgntctcgtcgatctctctctccttcccgttagctccgtagaccagtattgcacgtgttcgctatcatanataaacacatgaaaaatataagttgattgcgagncgttgagtcatagacagatgcgctgatacgatgtcatagtttatctctcctgcaantaccacacactacactacaccgacaactatacaaccacacaaaaaccaactaatacaattaacacaacaggagatcaatcacaaatacatctcggtacgcctactgtcgtggagacactgacgatgcgcgacgtaggctgggtctaactgtcatgtgcatgatttgtcgtacgagatactacacactatagacaaccaacatgtggatgacgtgcactatanctctatatacgatcgatagtcatacgtgaattaagtataatcgcgttgtaagagatntctatacgacacagaccattagnatagatcatatacactatctcactctcaactcacggacataattactactcctacgctcagtaatcacaatataaatcgttatatcagaacacgcctcgaatcctcttcacttatgccgacatacagagtgtatganatgagttnccacacacagcgtcacacacacgacactcacgcggaggagatngagatgagacangtagcaatagggtaaagcatgngagccatgagattaaagatcaaacaaggagaanatcantacatgatgcacacgacctctacatcatgtgtcctcatcctcttgcttcactgttatgcacacaccatctcgcactgatccatganacgcaattcncaaanctanccatcgacacagatgtacagatcactatacatacancacagaatatcangancatcgactcgactagcactagagtnctacattatcacacgcgctgcatacacgtatctaatatatctatgcattcagcnacatcgcactcgacgcgcatcgtctgcaccagctaccacaccatcacgtgtcatgtgtgttgtggagtgcatgagccancgcacacacactcacagacgacagagtagagcatgagtacagtctctacagaggacgatgactaagcagttgantgagagctgagcgaagccctagtcacgtataagatcgcgttggtgtcgtttctactcgcgtatcactcattatntaccgntnctgtgtncgaataacacgacaatagcaatacn

SEQ ID NO: 5656 - DNA, 687 bp, Glycine max
  misc_feature (187)..(187): n is a, c, g, or t
  misc_feature (189)..(189): n is a, c, g, or t
  misc_feature (218)..(219): n is a, c, g, or t
  misc_feature (223)..(223): n is a, c, g, or t
  misc_feature (227)..(227): n is a, c, g, or t
  misc_feature (234)..(234): n is a, c, g, or t
  misc_feature (236)..(236): n is a, c, g, or t
  misc_feature (244)..(244): n is a, c, g, or t
  misc_feature (246)..(246): n is a, c, g, or t
  misc_feature (254)..(254): n is a, c, g, or t
  misc_feature (257)..(259): n is a, c, g, or t
  misc_feature (263)..(264): n is a, c, g, or t
  misc_feature (276)..(276): n is a, c, g, or t
  misc_feature (291)..(291): n is a, c, g, or t
  misc_feature (293)..(293): n is a, c, g, or t
  misc_feature (300)..(300): n is a, c, g, or t
  misc_feature (302)..(302): n is a, c, g, or t
  misc_feature (304)..(304): n is a, c, g, or t
  misc_feature (308)..(308): n is a, c, g, or t
  misc_feature (310)..(310): n is a, c, g, or t
  misc_feature (320)..(320): n is a, c, g, or t
  misc_feature (323)..(323): n is a, c, g, or t
  misc_feature (328)..(328): n is a, c, g, or t
  misc_feature (337)..(337): n is a, c, g, or t
  misc_feature (341)..(341): n is a, c, g, or t
  misc_feature (344)..(344): n is a, c, g, or t
  misc_feature (346)..(346): n is a, c, g, or t
  misc_feature (348)..(349): n is a, c, g, or t
  misc_feature (360)..(361): n is a, c, g, or t
  misc_feature (364)..(364): n is a, c, g, or t
  misc_feature (368)..(368): n is a, c, g, or t
  misc_feature (380)..(380): n is a, c, g, or t
  misc_feature (385)..(385): n is a, c, g, or t
  misc_feature (388)..(388): n is a, c, g, or t
  misc_feature (393)..(393): n is a, c, g, or t
  misc_feature (397)..(399): n is a, c, g, or t
  misc_feature (404)..(404): n is a, c, g, or t
  misc_feature (407)..(407): n is a, c, g, or t
  misc_feature (426)..(426): n is a, c, g, or t
  misc_feature (428)..(428): n is a, c, g, or t
  misc_feature (436)..(436): n is a, c, g, or t
  misc_feature (438)..(439): n is a, c, g, or t
  misc_feature (445)..(445): n is a, c, g, or t
  misc_feature (448)..(449): n is a, c, g, or t
  misc_feature (452)..(453): n is a, c, g, or t
  misc_feature (473)..(474): n is a, c, g, or t
  misc_feature (489)..(489): n is a, c, g, or t
  misc_feature (493)..(493): n is a, c, g, or t
  misc_feature (495)..(495): n is a, c, g, or t
  misc_feature (506)..(506): n is a, c, g, or t
  misc_feature (515)..(515): n is a, c, g, or t
  misc_feature (519)..(519): n is a, c, g, or t
  misc_feature (523)..(523): n is a, c, g, or t
  misc_feature (529)..(529): n is a, c, g, or t
  misc_feature (531)..(531): n is a, c, g, or t
  misc_feature (536)..(536): n is a, c, g, or t
  misc_feature (540)..(540): n is a, c, g, or t
  misc_feature (548)..(549): n is a, c, g, or t
  misc_feature (552)..(552): n is a, c, g, or t
  misc_feature (554)..(554): n is a, c, g, or t
  misc_feature (567)..(568): n is a, c, g, or t
  misc_feature (570)..(570): n is a, c, g, or t
  misc_feature (572)..(572): n is a, c, g, or t
  misc_feature (587)..(587): n is a, c, g, or t
  misc_feature (590)..(590): n is a, c, g, or t
  misc_feature (597)..(597): n is a, c, g, or t
  misc_feature (599)..(599): n is a, c, g, or t
  misc_feature (604)..(604): n is a, c, g, or t
  misc_feature (607)..(608): n is a, c, g, or t
  misc_feature (615)..(615): n is a, c, g, or t
  misc_feature (617)..(617): n is a, c, g, or t
  misc_feature (619)..(621): n is a, c, g, or t
  misc_feature (625)..(625): n is a, c, g, or t
  misc_feature (630)..(630): n is a, c, g, or t
  misc_feature (633)..(633): n is a, c, g, or t
  misc_feature (646)..(646): n is a, c, g, or t
  misc_feature (659)..(659): n is a, c, g, or t
  misc_feature (661)..(661): n is a, c, g, or t
  misc_feature (663)..(663): n is a, c, g, or t
  misc_feature (667)..(668): n is a, c, g, or t
  misc_feature (672)..(672): n is a, c, g, or t
  misc_feature (687)..(687): n is a, c, g, or t
  Probeset Number=SeqID_15435
aaaatttaagaatcaaagtttatatttgtcttgtctgaaatggatgattcaactgtcaagattctaagcgtagttctcttctctatcctcatttctcaagggtacagccaatgtttcttgagtagtatatctgtaagccaatttcaaacaggagttaaagttcaagggacaaaacacaatgggaggngntaacccatccccccaacaaaattggggcnntggnggcncccaaananaaaagggnancttggaanttnnnaccnnggattttcccantttccttttgggacncncccccanantncctngnaaattttttnggnaaatntttttgggngganaanantnnggtcccccggnnatntaanatttggggggcnccacnccnttttntttnnncaaanggngccccccccccaaaaaacncnaacaaaantnngggggnggnngannaaaaaaaaaaattttccccnnttaaaaaaccccccncttntntccccccaaanaatttcttncgtnggtnttttananggggngccncccccccnnggntntttttttttttanncncnccccccccccccccnttntaacaananaaaanggnntcccaanangnnncccnccccnccnaaaaaaaaaaatnttctttttttttntngnggcnntaanaaaaaaaaaaaaaan

SEQ ID NO: 5657 - DNA, 1098 bp, Glycine max
  Peptide Sequence Number=SeqID_8444
  Probeset Number=SeqID_15436
aactaacgctaaaaaagttacagtttctgtactttattgtagcatacaggaccaagctgtctttagaggtttcttaaaatggccacctacgagctcaagcccgtgctggcaggcacaaagaaggacccgtccaagacgcagttcgtggcacgcaaaatcaacgatagcccgttcggctcgttccccgagtcatggacgctgccgaagcgtgaggaggccaaggccaaggccaccgctgcccgcgccctcgccaccggccgcagcttcggcgcagcagcagacgttcgttcagttcccgaaggcacacagcggcaccggcggcgcgacgtcgtcgctcaaccagggccgccgccccgacccgcctaaggcacccgttgccggcgccaccggtcgccgtctcatcccgccgactgagttccgccgcttctacgaccgcggcgacctgccgattgcagttgcgcacaagagcaagatgagcattgactggaaggtgcagctggagcagctggactaccaccactacctgcccatcttcttcgacggcctgcgcgagaaggacgagccgtaccgcttcttggccctgcagggctgctacgacttgctggccaagggcggcgcgaagatcctgccgacggtgccgcagctcatcatcccgctgaagaccgcgctcaactcgcgcgaccccgagattgtgtgcgccgtgctgaagatcctgcagcaactcgtggccgctggtgagctgattggcgaggcgctcgtcccatactaccgccaactgctgcctgtgctgaacctgttcaagggcaagacgaagcacatgggcgacgccatcgactacagtcagcgcacgcgcatgaacatgggcgatttgatcgaggagacgctgcagctgctggaggtgcacggcggccccgacgcgttcatcaacatcaagtacatgatcccgacttacgagtcgtgcgtgctgaattgaacggtcgaagggtcgtttgtctgaaaatttgctgcgagtagacacactttttttctttttgtttgttttgtttcaagtggggggaaagtgttcccgcccaatgtaccatcatgcttgatttcgtt

SEQ ID NO: 5658 - DNA, 1318 bp, Glycine max
  Peptide Sequence Number=SeqID_8445
  Probeset Number=SeqID_15437
gtttgttaaataattagaaaaaaaaataaactcgacaaagacaaatgtataatggaattggtttaactactgcaagaggttcaggaacaagtggatatgttcaaaagaatctcagtttcgtcaagccttatgctcagcaaaaccccagagatagtttccttaaagatcttcaagctctcaaggataacgtcttggctccacccaaaaaggcaaataaagatatccttctccatcagcaaaagagagatatacaacttcaactcattaaaatgagggaaaagttggaagcagaaggaaaatctaaagaagaaattaacgatagagtcaagaaagctgaagaaattttgaataagaaacttgaatctggtgaacttcaacttgcaagcgcaagggactaccataaaaaagctcttgagaaagaaaaggagtatgaaagagtcagaagagcctttgatatgtctgaagattataaaccaggaagcgctttcgactttgaaagtcaagaaaaaaagagacttgagcagatgtttgaaagagaaaagaaaaaatatgaacagaaaaaagaagaactcaaggctcagaagaaggctctcaaagacggcatcgttcttgaaaaggaaaagccagccgaaccagcagaaaagaaaaccaatgaagaagctcgtcgtgaaagaaaggaagaaagagccgctgccgaataaaaaagaaaccaagaaagagaagaaagaagagcttctcgcagagatttggataaaagaagtccacaaaaagacagaagatcagatcatcgtagggatcgcaaccgtagtcgcagccgaagcccaagaaatgtcgagagaaaagagagaagaccaagagatcactcttcagacagacaccatcccaaaaaagaaacctcaaaagaaagaagcagacatagagaaaaatccaaaagcatttctcaagaaaaaagaaaagaagaagtcaagagaaaaaagagagaagattctgaacaaaaagaaaagagaaagaggcgcgacagcagtagtagcagttcttcaagtgaaagaagtagaaagagtaataaaagtcaagaaaaagaaaccagaagaagaagaagacatgactctcgatcttcatcctcctcttcgagatctgctagtcgctccagctcttctagctccagatcctcaggttcaagatctgactaattccttttgttcgcctgtttgatcttggattcatatgcttcaaatattttttctttataattacccgttcattgagtttatataataatattacgaaaaatctctttttcttaaatttgactcaacct

SEQ ID NO: 5659 - DNA, 763 bp, Glycine max
  misc_feature (150)..(150): n is a, c, g, or t
  misc_feature (223)..(223): n is a, c, g, or t
  misc_feature (252)..(252): n is a, c, g, or t
  misc_feature (322)..(322): n is a, c, g, or t
  misc_feature (339)..(339): n is a, c, g, or t
  misc_feature (363)..(363): n is a, c, g, or t
  misc_feature (376)..(376): n is a, c, g, or t
  misc_feature (394)..(394): n is a, c, g, or t
  misc_feature (398)..(398): n is a, c, g, or t
  misc_feature (401)..(402): n is a, c, g, or t
  misc_feature (413)..(413): n is a, c, g, or t
  misc_feature (417)..(417): n is a, c, g, or t
  misc_feature (424)..(427): n is a, c, g, or t
  misc_feature (435)..(435): n is a, c, g, or t
  misc_feature (450)..(450): n is a, c, g, or t
  misc_feature (472)..(472): n is a, c, g, or t
  misc_feature (475)..(475): n is a, c, g, or t
  misc_feature (477)..(477): n is a, c, g, or t
  misc_feature (507)..(508): n is a, c, g, or t
  misc_feature (510)..(510): n is a, c, g, or t
  misc_feature (513)..(513): n is a, c, g, or t
  misc_feature (523)..(523): n is a, c, g, or t
  misc_feature (529)..(529): n is a, c, g, or t
  misc_feature (535)..(536): n is a, c, g, or t
  misc_feature (541)..(541): n is a, c, g, or t
  misc_feature (561)..(561): n is a, c, g, or t
  misc_feature (577)..(577): n is a, c, g, or t
  misc_feature (579)..(579): n is a, c, g, or t
  misc_feature (582)..(582): n is a, c, g, or t
  misc_feature (594)..(594): n is a, c, g, or t
  misc_feature (610)..(610): n is a, c, g, or t
  misc_feature (613)..(613): n is a, c, g, or t
  misc_feature (625)..(625): n is a, c, g, or t
  misc_feature (655)..(655): n is a, c, g, or t
  misc_feature (658)..(658): n is a, c, g, or t
  misc_feature (664)..(664): n is a, c, g, or t
  misc_feature (672)..(672): n is a, c, g, or t
  misc_feature (700)..(700): n is a, c, g, or t
  misc_feature (705)..(707): n is a, c, g, or t
  misc_feature (710)..(710): n is a, c, g, or t
  misc_feature (713)..(713): n is a, c, g, or t
  misc_feature (720)..(720): n is a, c, g, or t
  misc_feature (729)..(729): n is a, c, g, or t
  misc_feature (733)..(733): n is a, c, g, or t
  misc_feature (739)..(739): n is a, c, g, or t
  misc_feature (760)..(760): n is a, c, g, or t
  misc_feature (762)..(763): n is a, c, g, or t
  Peptide Sequence Number=SeqID_8446
  Probeset Number=SeqID_15438
aattggtaccgggcccccccgtcaccgggcatggtgcgcatctgcctttacggtgatttacaacgatttggtcgccgtatcgaccttcgtgtgaaaacgggggctgaagccatccgggcactggccacacagctcccggcgtttcgtcanaaactgagcgacggctggtttcaggtactgattgccgggcgggacgtgagcacaaacgggttaacgagcgcanttacatgagactctgtctgatggcgctgnaattcatattgtacccagagttgacggggccaattcccgtggcgtattccatattgtctgggggctggcnacattgccggatcattntttaccggcggagccacccttgcnccatggggggcanccattggggccggtggtntgancgnnatcctgttttntctnggtgccnnnntggcgctnggtggtgtggcgcanatgctggcaccgaaagccaganctncncgtatacagacaacggataacgcctgcatnncnggnggatcactanttctanagcggnngccancgcggtgatctcactttagncccttatgaggttaangncanctggcgtaacanggcatagttgttctgngtnaatgtgtcgttncattccacaacatcaaccgaacataaatgnaanctgggngctaagantactactactttttgggtgggtattccntttcnnncgnaantgggccntttttttanttgnaagccngggaagggttgtattggcctntnn

SEQ ID NO: 5660 - DNA, 1252 bp, Glycine max
  misc_feature (1029)..(1036): n is a, c, g, or t
  Peptide Sequence Number=SeqID_8447
  Probeset Number=SeqID_15439
accgtaaaccacttcttcaactttccttcccaattctaaactcattcaaactatggcagcgtcttcgctctgttcctctttcacctccaaaacgtggaacccgcacgcgcgctatcaccacaaaaccctagcacctccctattccgcctttcttcgcggagacctccagctccatccaccttcggtttccggaacgcggcggagaaggcgccgccgatcgggttcggtggcgtccctcggaggcttgttgggcggcatcttcaaaggcgccgatacgggagaagccacgaagcagcaatacgctgcgaccgttaacataatcaatggattggaaccggagatttctgctttgtcggattcggaactgagggacaggacttttgcgctgcgagaacgcgcgcagcatggccagtctttggattcgctcttgccagaggcgtttgctgtggtgagagaagcttcgaagagggttctgggccttcgtcccttcgatgtccagctcataggaggcatggttcttcataagggagaaatagctgaaatgaggaccggagaagggaagacactggttgctgttttgccagcttatttaaatgcattgagtgggaagggagttcatgttgtaactgtcaatgattatctagctcggagggattgtgagtgggttggtcaggttcctcgctttcttggattgaaggttggcctcattcagcagaatatgacaagtcagcaaagaaaggaaaattactcatgtgatataacatatgtcactaatagtgagcttggttttgattacttgagagacaatcttgccacgagtgtcgaagatcttgtcataaggggtttcaattactgtatcattgatgaggttgattcaatccttattgatgaagctagaacgccgcttattatatcaggacctgcagagaaacccagtgatcgatattataaggctgcaaagattgcagaagcctttgaacgagacatacattacactgtagacgaaaaacaaaaatcagttacgtaggnnnnnnnntactttctgagcaaggttatgaagatgctgaaaattttaaactctttcaaagtttatatgagccttggcaacagtggtctttatatatccaaaatgcaataaaaccagcagacctatctcttcgagatctaaactccaccttaattcgtggaaaagaggtcctaattgttgatgagtttactggtcgagtcatgcaggggagaaggtggagtgatg

SEQ ID NO: 5661 - DNA, 1428 bp, Glycine max
  misc_feature (57)..(57): n is a, c, g, or t
  misc_feature (139)..(139): n is a, c, g, or t
  misc_feature (253)..(253): n is a, c, g, or t
  misc_feature (286)..(286): n is a, c, g, or t
  misc_feature (304)..(304): n is a, c, g, or t
  misc_feature (329)..(329): n is a, c, g, or t
  misc_feature (439)..(439): n is a, c, g, or t
  misc_feature (824)..(824): n is a, c, g, or t
  misc_feature (830)..(830): n is a, c, g, or t
  misc_feature (1226)..(1226): n is a, c, g, or t
  misc_feature (1351)..(1351): n is a, c, g, or t
  Peptide Sequence Number=SeqID_8448
  Probeset Number=SeqID_15440
cgcgcgagacgctgtgagctatatgtgtctacacagaaaaagttacaggtaggtcancccgtctgtcagactcgatgattcagatctgtagaatataagatgagcggcatgctctatatgcgcagattagcatgtatantgagagtgtggacatcagctactaactgatcatgaaactaccgtcgcgcgcgacttacacaagaatacttagcgacgctgtctgctgacaggataattcggagatagtactggnttactcatgtatactccacagtgctcactcagnaggagagttattcctgtncggtcagccggctggtaacacatanaaagtctatgacatagatatatactcgcgtgcacctacgataatgatctgatatcatgcatctcttcctatctctatctctagtggttgatttgttctttatacgacttngcgcacatagtgtaagagggagggatgtctccctcacacagcgatcgacagcaaatactcttctagatctacagaagtgttaataatgttcattagctcgttccaacaaattatattcactatacacacacaagtaccaatgttagtatccctactatgttcacgtaccgactaaatattatagcgctttccacacaaagggggtggtaggttacttacatgagtagactagttttttatatgattctcatgtgatactgcctctttattgatacacatgttccattgtgacgagcgaccatatatacgcaatgtatgtgatgcgaatgtctaaccatctgcataggtattaaatgtcctatagtctctgtgcttgtatgtacgncatganttgactctctatgcttcatgttcgacatcccaaagatataaatacactcaccatgatagaagttcgataaagcgcaccgtccaatgccttctgttaagagctcgtgtaatgagtctttctagtaccatttctactacactttaataattatctctatagatttacacggagccgtctatttgatattgtcagatggggtgctcctccctacgtaaatagcaatatgtacaattatagcttaggtctgacttatgtagatacgacgataatgggagacatctgaatactactacctcctattataagtgcgtagtgatgatctagttcctctatctatcaatgttgcgaggtatacagatatatttcttttcccaacagacagaacaagaagactanaaagagtagattgaccttctcagtcccgccgcgcggggagtgcctatcttattttacgtaaataagcgcgccgccgctccaccccgcccggcgagaggtctgctccaccatctctatatgagggngttagttacaccgataagtaatctatgcagtggagcgagagcacgcaaaggagacaaatagaataacaacaaactac

SEQ ID NO: 5662 - DNA, 1565 bp, Glycine max
  misc_feature (574)..(574): n is a, c, g, or t
  misc_feature (1380)..(1380): n is a, c, g, or t
  Probeset Number=SeqID_15441
cgccgtatatcagagcaaactgtggtgttaatatggcgacagcaagatccagacgtcacaatcacatcgggtatcgccgcggctcgtcactacctacatttcgctatatatgcgttggcgcggcgcgcgccgacatcattatgtctctatagtaatttatacgtcgcgcgatccgcgcccgccgaccgctctcttgtcgagtgttatcccctattactgcgcgaccacggtacgtctattatatcatgagagttcacaactcgccctgactgtcagtttgtgtatcacccatctattgttgtatgattattatcggccggccaggcagtcgcgaccatgtttatacactactccttatcgcaccgggcgcacgcctttattatatctgtcggcccgcggcgatatattatatatccataaaactcggcgggccgagcaatacgggagcggtgtaaatgaagacggacacaacgcgtgcgacggcgtcgtgttaccatctcgttctactgtttgcgtattatttcgcgcgcgccgctgtttgttcatgatcacaacactatacacacatcctagnagcgcccccagagtgcggatgcggtaaacaaacagagtcgatgtacgaaacgagactacaccacaggttttgttcgtacacaataaatcgtcggtcgtgtcttcacacactctgattttcttccttgaatctccatatttaaaactcaccccgccctcctcatcgcatctattaataggcgtcacgcactctgttcactcctctcacgcacgttgtgtgcatcagacaattatacgcccgcgtgttatatataaatgcgcggcgccccccagccctatattattatcgccgcgggcgtggcgcggtctccttgcgtttatatctcactaattaattatagcaagcggggggagaaaagataaggcagtatcatatatgccgccggtctcatgcgatatttgtactcaaggggggtattatatatataatttccctgcgggcgggggttgtataactttttataaattaccctccctcgggacttcctaaaccagccttcttagcgtgtatatttgggtctcgggggggttcgcacgcccccccccctatatataagtcgcgtggcctttagcgatatctcaaataacatagcgcggttggtataaatatcatcgtaggcgggcgggaataggtaattttatataatatagggggataattaggagcggatcgtcgcgggtctatcctataaatatttagcgtgggcgacataaatgtgcgcgcgcgcgaacaatggtgttaaagaaatggtgggggtgcaaaacagtgcaatgtgttatttggggggcgcagtatgcgacaccgcnttttatatcaataaccctcagtctgtcttatacgcggatacgcttcagaacaatcggatcaaccaaccggcggaacagggcatgaaaaaacgaaagcgcaaaacgcggccagcgggtatatgggcgggggagaaatatcggacggcaccaataacggtagcgcacacagtatgctgtccattatc

SEQ ID NO: 5663 - DNA, 1702 bp, Glycine max
  misc_feature (1)..(1): n is a, c, g, or t
  misc_feature (54)..(54): n is a, c, g, or t
  misc_feature (81)..(81): n is a, c, g, or t
  misc_feature (92)..(92): n is a, c, g, or t
  misc_feature (99)..(99): n is a, c, g, or t
  misc_feature (107)..(107): n is a, c, g, or t
  misc_feature (152)..(152): n is a, c, g, or t
  misc_feature (196)..(196): n is a, c, g, or t
  misc_feature (322)..(322): n is a, c, g, or t
  misc_feature (424)..(424): n is a, c, g, or t
  misc_feature (427)..(427): n is a, c, g, or t
  misc_feature (522)..(522): n is a, c, g, or t
  misc_feature (540)..(540): n is a, c, g, or t
  misc_feature (1248)..(1248): n is a, c, g, or t
  misc_feature (1470)..(1472): n is a, c, g, or t
  misc_feature (1483)..(1483): n is a, c, g, or t
  misc_feature (1520)..(1520): n is a, c, g, or t
  misc_feature (1530)..(1530): n is a, c, g, or t
  misc_feature (1533)..(1533): n is a, c, g, or t
  misc_feature (1560)..(1560): n is a, c, g, or t
  misc_feature (1564)..(1566): n is a, c, g, or t
  misc_feature (1571)..(1571): n is a, c, g, or t
  misc_feature (1573)..(1574): n is a, c, g, or t
  misc_feature (1584)..(1585): n is a, c, g, or t
  misc_feature (1593)..(1594): n is a, c, g, or t
  misc_feature (1612)..(1613): n is a, c, g, or t
  misc_feature (1622)..(1628): n is a, c, g, or t
  misc_feature (1635)..(1635): n is a, c, g, or t
  misc_feature (1647)..(1648): n is a, c, g, or t
  misc_feature (1650)..(1650): n is a, c, g, or t
  misc_feature (1652)..(1652): n is a, c, g, or t
  misc_feature (1672)..(1673): n is a, c, g, or t
  misc_feature (1677)..(1677): n is a, c, g, or t
  misc_feature (1682)..(1686): n is a, c, g, or t
  misc_feature (1688)..(1690): n is a, c, g, or t
  misc_feature (1694)..(1695): n is a, c, g, or t
  Peptide Sequence Number=SeqID_8449
  Probeset Number=SeqID_15442
ncgagtggtatcgtcatttcgagagcgggcgcggcgcgtgcgacatgcgtcaantgagatgagtggtgagtgctgccaacncaccgctcganattactncatgttancactcatattcatggttcagtcgtcgtattaccgttctgtgcgancgtgtgtgggctgggtaggtagtttgtctgaagcatatcatgtnttgtctatgtatctcagttgtgttgtatgatgtgcgtttgtcggtcgatccgagtagcgagaggatgaggtatgtcgtgcttcggcgcgactggggtggcatgtagagcacgcgttgtaatcccangtatgtattccgataaccactaggagaagagagtggctagtatacgagagatgatgcatgacgtagccggagcgccacacagagacgtgacatccgccacgngcnactgtcgatcgatccagtggtatgtgacgcgaactgtgtaggacgtgagcgcacgggtgcttcctatgcgtgatcttgtcatctcggtgtgctangcaatgtttgtacacgtntgcctgcgtcggagggtgatcgcgtcagcgttcagagcacacaaggataggatactagtgatgatcagacatcagactaacgagaaagacggcgagacgtacatatagctcgcacacacacagaggtaggaggtagcattgtgtgagacagcgtgtggtgtcgttatgagatgcaagcgacatgcgtgagatagtcgtgaaggacacgatagctgagtggtgtggatgaatggttaccggtctccgcacacactaccagctcagtgatagcggtactagtgcttcacaacgtgtgtggacttctcgttacgacgacagacagatagcacagagagagtatgagcagcataaggggttaacaagcagttaatagacgcgggtgaggaatagcggaatcacataaaaaagtagaatgagcgacgagagaacacatacgagcacgagtcgcagactatatctatagataatcaaacactgcggcgaggcgacgaggagatgatcgctgtctggagtttatctcgcgttgtcgccggcttttgacacataccgccgcacgacactccttaccgatgccgacaacccgcacacgctagacacgactacacacgatcaaccgaacagcggcgccacgccggcgcatgctcactctcgcgtgcggctgagcgcgatcgcagcagcgcgctagagatgacgcggaggctgagattnctcgctcatctcgcgagagttggcgagagggtggtggagagacgtgggaggcagggacacaggatgtgatagaaagcgagaggacgcaaaacattataaagaaaatatagaacgcctccaagaataaagatccaaccacgatagtgatagggtcaccaccactcacacttagccatcatataacacatctatccgtcagatctaccgccacccatttacctnnntcttttgagtntggtggtggcggtagacgggggctctccgcgcgtcgncggcgcacancanggtggtggggcgaagctagggggggcnaatnnnaaacngnnagcataacanngtcgcccnnacacactccgggaaaatnngaggggggnnnnnnnagggtangagaggggaagnngnangggagggggggggggggggnngggnggggnnnnnannngggnnaaaaaaa

SEQ ID NO: 5664 - DNA, 1990 bp, Glycine max
  misc_feature (5)..(5): n is a, c, g, or t
  misc_feature (11)..(11): n is a, c, g, or t
  misc_feature (36)..(36): n is a, c, g, or t
  misc_feature (68)..(68): n is a, c, g, or t
  misc_feature (70)..(70): n is a, c, g, or t
  misc_feature (77)..(77): n is a, c, g, or t
  misc_feature (86)..(86): n is a, c, g, or t
  misc_feature (110)..(110): n is a, c, g, or t
  misc_feature (112)..(112): n is a, c, g, or t
  misc_feature (126)..(126): n is a, c, g, or t
  misc_feature (195)..(195): n is a, c, g, or t
  misc_feature (197)..(197): n is a, c, g, or t
  misc_feature (227)..(227): n is a, c, g, or t
  misc_feature (241)..(241): n is a, c, g, or t
  misc_feature (270)..(270): n is a, c, g, or t
  misc_feature (299)..(299): n is a, c, g, or t
  misc_feature (318)..(318): n is a, c, g, or t
  misc_feature (321)..(321): n is a, c, g, or t
  misc_feature (324)..(324): n is a, c, g, or t
  misc_feature (386)..(386): n is a, c, g, or t
  misc_feature (396)..(396): n is a, c, g, or t
  misc_feature (507)..(507): n is a, c, g, or t
  misc_feature (531)..(531): n is a, c, g, or t
  misc_feature (558)..(558): n is a, c, g, or t
  misc_feature (598)..(598): n is a, c, g, or t
  misc_feature (680)..(680): n is a, c, g, or t
  misc_feature (682)..(682): n is a, c, g, or t
  misc_feature (685)..(685): n is a, c, g, or t
  misc_feature (690)..(690): n is a, c, g, or t
  misc_feature (694)..(694): n is a, c, g, or t
  misc_feature (817)..(817): n is a, c, g, or t
  misc_feature (819)..(819): n is a, c, g, or t
  misc_feature (877)..(877): n is a, c, g, or t
  misc_feature (890)..(890): n is a, c, g, or t
  misc_feature (892)..(892): n is a, c, g, or t
  misc_feature (898)..(898): n is a, c, g, or t
  misc_feature (942)..(942): n is a, c, g, or t
  misc_feature (1046)..(1046): n is a, c, g, or t
  misc_feature (1059)..(1059): n is a, c, g, or t
  misc_feature (1077)..(1077): n is a, c, g, or t
  misc_feature (1177)..(1177): n is a, c, g, or t
  misc_feature (1189)..(1189): n is a, c, g, or t
  misc_feature (1211)..(1211): n is a, c, g, or t
  misc_feature (1228)..(1228): n is a, c, g, or t
  misc_feature (1261)..(1261): n is a, c, g, or t
  misc_feature (1300)..(1300): n is a, c, g, or t
  misc_feature (1325)..(1325): n is a, c, g, or t
  misc_feature (1344)..(1344): n is a, c, g, or t
  misc_feature (1351)..(1351): n is a, c, g, or t
  misc_feature (1367)..(1367): n is a, c, g, or t
  misc_feature (1390)..(1390): n is a, c, g, or t
  misc_feature (1405)..(1405): n is a, c, g, or t
  misc_feature (1411)..(1411): n is a, c, g, or t
  misc_feature (1459)..(1459): n is a, c, g, or t
  misc_feature (1467)..(1467): n is a, c, g, or t
  misc_feature (1501)..(1501): n is a, c, g, or t
  misc_feature (1523)..(1523): n is a, c, g, or t
  misc_feature (1532)..(1532): n is a, c, g, or t
  misc_feature (1542)..(1542): n is a, c, g, or t
  misc_feature (1617)..(1617): n is a, c, g, or t
  misc_feature (1622)..(1622): n is a, c, g, or t
  misc_feature (1646)..(1646): n is a, c, g, or t
  misc_feature (1665)..(1665): n is a, c, g, or t
  misc_feature (1670)..(1671): n is a, c, g, or t
  misc_feature (1681)..(1681): n is a, c, g, or t
  misc_feature (1683)..(1683): n is a, c, g, or t
  misc_feature (1686)..(1686): n is a, c, g, or t
  misc_feature (1711)..(1711): n is a, c, g, or t
  misc_feature (1713)..(1713): n is a, c, g, or t
  misc_feature (1754)..(1755): n is a, c, g, or t
  misc_feature (1803)..(1804): n is a, c, g, or t
  misc_feature (1813)..(1813): n is a, c, g, or t
  misc_feature (1816)..(1816): n is a, c, g, or t
  misc_feature (1823)..(1823): n is a, c, g, or t
  misc_feature (1835)..(1835): n is a, c, g, or t
  misc_feature (1851)..(1851): n is a, c, g, or t
  misc_feature (1885)..(1885): n is a, c, g, or t
  misc_feature (1894)..(1894): n is a, c, g, or t
  misc_feature (1896)..(1897): n is a, c, g, or t
  misc_feature (1899)..(1899): n is a, c, g, or t
  misc_feature (1926)..(1926): n is a, c, g, or t
  misc_feature (1933)..(1933): n is a, c, g, or t
  misc_feature (1946)..(1946): n is a, c, g, or t
  misc_feature (1949)..(1950): n is a, c, g, or t
  misc_feature (1953)..(1953): n is a, c, g, or t
  misc_feature (1956)..(1957): n is a, c, g, or t
  misc_feature (1959)..(1961): n is a, c, g, or t
  misc_feature (1963)..(1963): n is a, c, g, or t
  misc_feature (1968)..(1968): n is a, c, g, or t
  misc_feature (1973)..(1973): n is a, c, g, or t
  misc_feature (1975)..(1979): n is a, c, g, or t
  misc_feature (1981)..(1982): n is a, c, g, or t
  misc_feature (1990)..(1990): n is a, c, g, or t
  Probeset Number=SeqID_15443
cactncgcgtnctcgatgcgtctcagcacttgagtnagagtcgaccctgcggatggattggcatgtgngncatattnttacacgtnttgtacgtcacactgactctatgncntcatcaggctggcncctctcgaatgccatatcatcagatcgtgcgtgacgtgtgcgtattcgtcaatactaactagtctgctnancgtcccagtctcacgagtcatgcgagaccncttggcagagatgnaagtaaagagcgatagatagatgtagaantgtcatacgcgtagcgatgagacaggcangcatagtgatatagtcatnctnaanatatagcacctacacgagtgtacgaaggtgctacgacaggacgcaatgtagcacatgcatcncagtagcagnaggcgcgtgcgcgacgtcgtcgtcgcaggtaccgatatagctatagacaatatatctcagatacaacgacgcagacgcgagtcacgcacgtgagagatcggcaacgacacntcttacgagctacatatcatgggntcgcagagaggtgatggtagtggtggntggctgtccaggagtgatatgacgagcgaccatgatcacngatctgtcttctctacgtgcattcgtgtcgtcctctcgcctgctgcgtggtggtgggggggtggcagcgcatcactcatggntnttntcatntatnaacataatctatatggactctcgactccagtcgagataaccatgtaagacagtagtgagggattctacagatataagtatgtgcgtcctctatcatctcacgagcgtctacagacgtattcantntactgattcgcgtaacttatcgtacatactcacatctcttgtagtcgtcacgagatancacgtgcacgacngngagtcnatagcgagcacggaacgtccagtgtgtagcgagaggtacgttancgtcatgtgagagatcgccgtacggcgaggcaggataggacatcagcggtagtataccagacgaccaacatacataacaatgtagcgatgacagcacagaccantgcatcagatacnacgccgacgtcccgctcnagcgcgggcgcgaggcggacgagtcatgctatgtgtgcgatgccgcgtactgatcgtgatgctcgatatcaatcgtatcgtgatatgaggcttcatactngcgttcctctcntcatgatatgactgtcgacgcngctctctcgatcatcancggttttagagttagtacacgaagacacagccncgccgtcgcactagtacatagccagcaagcagacagcgngaagagaacacatcacgaagacccnacagagatagcacgagagncactcgncgcgtacgaatactcnatccactcgtcatatcatcaacnactcatataattatntaacancacgacagtcactagtgacgatgatatgatgtgaatgagtagtatgangtaggtanatactgatctgctagagaggatgtgtcgcttcangtgtatcgatatagtgaaggcncgtatctgntcttgctcgnacacactatctcgcatctgtctcaggatagcgtcgtgacatcagtcgagtcgatgcggtacgttcatactgactngatangacaactaccacacacatcgtcgncagacgatagacttcaacnaatannacactacatnanacnaaaaaatactgctcttttatatgantntgtatcgtacgcggatgtctgtgagagaagagatgagatannacgagcgtaagctagtagatcgtggatagagagtctcagttcccattnntatcttctnctntctatgnctctacagagangtccgccgcgcgacgngcggcgcgtgtatgtgataaatgaatgttgtgtngaagatgtntnngngtagatcggactcttatgatattaccnctacacncgctacgtccgcngcnncgnggnntnnncnagganaaaanannnnnannaaaatttn

SEQ ID NO: 5665 - DNA, 1402 bp, Glycine max
  misc_feature (17)..(22): n is a, c, g, or t
  misc_feature (24)..(34): n is a, c, g, or t
  misc_feature (38)..(38): n is a, c, g, or t
  misc_feature (40)..(40): n is a, c, g, or t
  misc_feature (45)..(45): n is a, c, g, or t
  misc_feature (47)..(48): n is a, c, g, or t
  misc_feature (70)..(71): n is a, c, g, or t
  misc_feature (74)..(74): n is a, c, g, or t
  misc_feature (171)..(171): n is a, c, g, or t
  misc_feature (179)..(179): n is a, c, g, or t
  misc_feature (317)..(317): n is a, c, g, or t
  misc_feature (357)..(357): n is a, c, g, or t
  misc_feature (377)..(377): n is a, c, g, or t
  misc_feature (646)..(646): n is a, c, g, or t
  misc_feature (710)..(710): n is a, c, g, or t
  misc_feature (952)..(952): n is a, c, g, or t
  misc_feature (956)..(956): n is a, c, g, or t
  misc_feature (1007)..(1007): n is a, c, g, or t
  misc_feature (1137)..(1137): n is a, c, g, or t
  misc_feature (1216)..(1216): n is a, c, g, or t
  misc_feature (1242)..(1242): n is a, c, g, or t
  misc_feature (1385)..(1385): n is a, c, g, or t
  Peptide Sequence Number=SeqID_8450
  Probeset Number=SeqID_15444
gggtgtggttgttgggnnnnnngnnnnnnnnnnntgtntngtggnannctacttcttgtacttgcgcgcnncanattaatttatatatacatattaaagaaatgacaccacgacctcccatctacggtagagtgggaagtgtggatctgggatatagaatgtatatagatntggttatntatatcagcgagagaggggggtgagggggcactacaatatacacatacggacgtcacaacgcaggcggcgcgggaatgatggagcggcgtgtcggggtagacttgctccatctcgttcgagagtaggcgagctagtgngatacctaacaccacacctagcacactagccgcagcctcngattgtacatagaatctagnagacgacttgcgtaccacgaccttatgagagaagtgagagaatggtgggggttgttgttgtgtgcttgtttatgtaaggagtgcaagaggtgctttggtgtgttgatgagagcgcgagcggagagtagaacgcgcacgaagcgcatcatgaagacagcgcaatcactgagcacgaggacggcagatacggaagacaagcaaacgagggacgcgagtccgcagcgtatgggattagatggatattgtcactgagtgaatagagatgaganacacaacgacgcgtgggagtgcacggtcgtggtgtctgtgcatcacataacttacgctcctcancggactaggtatggcgcggcactgaggtgtggggcaggggtgtgggagcaatgagtaaagggcgagcagcacccgactcatacatggactcagtgacggaagacagtgatgcactctgtgtggcacacgcatactacacggtggcggttgagttatgagtgatgggtgagataggcggagacacgagtgtcatatattttgacgtgtatgatagttatgagtgatgacggcagggacgtgtnaccncggatgctcggcgtcgtgccatgcagaggcgagagatgggatcatgccttngttgcacactgtaacacaggcatcgacacgctgcggtacacgcacaactcgcacacctcgaggtctatgtaagactaccaagcatgcgtgtgcgcgcgatgtcactagccccgaagacggtcacgacggncgcggcaggtgctgtgagagatgtacgcgtggtgttagctggctctacgtgctgtgactagtgctgcgtgagtgttcgnttcatagagtgccgcgtcgccgcgcnctctgaaggtgatgtgagagcacgcctctgcacacggtctcgacgcgagtgcgcgctgactagcgctggggtcgagacgctcgcgtcggatcgtcgcgctgataagcctgacaccaggtgcgtgtgcagtctggcctacgacnctgacaccatccacaca

SEQ ID NO: 5666 - DNA, 461 bp, Glycine max
  Probeset Number=SeqID_15445
aattggtagttcagaagaaaccaaagacagctaggatcgtcttcttggaagttgcatgaccttgctactagaagcagtttaatcatccattcagagagagagagggcctcaacatgttgcaaattttactgcctaccataggagaaaactgaaacaaactgtcgcttctaatgaaactcttattgccccgtgtgaaactgtttggacatgacaaatacgtccctttccctcgtgctgctttctcagctcataaagtctaacaagcaggtactggccatttattctgccaggccttttaaggttctagctcctcgggactcatgacaccgaattggcggcttatagtgctttggcagcagtccacatccattagccagtcccttttttatggggtcacgcatatcccatgagaagacagtggtgtttatttatgttctcctatacttggcagtagttatgcc

SEQ ID NO: 5667 - DNA, 739 bp, Glycine max
  misc_feature (555)..(555): n is a, c, g, or t
  misc_feature (576)..(577): n is a, c, g, or t
  misc_feature (602)..(602): n is a, c, g, or t
  misc_feature (633)..(633): n is a, c, g, or t
  misc_feature (654)..(654): n is a, c, g, or t
  misc_feature (658)..(659): n is a, c, g, or t
  misc_feature (665)..(665): n is a, c, g, or t
  misc_feature (703)..(703): n is a, c, g, or t
  misc_feature (712)..(712): n is a, c, g, or t
  misc_feature (739)..(739): n is a, c, g, or t
  Peptide Sequence Number=SeqID_8451
  Probeset Number=SeqID_15446
agggatgtaaagccagccaacttagtggttactaaacgagggcagattaaactcattgattttggtgcagcaacagacctgaggattggaaagaattatgttccaaatcgtacccttttggatcctgactactgtcccccagaattatatgtacttccagaagaaacaccaagtccaccaccagaaccaattgctgctttcctttcaccagttctgtggcaggttttgctacttatattctatttatgcactcaaaatatggttcttctgtagtaatattagttttaatgaaaaatataatactggggagtggggatcaacaattttatcaaatcggttaaagcagcatactggccaagatctgttcacaaagaatataattgttctgtaaattaaaattaagagcgcctagttaagatgtaaatgcaggaacattaactaaaagattggttaatatgttaatcacatactgctgaattaactatcctcttgttgtttccatataccctattttgctcaggaagtgctaaagtggagttatgggattttggtcgnataaccaccctgatcggttgnntggtattctcgggatggactactgnaaggcataccagctaaggcctccttgtgttnaaatttaactggactaaaacntggnntgattngaaaatggaggctccccgcgcgctgtttaatctaattngatctttanggggttcacactaacttgtctgaaagn

SEQ ID NO: 5668 - DNA, 451 bp, Glycine max
  misc_feature (370)..(371): n is a, c, g, or t
  Peptide Sequence Number=SeqID_8452
  Probeset Number=SeqID_15447
acacttctgtgtaatttcattgattctgtagatctctgctcatcctcgccgtagctaattttcttttgtggacccccttttgacagaatcttgtcgaaattagggaaaataacaaatgggtcaagttttaggatgtgtccaagtcgaccagtcgaccgttgcaatcaaagagacgtttggaaaattcgacgacgttctcgagccaggctgtcactgtttgccatggtgcttggggagccaagtcgctggtcacctttccctgcgtgttcaacagctcgatgttcgctgcgagaccaaaactaaagataatgtgttcgtcaccgttgttgcttcgattcagtaccgggccttagctgagagtgctcagganngctttttacaagcttagcaacaccaggaaccagattcaagcttatgtctttgatgtgatccgagcaagtgtgcctaagct

SEQ ID NO: 5669 - DNA, 414 bp, Glycine max
  Peptide Sequence Number=SeqID_8453
  Probeset Number=SeqID_15448
ttttttttttttttttttactaaaaaggtcactttcaaattataaaaattaaaaaaaattaaaatataaattataaagactaagaattccaatttaaattataggactaaaaaaattaaaatataaatcataaaaactaaaaaaatcacttttaacctaaaatatatcaatcatataactataggaactaaaatatatcaatcatgaaactaaataccaaattagtaattttaacctattaattattactctttaacatgaaacattaggaaagtctaatagtaggagattgggatactaatggtagtatagtatcatagctaataggttcgaacttgttcacttctccaaaacatatcatggaggatttgtgttttctgttgtctctatactactcctttaaaatcctcgtgc

SEQ ID NO: 5670 - DNA, 694 bp, Glycine max
  Probeset Number=SeqID_15449
accaccgatccatcgatctttttcatctttccagataaagatcgagtttgctaggtcgatatgggctctctcatggctggatggagctcccatgctctcgacgacgacctcaaagctcgtttcatgagaaatcgttcgctgaccaaggacgaggtggaggccttctggaggcaggccggcttcttgtgctgcctgaggcagcacaagaagccggggcccggaggacaacgtcgacggcggcgagaccgtcgtcgcctcctctccccgcaaggggagcccgaggttgaccacgcgtccgccgactctatctcatgtccgttcgtcgccgccggtgatgacgagtagcgtggacggcgacggcgacggcgaggctgccgctagccccagcgccagccgcgactggtggacgaggagcagctgggcgttcctcaatgagccacctccgcagcagcgcgaaggaggaggcgttgggcaaggcgccgcggccgccgtctgatcatcatctctttaattactttgctataagctggctttgtatccctgtaaataagtactctcttaaactattaaatcactatctaaacactcttttattagtttacggagagagtacgtaccagccatgtaattggagtggtggttttgctaatgtttgatttctatacgatgtggagtgcatgtcaccttttgtatg

SEQ ID NO: 5671 - DNA, 496 bp, Glycine max
  Peptide Sequence Number=SeqID_8454
  Probeset Number=SeqID_15450
atccacagattcgactttagatctgagtgagaagaagcagagccatgacgatgatcagatccatctcgatgctaacgttgctcgtcacactagctgcatccatctccatggtctcctccgcttcatccgcagactttgttaagaagactatctcttcccacaagatcgtcatcttctccaaatcctactgcccgtattgtaggagagcgaagtctgtgttcagtgagctgaatcaggttcctcatgttgtcgagcttgacgaaagagaggatggggggagtatccagagtgcacttggagagattgttggaaggcgaacagtaccgcaggttttcattaacggaaagcacatcggaggttcagacgatacagtagacgcgcatgagagtggggaactggccaagcttcttggcgtttccgaaagtacaagagctgaactctaggctgatatgtagttggaataaaaaaaactgtctgtgatgttcaggtgtaatca

SEQ ID NO: 5672 - DNA, 661 bp, Glycine max
  Peptide Sequence Number=SeqID_8455
  Probeset Number=SeqID_15451
aagaagcgggtggaaaaagtgaaatatctagaggaggaagaagaagacaaagagaaaaaaaaaagcttttcgttccgtacaaatggcgccgaagaagagtgacggagaagggaaggcgaaacctacgacggtgactacgccagtaaggcagactcgaagcatggatcggaagactcggagccaaactcggcatgactcgcccggtggcggttcttcctcctccaagctcttcaccttcgagtctcctgagaagaagaaaaggaagccgaaagccaaggacgctggaccggcgactaagaagatcaagcaagaaaaggaggacgacgacgacgtcgcggctgcaaaagaagaaggagacgacggcgctgagcacaagaggatcgtaatcgagcactgcaaacaatgcaaatctttcaaggagagggccaacgagctgaaggatggtctcgagatagctgtgcctggcatcattgtgactgtgaatgctgacaagccaaggcgtggttgctttgagattcgtgaggaaggtggtcagacgtttgtcagtctcttggatatgaagcgcccatttaaggagatgaaggatcttgatatggaacaggtcattgcagacatcgtagagaagcttaaatgatagactgcagctagaccaatgccgaat

SEQ ID NO: 5673 - DNA, 1524 bp, Glycine max
  misc_feature (18)..(18): n is a, c, g, or t
  misc_feature (21)..(22): n is a, c, g, or t
  misc_feature (25)..(27): n is a, c, g, or t
  misc_feature (29)..(29): n is a, c, g, or t
  misc_feature (33)..(34): n is a, c, g, or t
  misc_feature (60)..(60): n is a, c, g, or t
  misc_feature (67)..(67): n is a, c, g, or t
  misc_feature (73)..(73): n is a, c, g, or t
  misc_feature (107)..(108): n is a, c, g, or t
  misc_feature (114)..(116): n is a, c, g, or t
  misc_feature (118)..(118): n is a, c, g, or t
  misc_feature (129)..(129): n is a, c, g, or t
  misc_feature (145)..(145): n is a, c, g, or t
  misc_feature (184)..(184): n is a, c, g, or t
  misc_feature (212)..(212): n is a, c, g, or t
  misc_feature (278)..(278): n is a, c, g, or t
  misc_feature (414)..(414): n is a, c, g, or t
  misc_feature (443)..(443): n is a, c, g, or t
  misc_feature (918)..(918): n is a, c, g, or t
  misc_feature (921)..(921): n is a, c, g, or t
  misc_feature (932)..(932): n is a, c, g, or t
  misc_feature (939)..(939): n is a, c, g, or t
  misc_feature (951)..(951): n is a, c, g, or t
  misc_feature (1029)..(1029): n is a, c, g, or t
  misc_feature (1059)..(1059): n is a, c, g, or t
  misc_feature (1071)..(1071): n is a, c, g, or t
  misc_feature (1117)..(1117): n is a, c, g, or t
  misc_feature (1198)..(1198): n is a, c, g, or t
  misc_feature (1219)..(1219): n is a, c, g, or t
  misc_feature (1264)..(1264): n is a, c, g, or t
  misc_feature (1287)..(1287): n is a, c, g, or t
  misc_feature (1294)..(1294): n is a, c, g, or t
  misc_feature (1302)..(1302): n is a, c, g, or t
  misc_feature (1359)..(1359): n is a, c, g, or t
  misc_feature (1362)..(1362): n is a, c, g, or t
  misc_feature (1365)..(1365): n is a, c, g, or t
  misc_feature (1370)..(1370): n is a, c, g, or t
  misc_feature (1398)..(1398): n is a, c, g, or t
  misc_feature (1420)..(1421): n is a, c, g, or t
  misc_feature (1425)..(1425): n is a, c, g, or t
  misc_feature (1459)..(1459): n is a, c, g, or t
  misc_feature (1507)..(1507): n is a, c, g, or t
  misc_feature (1510)..(1510): n is a, c, g, or t
  misc_feature (1519)..(1519): n is a, c, g, or t
  Peptide Sequence Number=SeqID_8456
  Probeset Number=SeqID_15452
tttatttttttgtggttntcnntcnnncncttnnttctttgtttgctactgcccaccctntgatganaattcncattatacattatactattcattagactcctctnntataannnantattagtggancaaaactacgtataangtctttctccctattctcgttctactgagattcgcagancgtttgtgtcctagcgcacgtgcgacgnggtcgaattacgttaccatagtgactagtacttttattgattatgatctgcgtatatatcattgtncttcgcgcgctcttgtgggagtgtgcgaccggtactatcgcactgcgcgcgccaccgcgtctcaatatcttatgtacatgtgatctcttcacgcccactcgctcgcccgccaggtcagcgcgcgcagcggtcgcgntgacagttgtcgccataatcagtcatcancaggtagccatagcacatgaccgacacaaatgcacacgcgacgcgcctcaatactatctctatctcacgtcggattcgacggacgcgcgtcaagtacgcgacacagtgtgcggtgcgggcgcagtctgcgatggcgcgacgacgcgtgagcgtgtcgaggcggtgcttgcgcgttatatgttagcgcgccttctctcttatctctcgcgtcgaacttcgacatacatacgtcactcgataacagacgtgcgatatgacgagacgcattcgaatacatcaactctcgtcacacccgcactccgatcgacgctgaggacgtgtgattcgcgtcgtactctctctcgtctacgccaaagaagaacgcgcagcgatatacgactgcgcgagatcagtgacgtcatgacgaatgtgagagtgtgacgacgcagtaggttgtggacggtagattggagacgagtacagacgagagcaggancgncagagagaatnagagaanagagacagatgnacaaatgcgcgccacgcgacgcgatgcagtgtgtcgagatgtaatgaccacaacgactatcgtgcttgtagtgttagncgcgatctgcgcttcgcgctctactatcgntatgtgcgcgantcgttacgtttcgtgtgtgatatctcgagagcgacgtgcgtgtggnacgacgcacactaccacgcatgcgccgcgtatcgagtatcgagtagcgtctgctactcatcctactctgctactcgcattnctgcgctattgttatatcgtnacgttatcatcgactgccgtcatcatcgttcgggacagtacgccnggagtgacgtcgcgacactgtanagtcatncgtatcgncgtgcgtgcgtcgcgtgatgacgacacgacagctcgtctcgcaacatccgcgctgtntgntancgcancgcacgcgcgcgcggcgaccgcgcgtcntgtcacgtggcgcgcgtgcgtnntctnatgtacgaaagtgtcgcgtgtcggtccgatctcncgatcgatgtgacgaggcgtgatgcggcgtagcgatgatatcgcggcncgncgtgtgcgncgtgt

SEQ ID NO: 5674 - DNA, 1403 bp, Glycine max
  misc_feature (13)..(15): n is a, c, g, or t
  misc_feature (84)..(84): n is a, c, g, or t
  misc_feature (1109)..(1109): n is a, c, g, or t
  misc_feature (1351)..(1351): n is a, c, g, or t
  misc_feature (1374)..(1374): n is a, c, g, or t
  Probeset Number=SeqID_15453
ttacccgtctttnnnatatgctcaattctctcaacattcaatcccctcaacctcttacgttatcctccctcatcaaccccaacncctctcccacccgcctccacccccacaacgagaattaacgcattttaattactaataacaaatacatcactgccgctagcaagagaagatgaatacctcatatttattctcttaaaaccatactaacatcaaacaaaaccaaaacaaaataaaaaattaataactaaaaatctaacaaaactcaaaaaaacaacacacacacccacccaccacaccccccccaatacattacactcccatctaacctccattatattgcacctagcattcctccatgtctagtctttactattattttttccgtattattaccttccatctcatattccatcttataaataactttaatacacaccccgcatatcctccccctctctccacaatcccttattcatccatctcctaatctaacatccctcacaccaatcgcccaaataccaacactattaccttaataactctaccatactaatctactaaataatcgcctttccttcttcccatcacccttccctcatatacatactccactccacccacatctccatctcttccaaatatacctacatcctccgacccacattatcaatctcaacctatcaccctccactcaacaccataactcctctctttatcaaacaattacatactcattattggccatctctcctctctcctcataccacttatactctcccatctcatctacatcacatgttctctcagcataaacacaccataataacccagccccgcaacacaacctaacactacacacacacaccacataatcaacacatcgtaattatatacaacataacatatcaaacacaacaccccatacacatacaacaactaccatccatctccctctatcctccatcaccctcaccacaactcacatctatacaacttaacaccacttccacttcatacctctcacatccacaaatcaatatatattccacttacacacctccccacactatcccccatccacgactacacacaattccttacaatantacatgtcccaaatacacgcccaatcatatactatactaataataactaatacactctcctcatctcatcaacacacacaacacatatacccatacaatatcacattaatacccacacaaccctcaccacctctccacccctccaactcactcacgcccctgcaaccaacactactctactatatcacacgtattctatcctcatatcattaacagtagttttactcaatccatacatacanctcttcttatattcatatcaatntactactacatactaaaaatatcttatag

SEQ ID NO: 5675 - DNA, 1487 bp, Glycine max
  misc_feature (1)..(1): n is a, c, g, or t
  misc_feature (226)..(226): n is a, c, g, or t
  misc_feature (302)..(302): n is a, c, g, or t
  misc_feature (727)..(727): n is a, c, g, or t
  misc_feature (1196)..(1196): n is a, c, g, or t
  misc_feature (1403)..(1403): n is a, c, g, or t
  misc_feature (1421)..(1421): n is a, c, g, or t
  misc_feature (1429)..(1429): n is a, c, g, or t
  misc_feature (1438)..(1439): n is a, c, g, or t
  misc_feature (1442)..(1442): n is a, c, g, or t
  misc_feature (1450)..(1451): n is a, c, g, or t
  misc_feature (1453)..(1453): n is a, c, g, or t
  misc_feature (1455)..(1457): n is a, c, g, or t
  misc_feature (1460)..(1464): n is a, c, g, or t
  misc_feature (1471)..(1472): n is a, c, g, or t
  misc_feature (1475)..(1476): n is a, c, g, or t
  Peptide Sequence Number=SeqID_8457
  Probeset Number=SeqID_15454
nctaacgtctcatataggcacctacagggtatctggacgagcgtgttcatcctcgtccctccacgccctagccacatagtcatatctagttatctaccaactagcgcttagtaagtcatatctaacattaatttgtcagtgtactacatgcgcacacgtatatcctcttcttccgtacgcagacccgctgcacatatgccttagtgtagacaggagacattcaagntgatgatgcgccgacgctgatgttattggccgtcatagtcctatatcagagcacatttgggcagcgcagcattctnatcagtccatataagggtattgatcgtgtcggtatcaatatagctacccgattttctgtatcgcgggtataattcagaggttgtgtcgaaatcctcacgtctatctcaaatctcgcatgttgttatggtggcgtgtcttattgttctggctacatgttcgagtccacgacacatcgtgccatatcatgtaagtgtaccaatgtaggtcacaccgttagggaggagggtgactggtcgtctcgtatcacctcttacgaggtcggggaggagcatttgattatggtggtgaggtggctctgctcgactcagtagcgtgcgtgcacccgcgttctacgagatggagatggtgttgctttacgccacgcaccgttacggtgcgctacctacagtatatctataccgattcacttttccataagttcatnttgtcggatgccgagcgggtgcgcaatatcgttcctcggttactaaatggtctctttgctgagtttatccgtcgcgacatcacattctgagtcgggtcgtagccgttgacggattcggagtggacgggtcagtgaaggtatagcagctccggatctttggactggatagtggaagtcacgtaataaatgagagttggcggggggcggtgtgtgagcagcgtgaggattgatatagtatgggttctaagggtgttttttattatttattagaggtttttagatcttcattattgttgggctttgttgtgtggggtctctattcagctgcagggtattgctctttatcctaatcatgcccatcctaatagtcgcaggaatgtatgatttccactctctgcgctgctagtcgcgctacgacctatgtacgaccgcaccaagggtgtgtgatgagcaaaagagtgtactatangcaatcgaggtgagatggaggataagataagggcttgacactatattattggaaccattcagacgtaatgtatgcacggttgctcgcggcggaaggcctaagtacactaaccgttcgcggggttttgttgttgtcgtggggcctcctcccacgcacgcgccggccacccaacctccgctctcccggtcggtcggcggtcgcggcggntggggttgttgttatgcnggctgcgntggccatcnntancatcggtnnanannnttnnnnnggggtgnnaannttccttcccct

SEQ ID NO: 5676 - DNA, 1352 bp, Glycine max
  misc_feature (16)..(17): n is a, c, g, or t
  misc_feature (33)..(33): n is a, c, g, or t
  misc_feature (35)..(35): n is a, c, g, or t
  misc_feature (50)..(50): n is a, c, g, or t
  misc_feature (225)..(225): n is a, c, g, or t
  misc_feature (262)..(262): n is a, c, g, or t
  misc_feature (287)..(289): n is a, c, g, or t
  misc_feature (295)..(295): n is a, c, g, or t
  misc_feature (1155)..(1155): n is a, c, g, or t
  misc_feature (1298)..(1298): n is a, c, g, or t
  misc_feature (1325)..(1325): n is a, c, g, or t
  Probeset Number=SeqID_15455
tctttgttttgttgtnnctggacaccgttgtgngnttactccgcgcaccnttacacaaacacccaccccaccacacacaaccacacaaaaacttcgtcaaaaccacaaccacacacaaaagaaatatatatatcatctctcatctaacacctaccgcctcttcacaccaccccacaccacaacaccacacgtaaacaaaacacacttcatagtctacaccacacnctttatgccgtgggcactggtttgacccactgcaccnatgtgttgttgtgtacacacacaannnttgtgnataaatataaattgatataaaaataaaattagaagtaataaaaaatcgcaataaacaaaaacaacatgaccatatgtgacctaggtgttaaatatacacatacttgctaacaaaatcgacttcttgtaccgtacacaaaaaccacccacactccctacactactccctctccaacgatcactaacaacaaataatatttcttgcgataaaaaaacacaacattatgaactcgctgatatcaaataaaataaacacacacacaatctgaaaacataatatcccattcaacccatacatattattctacaatccctacaacatctcagtacccatataaattcactctatataattatttgttttcttgcctataactacgcacataaataacacaccacaacaactacatctctatactctccccgttctcacattctcaatccccataacacataatataaatagctgctaaaataaatatggataataaatgttggcccctcggtgttgtggtgtgggatgtggaaattatataaaaaataaaagtgaataaaatgttgtggaaaagcgatgaaaaataatcattccgatcatacatcaaatattatacacaaccgacacactaattctataacatctaatattacattatttaacaaaagatatataaatagaataaacaacacacacaattaattacgtctattcagctcaaacaatgaaaacagtctcacctataacaacactcactatgtgattcaaacactacaacaacatataactacaaaaaaacacaccaatataaataatattaaactcaccataaccacctcaacctactacatacatcacctcacacntccatttatcaacacttccattacacactacactagctctcatacatcaaacattttgtatatataaaccaactcctgtaccgcaactccataatagcaacacattattcgacttatatctgtctcacagctctagacaactnttaacgtcgctcattcacaacactatncgccccgtgacactaaatcaacaacaa

SEQ ID NO: 5677 - DNA, 1348 bp, Glycine max
  misc_feature (14)..(14): n is a, c, g, or t
  misc_feature (19)..(19): n is a, c, g, or t
  misc_feature (22)..(22): n is a, c, g, or t
  misc_feature (25)..(25): n is a, c, g, or t
  misc_feature (787)..(788): n is a, c, g, or t
  Peptide Sequence Number=SeqID_8458
  Probeset Number=SeqID_15456
ggggttgggggggnttggnggntgngtagtgtaagttgactgtggaaacagcctacacccacccaagaaaattctacaacatacaactgcgggctagagccgagggtgggatcgaggtgttatatttattgcgtgagaagaaacaaccagccgaggaaaagcagaaatgttgatgccagaaaaatgaccccccccccctcctccaacccacacataaaacacgggaatcttaccacccctctgtgctctcacctccggtatgttgggttcacatcacatctgaataggaagaagcaataatgtgtatcccggaatgccgatttagatatctctctgcgcgcaaaatagtcaccgcccaactgatagtactgtcttgccagggcgctgcacagtacgcgcatatatagtatatcctgttatgatcttatatgtgtttataaatagattaataatatttgtatattctgcgagcatatgttaggtattaagtgtatccacccagtatagggagacgggtaggagataggaggaggggtggcaatgactggagcacctagacgccagcattaaaatttatatttaggtatatagttataagtggtaaggtaggatggaaacgacgaaaaacgataggtatcaagacaaaaataaggagagtgggcgaacaccgaaactctccaccacagtagatgaggagacacgccgcacgactgatagagctgcacctctgttctaaaatgttgtaggtatgattatattaatagggggagacaaccataccgacaanncgcgcagcatatttgtgtggggcggagcgctccactaccccacccaccacagcggagatatattgaggcgaataataagccatcgagactgagtatatatataagggacagtgcgaggaacgcgcacgcagagagtcgcgccacacacctacacagaagaagtcggcggatctcggcagacgactgtccaacgcgagagggcgtgcggccgcggacgggaacaagcgcgcgcgtcgtggcacgacgctggtcgcattacgcctgtatatataatgatatacagactgcagctgacgtgcgatgggagtgcgtgacactgtgatgcatcactgcataaggctgatgaaaagtgcgtggcagcactgatgcgtggcaaacgtgagtgcgaggtgggcacgcgcacaggcacagctgtgacgctgagcaggtcagcgggtgtgccgctagcggccctctggcgcaacgcgctgctatatgattattatctcggctgtcatgtcggtacaagatgagaaactgtgagaccaatgatgagtatgtcgatgcgatgaagaatggcg

SEQ ID NO: 5678 - DNA, 591 bp, Glycine max
  misc_feature (277)..(277): n is a, c, g, or t
  Probeset Number=SeqID_15457
acggctcgagctcgagccgatgcgccgcgcgggtttgaccaaaacccctcacaaacacatacaaccccgacagcacgcctgaaagagtgaagagaacaaacagagcaatggaaggaggaggagctgctccgccggccgacaccgtgatgtccgacgcggcgcctccgaccgcagcagcctccggtggcgatggggatcgagaatattccggcgacgctgagccacggcggcagggtcatccagtacacataatcggaaacatattccgaggtcacgncaaatacaagccacccatcatggccatcggaaaagggcgatacggaatcgtttggtcggctttggactcggaaaccaatgggcccctttgccctcaaaaaaatggcaaaggggtttgttaaacaaattggggggaaagggaccccccccggaaaaaaaaagtgttttccccccaggggacagaaaaaacgggggtggagaacccagatattttggcccccccccccccaaggggaaaaattccaaggggggttattattgcgaaaaaaggggggggggagaccccccccccccccaaaaatttttttcccaaca

SEQ ID NO: 5679 - DNA, 573 bp, Glycine max
  Peptide Sequence Number=SeqID_8459
  Probeset Number=SeqID_15458
ctggatctcattgaaaagaaacctggtggcattattgctcttcttgatgaagcttgtatgtttcctagatcaacacatgaaacttttgcccaaaagctgtatcagacattcaaaaaccataaaaggttcagcaaacccaagttggcacgtagtgacttcacaatttgccattatgccggtgatgtcacgtatcaaactggattggtcccggacaagaaccaagattatggttgttgcagaacaccaagaacttccttatgctttccaatggcccctttggggctgggtttgttcccccccttcccctgaggaatcctccaaaaattcaaagtctcctccataaggtccccggtttaacaaccattgggagcactacttgaaaatttccgtgccccttggccccactacattttgttgtggaaaccccataatcttctctagccaccaatttttgtgattaaaaaagttttccaccacctccccagtgggggggtattgggggcaataagataaactgtggccgggatcccacttaggagacatttttttgaaattttcgaacccattttggac

SEQ ID NO: 5680 - DNA, 546 bp, Glycine max
  Peptide Sequence Number=SeqID_8460
  Probeset Number=SeqID_15459
agtacaagagaagtagtgatggaggggtctatgattcctttaccatttcaagagactacagagatgtgttggcctgatttaggaaccacgtatatagaatcatatcaaagatgacatgattatgattgtgtgaacaatgtgaattctaaaaactatgacgccgtatggctaagcattattgttaactggcggtgccatgggggaatggtctggcggatcttttgccaactgccataggcaatttatgaaggaaggctcgcttcggcagcgccataggccacaatggagtgtttgtatggcagaatattggttatgcgccattgataacactggcattataaaatataatattaacatgaaatcacattaattagaataaacgcatcaatgtttcataattcaactttaattatagtgaaaaataacgaaatgttattatttatctaatcattgtagtatattagtaaaaaaaatcaaaaaactgaaaaatacgagttataagtattccatagaatttaataagtatccgatatgtctcatttcttt

SEQ ID NO: 5681 - DNA, 649 bp, Glycine max
  misc_feature (649)..(649): n is a, c, g, or t
  Probeset Number=SeqID_15460
tcagctacgtaggccccccccccatgacttatcaagtttaatacaaagttcgacgacaccgctcaatatacctggatctcaattgacaaactctctttctggtattttgcaaggaacatcggctccagtaaatattccgggtagttcactaaataattttagtccaaacaatcattcgaatatgttcaatgtgtcagatccattcagtcatctgagtgacccagcgccaaaaattaacaattcctttggtcataatgatagtagtagcctatttttccaatcgcatttgatatcgcccagtttgggtgacacattatcaatgagccccgatctaagccggctatcggaaatcaatccaattcgcgatgagctttcaactggttcaataacaaatagtttattcgaaaatagtttgcataataagcaatattcgatgtcaccatctctattgaataattccagcctaagtgatatgaatcgtttgcgtgatgaattttcaaatcaatcgaccaaacatcttccgacaccatgggaagagcaaattgtacaggtctccaaagcatgcgaggcatggaaatcagaggctgatgaaagcaatcgaaaggcttcggaagcaaaacagcagcgagatgaagccctaacacatgtn

SEQ ID NO: 5682 - DNA, 634 bp, Glycine max
  Peptide Sequence Number=SeqID_8461
  Probeset Number=SeqID_15461
gggcgggggtttccctttttttttgaaaaaaaaccccggggaagcggtatcttttacccaggggggttcacttcctttggggggtttccaaagggtccttggttatgcgcaaattttgttcttttttgggaaagggggccggggattttcccagtagtttaccatgacgggttcacttttgaatattgaaaatttcaaatctgggaaagctacccttacgtgcccctaattaaagcatatgccaacactttaataaaaagggttgggttgatggagaacagctttcagaggtggaagccatcgcttacatagaaggtgctgctaaatcattgtaatttgcataggcgtgccatttattttaggtgtaaaatcttctagaataacttactcgtacaaaaaaagattctacttgtagatattgggtaactaaacctcatagtattgctacgagattctgcatatttctcctagttttggatgtgccgtgcgcagctacactttcatttgctacaatgctggtgcagcgctgcatgtatattttgagtgctaacatttagttttaactagaatatttagggaaattgtctaaaaaaaaaaaaaaaaaaaaaaaaaaaataaaaaaaaaaaaaaaaaa

SEQ ID NO: 5683 - DNA, 1380 bp, Glycine max
  misc_feature (65)..(65): n is a, c, g, or t
  misc_feature (71)..(71): n is a, c, g, or t
  misc_feature (86)..(86): n is a, c, g, or t
  misc_feature (146)..(146): n is a, c, g, or t
  misc_feature (234)..(234): n is a, c, g, or t
  misc_feature (401)..(401): n is a, c, g, or t
  misc_feature (1046)..(1046): n is a, c, g, or t
  misc_feature (1056)..(1056): n is a, c, g, or t
  misc_feature (1149)..(1149): n is a, c, g, or t
  misc_feature (1227)..(1227): n is a, c, g, or t
  misc_feature (1365)..(1365): n is a, c, g, or t
  misc_feature (1369)..(1369): n is a, c, g, or t
  Probeset Number=SeqID_15462
caacatcacatcagcacgagccacgcactactcgtgctgacctagtcgtgcacaacgtggcgtgnacatanagatgatagacagancgagcacgagtaggatgcatagcgatagtagcgatcagcgattgatggagagagggacgnacgcgcagacaaaggcgtcgacacaacagcgagggtagccgagagaggtcatctgtactcgcacgcaccggtgagttacagtggcgtncatagacagagaggtgtgagagctgcggcgtgagacagtcatgtcatcagatacacgacgatcgatatagtcgtgtgcagttaggctccaatagtgcttatccgagatatccagagttcatagctgactatcagtggtcgtggtgtagcatgctacacatagatganagtatatcggagtcgacctgaggtgctagagcagaatgtcgtagcggagatgggcgcgccgttaagattattcattgtggacgagataagtcactcaaaactaagtgaacatctatctagacatccaccacagatgctctgtgcgtgctttcgtacgcaaactttgtggagcttcgtgggtggagagtgtggtagacggtagttactatgtatctgcatatctcgtttctcgccctccttgtttgttcatgtgtatgtgtcgtgttcgtcgatggactatgagttcactcattctaccgtacactcatattatagtagccatgtggagagcatacgagaacgatgtcggttgtgatggacggtgaccacggacaacgtagaaagccagagatagctcggagttcacccacgattgaaggcgtatgctcacacgtaccccacctcacatcttaggctcgtgtttgccccacactttcataatcagttatttttatttctacttaactcgcatcgtagaatctcacaccaatattctaattcattagtattatctctctcacctaccctcctcacccacacccaccacactataggcgccgcacccggcgcagaagtgcgtgtgaaagggaggatagggcgaggagngccgtcgatnccctgcctactagtgtaatgtcttcgtcgagtacgtgtgggtaagctatagccagagaggacctagttctcaactagtgcgcatgcaaggaanaataggcctgcacacccgcctctcctcctccctcgtcctccggccagcccgcgccgcggcacacacagtaacagcgtngaggagcacagccgccccccccagcccaaccaacacaaaccacggacacgaacggcacggaagggagaagagaagaagagacgcagcgagcacggccagcggcgcgaacaccacaagaggaccaacaccacagccacnccangccccccccca

SEQ ID NO: 5684 - DNA, 1631 bp, Glycine max
  misc_feature (19)..(19): n is a, c, g, or t
  misc_feature (97)..(97): n is a, c, g, or t
  misc_feature (143)..(144): n is a, c, g, or t
  misc_feature (298)..(298): n is a, c, g, or t
  misc_feature (333)..(333): n is a, c, g, or t
  misc_feature (410)..(410): n is a, c, g, or t
  misc_feature (522)..(522): n is a, c, g, or t
  misc_feature (544)..(544): n is a, c, g, or t
  misc_feature (919)..(919): n is a, c, g, or t
  misc_feature (1007)..(1007): n is a, c, g, or t
  misc_feature (1243)..(1243): n is a, c, g, or t
  misc_feature (1253)..(1253): n is a, c, g, or t
  misc_feature (1268)..(1268): n is a, c, g, or t
  misc_feature (1397)..(1397): n is a, c, g, or t
  misc_feature (1403)..(1403): n is a, c, g, or t
  misc_feature (1429)..(1429): n is a, c, g, or t
  misc_feature (1431)..(1431): n is a, c, g, or t
  misc_feature (1434)..(1434): n is a, c, g, or t
  misc_feature (1445)..(1445): n is a, c, g, or t
  misc_feature (1453)..(1453): n is a, c, g, or t
  misc_feature (1482)..(1483): n is a, c, g, or t
  misc_feature (1512)..(1512): n is a, c, g, or t
  misc_feature (1527)..(1527): n is a, c, g, or t
  misc_feature (1539)..(1539): n is a, c, g, or t
  misc_feature (1551)..(1552): n is a, c, g, or t
  misc_feature (1557)..(1557): n is a, c, g, or t
  misc_feature (1559)..(1560): n is a, c, g, or t
  misc_feature (1563)..(1563): n is a, c, g, or t
  misc_feature (1572)..(1572): n is a, c, g, or t
  misc_feature (1576)..(1576): n is a, c, g, or t
  misc_feature (1579)..(1579): n is a, c, g, or t
  misc_feature (1593)..(1593): n is a, c, g, or t
  misc_feature (1599)..(1599): n is a, c, g, or t
  misc_feature (1601)..(1602): n is a, c, g, or t
  misc_feature (1605)..(1605): n is a, c, g, or t
  misc_feature (1607)..(1607): n is a, c, g, or t
  misc_feature (1609)..(1609): n is a, c, g, or t
  misc_feature (1612)..(1612): n is a, c, g, or t
  misc_feature (1618)..(1618): n is a, c, g, or t
  Peptide Sequence Number=SeqID_8462
  Probeset Number=SeqID_15463
cgcgagtcaagtagatcgngatcatacatatatacgagagcgggtagatatagcgacgcacgtcgcgcgtgtcagtgtactcgcgtgtgcgcgaatngcgatcgggtacaatcagtctccgtgatcaccgatggagtggtgtnntgtgtgatgtgatggagtgttctctcgctatcgcggctctgagctttgcgcacaggacgcgtcactgtgctgatagctcgttctgagcgtctcatgctctgtttctatcagcggacagacaccacgaggcatcgaagtatctaagtatagagtnataggtgaagtagtcatgcggagagtatatagcantcatatcgtcctagcactgtagtacgtgagtatgtagagtcacgttgtacaagtctagtcgtagtgtggacttcacnctcacacgtcacccgttcggtgtgtacctatctctgattcctcctcgagactacgtgtgatagccgtaagtagatagcgcgcgctcgtatgtcgtcgctcgcgtgctcgtgntgagcatatgcacttgcgatgngagacgcacatcacacattatatgcgatcggatctcatctcaatcactgtagcagcgatctgtctggatgtatatgtcgactctaatgttgactcacctgcacatgacgagtgattagagaaacgacgatgagacaaccaagcacaacgcagagatgtaagaagtgataacatatgctgcgccgtagtccgtcatcaacaatcattaactcgtgtatctgtctgtgtgctcgcagtgtcttctcgttagtctagctcctacatgatatagtgtgtgtttgcagagagctgctcgagtctgcgcaccgtgttgatgttatgatagagtaagggagtcagagatgcagttcgagctacacatatctcgcactatctnctctatatctgcaatacacagaatgataacgagtaatcaacataccatatatgcatattataataatgacgcgggtgtgcgcgcatanatgcgcgtgtctatatgtggtgtgagtatatattattgagtttgcatccgcactcgtggcacagtatgttgtatgacatgtctctttctatattgttttgcttcctgtctctctcgatgtgtgtgtggtggtagctggtggtcgcaatattatctgtgtgagtggtgtagctgccacgcgactgtcgctctcttattgccactatgcaacagtagatgtgatgttgtatagtatangcggtacatntctgtggagtcacanaaataaacaacaaatcaaacataccacgagatcatatacatgagagtgacgacatgagtgtgtacatagcgcatatgtatgtaggagtaaacaccgttcgacgacctgcctcgcatcacatcatcaatntatatngtagcacgccgcacgttggtgttctntnttntttgatatatncacagcanctcgtcgggtattagtctgtgcggggggnngcggacgagggggaggggagggggggggntacactcacagcgcngacgcgccgcangtggaaatggannatgtngnnagngtcccccgncttngcncagtacagtatatnaagaananntanananaanctcttngtatttatatatt

SEQ ID NO: 5685 - DNA, 707 bp, Glycine max
  misc_feature (1)..(7): n is a, c, g, or t
  Probeset Number=SeqID_15464
nnnnnnncttcctttggagtctctgcctgaagatggcaagccttcagttaacaacaacacccttcactcttttgagacaacaaaggcagcaccccacaaagaagaagtccactgcttctcagctgaaccctcctcggccacgtcccctcagagtgagtgtgaggtcctataaagtggtgattgagcacgatggagagtccactgaggtggaggttgaacctgacgagaccattctgtcaaaggcattggactctggcttgtatgtgcctcatgaaaaatttgcaaaggccttttgggaaggcttttctttgcaaaaacatgccctgctcgccgcggcaattggggttgggctgccaagcctagttgccccaagggaaccacctttggtgtttttttaaagccttaaaaaagttccctcgagcctgttttcttggttgttcccccccctgagccttttgggaagggcaagtgtggccctaattgcccttgcccgggctgcccctgtggcccttaaggaatttgtttgaaaatgtttttcccctgtgtttggcaatccaaatttcccaataaggtatttttcgtttgaataaatgtgggggctgttttcctccttcaggtctgggtagtcatcccgtttgaatcctttcaagttccttttttggttaatatacccccccgggttggggccttttttggtttttttgcct

SEQ ID NO: 5686 - DNA, 627 bp, Glycine max
  Peptide Sequence Number=SeqID_8463
  Probeset Number=SeqID_15465
atttacatgggatagctgagcttgcattaatttggcaaggctgccttccacaaatcctgatttttaccgaggttattaggtttcttctggttgatgccacagacacaccaacatagatgatgtgttgcctctcctggtcgacaaactacaagcgccctatggcgatctgcacagaggactctgatggctgctatacaaaattttctgactgcgcatccaggataatgttgctactgcagcagcttgtaccttttttgaccctctttactgaacataacgtaataggcagggccacccctggatgcaagtctaaaccctgcccatgttagtgtgcaacaatccttcgcttttccgcgttgaggcgctagtttagatgttcccttaccccgatgactaccatgaactaacaactcattcttttctgaagtgcgcgctttattaacacgacgcctttcacggctgtattaccccgtatccgggacctttccatactcaccccccccccaaggagggggccccgagtaaccccatttccttcataatcactacaacccccatattaaaaacccttccaacctgtccccgttattttctctcccattccacccgtccttgtcccaacccccg

SEQ ID NO: 5687 - DNA, 307 bp, Glycine max
  Probeset Number=SeqID_15466
aaaaagacgatggctccttaggaagctggcaattgggaggtactgtctctgacctcactgatttagagggaaacagtgggctctgcaatgtgggaggcaataacatattgggtgaacctattttggtgggcaacttggatttcggaatctcttggctatatgatgctgctaagaaagtgttgtagaagttccagctaagtgatcttccggaaattaactgcttacttattactcaaagccttgatgatcactgccatttgaagaccttaaagcctttctctaaaaaattcccagatattagagttat

SEQ ID NO: 5688 - DNA, 1883 bp, Glycine max
  Peptide Sequence Number=SeqID_8464
  Probeset Number=SeqID_15467
aacttataaaattttatcaaactagcacatttttttagaggcttctaatgaatctttccaaaattgcttcccttacaaagatccctcgcattatttctcgccccaaccttactgagaaagctcacactctcgttgcaatcctcaacgaaaatgagcttactcaacctccttctttcctcgaagccattagagataatgagccaatcctagaggaccttagaaagaagaaaactgtctctctctatggaagaaccaacgagccttttaactattgccatattgcttttgaagctcttcgtaatactcaaagaagtctttctgtaggcgctactattgctagaaatcttatgagaaccaagactactgatgcttctttgtatttctctaattccataaatcctgagcaaatcgcccaatttcttaatgggttatgcctcagcaactataaatttgagagaaaagctttgacaaagtccgaacaagagaatggcaagtttagacaaatcgagaacatcaacgtcttccatgacaccttcaatcctgaagaccctgctgccaaattcattatagagtcagctaaatattcattgttctgtagagaagttctcaatactagagctaatgtagctgaccctgaatctatgttggaactttgcaaagaacttgcagccatcgactcaaacattaaaatagaatatattgttggcaaggagttagaggaaaaaggcttgaatttgatctatggagttggacaaggatcttgtaaagcctcttctttagtgtgtttgaaatacgaaggaaatccccagaagccagaagatgtcctagccttcgttggtaagggagtcacctatgacactggtggactcaaccttaagcccacaggaaacattgagaatatgttctacgataaaggcggtgcttgtactgtacttgctgcattcaaaggcgccgtggaaatgaaacttcccatcaatcttgtttgcacagtagcattggttgagaactcaatgagtgataaagctttgcatcctaaggatatcctccgcagctataaaggtcttactgttgaaattggaaacactgatgctgaaggacgattgatccttgctgatgcaatgacatatactcaaagacactataaaccaaacactttacttgagttcagtaccctcacaggagccattaaagtcgctttgggaaatgaaacagcaggcatattcagcaatgatgataatcttgtttcagaactcactgaggctggtaatgagagctgtgaatctatgtggagattgccaatcactgatgaacatagagaagacatgagatcaactatagctgacctgaataataaaggaagatctgtgtcaggaggagcttctaaggctgccgctttcttggaaaactttgttgaaagaggcgtcaagtgggctcatattgatattgctggaacaagctttagagaaggtgaaaagtttgtgtacagcagtggggctactggacatggagttaagcttttgttgaattacctcaagaaaaagactcaacaataaaaataaaagctagtgtctgatgttacgattctaacatcaaaaattgataaataaataagacttacttaccaaatgtttaaagttttttttatttataacattgctaattttttaaatcttttgcatagagcttcaatattgaagctctttgttatttaatatgtgaatgtactaactatataaattccctcactctctctgtttatgctcttaaaaagtctatcatagcttcttttactatgaagctggactgattaactagagttataataaatgttataggtaactgttttttctttaaaccttggtaagttgtagatatgagtaatt

SEQ ID NO: 5689 - DNA, 623 bp, Glycine max
  misc_feature (588)..(588): n is a, c, g, or t
  misc_feature (599)..(599): n is a, c, g, or t
  misc_feature (623)..(623): n is a, c, g, or t
  Peptide Sequence Number=SeqID_8465
  Probeset Number=SeqID_15468
tcagctacgtaggccccccccccaaataacttaaacaaatgaacaaatcttccatcagtaacactctcaaaatcggagataacactccttctgcctacagtgcttccaaaaactactcccaaactttttctcccaacagaaacaatatgagcagccctcaaagaggaactacctctatgatccacagtgaacttgatcgtttacgtcgtgctaacgctgaactcagtcaggagtttcaaaagaatggaaaggataaaaccactctttatgaggagagaataagcattatccaagctgaaaatagaaacttggaaaatcttctcaacgcctatgctaaagatagagaacttcttaagcaaaaagatgccaagattgcagacttagaaaacagattggtccttgttgccactgaaaatgaaagacaagcctctgttatcgccaagttagaagaagaaaacgaagaattaagagccagatgctctgaacttggccaagttcagttcttattaaatgaatctcagtccaagattaacagactgaactctgaagtcgaaagattgagcgcagcagctgatgccaacagcaganaagctcaaggntggaagcataagcatgctgaaatn

SEQ ID NO: 5690 - DNA, 1808 bp, Glycine max
  misc_feature (205)..(205): n is a, c, g, or t
  misc_feature (459)..(459): n is a, c, g, or t
  misc_feature (503)..(503): n is a, c, g, or t
  misc_feature (811)..(811): n is a, c, g, or t
  misc_feature (1215)..(1216): n is a, c, g, or t
  misc_feature (1230)..(1230): n is a, c, g, or t
  misc_feature (1247)..(1247): n is a, c, g, or t
  misc_feature (1256)..(1256): n is a, c, g, or t
  misc_feature (1271)..(1271): n is a, c, g, or t
  misc_feature (1304)..(1304): n is a, c, g, or t
  misc_feature (1306)..(1306): n is a, c, g, or t
  misc_feature (1318)..(1319): n is a, c, g, or t
  misc_feature (1321)..(1321): n is a, c, g, or t
  misc_feature (1324)..(1324): n is a, c, g, or t
  misc_feature (1336)..(1336): n is a, c, g, or t
  misc_feature (1340)..(1340): n is a, c, g, or t
  misc_feature (1359)..(1359): n is a, c, g, or t
  misc_feature (1361)..(1361): n is a, c, g, or t
  misc_feature (1375)..(1375): n is a, c, g, or t
  misc_feature (1435)..(1435): n is a, c, g, or t
  misc_feature (1492)..(1492): n is a, c, g, or t
  misc_feature (1556)..(1557): n is a, c, g, or t
  misc_feature (1582)..(1582): n is a, c, g, or t
  misc_feature (1662)..(1662): n is a, c, g, or t
  misc_feature (1676)..(1678): n is a, c, g, or t
  misc_feature (1703)..(1703): n is a, c, g, or t
  misc_feature (1706)..(1706): n is a, c, g, or t
  misc_feature (1715)..(1715): n is a, c, g, or t
  misc_feature (1732)..(1732): n is a, c, g, or t
  misc_feature (1735)..(1735): n is a, c, g, or t
  misc_feature (1743)..(1743): n is a, c, g, or t
  misc_feature (1745)..(1745): n is a, c, g, or t
  misc_feature (1748)..(1748): n is a, c, g, or t
  misc_feature (1756)..(1759): n is a, c, g, or t
  misc_feature (1761)..(1764): n is a, c, g, or t
  misc_feature (1768)..(1771): n is a, c, g, or t
  misc_feature (1775)..(1777): n is a, c, g, or t
  misc_feature (1780)..(1782): n is a, c, g, or t
  misc_feature (1797)..(1799): n is a, c, g, or t
  Probeset Number=SeqID_15469
atatcgccttcgctcgcgcagcatgcgccctctcatcacccatcctcctcacgacgcccccctcctctatgatatacactccactactacatatcgtctccccccagtcgccacacgatacaccgcggcgctctacgaacactcgggcgctcgcgcccgtcgcgcacgaaccacgaacacaggcaggcgcgcggcggagcgctancaactaaatatgtctgcctgcgtgtgtgtcgtcagtatcggccgtgtctctactgtggctgtcgcggttgaggagttgtacgatcattatgacgttcgctcggtcttcttgcctcacagtcaccttcctcccatcatcacgacgcgtcgctcctatatacactctcatctcggcgaggaggtgcgcgacgaaccggacacaataacccacacatgcactcagctagttgtctagcgctgtaggtaatagtgtcntacgcttcttctgcagttcttatatttactgttcattcattcgntatctctcttattctcgtcttctgtccgtctgcgttgcattagctccgtcccttctgatccctcctatcttactctctcattcttctctctctcctctctatctatccatgtctcatattttcgtcgggtgtatgactattgcacacgtgtctgtaccggctcacacatcagcgcggtaacagagcgaggatgatggcgcagagcaccagctccacggcttgggcttcgatgggtgtactctaggcgacgacgggcgacaaccaggctcgtcttcgcgcgagcatgacgtgctaccgtcacgtgaatnagtatagagtcgacaggagggtggatctgaggcgggtaggactggtggcgtgaggtgtggtgtgctgatatctttctatatctctgtctcgttgtcgtacagtattcttctatactcttgtttctctttctgtgattgtgaggtcactcttccgtcctacttttcgcacatgtctgtcttatctctcctgcgtactcctagtcgcatactcacaactcgtgatcatcgaagaaaccgactataccactcgcgtgtcgtcgctccgtctctgtcatcgcgcatcagctccctacgatgctccgcgtcgaacaagcatgcagatgctcgcatcacaagatacatcgcactgctgctaatgcatgtcgccggcacaataacgctcgccactgagcgtgatacgtganncactgctaccatcnccgagacacgtcattcnttgcgctcnttacgacatcggctngcgcctgcgcgtggcgcccggctccactcccgnantcgctctggatnntngcnagatagacacgngcgnatgtagtgtgtttggtatncngctcgtgttacagngctcgttcatgtatgatgtattatatctctgtttctacttgttggtatatacatattgcnaatagctcacccatctcacgcctgttatctcttgtaggaggtgcgacaaaaaaacantacagatccaatgggaagactagcaggtaaagagaacgatgacccagatcatgtgttgtgtgtnnactgcgcctcccctcactactctcntgtgtgggtggacagagcggcggttgtctcgtgctgttgagttgtcgcttacgcttctatcatgtgactagtattcgganaatatctctagctnnntaactctctcatgaagagtaaatanganagaacaatnatatagaaataaaaatntanaaaaaaananaanatacaacnnnncnnnnaaannnnaaannnaannnaaatttaaaaaaaannnaaaaaaaaa

SEQ ID NO: 5691 - DNA, 829 bp, Glycine max
  Peptide Sequence Number=SeqID_8466
  Probeset Number=SeqID_15470
agaaaacacatagggtgcagaagcaatttgcctagtgcaacattaaacttccctaattccaaagaagctactttgggcacggtgactaggatttaaagcaggtaatcaactatggccatcactagaagcacagtggtcttggctattctctgcttcatccttatacgagctgagttggggatctatggtgaagatttgcacatggatgctgccaagaacatagactgcggtgggaagtgcaattacaggtgcagcaagactagcagacacaaaatgtgcataagggcatgcaatagttgctgcaagacgtgcagctgcgtgccaccaggcacttctgggaaccgagatatgtgcccttgctatgctagcctcaccacacatggaggaaagctcaagtgcccatgatgagtcgatcacacatgcttataataattatgaagctgatcagagtctaagattagatacctaatagtatttatctcaccatatgcgtgcagtcaaattaataaatgcaatattattttgtctcaacgtaactacgtggtaatatggtctgatcgaggaatgaagcaccgagggaagaacatacatagcaccaaacgagctgcttaattggctagcaaagtgggaaaatggatgatgactaagatctgatattgttgcggataaatatatatatatatacatatatatatatatatatatatatatatatatatatatatatatatatatatatgatattgtttttatgctgcaatttatttagtacgtwcaagtatgatgtatgatgttaatttgaggcttaataataatgctagtcaatgtt

SEQ ID NO: 5692 - DNA, 2884 bp, Glycine max
  misc_feature (1)..(44): n is a, c, g, or t
  misc_feature (2884)..(2884): n is a, c, g, or t
  Peptide Sequence Number=SeqID_8467
  Probeset Number=SeqID_15471
nnnnnnnnnnnnnnnnnnnnnnnnnnnnnnnnnnnnnnnnnnnnctcgagccgctttctttcttgtaacttcaacaaacggcagcttcttcaattcaaaacagaactctcttgggtgttggtgttggtgagggatctgaggcaaaggtgttgatgatatgggagcgtgtgtttcaactccacaagggtgcgtgggagggaggttgagctcttccaagaagaaaaccagaaagagaaggagagagggactcagaagaagagttacttctcggttgtgtaaggaatcatcggagaaagttgatgtggcagggttgcctgattgttcctttgctaaccccactttccaaggaagtattgaagaggcatggtttgattccattgcagtatttgactctgactgtgacgatgattatcagagtgttcctgatgatgttgtatctctgagtgggattgaaggtggatctgtatcaagttttccatcttcaagagatgccacccgtggagtttccacagatcatgttcagaaacagaaggagttgttggcaggataatttatataataatctatagggaggctagggttttacatatcttgttgttctgttagtctaagatgatgagataggattggataacaaattgagaggagaatggcaagcatgaacccttttgatttgctgggtgatgatgcagaggacccatctcagcaaattgttgcagaacagctcaaggctcaggttcctaacaagccactccctccctctcaggctgtgagggaagcaagaaatgtaaattcacgcggtggtcgaggaagtggccgcggccgcggtcgtggtggttgcaaccgtgacttgttcaatgacgaaaatctcatttactgcccctgctggtcaagttgctttggaaggggaagagacctgcttatggtggccctcctggtccttagcgtggtagtcgcggtggtggtggatgtggagctttcggtaatggagaagctgctgaagatggtctcccacgaagaacatgtgaacacccgaatggctatggacgcgacaatgtgcacatatctccgagagtgtcagaaattcagatgctgagttttttgatatagatgccacaaattctcaatgtaaacgcagtggaagagtaaatgaagcaaatgaacctgtttttcttgatgaattttcctcagtggatgcaggctcgaaatgggatgatggagatttgcacaactgtgggattcttccatgcaattgcttgtcatgtctttcatctactgatcagagatcattatgctttagtcctcctaatactacaaggaagaaggacataccaatacaatattctaatttgaaaagagcaatcgagaaatagataatcgacattagtgtcagaaaaaatgaagggtttttaccgacagaaaaaaaccatagccaccaaaaaaacgccgaatctctccccaggcattatctcccgcgctgtaaaagtccgacgaccaaattagctaaaggccaacaagaaagagtttgggcaaatccatcctgactattccccatgtgctgttcatggattcttatggctccaaaaaatagagcacgataagacgctctgcttgaattcttgtgatgaaatcttcagggtaatttccacccgtactagtcgtgaatgttcatattcctattgtccctgtcacactttctcaaggtgtaaaccaatggggagggagtgagttttgtgttatactttaaactttctgatagttactccaaggatcttccactgaattttcaagaaaacattagaagattgatggacgatgaagttgaaaaggtaaagagttttcgtggagatacaattgtacccttcagagaaaggttgaaaattttaggtcgtgttgtcaacccacaagatcttcatttgagtgcagcagaacggaagttaatgcagacatacaatgagaaaccccttctttcacgtccccaacatgagttttactcgggagaaaattactatgagattgatttggacatgcatagattcagttatatctccaggaaaggtttcgatatgttcttggatagattaaagatctgcattctagatgttggtctcactattcaggggaacaaagcagaggagctgccagagcaagttttatgttgtattaggctaaacagcattgattatatgaattaccagcaactggggataactgaggaacccctctaataatatactagcaaaaaatttgttatttaattttatgatcaataatgggtttcagtcttttttgttcaaaacaaccactgatataaaacatttacaaccatttgcactccttaaagttatcgtgagttttagtcgtttctggatgcgactctttctgggggctccttttttattattattgcttcgttttcaattgttattaggattttttttattttttattttatcaatcatgtagacaacatgcgtgtgattaaagatgtggcaactttgtgtaagatgccagcttcaaattaaggaggggtcactagcacaacaatagaaacatggacctacctacgcctacttgaatttcggacatgaagggtccatacttttgcatttactcattctttgaacaaaacatttattatcagagcaaggagaaataaaccaacataaatgtggacgcgtgagttctgatcagagaatgtccttttttttttatatatttatgggggtcatttctgattgtacaactactataagtgaaaaatgtagtacagcgttactagttgaacgtgtgcatagtgattgaatgcaactagtggtggaatcttccccttgacagccggaaatatttatggatttgggttcatataaaaaaaaaaaaaaan

SEQ ID NO: 5693 - DNA, 784 bp, Glycine max
  misc_feature (555)..(555): n is a, c, g, or t
  misc_feature (557)..(557): n is a, c, g, or t
  misc_feature (587)..(587): n is a, c, g, or t
  misc_feature (590)..(590): n is a, c, g, or t
  misc_feature (593)..(593): n is a, c, g, or t
  misc_feature (597)..(597): n is a, c, g, or t
  misc_feature (601)..(784): n is a, c, g, or t
  Peptide Sequence Number=SeqID_8476
  Probeset Number=SeqID_15472
ccccccctcgagtggaacacgacaggaagaggctgttttggtatgacctggaaaagaaagaggttgcccttgttaaaattcagggtttgcctaatttaaatgaagccatgatttgtttgggaaccctcgtaccaccatacttcttacctcgtcaaatttgtaggaagccgcgtgctttaggatgcgaacgtcccaggaagacgaggtacttacttattcacacgcctaatttctttttttgaagaaatatctcaatgtaacgggcccttcatgatccttagtccttactactcttttgtgtgtctatgtttgtgttacaaaatatatctggttatgagttggctttgactaactcaactccttccttaaaaaaaaaaaaacagaaataacccataaggataactattgaaaaatacttaagtctaaaaataaagttaaattaaaatatataaatgaggagcacccttctcaaagctaacttttggggtggaattaggcctctcacattattctttctaagaatacccctgagagcattcatgatattcactcggntntttctgccactattaatgcttcaattatgnttnctntgcnatannnnnnnnnnnnnnnnnnnnnnnnnnnnnnnnnnnnnnnnnnnnnnnnnnnnnnnnnnnnnnnnnnnnnnnnnnnnnnnnnnnnnnnnnnnnnnnnnnnnnnnnnnnnnnnnnnnnnnnnnnnnnnnnnnnnnnnnnnnnnnnnnnnnnnnnnnnnnnnnnnnnnnnnnnnnnnnnnnnnnnnn

SEQ ID NO: 5694 - DNA, 1759 bp, Glycine max
  misc_feature (210)..(211): n is a, c, g, or t
  misc_feature (308)..(308): n is a, c, g, or t
  misc_feature (1271)..(1271): n is a, c, g, or t
  misc_feature (1342)..(1342): n is a, c, g, or t
  misc_feature (1421)..(1421): n is a, c, g, or t
  misc_feature (1442)..(1442): n is a, c, g, or t
  misc_feature (1618)..(1618): n is a, c, g, or t
  misc_feature (1673)..(1673): n is a, c, g, or t
  Probeset Number=SeqID_15473
gatgggtggcggcagtgcgggcggcgcttacgaatattcgcacactaaaatattttgtaaaggcgcgccgaaacccggggcgggggatataatatggcttgggtgtgttgtcatagacgcgtacccggcggactgtaattacccctatgtacgagatatctattttggtgcgatgggccgcgcggagtgtggttgtaggtttgatatagnntgataaggagggagacgcgcaccctaaatcagaaattgtccgcgtatgtcacccacgacataggggttatgaaccagagctttactcccgcgcccantgtatagtatacgctgcgcctataattataatattaaacaacaccgaacatatcgcgcgtattattaatcccgccgcgttataatattgcaatatatcgtatttccgcccgccgcatagtattattataattggccgagcagcccctgatattaattataattgagcgcgatacgcgcccgcgtatatatataatagagggaggggttgcggcgtatcccccccgcgcccccacaaaaacagaatacggggaaatgggggtgtattaaggaagcgcggcgtgaggaggctcatttatttaactgtttaataaaaccgcgccgcctccggcttaggattatgaataaattacgccactgccagagagaatatacacctagtgctcgccgcacagaatgtttggggtttgtttattcttttctgcccgcccccctgtttattattttgtgcgctatattagtggtgtagatacgcgttccgccccggccgcgaatataaaataatccgccgtgcgcggcggcggaaatttaagaaaaaacccgcggcgggtataattggtgggatgatgaggggtgtgtgtgaaggtgacgagccacgcgctcggcccctagaaaataatgagaaaaagcggtcggtagggtatctagataatcgctatattacgctaatagagattaatgttgtatatcgctgctggagctagttttgtttaccaactacacccgctcgcggatgggatagtgttaacatacaagctgttttgtatatacactcactacgtagtgttagccgtgaatatgatgtggagttattgtaggatagagagaaccaacagccgctgtagtgtgaggaataaatgtagagatatagagagtggagtgacgaatgacgtggcgcgagatcgaccaagagcgtacttaataaataacgcacgcacgggaaggagacgcgcgcgcggcgtatntgcggcaaaatataataataagcgggagggacgagagaaaatatatagcgccggccacgagcgcgcagaanatacatgaggaggagatacgatgcgagcagggctcgcgcgagcgcggcgcataatatgaacacaatcataataatgtgnggtgatataattgttgcagtnctgcgcgccgctgtgcgaggtggcgacagaatgataataggcgcgtcgtgtatggtgtgcagtgagaatatgcgtacacacgcgacgcgtatcaatgtgttctgcgggtgcatgattactgcgcgcgggatcatataacgctgctcaaccatatatatggagcgcatcctcgaccnctcggaaacgaatgtgtgggatattgggtaggacggaggcgcgcgcggtggtaanacgcaaatcccgagtgaatatgagcgatgacgagagccgcacggattttaatcgcgaaccatatctgcgcacgacgcagcatctcg

SEQ ID NO: 5695 - DNA, 634 bp, Glycine max
  misc_feature (89)..(89): n is a, c, g, or t
  Peptide Sequence Number=SeqID_8477
  Probeset Number=SeqID_15474
aaaatttcctttaagggagttcttggccctttccccccggttgtggaaagctgtgcatattttccctcaaagagctttttcaaagaaancaagatatttgccatttggcgtgcacagtatgtctttctccggggcgcaccaagaggaatatacattctcaacggtatctatcgctacttaattgaccccctctttgcccattgaataacatgaatttcggccgtggtccaaacacaactcaatgctgttttcttctatcactattcccaaagcggaaagaccaccaaaaagcttcattggccagcataagtttattcttctgttcttaaaaccaaggttctaagtggcaattcacagtaagcagagaggattcccaaatttgtctggccaaggtggttttgattcacaaatgccaattggttgttttctccccacctcaaatactactgtactaatgactaggaagattatagacaaaaagcatcaatttgtttgtgattgtaatttgcaattttaacttgaaaaagtatttagatctagattgtggcacaatgcattttgatcttttactcttccctttcttcatttaacttgggtagtattaatacagataaagatcgttcttaataaaaaa

SEQ ID NO: 5696 - DNA, 539 bp, Glycine max
  misc_feature (446)..(446): n is a, c, g, or t
  misc_feature (475)..(475): n is a, c, g, or t
  Peptide Sequence Number=SeqID_8478
  Probeset Number=SeqID_15475
ttttttttttttttttttaaatgtgatttggttggtgatgttaaactatccttattttcattttgattgctggcgctcggattctttggtaaatgctgatttgatgactgttgttgattcggtggcgatgacgatgaattcgatgaattattcgcacatgctgcagacacaccacttgcggttgatgttccaatgccttgtcgaattgaagcagatgaaaatgtttgtgcgtgatgttgttgctgttgcattgtttttgatgagagtgatgccgatggggatttaatcaatcgtgacggacgatcacaccaattagtggacttgtcatcataaaatccatgatcatctaaacgttgttgaccaagtaaacggtctgtttctaaatcggtgtcggcctcttcgtcatcaacactcaacggttttgatggattgtgatcggaattaanactttcccgtgactgattatgttgattgngatgatgacgaggcagccatatcggtgagcttttgtcatttttcaatggtttcttttcctcttc

SEQ ID NO: 5697 - DNA, 557 bp, Glycine max
  misc_feature (12)..(12): n is a, c, g, or t
  misc_feature (318)..(318): n is a, c, g, or t
  Probeset Number=SeqID_15476
gatcgaacattntggttatcaacaacagcaccaattccaatgatgccagttgctgatcgtgaaatggaaaaatacatttcacgttgtgttgtatgcgaaattccacaaaacgttatcacattacacagtcaaacaacatcagttccagactgtccatacggttgggaaggactttggcaaggatacagtttccttatgcataccggagttgccaacggaggtggtggtcaagcattatcaggaactggttcatgtttgcaagatttccgtaccaatccgttcattgaatgtaacggtggaaagggacattgtcacttntacgaaacaatgaccagtttctggttgttacacttgattcaagtgaacaatttacaaaaccattgcaacaaaccatcaaagcaggcagcttctattcacgattatccagatgtcaagtctgcataaagaaatagaaatgctgcatcagttgccgaaattatgttagaaacaaaaaaaaaatgaaattgttgttgttttacgattgaaacaatctaccttataaaaaaaaaaaaaaaaaa

SEQ ID NO: 5698 - DNA, 487 bp, Glycine max
  misc_feature (129)..(129): n is a, c, g, or t
  misc_feature (158)..(158): n is a, c, g, or t
  misc_feature (241)..(241): n is a, c, g, or t
  misc_feature (331)..(331): n is a, c, g, or t
  misc_feature (392)..(392): n is a, c, g, or t
  misc_feature (402)..(402): n is a, c, g, or t
  misc_feature (446)..(446): n is a, c, g, or t
  misc_feature (461)..(461): n is a, c, g, or t
  Peptide Sequence Number=SeqID_8479
  Probeset Number=SeqID_15477
ttttttttttttttttttcttagttattaaacggctaggtgccgctgtcattcttgcaattacatatattagagtaaacatcgctcctcgccaccatccaatcccaacttcgtatcaccttcttttcanaagtcctatgttacaggtggcattatagnggtatcttgttcattaaatcgcgtcatggagcaaacagaaagaaaaggcagctgatcagtcccgaaagactagctgtcagtanactcgaagtctagttgttgatcgtgttgccgatgggacaatcattgatctaagcaacgccgcggtagacagggttgttctcgcgaagcanagtgtgatcgccattagtgtccatggtgtacgggttggcggttccctgaggagctccgtantaggcgccgngggaaccgtgagccgcgtggccggtgtgctgctgggtagcgtanccgttggcgccgtcnaccttgtcgtacctgtcgccgggggc

SEQ ID NO: 5699 - DNA, 748 bp, Glycine max
  misc_feature (94)..(94): n is a, c, g, or t
  misc_feature (99)..(99): n is a, c, g, or t
  misc_feature (105)..(105): n is a, c, g, or t
  misc_feature (113)..(113): n is a, c, g, or t
  misc_feature (116)..(116): n is a, c, g, or t
  misc_feature (119)..(119): n is a, c, g, or t
  misc_feature (123)..(125): n is a, c, g, or t
  misc_feature (128)..(128): n is a, c, g, or t
  misc_feature (130)..(130): n is a, c, g, or t
  misc_feature (132)..(132): n is a, c, g, or t
  misc_feature (135)..(135): n is a, c, g, or t
  misc_feature (140)..(141): n is a, c, g, or t
  misc_feature (143)..(143): n is a, c, g, or t
  misc_feature (146)..(146): n is a, c, g, or t
  misc_feature (159)..(159): n is a, c, g, or t
  misc_feature (161)..(161): n is a, c, g, or t
  misc_feature (168)..(168): n is a, c, g, or t
  misc_feature (175)..(175): n is a, c, g, or t
  misc_feature (514)..(514): n is a, c, g, or t
  misc_feature (637)..(637): n is a, c, g, or t
  misc_feature (655)..(655): n is a, c, g, or t
  misc_feature (682)..(748): n is a, c, g, or t
  Probeset Number=SeqID_15478
gacacaacacaacactttcctctctctctctctctctctctctctatggggtccacaagttgaacctgagaagaggtgtgaacctttttttacnttttnaccaanttgggtgnccntgncacnnnagncngnaanaaggnncnccnaggggccccaaangnggaagangaaaganaagaaaaaacaagaaaagtagagaaaggggtaggtgttgtacagaaatagaaattaaaaaattgagtgaaaaattaaaagggaaatttttttagaagaagagtgatagggatatggtgaggggaagagtggagttgaagaggatagagaacaagataaacaggcaagtcacttttgcaaagaggagaaatgggcttctcaagaaagcctatgagctatctgttctctgtgatgctgaggttgccctcatcatcttctccaaccgaggcaagctttatgagttctgtagcagctctagcatgctcaaaacacttgaaaggtccagaaatgcagctatggngctgtgaagttagcaaacctgcaaagagctcgagacactccgtgaatacttgaactgaagcaagattgatccttcaaagacccaagaacctttagggaaacttagcccctgattcaaaactgnctctgaccggatggtctnttaacaggggcccaaaccatctctgannnnnnnnnnnnnnnnnnnnnnnnnnnnnnnnnnnnnnnnnnnnnnnnnnnnnnnnnnnnnnnnnnn

SEQ ID NO: 5700 - DNA, 748 bp, Glycine max
  misc_feature (335)..(335): n is a, c, g, or t
  misc_feature (343)..(346): n is a, c, g, or t
  misc_feature (348)..(348): n is a, c, g, or t
  misc_feature (353)..(354): n is a, c, g, or t
  misc_feature (359)..(359): n is a, c, g, or t
  misc_feature (543)..(543): n is a, c, g, or t
  misc_feature (598)..(598): n is a, c, g, or t
  misc_feature (601)..(748): n is a, c, g, or t
  Peptide Sequence Number=SeqID_8480
  Probeset Number=SeqID_15479
ctcaaatgcagattagcaactatgccagtattgtgttcatggccctcttcatatccattgcagcaactggcatccttgagatgcaatggggcggtgttagcatagacgactggtggaggaacgaacagttttgggtgatcggaggtgtatcttctcatctttttgccctatttcagggtttactgaaggtcttggctggtgtgaacacaaacttcactgtgacgtcaaaagcagcagatgatggagaattctcagaactctacatcttcaagtggacatcactcttgatccctccaatgactctactaatcatgaatattgttggggtgggttgngggggtcnnnncngccanncacantggcttttgattcatgggacctcgcattattttattgctcttcgcattgtaggtgatgctgcctgttgtcccttctttgactgttttatcgtgaatcttggtagggtgcctgtcagtttgtgagttgcatgatccatagtaatgtagttatgactgtcatcgttagtacgtttgctcggtagtngtatgtatcgactatcgtacgaattgacgaggtatcgtagtatgtgtgtaactangannnnnnnnnnnnnnnnnnnnnnnnnnnnnnnnnnnnnnnnnnnnnnnnnnnnnnnnnnnnnnnnnnnnnnnnnnnnnnnnnnnnnnnnnnnnnnnnnnnnnnnnnnnnnnnnnnnnnnnnnnnnnnnnnnnnnnnnnnnnnnnnnnnn

SEQ ID NO: 5701 - DNA, 1875 bp, Glycine max
  misc_feature (1)..(1): n is a, c, g, or t
  misc_feature (25)..(25): n is a, c, g, or t
  misc_feature (219)..(219): n is a, c, g, or t
  misc_feature (278)..(278): n is a, c, g, or t
  misc_feature (326)..(326): n is a, c, g, or t
  misc_feature (472)..(472): n is a, c, g, or t
  misc_feature (669)..(669): n is a, c, g, or t
  misc_feature (726)..(726): n is a, c, g, or t
  misc_feature (735)..(735): n is a, c, g, or t
  misc_feature (742)..(742): n is a, c, g, or t
  misc_feature (850)..(850): n is a, c, g, or t
  misc_feature (1113)..(1113): n is a, c, g, or t
  misc_feature (1117)..(1117): n is a, c, g, or t
  misc_feature (1213)..(1213): n is a, c, g, or t
  Peptide Sequence Number=SeqID_8481
  Probeset Number=SeqID_15480
ntcgataatcgatgagagtctagtnctgataacgattctgcatcgcatcaggctatagtctcagtggtgtatgatgcgtatagctatcctctgcgtgtataacgatcgtggtgtcctattagagtatgacatgcgtgtatgatcagtgcgcgtgcataggagtatacatactatatacgataatacacatagcggacagcgtacagtcgatagagcganaatatctgtctagataagctatatctgatattagaatgtggtgaatgttaggcttacgngccagtcgactggtcatattacagccagactgtaggcatcaatggtgnaagtatccgcacagcagcacagtctctacgtaatgagagtatctgtgatgatatatagtcgatgatagagagtcacttgttacgtctacatacggataacgcagtgacatatagacttcctcgcgattcgcgtgtgtgctctcgcnatatccatgcttagtattcgatcagcgacaggttatactaatccaatctcaagagacaatatattctccgctctctatgatcagtgttgatcgagataggtacataccaatatccgtagtataatcatatgtattcgctgctctagcataacgcgtttaatagatagtcacagatcatacacgcaatataaccgcgntctatcggttccgcacatgcgttcagagtcgtatccaggtatgtatgtgtatagtanaattatcangacatcnagtattatacgcatacactgctgctcgactactgcgactggtgtatgatattatcattatatataagctgagagatgagattgtgggtgggacgactgtcgttcaggnacgtcgtgtacatatgtggtgctacgattatatacgatatcgtggtatatcgatggactaataaatatggcggcatcagaactctctactctgtgtctaaaactagagcgctattcgcggtatgggttgagattatgtatcacgcgtagtaaataagtggctgtcagctcataaacattgcttcgtttaataagagtttgagataacgactcatcctgctcacgtcattactagaagaggtttcttcaacaatatgcgctggntagngtaagaatacgttcaggatgtcgtatttaactatactcgaagttatagagcattatagtataatgacactatagcactgtcgagtctaatcgtacnattataaatattagtcggcaacatcgatatgcgggctcgtttctctccttgtcgccacaactcaaaaatcttatactcatcctataaaactataactaactctattcacatatatatatctaatcgattacatacgcaaatatgcatatatgagaaagtggacggtcatggctactgatctctataaagtaaccatcattctcatagtcgcgtaggacacgccgagctcactacgattatctacaatctatccacacatgctatacgaaggaacagaatatatccctctctatcatgccagacaacggcgcaccgaggagaagactatatgtgataaacatcaccctccagtcacattgtcgtgtcagcaggagatggagacccacgtggcatatagtgcagtcgacacgacaatacaaacacatcacacgtattcactctccacctctccactaagaacatacaaaggattcggtatatgtcattctcttatttctcttttccaagaagaacaggaaggaaaagtaacccctcattcaaaatgaagcgcctacaggtacctgcgaggcaagagagagcacggaatagaacaaatgcgacatatagaagacgaatacactctatagcgatcactcaacctcccagccctagacccagcgccg

SEQ ID NO: 5702 - DNA, 1489 bp, Glycine max
  misc_feature (16)..(17): n is a, c, g, or t
  misc_feature (33)..(33): n is a, c, g, or t
  misc_feature (98)..(98): n is a, c, g, or t
  misc_feature (106)..(108): n is a, c, g, or t
  misc_feature (229)..(229): n is a, c, g, or t
  misc_feature (363)..(363): n is a, c, g, or t
  misc_feature (419)..(419): n is a, c, g, or t
  misc_feature (433)..(433): n is a, c, g, or t
  misc_feature (485)..(485): n is a, c, g, or t
  misc_feature (546)..(547): n is a, c, g, or t
  misc_feature (550)..(550): n is a, c, g, or t
  misc_feature (941)..(941): n is a, c, g, or t
  misc_feature (987)..(988): n is a, c, g, or t
  misc_feature (1050)..(1050): n is a, c, g, or t
  misc_feature (1208)..(1208): n is a, c, g, or t
  misc_feature (1385)..(1385): n is a, c, g, or t
  misc_feature (1413)..(1413): n is a, c, g, or t
  misc_feature (1465)..(1465): n is a, c, g, or t
  misc_feature (1481)..(1481): n is a, c, g, or t
  Probeset Number=SeqID_15481
tttgttttgtttgttnnttttctctattgcgcncgcaaatagtattctatcgctctctcttcttagctttgtgctttctcgtctactcacccagcccncagccccnnncacaaccacgccgccactctccactcagtctgcgtatctccaatagtcatgtggtatgttgtcctgtatagggcattcgatagcacaacattatatacaacagtagcatgatacgagtatngaatcatcatatgacattcatatgtcagcttgatcaattactctcgatcaatagtataatcgatccttctctttcaggtatgtatggatgattagaattcatttgctcgtgcacagtccgctccgatgatgttncgcgtcactctctaacatagaactcagtagtatcattatatagtgagatggttgantgtgtagcttgttntctatcttactagtagcgtgctacgctcgttggtcatctcgagctgcccctncacgccaaatcgcagacatgaatcgcgatgtgcgtactcagacgttctatccatatttcannatnaatacataaacatgtcgatatactctggccgatcaatagagaaaggaagacgtaaacatagacaccatcagttccactgcacgggtacgatgattcgtatgatattgctcaccagagacgcattactgggctatatactgtatttcgctcacactattaatctaggatgcacgagcattatctgcgcaagacgcacgtcgccgtcactacaataacagattcgactactgcctccctctactcaccactccgtgaatagtttcagctcttgcgctatgtgtgatcttattatctgtgtattatgagatgatttataatatgttattatctctgcacatcgctacattttgtatgccgtgttgcagcttcgtagagcaatatgacaccaacnctcatacaacatcaacaagtgattcttatatctgatattctctatnnttgtcacaaacactttgcacttatactgttgccatcactcctactgcgtccgctatatctanctcttccatcaccgctctcgatctgcggcgagcagcgtcggttacacactgacagcataggtatgccgctgtgtcttgctcgctccgctgcgcgtctctcgctcacatctcccctcatacgtcgagaatagattcgctctgttatcgcagacacacangtatacgagcgagtgtctcagtcataattgtatatgctattcgtcctctctcttgatgagtctcgctctgtctcgtcccgtgctcgcaagcgcagctgggtgtgaacagagtggtgtcacgtactttactcctccgcgatactgtctctatatgaacgcgcaacatacatgctctgntcacgcaactgaacacacagcggacagntggtgggatgtgaatcgcacaacagatggtgctctaactcctgctctcctancataccactccctctngacagcct

SEQ ID NO: 5703 - DNA, 2109 bp, Glycine max
  misc_feature (1)..(1): n is a, c, g, or t
  misc_feature (34)..(34): n is a, c, g, or t
  misc_feature (45)..(47): n is a, c, g, or t
  misc_feature (50)..(50): n is a, c, g, or t
  misc_feature (96)..(96): n is a, c, g, or t
  misc_feature (122)..(122): n is a, c, g, or t
  misc_feature (144)..(144): n is a, c, g, or t
  misc_feature (150)..(150): n is a, c, g, or t
  misc_feature (221)..(221): n is a, c, g, or t
  misc_feature (241)..(241): n is a, c, g, or t
  misc_feature (249)..(249): n is a, c, g, or t
  misc_feature (253)..(253): n is a, c, g, or t
  misc_feature (272)..(272): n is a, c, g, or t
  misc_feature (292)..(292): n is a, c, g, or t
  misc_feature (296)..(296): n is a, c, g, or t
  misc_feature (314)..(314): n is a, c, g, or t
  misc_feature (356)..(357): n is a, c, g, or t
  misc_feature (361)..(361): n is a, c, g, or t
  misc_feature (375)..(375): n is a, c, g, or t
  misc_feature (384)..(384): n is a, c, g, or t
  misc_feature (403)..(404): n is a, c, g, or t
  misc_feature (434)..(434): n is a, c, g, or t
  misc_feature (474)..(474): n is a, c, g, or t
  misc_feature (513)..(513): n is a, c, g, or t
  misc_feature (524)..(524): n is a, c, g, or t
  misc_feature (529)..(529): n is a, c, g, or t
  misc_feature (585)..(585): n is a, c, g, or t
  misc_feature (638)..(638): n is a, c, g, or t
  misc_feature (695)..(696): n is a, c, g, or t
  misc_feature (714)..(714): n is a, c, g, or t
  misc_feature (744)..(744): n is a, c, g, or t
  misc_feature (795)..(795): n is a, c, g, or t
  misc_feature (803)..(803): n is a, c, g, or t
  misc_feature (809)..(809): n is a, c, g, or t
  misc_feature (811)..(811): n is a, c, g, or t
  misc_feature (1006)..(1006): n is a, c, g, or t
  misc_feature (1117)..(1117): n is a, c, g, or t
  misc_feature (1162)..(1162): n is a, c, g, or t
  misc_feature (1232)..(1232): n is a, c, g, or t
  misc_feature (1248)..(1248): n is a, c, g, or t
  misc_feature (1292)..(1292): n is a, c, g, or t
  misc_feature (1318)..(1318): n is a, c, g, or t
  misc_feature (1350)..(1350): n is a, c, g, or t
  misc_feature (1639)..(1639): n is a, c, g, or t
  misc_feature (1651)..(1652): n is a, c, g, or t
  misc_feature (1700)..(1700): n is a, c, g, or t
  misc_feature (1801)..(1801): n is a, c, g, or t
  misc_feature (1817)..(1817): n is a, c, g, or t
  misc_feature (1877)..(1878): n is a, c, g, or t
  misc_feature (1920)..(1920): n is a, c, g, or t
  misc_feature (1951)..(1951): n is a, c, g, or t
  misc_feature (1969)..(1969): n is a, c, g, or t
  misc_feature (1990)..(1990): n is a, c, g, or t
  misc_feature (1995)..(1996): n is a, c, g, or t
  misc_feature (2004)..(2004): n is a, c, g, or t
  misc_feature (2025)..(2025): n is a, c, g, or t
  misc_feature (2044)..(2044): n is a, c, g, or t
  misc_feature (2059)..(2059): n is a, c, g, or t
  misc_feature (2073)..(2075): n is a, c, g, or t
  misc_feature (2080)..(2090): n is a, c, g, or t
  misc_feature (2095)..(2105): n is a, c, g, or t
  Peptide Sequence Number=SeqID_8482
  Probeset Number=SeqID_15482
ncgacagtagcacagcacacgaacgtaactaaangttcgcggatnnnctnccggttcgcacgcgcgtcatgcgacagcgcgtgcaacgcgcagtcntcacgcatcatgaagaatgctgacgngtccgcccacgatgtcactaanaacctnagtagcactggtctggctacatgagcgatgtcagtacgtagactatagatatatcatgtgctgtaacatgntcgttcacatcataattctnctatagtnacgntatacgtatgcgtagacgncgctgtcgcggacacgaatnctcntcactgctcatgtcgctntgtcgtctcgttgagcagtactatgatatggtatcgcgttanngagnagggatgtgtcgantcgatcaanggcgttgggctctatgtgnntgtacagcatcacggattggtgtttcgatntaattttggtatgttggctgataggtcgtctgtgcgagtngagccgcgatggagtgtagtgtgatgaacatcacagtantgtgtgaatgnagtangtagacgtctagtctcaatgatgcgaagagtgatatcaatatatatatatatgatnttcagcgctgtacgtgcacacgcgctataattacacattatgagtcgtagtcntagctattacatcagacagcgctgtgacgcgatgtccatacactacatattagtagnncagttctttctaacgtanaaatttatacgtgcgcagatatgagttatntatacaaccatatactacatgatagctgtacagtaggagttgcaatagtcntacgtatngtgtgngngtgtgaattcctactgcgtcagtaagcagcgtagcatgtatcgtgtacatcatgtagtgcataatctaaagtatatacaattacgtcgacgcgcgtacgctcttcagcacgtgtcgtggctgctctggttattagtgagtgcttgcgtctgcgtgtgcgtagcgtggattgttgtagtaagtgtcagcgtcctgngagccacgtcatcggtgcccgtcgtgcgcgcctcaggtatattcgtagagcgattgtgtgttcgtgcaggatgatcatcatctctcgggcatcgctcgatagcgtcaagancgtcggtgcacgccgctccggtactcacagcgatatcacattgtnccattcggtcatcctattagatacatctaaacgtaaatgcatacgacgcaatcgctatacgtgacgagcnggcgcaggcagatgcncaagtccgcaactacatacacattaataccaacatcttattatncgtgtgtagaggacgcgcgcactggngaggcgcggacgccgaagcggcggacagtccnatacgtgtcatcttacgtcgccgctgcagcacgttgtcgtctacgtctggtagacatagcgaatcagagcatctagctgtcgcacgtacgtatgaggaaatcatagcaggaatagagtagcaggactactataatgagcgatgaggttacacatatacagcaccagaagaaagcatgagtacacataacagaatctgcagcagataacaacaaccacacaatatagagacgcacttgtacttagttattctatattataatatataactcacatgttcatttatacacncaacacaagaanncagcaagtcctacgcaaaacaacacatcccaaataacaaccgcggcanaaatatcaatatagatagccaaccctaattcatcgttctagtaccgcagacgccagccgccgcgcccgcgctcactcgtgtccgtgctatatgtcctggcncaccatccctacatcnttgcgcccgcgcgcgagcgtcgctggagtgtagataagggtgatatattagaaggaattnntacgataggtgagtagtcaatttagtagatcgattataaagnttagtagcagtaattaaaattatatattttnataaaaattaatataatnaaaagatattataataataantaaanntacaaagncagttgtgagtgagataaaanggttaatatattaataaanaaataaattaatatnataattaaaaaaannnaaaannnnnnnnnnnaaaannnnnnnnnnntttt

SEQ ID NO: 5704 - DNA, 324 bp, Glycine max
  Probeset Number=SeqID_15483
ccgcgcgctccaacgcagatcctggggttgactcgcctagcaacatatcagaaccggggtgtgacacttatcttcctttattcctgtgctcttctctcttggtttaatagtatacttagtgatgaaattcctcagatcccaatctatgccagagctcgtgatctcaagcatcttttaaatctgatgcaccgcaggtgcaacggatgccattttggaaaatgcagagactagcttgcacctgggttctaagctgctgaaaggccttggtgtgatgtctgatgatgtagcatttttgagtcagcttattagagattccatggagct

SEQ ID NO: 5705 - DNA, 1669 bp, Glycine max
  misc_feature (6)..(6): n is a, c, g, or t
  misc_feature (38)..(38): n is a, c, g, or t
  misc_feature (50)..(50): n is a, c, g, or t
  misc_feature (82)..(82): n is a, c, g, or t
  misc_feature (204)..(204): n is a, c, g, or t
  misc_feature (215)..(215): n is a, c, g, or t
  misc_feature (250)..(250): n is a, c, g, or t
  misc_feature (265)..(265): n is a, c, g, or t
  misc_feature (320)..(320): n is a, c, g, or t
  misc_feature (323)..(323): n is a, c, g, or t
  misc_feature (422)..(422): n is a, c, g, or t
  misc_feature (451)..(451): n is a, c, g, or t
  misc_feature (485)..(485): n is a, c, g, or t
  misc_feature (495)..(495): n is a, c, g, or t
  misc_feature (501)..(501): n is a, c, g, or t
  misc_feature (510)..(510): n is a, c, g, or t
  misc_feature (546)..(546): n is a, c, g, or t
  misc_feature (591)..(591): n is a, c, g, or t
  misc_feature (651)..(651): n is a, c, g, or t
  misc_feature (653)..(653): n is a, c, g, or t
  misc_feature (1389)..(1389): n is a, c, g, or t
  misc_feature (1421)..(1421): n is a, c, g, or t
  misc_feature (1481)..(1481): n is a, c, g, or t
  misc_feature (1507)..(1507): n is a, c, g, or t
  misc_feature (1536)..(1539): n is a, c, g, or t
  misc_feature (1551)..(1552): n is a, c, g, or t
  misc_feature (1556)..(1556): n is a, c, g, or t
  misc_feature (1641)..(1641): n is a, c, g, or t
  misc_feature (1643)..(1644): n is a, c, g, or t
  misc_feature (1649)..(1649): n is a, c, g, or t
  misc_feature (1651)..(1651): n is a, c, g, or t
  Peptide Sequence Number=SeqID_8483
  Probeset Number=SeqID_15484
ccggangcgtgtgccgagtatgcacatactacaaccgngcgagacgagcntgtggtacaatgacgaccacagcgcacgacgnacgaatactgacgatgtattcgagctgaacgcgcgcgcgtagcaggataggtctctttcgtcggtgtgctgtctcttgtgtcgtgtgggctctgatgtatgataagtgtatatgtgatgtantcgatgcgtantatattagtgtagcggttgtcagcgagattgaganacgaccgtcgacgtngccgtcatgtcactgtctgtgtcgcgtacatcctagttcatggatagcgcgcatnagnagtgcgacgcgcgtgcgacgatgatagctgttcggtgacgagtactgttgtgattagttgaggatatgtgtgtggagataatcggtatagtgatacgtngtagagacgcggatgatgagaagactcgntacgaatagactgacacgcgcacacacgtagggncatattcatnataacnacgtgactncatttattgatgtctttatgtaccacgtgcagtgantgtgatgtgcggatcgtcgtactgagagtacgtgagacgtatgangagggtagatgtgagtcgtgtgggtctatgtgtttatagtgatatatatacacattatcntntatgtatacagtcaacgagacacacatcatctctatcatcagcttgatcgagcgagcacatcgctgtgtcgagacgtcacactaatcatatctcgaatagacagtagtcacagagctagcatatatataaaattaatgtcatcgcatattagtgtggtgactctgtccatgttcgtagccagagcgcatccagatgtcacgcgccacgcatgtggtatcctcatcctctacacttctctctatcactctgtcatggtgacggtatcgcttatggcggtcatgtgtgcgaggatcatatatcatgcacgtgcagtatttgtaatcttatttcacacgatgcgcatataacagtccgactctactatgtctcatctctgtcaggtatgtgcgaaactgtagggagttgatacactacactatctgtaggaggataatgcagtgtgcggtttgatggcgaggctggccataggcgagcggtggtgaagaactacggacgatgggatcgagagcgaagtagcgacggagtgcacgggatgtaagagtgcgagggtggagagaatatcagcagtactgttgtgatgcggtatctgcggctgacaggcgctgtcgtgcgggagggcactgtacatagtaggtctgcttatgtagtgtctatgtatgtgtactatcactattcttaagctgtactataacatcctcgtgacgaacaggtgtagttctatacgtgtgtgatatnaggcgagcatgtagtgttgttaagaatatagntatataacctttgtattagtcgggggtgcgctctttattttactaagttgtgggtattantgctgtctttttctgtcggtgtttcnctgacacgtatctttgcctactatcactnnnngggtacgagaannaagntgactcatacaacaacactcactcatgttttaattctacgtaggtcgtgtgtgagtgtgtgtaagagttgtgctggtgtgtgctnannttgtntnaaacaacaccatcctctc

SEQ ID NO: 5706 - DNA, 314 bp, Glycine max
  Probeset Number=SeqID_15485
cattaagtacgttggtcgtggaccttctgctgctactgccactggtttctacactttccatgtcaaagagcaagctgagctcgtccagaaagccatcgggaaggaacccatcagctgaaaaaatcttcatttttaagctgaactttgaataagaagtttcggtgaacaatgtgatacacaacactgacaaagtcttgtctttgcattttttttggccccgttgatttttttgagcctgtcttgtgttgcaggtttatacacatcatctcatttttaataaaactttttgtttttcttcaaaaaaaaaaaaaaaa

SEQ ID NO: 5707 - DNA, 727 bp, Glycine max
  Peptide Sequence Number=SeqID_8484
  Probeset Number=SeqID_15486
gtttttcctatcctctccctcttcttcatctctcgtatacaatcaaaaccaacacatacagagagacacgaaccaaagagtgcaaaatggcagcgacgtctctctccatcgcaaccacattccgctcctcgtcttacctcactcacgcttctccccatggcttcttcccttcccgacccaacacaacattccgcatctgttcaccttcctccacaccgacccaccgtgcaacccacctccgtcccgtctccgccgtcgaagctccggagaagatcgagaagattgggtccgagatctcttctctgactctcgaggaagcccgcgtcctcgtggactaccttcaggacaagttcggtgtgtcgccgctctcgttagctcccgctgcggcggctgtggctgctccgggagacggtggcggtgcggcggctgcggtggaggagcagacggagttcgacgtggtgattaacgaagtgccgagcagtgcgcgtatcgcggtgattaaagcggtgagggctttgactagcttggcgttgaaggaagcgaaggagcttatcgaagggttgccgaagaagtttaaggaaggtgtgacgaaggatgaagctgaagaagctaagaagcagcttgaagaagctggcgctaaggtctcgattgcttaaagaatgtgtgggtctttttttgctgtgttgttagtatagttggcgaatgagaattgttgattaaatttttg

SEQ ID NO: 5708 - DNA, 1413 bp, Glycine max
  misc_feature (207)..(207): n is a, c, g, or t
  misc_feature (309)..(309): n is a, c, g, or t
  misc_feature (589)..(590): n is a, c, g, or t
  misc_feature (594)..(594): n is a, c, g, or t
  misc_feature (671)..(671): n is a, c, g, or t
  misc_feature (996)..(996): n is a, c, g, or t
  misc_feature (1120)..(1120): n is a, c, g, or t
  misc_feature (1301)..(1301): n is a, c, g, or t
  misc_feature (1359)..(1361): n is a, c, g, or t
  misc_feature (1402)..(1402): n is a, c, g, or t
  Peptide Sequence Number=SeqID_8485
  Probeset Number=SeqID_15487
cagtcgcgtcgagcagcatgtgcaacatatccatctccattatcatgatgcatacacgcgccatatcgaaggcagtcatcacgcgacgcgaccactatatagattgagttagcaagtcacatgccgcgacatgtcacctcgtaccatgtcgctgttacgcctctctactttatactatactcattcacacatgttagtggtggacgnccacatcgtgcgtatatatactagcatcgataacaggacaattgctgccgacactcacgcgcgcctcgcaacatcaaccgaccgctcatacacgtctgcacntcacgcaccacatggctatcgaacacatacactgatctagcgcgcagatagcatccctactgttgtcatgagcacacgacgcgacatgtgtagtgtagtggatacatctatcgcatgcgatcgactcgccgcttccgagcgtacgtagccaccgacagctcggcatcactaacgctgctggcatgctcatttaccgcatagtgagctgtgctcacagagagacgtccgcgctctctcctcataccacatagtaagatagtgtcgccatacagtgttgtgnngganaatgacgtacacgatatccagtcagtcgctagcataccctggacacatgctgccgtcgcagcagcgcacacacagtntctccgcacatcagtacatcatctcatacgacgatccggcccaggatcgctcccctgcatcccaccacatccaatctcaaaggctcagcgagcgagcgcacactggtaggagaatcgtgtgcgcctacctgtcactcatgtaatgtagtctgtcgttgccttcgcgtcgacagcgatcagacacataacgcatagatggatgtatatgttcgatctattttcatattgcatcgtcggtgctgctgcgcagcgttgataggatgtcagtcgagtgcaggcagcggcacgccgtctgctgctcccgcgtacgctggattgcaccaanccgcttccggcgcgcagcgactagcgaggtgcaatgactatgtgtctaggcacgtactatgtgcgtatgccccttccgtgtcacagactcctcaccaactacgcgtgctatattatatattctntaaactgtaatgtattatctctctcttgtacactctcatatccatatatattatatgatacatatattatacggcgcagagtgatcgccgggagtccgagtcgcggcgtcgatgcgcacacatgcgcgatgactcgctagtgtggtggtgagaggtggtgtagtaaacgggtaggctagtntcgcgcgttgtggtgtggtgtgtagtgatcagaccacacaccagacagagagcgcgcnnntcaagatatagagatcctattacaatatagttgaagtagangagggggaagc

SEQ ID NO: 5709 - DNA, 1407 bp, Glycine max
  misc_feature (83)..(83): n is a, c, g, or t
  misc_feature (87)..(87): n is a, c, g, or t
  misc_feature (99)..(99): n is a, c, g, or t
  misc_feature (144)..(144): n is a, c, g, or t
  misc_feature (556)..(556): n is a, c, g, or t
  misc_feature (662)..(662): n is a, c, g, or t
  Probeset Number=SeqID_15488
tggcgattgtgtgtaggcaaatcctgtgttgttcatttacgcgtcagcatgagtgagatgattatctacatacatagcatgcncagngtgcgtctgtanttgtaccgtcgattctctccaatgtcgcgcacgcgcgcgagcggntgagatattgtcgctctgtggtttacttccgcgcgaggctttatcacccacgcgcttgtgcagtcctatcttcattataccacatatgctcacggcccatagcgcaccgatgtatatcatgggcacagctactgacgcgtgtcgcggcacatgatatctatataatacaaatatttatgatgctacatattttcgggcggcggcggggggtacgcgctcgttattttaaacagcaagtttctcacgagggaggtcggcgtgtaattatatgtctgggcggcgttataatatatattttaagtacgagcgctggtagcgagtgtgtcgcgcagtaatatataatcgtgggggaggggccgagccctatagtgtagatagagcgattatttgtcatcattagcgcaagcgcacngtgcttgtaatatatccatcgctacgacttctactctgcgcgtcgcgcgggtgttgaagaaagtaaggaagtggtcggagacatgtccgctgtgggttcttaaggncgtaaacatacgggtgggactctactccaaaaacagtactgctttattaattcgtaatgcacacccaaaccctccctttataatatattatcgccggcgggggcgttataactttcaacaaactttttagcggataatatccgccacattatatttcatgtgtggcgcgggtcgatgttattctccggctgccggccacgattgtcgcacttatccccctattcattgagagggggagaatcaaacgtacagtttaatttggggattaacttgtttttatatccaattcttatatttattaaataaggagcgtgcgtcaattcgttgcaataatgccggaccggattgtacaacagaaccgcgttgatggcggggggggggctagacgtgtcgcgggtttttttacgggcgcacaaattacaatataaaagagggggaatcaataaagtggagggtggggtatcgtatttactatttgtacgttataggggagggtcggggtacacgataagtataaagagcggattaatcgttgggggggcagtttgctaaatgattctctgctctacagctccctctgcggggatgggctcacccactccattattttcctatcatcgccgcggacgtgactactatttattaaaggcatcgctgcgggtcgcggttgatacaccaccgataaatagggggggatagtggggtagatatgcccgtacttatgtatggcgggggagggacacac

SEQ ID NO: 5710 - DNA, 520 bp, Glycine max
  Peptide Sequence Number=SeqID_8486
  Probeset Number=SeqID_15489
ctgatccttatcaacgaaagacaggattccgacatagtactcaggcccaacggaggaggagacaatagcgagatgttcgcgacgatgttttcagtgtttaaagcgttcagtgcgacaccgtcggacatcatcatctagggataggtgaggggtacaatactcctcgcatggctgagtcagtccttattctcctagacaacttgatcaagaaggaggtagtccaagagacgctacagattccgaatccgcagtaatcgagcagtcataggcgttactgtagtcacttgttctggcgcatcttgtcgtgtatggttttggtgtatcggcctctccaacacagggggacggtggggcttgaacattctatgtttcatgtagtcctcgcccggcttccggtatacaaggtggttcatgtccatccggagttaggcgcccccagaatgacattattagcaaggggacgagttcctatccactgcgagggtcagcaatcagtttatcaaaggacaggaactaacag

SEQ ID NO: 5711 - DNA, 1930 bp, Glycine max
  misc_feature (16)..(16): n is a, c, g, or t
  misc_feature (36)..(36): n is a, c, g, or t
  misc_feature (60)..(60): n is a, c, g, or t
  misc_feature (62)..(62): n is a, c, g, or t
  misc_feature (84)..(86): n is a, c, g, or t
  misc_feature (108)..(108): n is a, c, g, or t
  misc_feature (111)..(113): n is a, c, g, or t
  misc_feature (117)..(118): n is a, c, g, or t
  misc_feature (120)..(120): n is a, c, g, or t
  misc_feature (122)..(123): n is a, c, g, or t
  misc_feature (135)..(135): n is a, c, g, or t
  misc_feature (171)..(171): n is a, c, g, or t
  misc_feature (186)..(186): n is a, c, g, or t
  misc_feature (218)..(218): n is a, c, g, or t
  misc_feature (244)..(244): n is a, c, g, or t
  misc_feature (246)..(246): n is a, c, g, or t
  misc_feature (250)..(250): n is a, c, g, or t
  misc_feature (272)..(272): n is a, c, g, or t
  misc_feature (290)..(290): n is a, c, g, or t
  misc_feature (305)..(306): n is a, c, g, or t
  misc_feature (321)..(321): n is a, c, g, or t
  misc_feature (328)..(328): n is a, c, g, or t
  misc_feature (330)..(330): n is a, c, g, or t
  misc_feature (389)..(389): n is a, c, g, or t
  misc_feature (419)..(419): n is a, c, g, or t
  misc_feature (445)..(446): n is a, c, g, or t
  misc_feature (459)..(459): n is a, c, g, or t
  misc_feature (544)..(544): n is a, c, g, or t
  misc_feature (548)..(548): n is a, c, g, or t
  misc_feature (561)..(561): n is a, c, g, or t
  misc_feature (584)..(586): n is a, c, g, or t
  misc_feature (592)..(592): n is a, c, g, or t
  misc_feature (659)..(659): n is a, c, g, or t
  misc_feature (667)..(667): n is a, c, g, or t
  misc_feature (696)..(696): n is a, c, g, or t
  misc_feature (705)..(706): n is a, c, g, or t
  misc_feature (719)..(719): n is a, c, g, or t
  misc_feature (768)..(768): n is a, c, g, or t
  misc_feature (913)..(913): n is a, c, g, or t
  misc_feature (1075)..(1075): n is a, c, g, or t
  misc_feature (1103)..(1103): n is a, c, g, or t
  misc_feature (1149)..(1149): n is a, c, g, or t
  misc_feature (1174)..(1174): n is a, c, g, or t
  misc_feature (1204)..(1204): n is a, c, g, or t
  misc_feature (1239)..(1239): n is a, c, g, or t
  misc_feature (1241)..(1241): n is a, c, g, or t
  misc_feature (1250)..(1250): n is a, c, g, or t
  misc_feature (1252)..(1252): n is a, c, g, or t
  misc_feature (1261)..(1261): n is a, c, g, or t
  misc_feature (1268)..(1268): n is a, c, g, or t
  misc_feature (1344)..(1344): n is a, c, g, or t
  misc_feature (1360)..(1360): n is a, c, g, or t
  misc_feature (1424)..(1424): n is a, c, g, or t
  misc_feature (1426)..(1426): n is a, c, g, or t
  misc_feature (1456)..(1456): n is a, c, g, or t
  misc_feature (1461)..(1461): n is a, c, g, or t
  misc_feature (1495)..(1495): n is a, c, g, or t
  misc_feature (1531)..(1531): n is a, c, g, or t
  misc_feature (1578)..(1578): n is a, c, g, or t
  misc_feature (1618)..(1618): n is a, c, g, or t
  misc_feature (1656)..(1656): n is a, c, g, or t
  misc_feature (1666)..(1666): n is a, c, g, or t
  misc_feature (1718)..(1718): n is a, c, g, or t
  misc_feature (1744)..(1744): n is a, c, g, or t
  misc_feature (1747)..(1747): n is a, c, g, or t
  misc_feature (1755)..(1755): n is a, c, g, or t
  misc_feature (1759)..(1759): n is a, c, g, or t
  misc_feature (1764)..(1764): n is a, c, g, or t
  misc_feature (1772)..(1772): n is a, c, g, or t
  misc_feature (1838)..(1838): n is a, c, g, or t
  misc_feature (1847)..(1847): n is a, c, g, or t
  misc_feature (1874)..(1874): n is a, c, g, or t
  misc_feature (1881)..(1881): n is a, c, g, or t
  misc_feature (1925)..(1925): n is a, c, g, or t
  misc_feature (1927)..(1927): n is a, c, g, or t
  misc_feature (1930)..(1930): n is a, c, g, or t
  Probeset Number=SeqID_15490
cttaaaccacacctanacctatctatcgacaccccnctaccaaagatagtgttatatatnanatgtgtgtgagatatatagtannnatgttgttatgtgtataatagntgnnntaanngntnngcgtgattcttngtggtcttggtgtgctcgagctctctgcgctgcttntgtcgatctacagcngtcgacgcatgactgtagatacgacgaggatnatcgatacgtatatgcggctaatcgncnagangatactcgcacgctgcatgcangtcgagcacgcgacagtncgctgtgtggtgtgnngtgtgttgtcggacngacgagngngcgcgttgtgtatgtgtagtgttagtagatctaggataatgatagtagatgtcgtgctntgatcatctctgataaatctcactacgtcntcatctccatctacatatcgtatctnnacgaatacgatcnatctcgtcgtgcacgagtatagcgcacatacgctgataaatcatcacggctagcacatctcgctgatatcactctctctcgcgcncacntcgccgcgcgccnccgctcgccgcgcgcactcacgnnnatgtgnctgctatctcgtcacatcagctcgctacaacgacttttatatgatatatatactattaatactattnatctgatnctatatatgattacactactcatctaacncaattatanntacatatacatanaatatttctggtggtgtgtttgagatattgtgatcatcctagtaatgtnagcatctgcgctctgacagcgttactcatctacactctattgtcgacttcgtatgtgctgactagtagtacagtcgtcgtacgtcatcatcatgacagtgtactactgtcctactactcatagcgttctcacatatatctactgntcatacctctatcacattttgagtgcgtgcggtgcttctaccacgcgctcgtactcgtgtgtgctatgacgtcgtatccgtcgtcatagatgtcgcatgacccgcgtgagcggagtatctaactcacacatcatacttatatcgctgctgattgtggcgctntactcctatcaggcgtcatatatcactnctcactctactacactactatgcatcatcttatatgctctatcatnatatatatactaattatctgtatcnctatagtactcgatgtacgcatcatagggncacaattccacgtacgtacgatgatgactatgtgnangtaacatangntggtagggncgtgtcnctcatctactgatcatcaatatcttctgtctctgtcttgtctgtctctcatactgtgtctactatctacgactccntctagcactgcgcgcnctggtctatgacactgactcatagctggtgagcactatatactatgtgtgggcagtaacacacnantcatacctgactgctcatgcgtgcgtacgnttctntcaacacgcatcaattctacactctatgctctgngggatgttgatatatctcgctgctgtgctcatgtcntgatctagtactcatgtcaatgtcgtgctatcagtgatatgacggtntgtactaggtatcgtatacgagtagtcatctctctgctgnatcgattcagcgcagtgtctgcgtgtatctctgtctcntactatcctntcatgtgtgctatgctggcgagcgcagacactgcgactgataccatctacangagcatgcgcagtctctaactgtcanaancaaacacngtgncaacnatcacatnatcatcactatagacaaagtctatgtatactacctgcgcaactgcagctgccgatgactccgctcncacgtcgcnatctaccatgctactctcactactctncatacgntcactcacgataacgtcactttcgtgtctcgatcatcgactcantnacn

SEQ ID NO: 5712 - DNA, 1556 bp, Glycine max
  misc_feature (1)..(1): n is a, c, g, or t
  misc_feature (10)..(10): n is a, c, g, or t
  misc_feature (39)..(39): n is a, c, g, or t
  misc_feature (51)..(51): n is a, c, g, or t
  misc_feature (53)..(53): n is a, c, g, or t
  misc_feature (97)..(97): n is a, c, g, or t
  misc_feature (139)..(139): n is a, c, g, or t
  misc_feature (195)..(195): n is a, c, g, or t
  misc_feature (200)..(200): n is a, c, g, or t
  misc_feature (214)..(214): n is a, c, g, or t
  misc_feature (288)..(288): n is a, c, g, or t
  misc_feature (392)..(392): n is a, c, g, or t
  misc_feature (403)..(403): n is a, c, g, or t
  misc_feature (442)..(442): n is a, c, g, or t
  misc_feature (464)..(464): n is a, c, g, or t
  misc_feature (525)..(525): n is a, c, g, or t
  misc_feature (622)..(622): n is a, c, g, or t
  misc_feature (634)..(634): n is a, c, g, or t
  misc_feature (737)..(737): n is a, c, g, or t
  misc_feature (820)..(820): n is a, c, g, or t
  misc_feature (896)..(896): n is a, c, g, or t
  misc_feature (951)..(951): n is a, c, g, or t
  misc_feature (1376)..(1376): n is a, c, g, or t
  misc_feature (1496)..(1496): n is a, c, g, or t
  Peptide Sequence Number=SeqID_8487
  Probeset Number=SeqID_15491
ngtgcgtgcngatcactggtgctaagtagatagagatgngatatatacgangngtgcgccgtcctgtcacgcacacgacgacttgtatatatcatcnatgatcactcactctctggtatcaagagacagacggtgcganagtcatagtatgtcaatagctacagagtgatgatcgggcgagcggcgatctcatgnacatnccatccgaacgcgntcgtgcatataaatggtcgtcatatagtgtgtcatatacatcgtccatgtgttgtgggtaatagaagcagtcancctcgcatgctatattcttatatatttatatcgtcaacgtgtgcgatagatgcgcgcgtggagagagcagacgactgacgttatgtagtagcctcgcacactcnatcgataatantgctaggatattggcgttacatccacacacgctaactcntatctgtgtggatcattgtgtnccggtggcacatatagtacgacagagagcacaatgcgctgagtagatatagattgtgttcncacgtctaatatcatatattatcaggccatgctctgccgataaagatgacgacctcgcacgggtgtagagcgtgacatgatagagagcgctatatanagttcaaattantgggtccgcgaaggccccgcaggctcggtacgacgatatgaagagatgttagtatagggttagacgagacgccgggtgtggtggggtggatcttgttataccnaaatacactaacactgtcgcgtatatattcatcggacatgttgtagatgcgaatatagtaaggtgagggtgcttaattatcancgatatagttagcactccagcatcagcgacaataacctaatatagtacgttttatatgagtatgttattacgcatnccgatatggcggtcgaccatgtcgcgcgttatgataacgtcgacgaatatgtgcntaaatagacaagtacttctctaaactctcgcctattcaagcaaaagttgccatgaagacgtgctgttgcctcgaaccaacacaaggattggatcgtatgagtagaatatcgctgcaccgataaaaacaacaagatagagtagtattagattgagattgcagaggctgtgttatacataatagggttctctacagtttatataaagttcaagaacagggacgctaactacttcgtatcatggtagctatcgcatggactggatggtagaatatatctagaacattctacgagctactaggttagcgtcagtgtctagagggctggattggattctgtcgggggaagagctcgttagacatcttgtattagtgtattctgtgggtgagcaaatgattgctttaaggagacataggcgacgtccttgntctacccattcataccccactagcgcggcatgagatgttgtgctcttataatctttatcgcgcccttcgtgcgggtgtggaggatgaaggttagtttatatatagtgtgtatgagggatngctcgataatacatccagaaatttcagacaagagggggataatcgggtgaggtgtggcca

SEQ ID NO: 5713 - DNA, 1458 bp, Glycine max
  misc_feature (20)..(20): n is a, c, g, or t
  misc_feature (247)..(247): n is a, c, g, or t
  misc_feature (491)..(491): n is a, c, g, or t
  misc_feature (530)..(530): n is a, c, g, or t
  misc_feature (1349)..(1349): n is a, c, g, or t
  misc_feature (1423)..(1423): n is a, c, g, or t
  misc_feature (1431)..(1431): n is a, c, g, or t
  misc_feature (1440)..(1443): n is a, c, g, or t
  misc_feature (1446)..(1447): n is a, c, g, or t
  misc_feature (1450)..(1451): n is a, c, g, or t
  misc_feature (1453)..(1453): n is a, c, g, or t
  misc_feature (1458)..(1458): n is a, c, g, or t
  Peptide Sequence Number=SeqID_8488
  Probeset Number=SeqID_15492
agatcgtgttactagtttgntatgtagtattcttggcacggtcggaggaatgtcaagtatacatgggtaatagctgagacctgtgtgagtattatcaacacgacacgcggagatgtgcgtcagcgacacaccacccacacgcggcgcgcgtgacaacacacataggaacttgtgtagtcgcatacctatatattatgtattaattatatcgactgtgtgtgtaggtaatacgttagcatatcatcanttgactcgccatcaaaacacataatcgactataaatatatactcatctcacacacatactgtgtccacgcgatcaaccggtcacactgcctacagaacctacttaccgacacatgcggacgcccgcccataccagtagcagagtatagagtagtggggtgtggtgttaggtgttggttgaatatcgagtgtgtctcatatggggagagggcgcatgacgacggaggtgtgtgcggagatcgcanaccgcgcatgtcatgggcatacaaccacaatcataggtngtgtgcggcgagcgagtccaggggtgtttagtctcaaaaatcatcaacccagtactgttcgaggtatattgattgtgttaatcttcgccgcagcgcacagacgtggcggacgaggcgaagttgcagtcgaacgtcatgggtcgcttgatttgtgtagttatgctatggtgtctctcgtcatatgataccctcgagtgtatagttcagcactgtgtattctttgttgcgaattagttagtgtgtgaggcgggtaaacatcggttatagatatgagtagtgcaaacaataactactatcaaggaagcataagcgttaatggcttgatgctgatgagagaggtatcgcgctaaatagatatgggggcggcgttacgaattaatacactccaccgcgaggtgaatagataaatatttgtgtgtgtgaaccagtgtaagaagaagagttttggcttgtttttattatctatagtatccttttttgaaaactactaaatagaacccggaaacgttggccctcttgggggcgcgccatccggcgccgccgctcgcccgccgccccacggataggagatgagagtacaactaaatttctaataataggtgcattgtgttatgttgagtatcttgcttgcgatttgtaagttcattataacgggtcataccacacgccggcaggtgttgtcgtttctcctgtttcctcaggggcgcccattttctatcttgctgtgtgttttccgtagaaggggtggtaaaatatactaacatccattctagtaactcttatctccctatgattatcttcgtgcatttcacgctatgnatttcgtatatcccccttcgcttgcggcggacgcgtttggcggggccgcgtgcggaaaaagaaaaataatacantataaatnaaagaaaannnnaannaannanaaaan

SEQ ID NO: 5714 - DNA, 1355 bp, Glycine max
  misc_feature (47)..(47): n is a, c, g, or t
  misc_feature (129)..(130): n is a, c, g, or t
  misc_feature (185)..(185): n is a, c, g, or t
  misc_feature (215)..(215): n is a, c, g, or t
  misc_feature (355)..(355): n is a, c, g, or t
  misc_feature (368)..(368): n is a, c, g, or t
  misc_feature (401)..(401): n is a, c, g, or t
  misc_feature (758)..(758): n is a, c, g, or t
  misc_feature (901)..(901): n is a, c, g, or t
  misc_feature (949)..(949): n is a, c, g, or t
  misc_feature (1254)..(1255): n is a, c, g, or t
  misc_feature (1259)..(1263): n is a, c, g, or t
  misc_feature (1325)..(1326): n is a, c, g, or t
  misc_feature (1329)..(1330): n is a, c, g, or t
  misc_feature (1332)..(1332): n is a, c, g, or t
  misc_feature (1334)..(1338): n is a, c, g, or t
  Probeset Number=SeqID_15493
tttgactagtatggaatgttgtattttatattatgtcgtaataggantatacgaggatcagtgtataagtgatacataaggctactgtcagaccaattacgatatagtagcacaagcatgcgcgtcaannagatacatatataagatcacacatctaatggcagagaagagagagtaacacacanatagtcaattatatataatcatagagtccntcatagtaatatagatatatcgtcaatattgtagacacatggttactacttgatgtttcatgtaggaagactgatgacagcgcgagcgttatccaatgatctataatgatacaccgtgtgagaaatgcgactcgagtatnttactgtgctggncgctcatgtatattagtaatctaatgatgaaancattattataactctacatatctgatatcgtcttggatggtatgagattatttatatctatatatgtatttacatccgattcttgtggaggctcacgtcgtggtagtgtgcgataccgctactatcactaccaacaactctcactcttacactgttgtttcatgcgagatcgcgcacacgtatctagtacactctcctgaagatgtatggaaagagagaatctcatcacttcatatgatgacatacataaagagtattatttatttatatcaattagtgtgacatatatatatagaatttcgtcatctctttctgtgatcgccactcacactccgtctgtgatctcagcatgaaganaataatagatagattgtggggtcacaccacccaacacaactctccgctagcatagtactagattagcatattaaatctcagatcaaatttaatgtatataatgtagattatattagaatatataatatataatctattataanatgaaaatactgggtcacctgtcgtcatgaacgcatcattaatcatancaaataataagtatatattactattaatcatggaaagaaagaaagaaatattacaggattcctcatctaatatatagatcctacacaggtgatattaatgttataatttatgtatatgctcgattatataaattaataaacttacaatattataaaatataaagtaatgaatgtgtattttaatcatatcatacatatactactctctacgagggcgaagactctgatttaaatcaataatattatgtaagaaattttgtcattattagacttgtcgcacttctgagaggggggtggggtggggnntgtnnnnntcaacataaacctcgaagacaaacggacactcatagaagaatagatggataacccaagggtnnggnnanannnnnaatataatattttatat

SEQ ID NO: 5715 - DNA, 2441 bp, Glycine max
  misc_feature (1)..(1): n is a, c, g, or t
  misc_feature (607)..(607): n is a, c, g, or t
  misc_feature (646)..(646): n is a, c, g, or t
  misc_feature (795)..(796): n is a, c, g, or t
  misc_feature (2429)..(2441): n is a, c, g, or t
  Peptide Sequence Number=SeqID_8489
  Probeset Number=SeqID_15494
natttttacttttccttttaactttttcaccgatacaaattgaaataccataaatcttagcatctacgatgactatgttcacttctaaaacatgaattctctcttgtaatttaagatctttattttacggtcatttcatattaattttatatgtttattatagctgtgtcgtatcctgtgatttttaaaaattttctatatcctgtatctgtgtttcctacctaacagaactatttttatgtcaacttttgctcagttcatagttttatcttaaattctaaggtggactgttgagagttgagacagtgaagtttgatctcttatgtgccattggaagttgcccattacttgctagaacagccaaattttataaacaaactgtgtttctgtaaaaattaaataaataaatcaactctcagtattatgtttggattctgtcgtctatttctttgttttttgattgctgacactccttccaccaatatactactttgtgttttctccgttgagatggagttagtgatagtgaattggctgtgcattccatgtgttgaactatgtacatacatgaacatggagggtacaggttacagttgcatatattganaaagaaagagaatggtatgcaaaaatgagaactgggcangtgtttttaatattcagactgagttatcagaagaaataagttcatgtttattacaatggatttttcctatatcaagatgagaattggagtgtgaatggaaaggaatgagcattcccccttattgttgccatcctttcttttcatttctnntgtgttgcttatgttttgaggaattacagaggtcttcttctgtattagacgataaaaaattagacacataacaaattaacaatagatggctgtgaatttataatacaatgcccttggatgttctcaatggctatttatagttcttgttattacgcttattgtcttgaatgataacaaatggctttattcttcaggagtttttgaaggcgttaataggttttatagatgttgctgggctttattttgccttgacccagttgactcacaggaacatctctcagaatcataaatttcaagcagttggacttggctgggcatttgctgactctgtctgcatcggttggctccactttgggttggtgccagaggattagaattacttacttggattattcgttgacaacatggctgtttgcgagaaatcacaagtcaatggattccgtccagctgtttgatacaatagattcatggcatatgcagcatggtttaccaaagtgttaggttcaaaacaagcatatcaaagatgaaattctttaaaatcagcattatgctcacaaacatgagaagaatgagtcgaagaagtgaaggtgttgagtgttttcttcttttttggatctgagagagaagagcgagcgatgacggtctttcatttcttcaacttgccgccagtctcacctttcggcccccacgccgtctacttatttctgccacgcccttatctgagtatgatacactgctgttacctctataaaaggaccggctgttcgtttatgcttgcaacggtatttataggagtcttatatcgtctagtttgttttgtttcaggagtttttaaaggcgttaatagttttcataatgttgatggtttttaatggattaatcgcatttaaataagaggatcatctctcttaatcatagatttcgtggactcggacgtggatctgtcttttctgactctgtgctgttgcggtgggcgggcctttgcggtgtttgtagtggattgaaaggtacttgggattacattcttcagggccttgaggctaatgcaaattttgtcatgagcaaatgccttgaggctatggcacatgtggtgttgagcatatcccttgctgcacatgaaacttggatcttggtcttgcttcaaaataaagcccaagaaccctcatcccctattatatatttgtagtgcaaggggattgtagcaactatgccatctatcacaagctatctgaggcgtggattggggtggcactttcccaaagtggtaggttttgagctcttcacatccctggtgatggcttttataagctggcaactgtttgctgcatgtcagagaccttcagtgtgagaaagctcattacataatgatcgaatcctgcttaactattttctggctagagttttgatccagggtcatctgtttcttttggctgctgcaatgctgtttctttaaattccaagaatgttttcttgcggtagaatgttggctgcaattcattagaaatttttgtttattcagaaaattagagacaatatttaccccgaacatctgggattgataggttgcaaacactttctctttgaaaccccgttggatatctcattaatccacgtcccttccattattaaccannnnnnnnnnnnn

SEQ ID NO: 5716 - DNA, 1775 bp, Glycine max
  misc_feature (1)..(1): n is a, c, g, or t
  misc_feature (17)..(18): n is a, c, g, or t
  misc_feature (20)..(20): n is a, c, g, or t
  misc_feature (62)..(63): n is a, c, g, or t
  misc_feature (65)..(66): n is a, c, g, or t
  misc_feature (70)..(70): n is a, c, g, or t
  misc_feature (111)..(112): n is a, c, g, or t
  misc_feature (114)..(118): n is a, c, g, or t
  misc_feature (120)..(120): n is a, c, g, or t
  misc_feature (130)..(130): n is a, c, g, or t
  misc_feature (176)..(176): n is a, c, g, or t
  misc_feature (186)..(186): n is a, c, g, or t
  misc_feature (194)..(194): n is a, c, g, or t
  misc_feature (197)..(198): n is a, c, g, or t
  misc_feature (215)..(215): n is a, c, g, or t
  misc_feature (219)..(219): n is a, c, g, or t
  misc_feature (252)..(252): n is a, c, g, or t
  misc_feature (263)..(263): n is a, c, g, or t
  misc_feature (288)..(288): n is a, c, g, or t
  misc_feature (322)..(322): n is a, c, g, or t
  misc_feature (361)..(361): n is a, c, g, or t
  misc_feature (379)..(379): n is a, c, g, or t
  misc_feature (381)..(381): n is a, c, g, or t
  misc_feature (389)..(389): n is a, c, g, or t
  misc_feature (394)..(394): n is a, c, g, or t
  misc_feature (435)..(435): n is a, c, g, or t
  misc_feature (447)..(447): n is a, c, g, or t
  misc_feature (531)..(531): n is a, c, g, or t
  misc_feature (538)..(538): n is a, c, g, or t
  misc_feature (542)..(542): n is a, c, g, or t
  misc_feature (549)..(549): n is a, c, g, or t
  misc_feature (582)..(582): n is a, c, g, or t
  misc_feature (619)..(619): n is a, c, g, or t
  misc_feature (684)..(684): n is a, c, g, or t
  misc_feature (689)..(689): n is a, c, g, or t
  misc_feature (691)..(692): n is a, c, g, or t
  misc_feature (718)..(718): n is a, c, g, or t
  misc_feature (733)..(733): n is a, c, g, or t
  misc_feature (761)..(761): n is a, c, g, or t
  misc_feature (773)..(773): n is a, c, g, or t
  misc_feature (776)..(778): n is a, c, g, or t
  misc_feature (870)..(870): n is a, c, g, or t
  misc_feature (889)..(889): n is a, c, g, or t
  misc_feature (936)..(936): n is a, c, g, or t
  misc_feature (965)..(965): n is a, c, g, or t
  misc_feature (977)..(977): n is a, c, g, or t
  misc_feature (980)..(980): n is a, c, g, or t
  misc_feature (1082)..(1082): n is a, c, g, or t
  misc_feature (1085)..(1085): n is a, c, g, or t
  misc_feature (1100)..(1100): n is a, c, g, or t
  misc_feature (1365)..(1365): n is a, c, g, or t
  misc_feature (1528)..(1528): n is a, c, g, or t
  misc_feature (1739)..(1739): n is a, c, g, or t
  misc_feature (1746)..(1746): n is a, c, g, or t
  misc_feature (1756)..(1756): n is a, c, g, or t
  misc_feature (1759)..(1759): n is a, c, g, or t
  Peptide Sequence Number=SeqID_8490
  Probeset Number=SeqID_15495
ngtgtctgagtacagtnngncggatttcgatatagtatctgaagtcgtggagtcatgcatgnnannaccngtttcgttctgatggcatagagcgattgtctctactgatanncnnnnnantgtgtgtgangtggtgatgtcagcgtcgtagttcgatgtgcgacagtttgagaaancaccggacanacacaganaannagcacgattcgtcaatngagnacatctgttaacgtcgttagtgtgagttagacnactgatcaganaaaactatatatactagcgtagtgnatacctacgttgataatatctgtctctcacttgnttaattacgacaggaaaggcagatgcgaacagtcgtgantacgcactagtatcggtntntgtagacntaatntctggtatcgcgctctgtacgcggacgtcatgagagacganaatatatggacncgcgtagctcgagtgagatggcgcgtctctcacacaccttagatcaatagcactaactatactcgtgactatacacaagccaantctaagntganaacaaanttatagcgtgaagcgaacacatgaggtctctgncgcttagattattctagtactagatatgattagacanatgtgtgttgcttcgttcgtactagtctgagacactaaggatgtatacagaaccgtggacaatgncgacncnncaccgttgttgagacgatacagagtnaagacgacatacagncggcgatcgctgtgcgagtctctggtgngtgatcagtgantannngagccatatacaactatcatatacagccgaagagaacacaatgatgagtggagagtgagtgcatgatagtacggcgtatgtcgtgcatactnttactatctcaaccatcanatcatctacttctgcgtgtgaacagacagcgacgcatgcgaggtagnagaaagccgagaagccagatcgggatgtnatacattgaatnagnaggatacataccatagctcacacacacatcggcgataacccgtctatgacataatgagtgaaagacacggtgcaagtcacaggccagcagcagagcgtcatngtngcgggcgagatgtcncacggcggactcacgatagttctctacattctcgatgcgcgtatacgtccgtagctgacacatgtaagaggagcgggagtcttatggctttatcgagacggtgaagacaacagttacatattcctatacatagtacacgggaccaagagcgctagagcgacatacatttcagtgtccattcgtgctatatcgatgggacggggtcggatgcatatgtctgcttagacgtgtctaagcttgtcacacgcgcgtattctagtacatntgccgctgtctcgatttatgtattactattctcttgtgatcatgactgattagtagaaatctctagctcctcaattatgatatttaggagagcagagcgtcgaaatggtagtatttgacggccggtagcgttatatggtattgatatcgctatcttatatcgnggcggcgtgggaaggatgaggttcggcgactcaaacgcagttggcctctgtccctgtgtcggcgtcgcgggtgtgtgctatacctcataatgagtatctatggtgaggggcgcggcgtggcgcggtcgagatgaggagattggcgttatcatcagtatttcgtggcgctggctcgggttagacgacgagtctcaggtttctatgatttgtnataagtnagcaagtaangtngggtgcggtggactgc

SEQ ID NO: 5717 - DNA, 2935 bp, Glycine max
  misc_feature (1)..(71): n is a, c, g, or t
  Probeset Number=SeqID_15496
nnnnnnnnnnnnnnnnnnnnnnnnnnnnnnnnnnnnnnnnnnnnnnnnnnnnnnnnnnnnnnnnnnnnnnnaggctcgagcttgcctgccgctactttccctttcccgattaatctgctcccgagtttgttcactcatcaaaccctaaccctaatcctcaatcctctcatcactcgatttaaaaccccattcccattgctatcgtgacatcttccgacaaattttctctctgtcttccgtttcgttcttccaatttcaggcatgaatcgtgcatcggtgttccggtagagcatatgacgagggaggttatcggaactgcgaatcgattgcatgggtttagagaatgccagagcttcgtagtggtgtgcgacgggggcgtggccgtggccagaaagcatcggaacctgcaaggaaggaggtgaaggctcgtgcggcgccgagagggagacccaggactcgattggcggcgaaggaattggagcttcaggagccgttgatcccgataccaccgacaccgataccggaaccgttgatcccgatactggagccggcgaaagaagagaaaaaggaagttggtgtggtggtgaatatgggtgagttcatgcatagccttgagttgcaatatggctttcgtagatgatatgactagacccatacttttaaatttggcattcattgatcccccaatgtaaaaacccagagggttgaggaaggagaatgtggccttggcgtgagtaaggtcttgagcgtccgcgttgcatgcagtgagaacatgaagggggatggcgggactcgccgacaaggggaacgggcccgggggggaggcccgcccgcgaaggcggtggagaggtaggtgggttgggggtggtgtgggaaggatgtgggtaggcgtcgggtcggtgatgcaggggctttgggtgtggggggggctgcgggatttggcctccgtaatgggcagggccgtacctgaggctctccctaggatgtggagatgaaaagcacccatggggctggatagggagacccgggggaccatcttagatgaggcgacctggaatacaaacacttgctcctcctcagaggtggtcaatgactgggtaatgacggtaattcttaacacgatcttatatcttttgaaatggtctaatgtgtacgcagttgagtttttatcaatatcaaggagaagcagcacttaggaagctggcaggctaggagatgacaaagagctaaactgtttactctttcaacaggttgcagcgcaagcgaagttaattgtttttttttgctggtgacaaaatatatgcatgctagtttcataacatagttcatgtcttacaaataacttcatctacgcttcacaatacccattttacacacagaagattcttgacgaacaatgttattgttatctttaggtgtctctacaaagcccatgttagccttcatcatgacatcaccttcatagcacacattcctccttcctatgctatcatttcctttgttaaaggttgccttgccattgtttgaatcttcatcaaagctcatcaaatccttctaattggtcataatacttacctgactttttcagctatccgatgctgaatgcatctaaatctttataggaagttgattcctattgtggtcaaggtgaaattctttgaagaacaatactattcaagcctaatatctatgattgacgcaatgcttggaacgaaacctgcattttggccaattaacactgaaggtgctcaaaaggtgggggcagaagaggggtagattgcatcttggggaagaggatcattcacagcccaaaaagaaggttcgtttgggtgttcctgctacacaatggatttcagtttacaatgcaagactgccaatgaagcaaaggtaccattacaatgtagaggacgcaagattagcgcaacatgtggagagagggattgcagatggccttctaattagttgtgtggcttcttgttccaatctatgggcccttattagtggatgcaggaactgacttttcaagattaagtttataagttgtcaccatttatcttacacatggaatggatcatggaacagtgggagaagaactattacattacttctatagaagggggtaataatgggagctcacttgtaatgaagtcaaaaggcattcaagtatacacaacaatcatacatagtaagtgatgctgtcacattcaaattgaaaaataaaaaatggagagaagtttttcatatggcttcaatggatactgctggaagtcgttggagtattgtaatgtggacaaagtggaggatacaatgatcaagttttagaacttttttatatatatcataattagggaatccagcaaaagtgcccaaatggccataggcttacagcatcgtcggcaacgtggtctttatttgtggttatttgtagcattgtgagaaggagtagaggtgggaactcgtaggaatctttgcgaagataaaagattcgctggagaaagggttagaagaaaaatgtgattcatttggttttcatttacggtcgtcccacccataaacaattttgtagatgacgttttcactcacgttattgtgtttgagaaagacataatttatttagaggaaggtgcaaattcataactttattaatgttattgcatatgtatggatcattttcattttccatactataagaagattaatagggtctgtgttttatgtggattaatgactatggctgaaatttatttcttttgctattttgatttatgacaacattttattattatttttacaaaaatttcaagcattataacctttgagcaatagaaaaaaacatagtatgtttatttatgtctttgcattcacttaagctattatactattattaccttattgtttgggttaaaaaattggggggggtggcctacgtagctgt

SEQ ID NO: 5718 - DNA, 1545 bp, Glycine max
  misc_feature (42)..(42): n is a, c, g, or t
  misc_feature (44)..(44): n is a, c, g, or t
  misc_feature (214)..(214): n is a, c, g, or t
  misc_feature (216)..(216): n is a, c, g, or t
  misc_feature (255)..(255): n is a, c, g, or t
  misc_feature (265)..(265): n is a, c, g, or t
  misc_feature (279)..(279): n is a, c, g, or t
  misc_feature (400)..(400): n is a, c, g, or t
  misc_feature (462)..(462): n is a, c, g, or t
  misc_feature (480)..(480): n is a, c, g, or t
  misc_feature (743)..(743): n is a, c, g, or t
  misc_feature (759)..(759): n is a, c, g, or t
  misc_feature (1196)..(1196): n is a, c, g, or t
  misc_feature (1511)..(1511): n is a, c, g, or t
  misc_feature (1514)..(1516): n is a, c, g, or t
  misc_feature (1525)..(1525): n is a, c, g, or t
  Peptide Sequence Number=SeqID_8491
  Probeset Number=SeqID_15497
ttgtagagatgagtgtatagagcggtcgatgagtgtgagatnanaagtagatatataagatatagagtcatagcggtagagtatgtctgatgacgtgaatcagtgacactgtgccaatgatgtactgaagtatatacggagtgtgtacacatggagtatagcctaggcgctagtggtatgtgccagctattagctccatgagaggcgtgcgtgngntactgctatcgctcgacgtgcgatcgtatatacaccccnacacgtgcgncgtgactggagagnagaggatgatatagagagatatataggggcatataagtgtgaattgagagacagagagactaataccacactgaccgtagacgacaccacaagagggtcccctctactcgtagtggatccntgtgtcgagcgactcgagcagaggagagaacttcgcgaagtatatagcacgcaactagagcntgaagaggaggtgtgacngaacgaccagacgtcgttgagagcgcgcgagagaatagagaggaggcgcagcatcgaagataatcagtaacagagcgaatcttcacgtgtagtgaccacgtcgcgagatgtcacatctcacgaacgatacatacatatccagaacatacataactcatattacggtggtgaggtggatagtgagataggaggtatggaagagagagggtggtcgacaaatctctacaacgcatttgttatagtagtctttatttctagttatnctttatgcggttgcancgtaacgtacttctatcttgcgagttcactataagacattttcattcttaaactcgtttacagtgcctgactacatttttcgttctctcccatatcgtatgaatgatagatatcattctcctacatcattaacatccatcgcacatcaccattatatgcaaaggtcgtcgacgtcgagggagcgtagattagagctcagagtcgaatgagaagagtagagaataggacgctgagatcgctacgagaggtgtgcgagtggggtgggatataccgagatgatatcaacgataatagagaatttgaaagagcgttggtgttgattgaggagatagacgagagagaggtatagaacattaagttttccttactgctgtattaatgtatctatatttatctctagtactcgtgcgtgtttatgtactacgcagcgcgcggcnagggattaggtagcactctataacagcacacccacatagaagccacttgccccataaggatgcagagcgtatgttacttgtatcgtggatatgatatgcattgcatatcgtgcaggtacgcgacgtgataagaagatatagaagagaagtaggtgctccgttgtgctgcagagaagaggaggtcgagggagtctcataaatacgataaatgtacttcttattatggtggtgagatctctgtcgtattcataatagtttgtggtggtgtttgttggggtgtatacactatagatggcacatcgttataatataatnttnnnatattttgnattatcaacaacttagaaaa

SEQ ID NO: 5719 - DNA, 1416 bp, Glycine max
  misc_feature (16)..(16): n is a, c, g, or t
  misc_feature (20)..(20): n is a, c, g, or t
  misc_feature (26)..(27): n is a, c, g, or t
  misc_feature (30)..(30): n is a, c, g, or t
  misc_feature (32)..(33): n is a, c, g, or t
  misc_feature (35)..(35): n is a, c, g, or t
  misc_feature (40)..(40): n is a, c, g, or t
  misc_feature (45)..(45): n is a, c, g, or t
  misc_feature (68)..(68): n is a, c, g, or t
  misc_feature (70)..(72): n is a, c, g, or t
  misc_feature (82)..(82): n is a, c, g, or t
  misc_feature (91)..(91): n is a, c, g, or t
  misc_feature (119)..(120): n is a, c, g, or t
  misc_feature (154)..(154): n is a, c, g, or t
  misc_feature (156)..(156): n is a, c, g, or t
  misc_feature (172)..(175): n is a, c, g, or t
  misc_feature (177)..(180): n is a, c, g, or t
  misc_feature (209)..(210): n is a, c, g, or t
  misc_feature (214)..(214): n is a, c, g, or t
  misc_feature (232)..(232): n is a, c, g, or t
  misc_feature (238)..(238): n is a, c, g, or t
  misc_feature (241)..(241): n is a, c, g, or t
  misc_feature (243)..(243): n is a, c, g, or t
  misc_feature (248)..(248): n is a, c, g, or t
  misc_feature (263)..(263): n is a, c, g, or t
  misc_feature (434)..(434): n is a, c, g, or t
  misc_feature (487)..(488): n is a, c, g, or t
  misc_feature (532)..(532): n is a, c, g, or t
  misc_feature (773)..(773): n is a, c, g, or t
  misc_feature (1063)..(1063): n is a, c, g, or t
  misc_feature (1066)..(1066): n is a, c, g, or t
  misc_feature (1163)..(1163): n is a, c, g, or t
  misc_feature (1414)..(1414): n is a, c, g, or t
  Probeset Number=SeqID_15498
ggttgtgttaatagangttntgtttnnttntnntntttanatatnagaatatatcagtcaacaacganannngcaaccaaanagcaagacncgactgaataaatgacaagactctgttnnttttatatctctcttatctctcgtgtcttctatntnatctctgtgtaggcannnnannnnttctcatactctccgcggcgtgacgagcnngtgntgtatctgtgtagggtcncgccgncananaaaanataacacacctcggngacatgatactacccgtgctctgcgacctttacgatatgagctatcgcgcgacgcgtctgtcgagagcgcgatactagagtattgcgtacctcatatatataccgattataattaaagagcgcgcggagacacgatggcgcgcgacgcgcacatacaacatacacacatanatatttgtagtgtcgtcatgcccgtgtgcatcgcaccacagtgacgcgcgcanncccagacatcactctgtgatacgcgccaacaccaccacaccccnagtctaacattttatcttcatctcctaatgttgtgacatctgaattatcgttgttgtagttgctgggtggcgtgggcgtggcggcggcggctgctgatgatgtgcacgttagttatcagatctcacgacactacttctcttttcttgtgattatacttaagtagtattagatatgggtgatataattgttagcttatcttattccactcatactcagctcaccgaccccctctcgcccgcnccagcgtcccaacgctcttcactcctctctcacgccatcaccatgcgtccatcctgcgcacgtcgcgacccatgtatatattgtgtgctgctcgcacccgccacaccgccaccacccggtcaaccacactactctacgcatcacatctcaccgctgccgtggtgcggtgagtaataactctaactcacatatactgcgcgatatacactcgtgtcattacttattcgttcggcgcgagagagatacacacctgagcgcgcacatcaatatataatatacataaaacacgncgncgccgagcactataatatgccgtttctcatacttctatcataccccatacgcatatactggtcgcgtacatataacaccactctacataacatctgnctagctgttatccgactatcaagcgacggacctctactcgctctacatataggtcgcgctccaataccactcgatctactacatactggtgttgctgtttaatacaactctgtactcttacccatctcatactcatcacactaattatctaagtgcggtgtcagttattatcacaacctgcggcgtccctccgccacattctccacatatagaaatgagtcgcgtatatacaaatgctcacagttcgtcangg

SEQ ID NO: 5720 - DNA, 448 bp, Glycine max
  misc_feature (430)..(430): n is a, c, g, or t
  Peptide Sequence Number=SeqID_8492
  Probeset Number=SeqID_15499
cagttgccaatttgcccttcaccaaacacgcacagcgacagatcgagaggccagagggagctgctgaaaattcaatgcgccaatcattgcggcgcagcggcaccagcaaccaggggctcatcatccgttcttctcctggcagtaaatgagcagtacaagttcttcatttctctctggaacttcagttcaatcggtgaagaaaagatgatattggcgagataatttaacaccggaagagggcttcacaaatcactgggcgagctagagagagggggggcgaggggaacaaaccaccactggaaaaaggccgcagaagagaagggggaaacaggagagagaaaggcgaggaacttttcgttggatccttcgcttttggggacgaaggaggagaaggtctctgtccctctccacgcccacctccacctccgcntcccttcttggctggaga

SEQ ID NO: 5721 - DNA, 1642 bp, Glycine max
  misc_feature (21)..(21): n is a, c, g, or t
  misc_feature (26)..(27): n is a, c, g, or t
  misc_feature (31)..(31): n is a, c, g, or t
  misc_feature (53)..(56): n is a, c, g, or t
  misc_feature (60)..(60): n is a, c, g, or t
  misc_feature (69)..(72): n is a, c, g, or t
  misc_feature (76)..(79): n is a, c, g, or t
  misc_feature (101)..(102): n is a, c, g, or t
  misc_feature (137)..(137): n is a, c, g, or t
  misc_feature (182)..(182): n is a, c, g, or t
  misc_feature (205)..(205): n is a, c, g, or t
  misc_feature (221)..(221): n is a, c, g, or t
  misc_feature (292)..(293): n is a, c, g, or t
  misc_feature (401)..(401): n is a, c, g, or t
  misc_feature (462)..(462): n is a, c, g, or t
  misc_feature (484)..(484): n is a, c, g, or t
  misc_feature (583)..(583): n is a, c, g, or t
  misc_feature (652)..(652): n is a, c, g, or t
  misc_feature (687)..(687): n is a, c, g, or t
  misc_feature (755)..(755): n is a, c, g, or t
  misc_feature (775)..(775): n is a, c, g, or t
  misc_feature (799)..(799): n is a, c, g, or t
  misc_feature (829)..(829): n is a, c, g, or t
  misc_feature (872)..(872): n is a, c, g, or t
  misc_feature (878)..(878): n is a, c, g, or t
  misc_feature (901)..(901): n is a, c, g, or t
  misc_feature (932)..(932): n is a, c, g, or t
  misc_feature (959)..(959): n is a, c, g, or t
  misc_feature (981)..(981): n is a, c, g, or t
  misc_feature (989)..(989): n is a, c, g, or t
  misc_feature (1103)..(1103): n is a, c, g, or t
  misc_feature (1170)..(1170): n is a, c, g, or t
  misc_feature (1173)..(1173): n is a, c, g, or t
  misc_feature (1191)..(1191): n is a, c, g, or t
  misc_feature (1196)..(1196): n is a, c, g, or t
  misc_feature (1226)..(1226): n is a, c, g, or t
  misc_feature (1231)..(1231): n is a, c, g, or t
  misc_feature (1233)..(1233): n is a, c, g, or t
  misc_feature (1276)..(1276): n is a, c, g, or t
  misc_feature (1283)..(1283): n is a, c, g, or t
  misc_feature (1293)..(1293): n is a, c, g, or t
  misc_feature (1365)..(1365): n is a, c, g, or t
  misc_feature (1423)..(1423): n is a, c, g, or t
  misc_feature (1496)..(1496): n is a, c, g, or t
  misc_feature (1514)..(1514): n is a, c, g, or t
  misc_feature (1521)..(1521): n is a, c, g, or t
  misc_feature (1531)..(1531): n is a, c, g, or t
  misc_feature (1552)..(1552): n is a, c, g, or t
  misc_feature (1554)..(1555): n is a, c, g, or t
  misc_feature (1625)..(1625): n is a, c, g, or t
  misc_feature (1636)..(1636): n is a, c, g, or t
  misc_feature (1642)..(1642): n is a, c, g, or t
  Probeset Number=SeqID_15500
gtatttgtggtgtgctctccnccccnncccncctgcttttctcgctctcggcnnnntttnatcattatnnnntggnnnngacacgacttacatctctctcnnaaatcctaataaaacgcacaaaacgagagggaacnacccacaatagaatagaccgacaactacgtgaacgtagagcgccncaaccgaacgagacctactaatnagtagataagagatgnattgatatgacgattagtatacacactactatcacattctatataagtatttgtagtattatacatatacnngtaagctagatagctcacgcctgacacacacaaaagacaatataagaatatagtagagagatcctcaggacagtcattctatacattattctacatcttctatacatnctatgagcactagcgtcgcgggtgtattgtgtgtagtgagcgatatatttagagataattntctcagtctacattacacatanatcactcctcagtgattcgcatcacgctactaagtgtctggactgaggagggtgttggtagggaggtgggtatttgtagtgatgtgtcggctctcctcnctctgctagagagtaaagagatatggccgtggataatataaataatcagacgcaatgcgaccagacacnacactgctcgatagacactaatcgctgttgtgttntgtgtatagtgtgtagtcacacgcacagcgcaagtaagatgtacgatatggagagaacgccactcacncgcacagcgagtatgatggnatagtctcatataacatcccagcncgtgctgagtcgagtaccgagcgtcgtccntggtcctcgtctcgtgatgtatgtagagatgaaggtgttgggntgtganacaccacctgcacaagtctggantgagatagtgagatctgatagattaatatgnaatcggtgctagactcatatgagaggnaagaaacccacccccacctcancacacacnaccacacgcgctaacactataccatcgtcacgacgtcgaccagcggagaacgcaatctcatctgatctagccataaacgtaatacaagatgacgctctctcctgtcagcactcnctactatcctgctcatctcacgtcgttgtgatgtgatgcagtgaactctgcgactattatagtgaanatnacacaaacaccagtatcnattanctagcgcgagacgtcattgagctgcgtganagtgnantgtgaacgtgagatgtcggcaatcagccacgcacgtagttgcnctgtagnatcttgcacncacacttgtagatgtcgacagtcgaaacgtatgggacacgtgtgagtgctatatgcctatgtcgatgtgtantgtatgctgtatatatcgatgtctatagtacgatagatgcgtagacgaatgcgacgcntctacaggacgactgacacgtctctatgcgcatgagcatgagacctccacaacgatgtctagtactcgcatantgacgtactcataggatngtgttcncagactcgtncctgatctacgcaatgactgnanngtacgttcgacatgctgtgatatatcatagtcagatactatcgtcgacgctagtcgggacgtcacaacgnacctcacatcncaccgn

SEQ ID NO: 5722 - DNA, 1411 bp, Glycine max
  misc_feature (1)..(1): n is a, c, g, or t
  misc_feature (44)..(44): n is a, c, g, or t
  misc_feature (97)..(97): n is a, c, g, or t
  misc_feature (220)..(220): n is a, c, g, or t
  misc_feature (294)..(294): n is a, c, g, or t
  misc_feature (360)..(360): n is a, c, g, or t
  misc_feature (611)..(611): n is a, c, g, or t
  misc_feature (613)..(613): n is a, c, g, or t
  misc_feature (996)..(996): n is a, c, g, or t
  misc_feature (1288)..(1288): n is a, c, g, or t
  misc_feature (1292)..(1292): n is a, c, g, or t
  misc_feature (1358)..(1358): n is a, c, g, or t
  misc_feature (1380)..(1380): n is a, c, g, or t
  misc_feature (1388)..(1388): n is a, c, g, or t
  misc_feature (1392)..(1393): n is a, c, g, or t
  misc_feature (1395)..(1395): n is a, c, g, or t
  Peptide Sequence Number=SeqID_8493
  Probeset Number=SeqID_15501
ngtgttaggatatataggctagaatggcggtatattatagtagnacgcaggggcggtgcgacgtgtacaggtgagtgcgaaggtgttgctgctcatntcacggtcattgatatagagctggccgcggcgtagtagtggagacagtcgttattatggtacttgttgcgtgcgggtggtgaatgttgtgttgtatgtacgcgcgacgggataatggactgtntgtcgtgagtgggtgcgccgtaggcgtcagagaggagagacggggctgtccgcgctggacattcaccgcaccantcatggatcttttctgatcgtggatgggtgtgtgcggtatccgcacgtcctgatagcgcgacacgnctgcggtcggcgcggtggatgggttattcacttcgaggttgcggcggatcttgggtcgttgggtacgaattaagtgtgcgctgtagttaaatagagcgcgctagtgttggtgagtggcgcacattgcgcttactctgatgcgtctcggtgtatagctgcgtcggataggaactagaagcaaggccgacgatggagcggggcgatacccgttagttttgctacaccacacacaagccagcgcgagcccgcgncnggccgcccgcgctccacacacggtggttgttgcgacaacgcggcggatcgaggcgctatactgtcgagtttagtcctcgctcgcagtactcaatatattctaaatttgtggctggttgatcggtcttagtgtagttggcggcgtgcgctccctctcaatctgttcgtgtgtgcgtgattgggtattgtggaaagcgtaggaggggattggtggtagatgctggggcgagaacataagcggaggtagttaattttgcaatgttattttgggcacataacagtgaccttgacgatgcttgcccaccgaccacacgcgcggcgcttcgccccccggccgcagtcccgcacccctcaccgccacgccagcgcgccccgacccggcgnaccccgtcgatacgctttggcgcgctttctctaaaagcgaaaagaaccgtctcgacagcctcacctccgcttgctgccttcgtccgcctgctagcgcctaacagacccgcatgggttctcatggccagttgacgggaggtctgcctggtgcccgagcgtacaccagccatgaccgtgtgtactcgttcaacacaacacccacagcatgttgctcggttatgtttatccctctctcagtaaaatgtcggtcgtactcctcacaatattaaaataaatctgcggaccgactagngagntggggggggcgggggcgcgcggggggtgtgcgactctatttatcactgctgcttttgggagggggntgtttgttgttacttggtaaantctttatnaaannanaaccccccccactctc

SEQ ID NO: 5723 - DNA, 450 bp, Glycine max
  misc_feature (436)..(436): n is a, c, g, or t
  Probeset Number=SeqID_15502
attgtttgcagagcgagagagaggatggtggtagtatctctcacaaatgcttcaggttttatccgattggctcatccgtcacaccggaggattccaaggttcggacctagcagctccaagtttcctcgggattcgagtctcaatgggagagttagctataagcctattgtgggtgggtatcccacagtgtccgtatgtttcgcacgccaaagtacgagcttacatgatgagccagagccccctttatggttgagccttgttagggacattttcgggagcacgggatcgctcttctcctttatggctgagcagccgagccagctgaaattcatagagtggcctagttttactaccacgctcaagactgccacactgagtctctttcttgtagctgttttcattgttacactatcgtcagtggactctgctctttgtnacgtattgtctctc

SEQ ID NO: 5724 - DNA, 466 bp, Glycine max
  misc_feature (435)..(436): n is a, c, g, or t
  misc_feature (455)..(455): n is a, c, g, or t
  Peptide Sequence Number=SeqID_8494
  Probeset Number=SeqID_15503
ataggccatttcatttttcgaacccatccagcctcaagtgttgtactacatgtgtgtgctcaacttgctcaactagtactccagtgtgtgtgagttcagctgttcgtgagtgcgagggagagtaagaacagcttgtgtgcagccgctggttagctaggcttcctctgttaaagtacaagtgagagttagttgcttgtagttctgggctaacagttagcttgtcagaaggcccttgcttttggccgtgatcttggtgttcacaggattcatgtggagttggactgcagcgaggcggtgagcttgatcaacggggctggcaagaatctctcggtggcgggccccattgtgcagcatatcagagagctcatgcttggttggcagggttgcaagatcacatggcggaggaggtctgcaaaccgagcttcccaaatattnngctaattaagctagctgtnggtgatgaggt

SEQ ID NO: 5725 - DNA, 360 bp, Glycine max
  Peptide Sequence Number=SeqID_8501
  Probeset Number=SeqID_15504
attcgaaaaaaatcatggggtttgctgcgatttggaactctcatcccaagaagtacggtcctggttcccgcacctgccgtgtgtgcggaaactcgcatgggctaatcaggaagtatggtcttaactgttgtagacagtgcttccgcagcaacgccaaggaaatcggattcatcaagtaccgttaaagatctggggttgttgatgcagttgcagtcattttgtttttcttttaagcttttgagactttaatattgtaatgcatcttataaatgttctatggtttatgcaagacatttgaattgttgaacattttagcttctttcatccaaatttttttttttggcaaaaaaaaaaaaaaaa

SEQ ID NO: 5726 - DNA, 658 bp, Glycine max
  misc_feature (180)..(180): n is a, c, g, or t
  misc_feature (189)..(189): n is a, c, g, or t
  misc_feature (203)..(203): n is a, c, g, or t
  misc_feature (312)..(312): n is a, c, g, or t
  misc_feature (327)..(327): n is a, c, g, or t
  misc_feature (601)..(658): n is a, c, g, or t
  Peptide Sequence Number=SeqID_8502
  Probeset Number=SeqID_15505
gaaaaccactctctctttttcccaattttcgaatctctctcctccatggacccaacttcgatccctccccctccggccaccaccgtccccttcactgtcgaacccagcaatcacgtgacccccgccgacaacaccaacaccaaccaccctccttacgatgagatgatatacacagcaatncgggctctngaggagaaagatgnttcgagcaagcgagccataaggaagtacatggaacaagtgtacaaggaccctcccacccacccactctgctttgttgacctcacatcctcaccgattggaatccgctgntcttctcatcctccnaaaaaaaatctaacagctccccggatctgatcctctttccggggctccaggccaaaaaagcccggggcccccccccaaagctcaaatcccagcccaaccttgagtctcaaatggcctgggataacccctaaaaaaaaaccctgttcttaaatccgaaaaaaaagagcccggccccccccaaaaaaaattgagacccccgaaggggggacccgggccccaatggcgcccgggaaaaaaggtcctcccacccctgtggaccggaaaaataatattnnnnnnnnnnnnnnnnnnnnnnnnnnnnnnnnnnnnnnnnnnnnnnnnnnnnnnnnnn

SEQ ID NO: 5727 - DNA, 315 bp, Glycine max
  misc_feature (100)..(100): n is a, c, g, or t
  misc_feature (125)..(125): n is a, c, g, or t
  misc_feature (127)..(127): n is a, c, g, or t
  misc_feature (129)..(129): n is a, c, g, or t
  Peptide Sequence Number=SeqID_8503
  Probeset Number=SeqID_15506
ctacctagaattcagctcgaggaaaaaacactttcattgtgatgattgtcgtatttgtagactcggttttcgtgagaattattcccacttcagtaagagntctttttagctacacgaatgctctncntnataatcatttgtgcgtagagaactccatgaggcatcattctcccatttgttatgagtatctttttgactcattgaaaaacattactgttatgaaatatggtcacacaatgcatactcaatgctacctataaatgctaaatcgtgacaaatatttttgtcccatattctccaagtcccttattgaca

SEQ ID NO: 5728 - DNA, 1683 bp, Glycine max
  misc_feature (16)..(16): n is a, c, g, or t
  misc_feature (19)..(20): n is a, c, g, or t
  misc_feature (23)..(23): n is a, c, g, or t
  misc_feature (25)..(25): n is a, c, g, or t
  misc_feature (28)..(28): n is a, c, g, or t
  misc_feature (31)..(32): n is a, c, g, or t
  misc_feature (34)..(35): n is a, c, g, or t
  misc_feature (50)..(50): n is a, c, g, or t
  misc_feature (56)..(56): n is a, c, g, or t
  misc_feature (58)..(58): n is a, c, g, or t
  misc_feature (98)..(98): n is a, c, g, or t
  misc_feature (119)..(119): n is a, c, g, or t
  misc_feature (201)..(201): n is a, c, g, or t
  misc_feature (252)..(252): n is a, c, g, or t
  misc_feature (278)..(278): n is a, c, g, or t
  misc_feature (313)..(313): n is a, c, g, or t
  misc_feature (1013)..(1013): n is a, c, g, or t
  misc_feature (1274)..(1274): n is a, c, g, or t
  misc_feature (1344)..(1344): n is a, c, g, or t
  misc_feature (1360)..(1360): n is a, c, g, or t
  misc_feature (1396)..(1396): n is a, c, g, or t
  misc_feature (1505)..(1505): n is a, c, g, or t
  Peptide Sequence Number=SeqID_8504
  Probeset Number=SeqID_15507
ttcggccccgccccgnccnnggngnggnggnngnnggcgggtgcgtgacnttcttntnacttatcttactttatacttcacgcagatctgaaaaccantggtagacgtgcggcgcggcnggagtcagggcgagcaatagccgcgaacggacctcacccacgtcgtggaggtgtccactcgacgtgataagagtaaatcacngttgcggctgtgctctctcttcttctcatctcttcctacttctcggctcgnttctctgcgcatgccacctgctctantagtctctcatcttcttcctccgcctgccctgcgnggagcggcagagcgcgaggctgtggtctgttgcgccgtgctcatgtcgtgtcttgtttgttcctgttcttttggctcctggtgaacatcgcattccgatgcgtgtctagagcgacgcagctgtcacccgcacgccaacatcctatcaagcgtccgtgtcacgcagactgtacgcgtagttgtatctctcatttattctgattctctcattctagtctcatacaatatatataattaatttagatatcttatatcaatgaacacactataacatgaacattcgctgcatcgtatcaactgcatcatccatataactatataaagctcatagacacgcatacaccactatctagcatactactctcgcgcacaatttctctgtgtttgttatgtcgttctatttgtcatcatgtacattatagataattcgatgtcatagcgaaaccatagaccacacatcaacgcctcgtcggactgtcgtactgataatcttgagattataacaacagtgatatcgtccacacaccacctcgtgtaatgctagacatgatacactcgtattgtaacgcgtttaagagtgtatgatgatgtaggatgtaccttctcattactatctcacatcagcatatgtctactactatcgcagcatactaatgtacgcgtgcgttgcataataacatacgacttatattcgcttgacnacatcactcatcattataccgtatcgtaccaatcgccacgtcatctatagtgattgatcttactgttactatatacgtatatctctacactacgccgtgacgccattgatctactgtcacgtgcgtagtcattctgatattctcttccatctctcttctcttttcttacatcagccgcaaccgtgcctacacgctactgcactgccatctcacactcgctccgcctactactacactctactctctgtactttgctatgcnttcgacgcgtgctgatattattctatagatctcgctttgctgacatatgttgtctcttgagtcttctctngcatcgactatatganatatctctcttgttatcatgcgtcgtcgctcactcnccacgctgcgtatgtatgtgtgtgcgttatgctatggtattgttatattattatgtgtagtatatatacatatatatatgtcattactctccttatgtgtcgcgtatgnatgatcacactactgatagaatatctatagactaatctgacgcgcgcgcggcacgccggatgtgagcaagatgatctatactatatgtaatctactaatacgaatatgagaataatcatctatatatataataacatatacacatctctatacgctcagatcattgacaacatataat

SEQ ID NO: 5729 - DNA, 1403 bp, Glycine max
  misc_feature (64)..(64): n is a, c, g, or t
  misc_feature (93)..(93): n is a, c, g, or t
  misc_feature (154)..(154): n is a, c, g, or t
  misc_feature (299)..(299): n is a, c, g, or t
  misc_feature (489)..(489): n is a, c, g, or t
  misc_feature (526)..(526): n is a, c, g, or t
  misc_feature (541)..(541): n is a, c, g, or t
  misc_feature (547)..(547): n is a, c, g, or t
  misc_feature (605)..(605): n is a, c, g, or t
  misc_feature (771)..(771): n is a, c, g, or t
  misc_feature (1039)..(1039): n is a, c, g, or t
  misc_feature (1107)..(1107): n is a, c, g, or t
  misc_feature (1264)..(1264): n is a, c, g, or t
  misc_feature (1319)..(1319): n is a, c, g, or t
  misc_feature (1344)..(1344): n is a, c, g, or t
  misc_feature (1346)..(1346): n is a, c, g, or t
  misc_feature (1354)..(1354): n is a, c, g, or t
  misc_feature (1358)..(1358): n is a, c, g, or t
  misc_feature (1365)..(1365): n is a, c, g, or t
  Probeset Number=SeqID_15508
ggctggactcagacgcgggtcgatggcaacgcggctagtcggcaggtgcgcgtgcgacgcgtangccgcgtgcgttccacgtgcgcgcggcgnggagcgctcgtcgcagcggtcgcggcggggacgcggacggcgcagacgccgcgcgatgcanccaagagcaacggcaggcgggagtcgcgggccgcgactcagaggcgagaggagaagcgagtgggacgcgccaaggtacgcgcgagcggacaggggagagatacgggcgggcgcgcgccggcgagaggcgggtcggcgcggcgagngcaacggagcgcacggcgagcagacgggcgcgaggcaaggcagacgcgggggcgcggcgggcgcggaggcggagcgggggagcgacagcacgcagactcagagcacttagcagagggcgggggcggacgagcgcaggcgcgggcgccgcggggtgcggggcgggcggcggcgagggcgagcgcggacggnggggcgtcgcggcgcgcgcggcggcgcgcgttcgcgncgggcgcgcgcgcgntggtgngcggcgcctgctccccgccgttcgtccgcgcgcggcggcgccgcccgggtcgggacgnagcggcgcgcgacgcggtgggcaaccactctctcctccaacacatacttaaacttctctccctatatgggtagggggatagcgagtgggcgcccaatacatcatccaccatactgacaccctagagtgggtcgccactctgctgcatcccgtcgcagcgcgcagtngtgcgcacgcaccactatcaattgttgagatgtgggataggaataacgtcaacggacgtcggcgtctaatgtagttaggaccgcctgacccgcgcaggggtcgtttagttgtgagtgggtgagttaagaccatagctaagtataactcgcatccgacacgggaccaccaagcgaggcaacgtggtggacagcggcgtgaaagggagtgagtgcgataattgcgtgaatagagggggaccgtcggatgagggggccgcaaagagtatgnggagagaggggtagagaagatgcacataataaagctatatttaatgtaggattggtctactatattantaggtgtgggtgatgcgaacgtcccagggtctcaggatgaataaaatgtgtggaggggtgaggggtggcggagctagggccaacacgcgaagacagagaccgcgatattatagtgtgggggaggggaggagggggcaccctaatacgcgataacgcnggctcgccgcgggggagagagccctcgccagagaactatgaagggggggggtgtnttggtcgggggtgaacaaaagggangntgtgtgtngtgnggtgggnggcgccgggggggagcgggggaagggacaaacccaaca

SEQ ID NO: 5730 - DNA, 580 bp, Glycine max
  misc_feature (169)..(169): n is a, c, g, or t
  misc_feature (192)..(192): n is a, c, g, or t
  misc_feature (239)..(239): n is a, c, g, or t
  misc_feature (277)..(277): n is a, c, g, or t
  misc_feature (291)..(291): n is a, c, g, or t
  misc_feature (317)..(317): n is a, c, g, or t
  misc_feature (331)..(331): n is a, c, g, or t
  Peptide Sequence Number=SeqID_8505
  Probeset Number=SeqID_15509
agagagagagagagagagagagagagactcgtgccgaattcggcacgaggttaaccaatttcgttttgcgcagtgcaagttcgaatcaatggccagcgctcagctcacagcaatagcgtcatcaatctctacagcgtcatttgaagggcttcaaccttccactgttcantttgcttccacgggcagaattanaattggcaatctctcccaaaggtccttccagggcttggttgtcaaanccaccaccgttgttgcccccaaatacactgcgataaancctctgggagatanagtgctaataaaaattaaagaaccanaagagaaaactaanggtgggattttacttccatcaactactcaaacggaacctcaaagaggttaagtagttgctattagaaaaagaaagacagtttggaagaacaatgtagagattagtatgaagactagtacacaaattttttatttcgaatattcagttgctgagatagacttcgatagttctaagcatcttattgttaaaaataatgacgttgttgtgttgctgcgaacttataacatcaagaatcttaagccctttgat

SEQ ID NO: 5731 - DNA, 214 bp, Glycine max
  misc_feature (125)..(129): n is a, c, g, or t
  Peptide Sequence Number=SeqID_8506
  Probeset Number=SeqID_15510
caattatcaaattagctgtcacagttgcaatagtcaatacgcctggcaaacccttatcacttatgatgcctgcatacgtttatgcctacaagcatgggcaaaaggctgcactgaggccccagagnnnnnaaaagatgagtgcctagctctccgaagtgcttttgggtgggttccattttgttttaccaacacatttcttttggcttcatttatt

SEQ ID NO: 5732 - DNA, 372 bp, Glycine max
  Peptide Sequence Number=SeqID_8507
  Probeset Number=SeqID_15511
acttctcctgaactttctccttcttcttcactctttctctgggtttctttctggatttgaaggctgttggatcatatttcttctcaacaatgcatggctatttatagaagatatcttgcagggaaattagccaaggcaagctgcagctcgcctaggcgaattgtgtggcttaatggtgaaggcatccacttgcccaagcgagttgcttgcttagggctgaagttacatccaacttgcttgggcgaatttagggtcggaaacctttgtgaagataccattttgcccttccttttggctttgtttttgaatctaacaaacaaccatcaaaacctgctttgtcaaaatgagtgtgaatgcagaaggaacagttgt

SEQ ID NO: 5733 - DNA, 442 bp, Glycine max
  Probeset Number=SeqID_15512
aatatattacatgtttttggatggttctttttcttgagcggccgctcctgtccacggtctccttgatctcaggatctgctccttccccacgcctgcccacgaggacaaggaggcatggcggtggccactagcagcgccaggaggttttaagctcaggtgtcatgtgtggtgacgagctcatcatcgcgggattggtcacgttcggatgtgttgtgatcaagtgaacaccatggccatcgccggtgatggtgggaaggaagataagcacgtcagatcgggtgatgtgttgaaattgatgacttggacctgctggcagtcttgagtcatgcttattgggctaaagaaactgatgttgacggaagtaatgacaaacaagatggtgaatctgaaaatgtgaacacacaagatctctaagaaatgatttggtagatggcacaattac

SEQ ID NO: 5734 - DNA, 932 bp, Glycine max
  Peptide Sequence Number=SeqID_8508
  Probeset Number=SeqID_15513
acactactcaagtcctcaaatcaacctccagtccaagctactagccagcaaagacgcctcatcctcccgacgctctcccagtccctcctcgttcatgtgcggccgaactcctcgccacagcttgcccccgccaccctgccctcccaaagcttctacaactgccgccgagaggtcgcgagccctgcaccagccgtgtaatctgcacctcctcagtaattgaagcgaaaaggaggtagtatatatagctatggtttgttgctctcggcggcgagacacgccggcggccggcggtctgctcgggtcgtgcctcctcatcgccatcctcgtccaatcctcgctcctcggatccacctccctcttggccgtggacgctgctcgcacgtcggcgttcatggccatggcgccgctaccagctgttgctatggccccctcgccgtcggggctcaaggacgacaaaaggcgtgtgccgacgggtgcaaaccctttgcacaacagatgaggcgggccgcaggatcgtggcacgcacagcgaagctgctggtatcctgggtgagagggagatacagtgcgtgtatcattcagagcatgcaggctgatcaactcgcgatcgacattcgacagtgctgcgagactccgtaagcttctgattctacctcttttcttctccgcgccaagccgtgaagtcatcgatcaattgatcagctgggggtctggtcgaggagaaaggaagctgaatgagaagggtactgggctgcgcttgtgttagttagctaggtatagtacgcccttgttgttttgtagcagtatggcattcttgatgcttcaagtaaaaacattcatgtaatcatttgttgttttcgccctccggggggcttctcattttgcttcttcttcttcacgatggatcaataaatacatagttgttgcgatagg

SEQ ID NO: 5735 - DNA, 1423 bp, Glycine max
  misc_feature (88)..(88): n is a, c, g, or t
  misc_feature (935)..(935): n is a, c, g, or t
  misc_feature (992)..(992): n is a, c, g, or t
  misc_feature (997)..(997): n is a, c, g, or t
  misc_feature (1024)..(1024): n is a, c, g, or t
  misc_feature (1070)..(1071): n is a, c, g, or t
  misc_feature (1117)..(1117): n is a, c, g, or t
  misc_feature (1142)..(1142): n is a, c, g, or t
  misc_feature (1183)..(1184): n is a, c, g, or t
  misc_feature (1304)..(1310): n is a, c, g, or t
  misc_feature (1385)..(1391): n is a, c, g, or t
  misc_feature (1393)..(1396): n is a, c, g, or t
  misc_feature (1398)..(1399): n is a, c, g, or t
  misc_feature (1404)..(1404): n is a, c, g, or t
  misc_feature (1413)..(1414): n is a, c, g, or t
  Peptide Sequence Number=SeqID_8509
  Probeset Number=SeqID_15514
ccagcacggcaagaaatagacaacacagcggagtcgctgaacaatatatacagacacgtaatttatcgtatcatgtcgggagtaatantaattagtatatagtttctcagtactgatcaccggtgagtcgctaatatattcactatcgcgtctcgactatcacctctctaatctatgtcagttgattcgcgtggataagaagagtaagtgaggtatattctctcacacttgcggtcatgtcgaacagtatctagtcttgtcgatcgaccatacacacgcacacgctctagcacgcagacgcgctagatgcaaggtagcggcgaggatgtgagtagtgatataaagaaaacacgaatactcctctataagattcagtatatactcgatgatatatatagacgtatttagccaacatacgataggatagacgaatgacaagcatacgataattagaggctatctcaactacacacataacataccagaaccagacgtagagcatattagcgtactaggcagagccgttattatacttcaattaattcccatacatactcgctcgtctcatatcagtatcttgatctcattcgtctgtactacactcatccgtcgtctcgcattatgagcaagaatatattagttatacatatgataataatataactcttatatattgtcaatttaaccaaattcatctccttatatctctgtcgttcgctgtttgattaatttagtatcatatatatttattatttgtcataaattataatatttaaagttggagttagagaagagagagagaggaatacaaatcacaccatactatactctctcggggacgcacacaacacaccgaccacacaaccacactcaaaaacatcaaaaacagagacacgacacacactataacgtagaaacagagtaataccaagtanacaatatgaagagagaaagagaggcagaggtcgcacgttgagcatcgacaaatgccnccagncagctcgtggattgtattatctactgntgagatgccagcggcatcgtatcatctcgttcgacacacaagatanntaactataggtggtggacggagtaagcgatagagggttagaagaantatcataacacacacacatacttcntatttcgtgcctgacagtatagggacactacagaggcagcnncacggctgtggtacgcatcgtatatatagggttacagatctcgtgaacaaatattttccatatcactgttgtcgtttggttgattaacccgccgtgtggggacaaggaggagagggattnnnnnnnttacatcgaatatcactcaatactctcgtcgcataagtgcgacaagcattatttgttctaccctacattaagatnnnnnnnannnncnnccgancaaaaaaannttgaaaaaa

SEQ ID NO: 5736 - DNA, 548 bp, Glycine max
  misc_feature (232)..(232): n is a, c, g, or t
  misc_feature (249)..(249): n is a, c, g, or t
  misc_feature (257)..(257): n is a, c, g, or t
  misc_feature (329)..(329): n is a, c, g, or t
  misc_feature (358)..(358): n is a, c, g, or t
  misc_feature (439)..(439): n is a, c, g, or t
  Probeset Number=SeqID_15515
tgcggcaccaggcagatttagttttcaccagtgctgcatcagaaaacccattattcttgaaagaacatgtcaaggactttcctcctgcaagtcaagaagttggaggccggcgctttttcattgatatctctgttccccggaatgtgggttcatgtgtctcagaccttgagtctgtgcgagtttacgaggttgacgaccttagagaggtggtggctgcgaatgaagaggatcnccgggtagaggcggtgnagggacangcaatcagtggtgaggaaggtgagcaattccagggttggagggactcactggaaactgttcctactggtaanagatggagggctgatgctgaaggaatcangcttggtgagcttgagaagtgcttatgtgggatgggtgatgatatacgagagaaaacgcgcggagctgtggatgacgctantcggggtatggtgagataagttcgtcatggtccgatgcaacaggtagtgtgtgatgtgaacaacaacccgagctcttaggagacacgtgaaaacgttaatggtttaaat

SEQ ID NO: 5737 - DNA, 1333 bp, Glycine max
  misc_feature (1)..(1): n is a, c, g, or t
  misc_feature (42)..(42): n is a, c, g, or t
  misc_feature (85)..(85): n is a, c, g, or t
  misc_feature (162)..(162): n is a, c, g, or t
  misc_feature (204)..(204): n is a, c, g, or t
  misc_feature (206)..(206): n is a, c, g, or t
  misc_feature (212)..(212): n is a, c, g, or t
  misc_feature (293)..(293): n is a, c, g, or t
  misc_feature (336)..(336): n is a, c, g, or t
  misc_feature (519)..(519): n is a, c, g, or t
  misc_feature (523)..(524): n is a, c, g, or t
  misc_feature (526)..(528): n is a, c, g, or t
  misc_feature (532)..(533): n is a, c, g, or t
  misc_feature (881)..(881): n is a, c, g, or t
  misc_feature (1237)..(1237): n is a, c, g, or t
  misc_feature (1272)..(1272): n is a, c, g, or t
  Peptide Sequence Number=SeqID_8510
  Probeset Number=SeqID_15516
ngtaccctgttgtgcgtgcgcacagtagctggtgcgtctcgncgtgagcgggtcagcgcctgctgtctgagtgtatgtctcgggngagtgtgcccatgatgtgtggagtgacagttacgatgaccacgagtccacaggagatcgcgcggctatgacacgtangctatatccgtagtactgcagagtgttcgtactgcgcgtgtntntggtgngtaagagttccgtgcacgaatgcggctcacattgacatgtgatcgagctagagaaggaatgtacaattctctgtatgtcangtatacgtgggcgtggaccgtggcgatgagagtttgtgtgcgngtcgagggagagtatcgcagaggctgtgtggagatggtttcgatacaatatccacgcccgttgagcgaagttcggaagtaattgtatcagggtcagaggtcgcatatgtttttcatcatatcgatatcttactaaatctacaaacgtcaactcttcgacgccgactatagataggttagtggnggtnntnnncggnntaattggagataaatagtctcacgataacaatcacatcgcgaactacatcgtaagcaaaccgtaatgtgcagcgggtgggtttgggggtgtataatgtaactattatttttcataaaaatctaaacttaatacaataaacgaagacccgtgggttcttgaggatgacccggggagttggctgttaagccgagggacggagggcggttgaaatggtggaatgatcagagagtaatgttgtaattctagcctatctgtgtccacgtagcctcttggcctctaggctcatgatatcatttcagctgtagtggggttggttgaagatttattggtaagtagtgttttgtgcngaatctggagtaacgagagctctgttgttgaggagatgtgtaggcggagagagtaggacgagagcgcttacagcgtgtcggtgcgggtgggatgattggggttgggtcagagaaggtcatgtatgctgagtgtaagatagtgggagaaggtgagagagggaggataggtgttgagaggagcggatgtagccgcgcctgctgtgcaaatacctagcataatgtaaagaatggtctagaagtgacaattggggtggaagtgataaagacccattatttagaaagtgatatggtagttagcgtaaattctgaggagaagatattagtctgaggaggtgtgtgttgttctctttatgttngtggagtgtgcgcgggcgtggggaggtggagaagntggggcggtgcgcccgacgccggggccaaaggaaacaaaaccgaaaaaggaagaagacaac

SEQ ID NO: 5738 - DNA, 572 bp, Glycine max
  Probeset Number=SeqID_15517
gagatgcaagctttttatcagattgcaagattatgataaagaattataaacatatattataagaagcttcaatataatgagaaaacgagaaattattatactttttataaacaacctttaacgtataaaaggatggttaataaggcattcaagttccttagaacttttgtttgtgggagagtctcttagcttcttcccatctcttgaattcgtctcctttcaaggcgagtctttccttttcagtcatggccatgtatctaagtctgtctttctcagagaggttgaattggtttccaccatagttggtgtagttgccagagtcgaatccacttccactggagaatctttgggcttcttgccatctcaagagttcatcacccttcaaagcaagtctttctttttcgctcatattcatgtatctgagtctgtcttgttcggaaaggttgaattggccgaattgattaggatgaacgtggccaatattgccaccgtagttgtagccacctccagagactcttctagcttcgtgccatctccagagatcttcttggttgagattgagtctttcttgc

SEQ ID NO: 5739 - DNA, 1479 bp, Glycine max
  misc_feature (1)..(1): n is a, c, g, or t
  misc_feature (22)..(22): n is a, c, g, or t
  misc_feature (47)..(47): n is a, c, g, or t
  misc_feature (61)..(61): n is a, c, g, or t
  misc_feature (63)..(63): n is a, c, g, or t
  misc_feature (65)..(65): n is a, c, g, or t
  misc_feature (69)..(69): n is a, c, g, or t
  misc_feature (106)..(106): n is a, c, g, or t
  misc_feature (108)..(109): n is a, c, g, or t
  misc_feature (111)..(111): n is a, c, g, or t
  misc_feature (216)..(216): n is a, c, g, or t
  misc_feature (240)..(240): n is a, c, g, or t
  misc_feature (267)..(267): n is a, c, g, or t
  misc_feature (339)..(339): n is a, c, g, or t
  misc_feature (347)..(347): n is a, c, g, or t
  misc_feature (389)..(389): n is a, c, g, or t
  misc_feature (437)..(437): n is a, c, g, or t
  misc_feature (628)..(628): n is a, c, g, or t
  misc_feature (962)..(962): n is a, c, g, or t
  misc_feature (1040)..(1040): n is a, c, g, or t
  misc_feature (1091)..(1091): n is a, c, g, or t
  misc_feature (1276)..(1276): n is a, c, g, or t
  misc_feature (1286)..(1286): n is a, c, g, or t
  misc_feature (1404)..(1404): n is a, c, g, or t
  misc_feature (1412)..(1412): n is a, c, g, or t
  misc_feature (1479)..(1479): n is a, c, g, or t
  Peptide Sequence Number=SeqID_8511
  Probeset Number=SeqID_15518
ngggtgggggtggctttgtgtntagtgcggggggggcgctcaacacntacacacacaaatnangnacanagagagacgaatacatagagaatatacccaaatattntnnantattcaggtgtgcgcatcaatctcactcacctgagtgcgcacgtgtctgtggactcacactcacatatataactagtagttaataggtgctccgtcgtgggtgtngtgtgtgtggggtggagcgcacgncatcatatagcccgggagaagaggttngtactttgtgcatcatcttgtgtgtgtactgttggagtcatcgcaatcgagcgcgaagtgatacatgactgnctcgaagntggcggatctggtgtgctgcataaggctctgggctgtgatgnttctactactgtcgctgcttctctgttcgatctcattacatactcgcnctactctctccacactatcgatcatctcacagacctctctcatcctgacacgacccgctgcgcttgctctgcgataggcatgtgatacagatgcttatagagcaacagtgactgaaatattgattagcacggaatgtgtcgtgcgcccagccacacacatctgattactgatccgttcgcatcctaacctntcatcacgtcaacttacatcctagcgacaatctctccaccgtacaatagccgtgagcgcgccgcagcctatgactatataagattgagaagtactaagagtacagataacaacaataggtcagagcacagacaccggagcgaagtcagactaccagctctcatgtggaatgtatggatatgtaggaacgactatcacgatcagctcaatatcaatatacagcgtgtgtgagatggcgacggatagatagtagagaagtatgagatgaatcgagccatatctgtgcgatctagccatgtgttactagtgatgttgtcactgtcatcagccgcacnctcgacttaacacacatgagacatacactactcgcgctcacgcggtatccagatgtcgatgcgtatccatacctccgncgcacggcgatactgctcagtcgtgacgacttctaccactcatctatgtgnaattatgtcacagtcgtatactgcacgtgccgacgcacgcgacgtacagcgagatgaggaagcgatccatattccaactctcgtatagacacacgagctagaacgagcgacaaacggacatcacgtgtcgcatgcctctcacagagtcgcacacgtgcggcatatctacgatagatacaacagtnctcgatacantgatcgtcttcacacgatctgcgtactctgcgataggatcctatctgatctcagactctgatatgtagtctctctacgtctaagtgacgtgtgtatgattgactcgcacctgcataancactcgcncatcgcgcagtcacgcatgtctcttcatatcaccacgccactctgctcacacttattcgtatagcgn

SEQ ID NO: 5740 - DNA, 289 bp, Glycine max
  Probeset Number=SeqID_15519
atacatgaacttgttaaacggggatgttgatcagacgaaatttggaggggatactccttacagcattatgtatggtccagctatttgcggttacagaaccaaaaacgttcacgctattcttacctcccataacacataccatttgataaagaaggacgttccttgtgagactgaccaacttactcatgtggactcgataattctacatgccgatgcaacctacagaatcctgattgttgatgtgtggaagcatactggtcgcctctactctgattgggatcttctccct

SEQ ID NO: 5741 - DNA, 181 bp, Glycine max
  Peptide Sequence Number=SeqID_8512
  Probeset Number=SeqID_15520
gccgacaatacactatgatgttagccgcctacctccacctcggagccaaaaactgcaacttacagatggaacgctacatcatgaagcgccgccacgacggaaactgaacttttctggaactctctttgatcatgtcggtaaaaaaattaaatgccaatggatgcttgaaaatgcaatagct

SEQ ID NO: 5742 - DNA, 423 bp, Glycine max
  Probeset Number=SeqID_15521
actagcaaccactctgagacggcgggccgcggagatggcagggtacagagtggaagatgactatgattacctcttcaaagtagttcttataggcgactccggagtaggaaaatccaatctcctatccagattcaccaaaaacgagttcaacctcgagtctaaatccaccattggggtcgagttcgccactcggacattaacagtcgagggtaaggtcatcaaagctcagatttgggacactgctggtcaagagaggtaccgtgccatcaccagtgcatactaccgtggagccgttggcgcactcctagtatacgatgtaacccgccgtgcgacgtttgagaacgtagaccggtggttaaaggagctcaagaaccacacggacccaaacattgtggtgatgctcgttggcgacaaatctgatct

SEQ ID NO: 5743 - DNA, 1718 bp, Glycine max
  Peptide Sequence Number=SeqID_8513
  Probeset Number=SeqID_15522
aactcaagaactactcaagatcattggaagatactgaggaatgctagaacagaagaaacttaaatgctttgaaacaccaaatatttcaaaaggtactagaggaaaaatgatcattgatagtcgaattggaaacctttttacactgaagatagagttcaagactatgaacactttatgaaccaaagaagaaccaagagaacacgaaagatggacgaacaaaggtacccttggaaaagttatgcttagtagatggatggaaaaacaaataaacatgatattaagacgagactttgacttaaacacatggagaacacggacatcatactctaacaactaaacatatatgggaaaaaggtaccattggaacagttacgcttagtagacggatggaaacaaatgaaacacgaccacggaactgatatagagaacacggaacatggatatcataatacaaatgctaaggatgaatgaagaaaggtaccattggaaaagttatgcttagtagatgaacgaagccagtcaacatgatattgagacaagaaaaactgacttaaacacatggagaacatggacatcatacttttaacagctaaacatatatatcggaaaaaggtaccgttggaacagttatgcttagtagatgaatgaaacaatcaacgctataagcttaaaaagctaaacgaagatatttcaagactcagtaacaacaagaagatgggggaaagaacgaaccattataagttacattaatgctaaactatttcaagaaggctaatgctagaagatataaacagcaaagatacaatctaaaatctatgaatacaagtaaaatgctactcaattaagatttcaggctattttggggttcaaagatattttgaagacttactctactcaagaaggaagacaaagacaatcaagatattcaacacgacgcactattcaaacagcaaagtacaaatcaaactcaagaatcatttcactaaacacgcaggtctaaatgttcataaaactcaagacgaaaagttatcaaagacgaagaagactttaagaggaacctgcacagacaataccaagtaaataacaacataaatgaacgcgctaggcaagatcaatcacaatcagaagacggcaaacagaagactactattaaagatctattatacataggaacaaatttattgaagaaagaacgagactcttacagaagaaggatctgaaaacgaagaagacttacaaggctctgaaggttcggaaggctcggaaggctcacaaaggctggtggcatggttcagaagggtcaggtwatacaaggatgttggtttcagttrkaaagttgaaggtagaagggtcaaatcttckaagctcaatgagtaaagactgttcaaacactccagttaaccagatgtccagagatgagccagatgggtcagatagcagcgatgggccagcggacaggtttcarggatgrgccagtggtcagattaaccagatgggtcagacgcctgcgytagtccgatgtgagctggaagagttggaagagcytgaggaagaagaaagcgtsctggaattraagatggatgggggaagtatcagacgaagctatatactatataacaagatttgaacgtattacgattacttatacaatatataacaaatatatacatatatgtaaagcccccaccaccacaaaaaaaaaacaacaaaacaacccc

SEQ ID NO: 5744 - DNA, 559 bp, Glycine max
  misc_feature (530)..(530): n is a, c, g, or t
  Probeset Number=SeqID_15523
gccccccatatcgtatgcagtttattcctgcaacagtcagtttaaatatgcgactttttgtgatgccaacattggggtttttgatgctgaaagcttgaggctcagatgtcgtattgcaccatcaatatgtttgtcaccggcagctttaagtggaagtcaaggtgggtatcctcttgtggttggcgcccatcctctagaacctaaccagtttgctgttgggctgacggagggatctgtcaaagtgatagacccgaccgaatcagagggtaagtggggacccctcccccccttatggccaatgaaatattgaagggtagggcgggttcttcttttacaccaagcacccccattgttgttcaggttcaaaaataagttcaaaggttttttactaggttattttccttcggaaatggaaccagtttaaaggtttgaatttgatttccccaaaaggtttccttcaaaattaaggcagttgggcaaaaaaaggttaaaggtttaacgtaagattcgggtaaacccttgatttattnctagttaataactcaattttattgtttaa

SEQ ID NO: 5745 - DNA, 1498 bp, Glycine max
  misc_feature (211)..(211): n is a, c, g, or t
  misc_feature (711)..(711): n is a, c, g, or t
  misc_feature (873)..(873): n is a, c, g, or t
  misc_feature (898)..(898): n is a, c, g, or t
  misc_feature (952)..(952): n is a, c, g, or t
  misc_feature (1057)..(1057): n is a, c, g, or t
  misc_feature (1123)..(1123): n is a, c, g, or t
  misc_feature (1185)..(1185): n is a, c, g, or t
  misc_feature (1192)..(1192): n is a, c, g, or t
  misc_feature (1300)..(1300): n is a, c, g, or t
  misc_feature (1310)..(1310): n is a, c, g, or t
  misc_feature (1436)..(1436): n is a, c, g, or t
  misc_feature (1496)..(1496): n is a, c, g, or t
  Peptide Sequence Number=SeqID_8514
  Probeset Number=SeqID_15524
cccccctcctctcccctcttttattattaatttctacagacttattctaccaccactctaattaccacacattgtgaataccgctggctcccctccctcgtaggttccgtacgtgatattcgcacacagcctccttccttcttgtctttgctgtgtttcgcattacttcgtctggcctgtatctagtgccacacgcaaacatcaatagtangtaccgcatagcaaccactatctacacatagtcacatacatactagtatgtgccatggtcgtggctcatttacagtactcatgtgcaccataacttcacaagttagcgcgatactgtcgttgcactacgtgaaccacatcacctgacctctcatcattacatgcacgcatccacacaatcattggcctctcgcatcaatattgattcaactcgacttcgagcacataaccatataaacggccacttacgttagacaagacgtttaacatagcgccactcactcactggatcttctcgccgggagatagcgtcacgtctgccgtcctctctacctccaaaccgcaaaacaggaaccttggattccacgactacgctgaatacaaatcctatcaccacctaccctccacacctacacctcgcataccttaatcatataacacaacacagggctccacaccgctacctcacagcctttgctccttcctgacttattataccgntacgacttttcgtcaatcacgccgctacactcgcacatggcttctacactatacagcgtgagtccgcgaacctagtgtgtctaagtgtcgaacataacttgcacacctctccgccactttcgcgtcgtgcaattctgcataccgctcgtctacaattgtagncacacactcactcacatattcggcncgacagagtagcactcatatatctactcctgtgctcgtatgtgtcctacgcatntgctacgtcgcgcactatgtgtcagctctgcgctctcaaccgacacacactaactacgtcgcctcgtatgcacacacccgctcacgcgcacagccgcactagatnctactcatatcatacacgcttcatctcctccgcacatctcattatcttgacgtacatcatcgcatncgccctctactcactcttcatatcgctctgtaccctatctcgaatctctgcgcgacaggagnatcacgncataccgtttatatatatatgtatcatcatgtacgcatcgaagtgataatcgatatgctctatttcatcatcatacgactgcacatcacggatggagatcatcgactnctctcaacancgctcaactctctgcactatcgctatgtcctattaatagatacctactagacagatacgaacaacacttatagatgagcagtggctagatactatactcgatacatacgacgtcgtcacagacacnctcacacaccgtagtatacacgttatgctgtcctacgcatgcacacacatgtctctcacnag

SEQ ID NO: 5746 - DNA, 605 bp, Glycine max
  misc_feature (334)..(335): n is a, c, g, or t
  misc_feature (601)..(605): n is a, c, g, or t
  Probeset Number=SeqID_15525
tccaccccgcgcggcggccggtctataactattcgatccccccgcgctgcctgaatgcaggcaccagcgaagggacgctagacacatgacacagacaagacagtgccggagagagtgagactgaaaccgatatagactttgattactagcctagatgagacctgagttgtggtgagctccatcgatgacacaccatgtgcttgtttgctaacaatgaggttcaacgcatgcctgagaggaacatacgatcgctgcccgaatgaatggaatggatttacaagctcacagatcactgacactgtgggatcattacgggaaaaaaggtgaagaatcnngatcgtacgaacgctttatattcctaacccattcgtgagaagttgcaggtttacatatcagtatccagccattgcctgaagctttatatatgatgtactttctaacatgaaaatttctggactgattcataaagaaatggatcagcttcctttttttctgagggatcttgtagaaataaagacttgaagggtgaaaatataccttttttttacttcgctaagaatattatattgaatattttttcctacccttgtttttaaaaaannnnn

SEQ ID NO: 5747 - DNA, 1862 bp, Glycine max
  misc_feature (5)..(6): n is a, c, g, or t
  misc_feature (21)..(23): n is a, c, g, or t
  misc_feature (28)..(28): n is a, c, g, or t
  misc_feature (36)..(36): n is a, c, g, or t
  misc_feature (44)..(44): n is a, c, g, or t
  misc_feature (69)..(70): n is a, c, g, or t
  misc_feature (88)..(89): n is a, c, g, or t
  misc_feature (95)..(95): n is a, c, g, or t
  misc_feature (99)..(101): n is a, c, g, or t
  misc_feature (136)..(137): n is a, c, g, or t
  misc_feature (146)..(146): n is a, c, g, or t
  misc_feature (173)..(173): n is a, c, g, or t
  misc_feature (184)..(184): n is a, c, g, or t
  misc_feature (189)..(189): n is a, c, g, or t
  misc_feature (195)..(195): n is a, c, g, or t
  misc_feature (220)..(220): n is a, c, g, or t
  misc_feature (243)..(243): n is a, c, g, or t
  misc_feature (352)..(352): n is a, c, g, or t
  misc_feature (354)..(354): n is a, c, g, or t
  misc_feature (390)..(390): n is a, c, g, or t
  misc_feature (441)..(441): n is a, c, g, or t
  misc_feature (528)..(529): n is a, c, g, or t
  misc_feature (587)..(587): n is a, c, g, or t
  misc_feature (617)..(617): n is a, c, g, or t
  misc_feature (692)..(694): n is a, c, g, or t
  misc_feature (696)..(696): n is a, c, g, or t
  misc_feature (698)..(699): n is a, c, g, or t
  misc_feature (701)..(701): n is a, c, g, or t
  misc_feature (717)..(718): n is a, c, g, or t
  misc_feature (724)..(724): n is a, c, g, or t
  misc_feature (729)..(729): n is a, c, g, or t
  misc_feature (736)..(736): n is a, c, g, or t
  misc_feature (771)..(772): n is a, c, g, or t
  misc_feature (788)..(788): n is a, c, g, or t
  misc_feature (791)..(793): n is a, c, g, or t
  misc_feature (817)..(817): n is a, c, g, or t
  misc_feature (847)..(848): n is a, c, g, or t
  misc_feature (850)..(850): n is a, c, g, or t
  misc_feature (852)..(853): n is a, c, g, or t
  misc_feature (877)..(877): n is a, c, g, or t
  misc_feature (898)..(898): n is a, c, g, or t
  misc_feature (953)..(956): n is a, c, g, or t
  misc_feature (959)..(959): n is a, c, g, or t
  misc_feature (967)..(967): n is a, c, g, or t
  misc_feature (981)..(981): n is a, c, g, or t
  misc_feature (1020)..(1020): n is a, c, g, or t
  misc_feature (1027)..(1027): n is a, c, g, or t
  misc_feature (1059)..(1059): n is a, c, g, or t
  misc_feature (1073)..(1073): n is a, c, g, or t
  misc_feature (1112)..(1112): n is a, c, g, or t
  misc_feature (1122)..(1123): n is a, c, g, or t
  misc_feature (1128)..(1128): n is a, c, g, or t
  misc_feature (1134)..(1134): n is a, c, g, or t
  misc_feature (1140)..(1140): n is a, c, g, or t
  misc_feature (1144)..(1144): n is a, c, g, or t
  misc_feature (1151)..(1151): n is a, c, g, or t
  misc_feature (1194)..(1194): n is a, c, g, or t
  misc_feature (1219)..(1220): n is a, c, g, or t
  misc_feature (1222)..(1223): n is a, c, g, or t
  misc_feature (1225)..(1226): n is a, c, g, or t
  misc_feature (1276)..(1276): n is a, c, g, or t
  misc_feature (1312)..(1312): n is a, c, g, or t
  misc_feature (1356)..(1356): n is a, c, g, or t
  misc_feature (1362)..(1362): n is a, c, g, or t
  misc_feature (1411)..(1411): n is a, c, g, or t
  misc_feature (1436)..(1437): n is a, c, g, or t
  misc_feature (1449)..(1449): n is a, c, g, or t
  misc_feature (1536)..(1536): n is a, c, g, or t
  misc_feature (1579)..(1579): n is a, c, g, or t
  misc_feature (1607)..(1607): n is a, c, g, or t
  misc_feature (1768)..(1768): n is a, c, g, or t
  misc_feature (1811)..(1811): n is a, c, g, or t
  misc_feature (1846)..(1846): n is a, c, g, or t
  misc_feature (1862)..(1862): n is a, c, g, or t
  Peptide Sequence Number=SeqID_8515
  Probeset Number=SeqID_15526
ggggnnaaaaaaaacaccccnnnccacnaacacaancccccccnccgcgcccgccccgcgcgccagaannccccgccaccgccgcggnngtcccncggnnnctcacccatagcaataagtattgttgggggagccnnaaacgaggnagaccaagagaataagacctcactacncaaccacacanaatgngacacnggcgctcttgtcgtatgcacacagngactcatactttctcttatactntttctgtctgtctgtgtgtcacatgttagtgtacactaactcaccatatatatctcttaattcctcttctcttatcacaacacctctgactctctcttttctgctaaananaaaaaaaccacttacatcatgtacttctacttctgntgtgttctgtctatttatatttcatctattatattatatttcaattattanctctatatctcacattcacctcctccgctgttcgtttccctaatattccttatatctgctattctcactcttggccttacttactanntcgtattatatatgcaagtgctactacatcaccactctggatcgatctgtcatcatanatacactttcgtcatgtgcgtctccgcacnatctactgtatgtatattttatgattattttgttatctgtctactacgtactgtgcaacggcggcgtataaaaannngngnngnctgacgcgttcctcgnnctcgcngcacnattccanccaccacaatctcttcatgaatatagtagtgtggnngggtggccaacaccgntcnnngggtcgtgatataatatacgactntctgtcgatgtaattcactactatatatanncncnngcacaccggtatcctataattcanatactaaacacaatgaaaganccactcacccgccgccatcaacatattaatgtgatacgccatcgtcgacacactnnnnatngactcacncgcgctcgcgatgngtacgacatcgcctccgcgcgcacacatacccactatcncctcgancactaaaaattcattatcattcaatacaaccncctccatgattggnttatggtaattccttctgagatagctcacgatcgcgcanctactatacnnctcgntcagcnctcctnctcngcctccntagccgcacatcttcctctcctattctatctcttgtgtatgtnttcctccccccccccccccttctcnncnncnncacacacccccagccaggcacaccgcggccgtcgctgcccccgcctcacncaccgacacgcagtgcatgctcagacattaccctgntagcgcgaaccacacaccctactatgcgcctcgtctctcatgcncccgcncacccactccggcactcctcgcttcatatcccacagcattcttctcgcncgccggcatcacacacgctgctcanncatcacaccacnccctgccaacacaacacatacacgccatcgcacacgagataaacgcatcggcctgtctgtatcacacaaatgacatttatgtcggcntcaccgactaccacatatgctaactgtataacataaccaacangtgcgttccctcgtagtgtctcttacancgccctctctctcccccactatactcctgccttcactctcatcactattcgctatctatcacatccctctcagcgtctgcacacacgtacactaactctcttcactcataatcaatcaatacagtgctgtcatatgaatagaagaaacatatataccacgntgtcaacgacaatacaccacatcacaccacatcctactacgtntaattgttattaaatcatactacatccacccatcnaccgctcccaccatcn

SEQ ID NO: 5748 - DNA, 481 bp, Glycine max
  misc_feature (74)..(74): n is a, c, g, or t
  misc_feature (79)..(79): n is a, c, g, or t
  misc_feature (128)..(128): n is a, c, g, or t
  misc_feature (150)..(150): n is a, c, g, or t
  misc_feature (201)..(201): n is a, c, g, or t
  Probeset Number=SeqID_15527
atcatcacccccacctcttgtatttctctgttttcttcctaaactacatacaaccttttatttgtgtcactcanatttngttgttagaaaatgaagctgccacttcttgtatcttttccgaccacagntaacaggagaatggtccctccnacacatggtacaggtaacacccaacaggtcaagagtaagacccccattccntcacaatcacggccaaaatcttttaagaacactgaagggcccctaagaaaaatggcccagaaggggggcgcccttgggtggaaataccccaaatccctttaaaaaatttttgggaaaaaaaaattacctttttatcctttttccccaaaccaccccaaacaatttgggggggtttcttttggggcctttcccaaaagggggaaccccctcggacccccccaaaaaatttgggggaggggggggggtcaaaaaaaaaaaaagggatttccctttttttttt

SEQ ID NO: 5749 - DNA, 452 bp, Glycine max
  misc_feature (433)..(433): n is a, c, g, or t
  Peptide Sequence Number=SeqID_8516
  Probeset Number=SeqID_15528
ccccccccgtatggctgtcgaaatcgacggctggcgcgaccagcccatcgctggcgacgaggtgcttcagtgcagaggatgaacagcacgctagctcagtgactgagcttcgcagcgaaaaggtcgacagagagcagatggcgcgtgacatggaagccatcaatgaagctcgccgtgcagaggccgaacgtcgcgaggctgaagaggccgctgctaaggccatcaagaatggtgaggaagctgtagtcgccgagaagaaagaagctgggcccgaagttgtttctttcatcatcaagggtgatgtgtctggctctgttgaagcagtcatcgactccgtctcggcactcggcaatgcagaagtatcaacgcgtatcctccgccacggtgtcggcgcgccatctgaatttgatatctcgcacgccgccgacgcaanggggcacatcatcaatttc

SEQ ID NO: 5750 - DNA, 715 bp, Glycine max
  misc_feature (295)..(295): n is a, c, g, or t
  misc_feature (297)..(299): n is a, c, g, or t
  misc_feature (601)..(715): n is a, c, g, or t
  Peptide Sequence Number=SeqID_8517
  Probeset Number=SeqID_15529
gcagttcaattccaatatattccattctctctgtgtatttccctacctctcccttcaagatgcagatcttcgtcaagaccctcaccggcaagaccatcacccttgaggtggaaagctctgacaccatcgacaacgtcaaggccaagatccaggacaaggaaggaatccccccggaccagcattgtctcattgtggaagggaaagcacttgaggacgttcgtacccttgtttgacaacacattcagaaggaagattttttcccccccccccccggagggaagcaggggggggattncnnnattcttccttaaaaaacctccccccccaaaaagacaataacaccccaaacgctgggagggccggggcgtccctcgataaccgccacaggcccaggacccccgaacatggggggatactccccccccccccccgaagggcttattcgtggacgcagaaaaagagacccagcacacacccgcgtctcctctcgacggggtaaagatatttccaaaagagcataagacggtttgctcacgggcgcgacgtggggctatggacgagaggttaccgcaacgaccaaagcgcttctaatatcactccnnnnnnnnnnnnnnnnnnnnnnnnnnnnnnnnnnnnnnnnnnnnnnnnnnnnnnnnnnnnnnnnnnnnnnnnnnnnnnnnnnnnnnnnnnnnnnnnnnnnnnnnnnnnnnnnnnn

SEQ ID NO: 5751 - DNA, 1444 bp, Glycine max
  misc_feature (12)..(12): n is a, c, g, or t
  misc_feature (33)..(34): n is a, c, g, or t
  misc_feature (46)..(48): n is a, c, g, or t
  misc_feature (50)..(50): n is a, c, g, or t
  misc_feature (78)..(79): n is a, c, g, or t
  misc_feature (87)..(88): n is a, c, g, or t
  misc_feature (110)..(110): n is a, c, g, or t
  misc_feature (146)..(146): n is a, c, g, or t
  misc_feature (151)..(151): n is a, c, g, or t
  misc_feature (157)..(157): n is a, c, g, or t
  misc_feature (215)..(215): n is a, c, g, or t
  misc_feature (274)..(274): n is a, c, g, or t
  misc_feature (324)..(324): n is a, c, g, or t
  misc_feature (492)..(492): n is a, c, g, or t
  misc_feature (667)..(667): n is a, c, g, or t
  misc_feature (679)..(680): n is a, c, g, or t
  misc_feature (692)..(692): n is a, c, g, or t
  misc_feature (694)..(694): n is a, c, g, or t
  misc_feature (697)..(697): n is a, c, g, or t
  misc_feature (724)..(724): n is a, c, g, or t
  misc_feature (796)..(796): n is a, c, g, or t
  misc_feature (839)..(839): n is a, c, g, or t
  misc_feature (960)..(960): n is a, c, g, or t
  misc_feature (1303)..(1303): n is a, c, g, or t
  misc_feature (1345)..(1345): n is a, c, g, or t
  misc_feature (1347)..(1347): n is a, c, g, or t
  misc_feature (1394)..(1394): n is a, c, g, or t
  misc_feature (1405)..(1405): n is a, c, g, or t
  misc_feature (1444)..(1444): n is a, c, g, or t
  Peptide Sequence Number=SeqID_8518
  Probeset Number=SeqID_15530
gggaaaaacccngggagtagttattggtgtgtnnaagaggcgaggnnncnaacgataataggaaattaagatattttnnaaaaaaannaaaacacttctcgctcgcgcgngttgtgtggtttgtcgtcctcttcgcgtccgctccnttgtncaacanacaccgggttgcgtctgatcgtgcgatctacatatatgtcgtacggctcatcaccacnatctctttgcgtggcgggcggcacaaatatataatggcgtcgtgctgatatcttgttgntgtggggggcgaggaaggaaattatttgtgtatattttgagaaagtcgtngaaaccatacaataaatgtctgctcggacctggcagctgcgcgataaatacacaaacacgcgttgggtggcttggacacaaacatcatcgggtgcgcggagacacatagcgcgcgcaacaagattatctgtctagtattgttttgattgttgactgtatctacaacangcgtgtgttctccttcctccacacataccatttcttctctctcctctcctcggtcgtcgcttctctctcctacattatctacccacaaatacagcactcctgtgcactacgtttagtcgctggttgctgtcagcgcatatacataaataacattagctgtgtaagtaattgcggnggcgcggagaanngcagggggagananacnacagcagagcggagaaaaaaacacaanacgacatatccgaaatacatattctgtattgtcgtcccttataattaattgaattcgtgttgcgactgtgcngaccacgcatctcaccattacctacatgctgtgtgtgtcattnataatatctcatatcattcactacccacccacattctactttgttaacacaccctctcactctgtcttcccggtatattatatacacacacatgcacaaaactatatatgtttccctctancttcatcctcatactgttctgcttcgatactcactcacacgctcgccgtgtctactatcagagcctatatctatccatctcctttctctctcttatgttgatactacatcactgcacacctctctacgtcagctgtgtgctgtctctaagaccatacacctctctcacccggcttacatcacttacatcatcttactgttatcctactggtctgtcgtgtcgatactatatatatgttatgactattgtttatctggtgctctgaacacaatcctcgcacgcctccacccgactcatacaccagataatgatataagtatgtacatgcattctctattagtgncttatggcggtcgtggtgtgtgttagcatcatatgacctctncnctctctcgatgctccgctgaccgtactccacactttctcgagacatnctgcctctgtntgtgtgtgtgtatatgtatgcgtgcatcagcgatgccgn

SEQ ID NO: 5752 - DNA, 1481 bp, Glycine max
  misc_feature (90)..(90): n is a, c, g, or t
  misc_feature (103)..(103): n is a, c, g, or t
  misc_feature (106)..(106): n is a, c, g, or t
  misc_feature (165)..(165): n is a, c, g, or t
  misc_feature (354)..(355): n is a, c, g, or t
  misc_feature (358)..(358): n is a, c, g, or t
  misc_feature (361)..(364): n is a, c, g, or t
  misc_feature (553)..(553): n is a, c, g, or t
  misc_feature (927)..(927): n is a, c, g, or t
  misc_feature (1018)..(1018): n is a, c, g, or t
  misc_feature (1200)..(1200): n is a, c, g, or t
  misc_feature (1225)..(1225): n is a, c, g, or t
  misc_feature (1279)..(1279): n is a, c, g, or t
  misc_feature (1346)..(1346): n is a, c, g, or t
  misc_feature (1370)..(1371): n is a, c, g, or t
  misc_feature (1384)..(1384): n is a, c, g, or t
  misc_feature (1411)..(1411): n is a, c, g, or t
  misc_feature (1413)..(1414): n is a, c, g, or t
  misc_feature (1453)..(1454): n is a, c, g, or t
  misc_feature (1461)..(1462): n is a, c, g, or t
  misc_feature (1464)..(1464): n is a, c, g, or t
  misc_feature (1469)..(1469): n is a, c, g, or t
  Probeset Number=SeqID_15531
atatacatgagcatcagcatagtatgtaaggtgccggggcgcagtagtgctcagattcgcattggcgacgccgcggatcacgtcatgggngcgtagtcttatnggntgtgtgccggtgttggttgtggtggtgatgtgtttttatcacggcgctcgagcggtggngcgatgtggctgagagagcagagaggcgggcgagagcgggtgtgggattatgtagtgcacggacacacatggatgtgacgcaacgactgtcttgcggttgtgttcggggtgacgctaagggtgtctcgtgctcgctgtatattgttcggtgagaagcgagcggacgaggaggacgagggcggcggagcnnccncgnnnnacgtcgatctgcaactccctccccatctgttatatgtggcggcgcacccaacaaaatatagtttcgtctttttatgtggttgtggggtgcgcgcgccccgggggaggggggagaaaggtgatgtgagggtgctgttgtgtagagattgtaggggaagggaggtgtgtgtcatctcttcttttgttgtcngcgagccccgtattaggttggggtgagccccgcctcacggcgggagtgggcgccgtattttctttaattcagacaacacgcgcttctcgttcttcctcctccctcgtgtgaggaagagaaccagcacgtctgtgcaagaagtgtcttctcttgtcgctcttgcgtgggttcgtcactttatcagcgccataataaaatataaatatatagaggggtgtgcgtgcgatagagagggtagggtgaagatcactgtagcgaggacacacgcagaggagagaggtgattgtatcggctgttgtaacgtgtagtatccccgtgatagaccccactatacgccagagggaggtgttgaggggtgagtgggagggatgttngtatattaatagagagtttctccacattccgagaaacatgagagcctctttgtttatataaaagagagagagcgtattctcgctgtcgtcntataattgagggttgagaattccccgcccttccttctcctctttctatatttcctatcgctgttatagaagagaacaacaacgcgcaacacatattttccgggtatgttgtcgtttcttgccgaaagtttaaggggaatgtgttttcctttacgggttagtaatgggttgcctcgccgttcnccggacatttcgcgcgtcggccagnctcccgcgcggcggggtatccctcacctttatgtttccctaagatattccgtgntccctttctctaaccacgaccgggatgggaaagcttaacccaagcctattttagtaaactcaccgcnccttctgggtgtattccacagcgnnggctcataggtgntcttcttctctttctgcttcagtgttngnnttctctctactctcctcactttggcgtccccacccccannttccccnncntttantatcccaaacta

SEQ ID NO: 5753 - DNA, 462 bp, Glycine max
  misc_feature (384)..(384): n is a, c, g, or t
  Peptide Sequence Number=SeqID_8519
  Probeset Number=SeqID_15532
acatctcctccattctctcctctcctctcctctcctctccgccgccacctccctctcacggacctcgccgccggccatggcctcccccgccctctcctgatcagacgacaggagatccgccgtgtccgcgacggagcaggtcgccctcccgcgagccccaccacctacgccggtcgattccagccgaatctggcggcgcccagcaccctcccgtgaacgcctccctccgctccgtcctcctctccgacccaggcggactccagcagccacccaccaacagccctccccgtggcgtgcctagggtttcggcctgcgtgtcgccggcgactcttcttggccgtgatccgccacaaccgcggcgacctcgacggatctgcggcgcancagcgagggtcacttcctccgacctgcagcgaccatagtgacacggattccatctggcgcctccacggatgacgacat

SEQ ID NO: 5754 - DNA, 789 bp, Glycine max
  misc_feature (779)..(779): n is a, c, g, or t
  Probeset Number=SeqID_15533
tcgagtcagctacgtaggcccccccccggttccatttgcatcttgggtctcgatcgttgtattcctgtttcttccgtgagttgtgtgggatcgcgaggagaaatggtgtcgtggtgcggacgcagctgcgggtgcggcgccggcggcaggtaccgcaggcgctgcggggggtgcaaggtgtaccgggacagcggagagggggagacccacccccccaccactcagcctctgatcatgggtatcgcaccatccaagggacggggtggtggagggccgccggagcgcagaacggcgggggcaagtgcggcgccgactgcacctgcgacccccgcacctgcaagtgagactatcacggtggcggcgatgacacggcgggggctgcaggccctcatggggtcagaaggaatctttatctttctagctaattaataagttctagctagtatacaatattctagtagtgtggtttgctttgcattgtccgagtcagttagacagtcagccgcgtgccatgggccatggcatagcatgcctcgctctatctgctccatcgccttgctctagtggtggtagtgatgggggaacgagtaagtgcagcgagatgttgggcccgtgtcgtgtcctgctgtgttgtgtcatctccttcctgtagctcatctagcagtcagactgtgttgtgttgtgttgtgctgtgtgggccgagtgtgcagtacagcatcgggccatgcccctgttcgatctgtctgcgactttaatttgtttgtgctgtgtaaaaaaanaaaaaaaaaa

SEQ ID NO: 5755 - DNA, 1539 bp, Glycine max
  misc_feature (79)..(79): n is a, c, g, or t
  misc_feature (437)..(437): n is a, c, g, or t
  misc_feature (554)..(554): n is a, c, g, or t
  misc_feature (615)..(617): n is a, c, g, or t
  misc_feature (1062)..(1062): n is a, c, g, or t
  misc_feature (1077)..(1077): n is a, c, g, or t
  misc_feature (1079)..(1079): n is a, c, g, or t
  misc_feature (1271)..(1272): n is a, c, g, or t
  misc_feature (1308)..(1308): n is a, c, g, or t
  misc_feature (1310)..(1310): n is a, c, g, or t
  misc_feature (1346)..(1346): n is a, c, g, or t
  misc_feature (1374)..(1375): n is a, c, g, or t
  misc_feature (1388)..(1388): n is a, c, g, or t
  misc_feature (1405)..(1405): n is a, c, g, or t
  misc_feature (1414)..(1414): n is a, c, g, or t
  misc_feature (1423)..(1423): n is a, c, g, or t
  misc_feature (1443)..(1443): n is a, c, g, or t
  misc_feature (1497)..(1497): n is a, c, g, or t
  misc_feature (1499)..(1499): n is a, c, g, or t
  misc_feature (1502)..(1504): n is a, c, g, or t
  misc_feature (1515)..(1516): n is a, c, g, or t
  misc_feature (1530)..(1539): n is a, c, g, or t
  Peptide Sequence Number=SeqID_8520
  Probeset Number=SeqID_15534
ctcgcacacactgctcgtacattcctgtcccataggcttgctctcctgcgtatttatctgtgatgcctttcaatgcgcngtgactacttcggtgtgctggtcacaacatcacagcacagaagcaagcgcctcggcggcgctcaggctgcactcacgcacgagtactcgcgtctctctcacccctcatgtcataccgctgcgctccgccgtcccaccacgccgtgctcctcccctacctcccgggccgtgcccctgtccgcacccatgcctcttccggcgccgcagccgttctactgctgttggcaccgaggcggtgttggcggagcgcgggccaggctagccgcgtgccggtggccggcgcaggcgctccgtcaccaccacgtccactcgccacgcactcgcacgtcgcacagtgttgctcgcggcggtggctccgngctcctgcgtctctggtccttctgcgggtcgttcctcaggtgtgtccgtgctgtcagaggtccctatggctcggaccagtacgctcgcagttcgtacgtggttctgttggtgttgcngctgcgctcccactccctcactaccgcgctactagttgagtgtgaatgttcttccccctcnnnctgttgcgcggttggcgcggtgtgctcttatatagttgtgcaccgcgcaacgcgctcgctccgtcttcggtgagctcttcgtttggcgcggggtcggccgcctccacgtcgccacgtgttgtcttccatcggcgcttgtgccccctattttagatttgtccgtgggccgcggacgtctcatccgtgcccctccctgcctctcgttctttgtctctctctgcacccaatattcgtcacacgccactcgcgctccgcgggccgcacgcggttgttggaccactcccccccacgcgcaccggccctccgcccgcccccgccgcgctctgggccgcgcgccggcctgcggggcagtcgcgcgcgcgcgggcttctcccagtgtggtgcatatccaccagcgagttagagctcccgccgcacgttgccatgccgtgtttatgttctactntcgctctctctcacntnctctcgttgtcctatgcgctgtctggtataattgcagggagggtggcgtgcgtcgcagtggtgcgtccccctgcctctccctctcgccctgctcaaaacagacgtctgtccgctctggcgcgggtggcgcgcgtctgagtgagcggtgcgctgagtccctcggttgtcgtgtgggcggcgcgggctgcccgnnccgccgtgctcgtgctcgcatatataactgcctcgngnactttgctccctaggtgtgtaggggcgtctgttgtnccgaaaagaaacatgcatcgtgcgttgnnccgtctggccgcncccccctagtgacccgnggagggggnccggccctnccgtgtggcggtcggtttgnagtgtgaatgtaacctctcgtccgcgttctcctaccccctatcgtaccctaacncnccnnnccccccccttnncccccccaattaannnnnnnnnn

SEQ ID NO: 5756 - DNA, 470 bp, Glycine max
  Probeset Number=SeqID_15535
aaaaaattctctcctccatcaaaactctccaaagatgacaaccgtagccgcaacaggcatcaacgtcgcgactccacgactggtcattcgaccagcggctcgtctatacgccccggtccgtttgaattacccgtggaaattcggttcgatgaaccggatggttacgtcggtgaaggcgacatcggaaggagggatgatatcggataaggtggagaagagtattcaggaagcgaaggagacttgcgctgacgatcctgtgagcggagagtgtgttgcggcgtgggacgaggtggaggagctgagcgccgcggcgagtcacgctagggacaagaagaaagctggtggatccgatcctttggaagaatactgcagtgataatcctgagactgatgagtgtcgtacttatgacaactgaaaatgtttttgatgtctgaaaatttaggtaccggtcagatcaatttttctatctt

SEQ ID NO: 5757 - DNA, 1453 bp, Glycine max
  misc_feature (63)..(63): n is a, c, g, or t
  misc_feature (112)..(112): n is a, c, g, or t
  misc_feature (114)..(114): n is a, c, g, or t
  misc_feature (146)..(146): n is a, c, g, or t
  misc_feature (157)..(157): n is a, c, g, or t
  misc_feature (179)..(179): n is a, c, g, or t
  misc_feature (199)..(199): n is a, c, g, or t
  misc_feature (232)..(232): n is a, c, g, or t
  misc_feature (236)..(236): n is a, c, g, or t
  misc_feature (248)..(248): n is a, c, g, or t
  misc_feature (287)..(287): n is a, c, g, or t
  misc_feature (310)..(310): n is a, c, g, or t
  misc_feature (316)..(317): n is a, c, g, or t
  misc_feature (334)..(334): n is a, c, g, or t
  misc_feature (369)..(369): n is a, c, g, or t
  misc_feature (438)..(438): n is a, c, g, or t
  misc_feature (476)..(476): n is a, c, g, or t
  misc_feature (480)..(480): n is a, c, g, or t
  misc_feature (526)..(526): n is a, c, g, or t
  misc_feature (534)..(534): n is a, c, g, or t
  misc_feature (543)..(543): n is a, c, g, or t
  misc_feature (549)..(549): n is a, c, g, or t
  misc_feature (559)..(559): n is a, c, g, or t
  misc_feature (565)..(565): n is a, c, g, or t
  misc_feature (592)..(592): n is a, c, g, or t
  misc_feature (633)..(633): n is a, c, g, or t
  misc_feature (662)..(662): n is a, c, g, or t
  misc_feature (722)..(722): n is a, c, g, or t
  misc_feature (756)..(756): n is a, c, g, or t
  misc_feature (951)..(951): n is a, c, g, or t
  misc_feature (1287)..(1287): n is a, c, g, or t
  Peptide Sequence Number=SeqID_8521
  Probeset Number=SeqID_15536
ccacgccgcgtcgcttataatcatagctgcgggtgtatagtgcggatcagcgtaggactatanaatatatacgttggtgtctggtgtagatgttagtaatgtccgagcgtantnatagccgacgtcgatgcgccggcgtcatccgnctcgcgtctcnggcgtcgtcccttgttgctagnaaataaccgcgctcactatntattaaactataccggctacatttccgcgcccngccnccggcgctcatnatatcgttactactacgtatacgcgtaccgtgttctcanataataatatgacttcatctcgnctcggnngtatagctagcggacgncgtatcacccggacgggatgtcagagggggaatgnctatagatagaatctcgttcagtgcgtctattacaccgctccatcattgtcaaaaatcacgaatataancaacagagctatgaccacgactatatatgttgtatacnacanccgcgatgtattcttaggctatcagcaccgcactaagagtacgcgngtttgatnaatatacancaacanccagtcagcngcgcgngagaatcattcacatttgtcaataatnagggggggtgtatacattccacccactacacagacacgacncggcgcgtgtcgccgcgccaccacccacncctcacctgacaactgatagccatcacatcttgcgactacaccactcgtgcgccgtacgnttattcatcatcatactatgctatacaacactcncccccaatggcgcacgtcgtcgtcggcgcgcgcgcgacacgcaactagctgtaatatctgcacctatgataagcatatccactcttcccgaccacgctcttactgattccgattcgcgcactccgtacagtacttgacgcaagatatacagtcacgcagcacgagtctatatagtatattaagatatatataganataccacacattacatcacctatcatccatagcgcgccatcgtgccattgattactagatgcgaatggaacgcacccagtacttacctataatacttgtcattgattagatgcgagagggtatggcgtatggcatgcccgcgtcgcagccgcactccagcttcagatagtgtatatctagggtacgctgatcttttatatacacaatgttgtgaatcaagatctacatgagccattgtatatcacagctctgccgcacaagatatatctactctctgtatatcatagttatcattagcgttgttgtggttattatgattctatatactactggctnactgtccttgtgtgtggtatacggcatatctggtaacacgccgccgctcctagcgtcattcatgtggtggtattattcgtagtggtgtcaggcggagggtggggtgccctccccaccgtctagaatcatacctctaaattcgtaggagtgcagggggggcgcccca

SEQ ID NO: 5758 - DNA, 573 bp, Glycine max
  Probeset Number=SeqID_15537
acactagataaagaataggatgaaacctcacatctccggtgaaagctctctgggcaatgaattgaggagatctgtcagcgagaagcttcatcacgttgatgatgctaacgctgccaagcaaggtagggttctaaagtatatacaaactgagaagcgacggaggaggagccaccgtgcagaagaccccataagaaccttgatgttcttaggctctatgaatcacacatgacatgaatcatgattgatgaggtatttggacctagctagccttggtgttgaaatttaactccctttgagtttggggtgaaaaatcaaaaccaaaattcattccaattgtcacatatataaataaatatgttagtacagcagtgatgtaaatatgtcatggagcttcatatatatatatatatatatatagagagagagagagagagagagaactacatactaaaaaataccagtctacttatgtatatgtgtatattatctaatattataatatctatatagtttaaagtttctgattccattactgctgcatatatatggctggatctatgcatttacttatat

SEQ ID NO: 5759 - DNA, 1429 bp, Glycine max
  misc_feature (1)..(1): n is a, c, g, or t
  misc_feature (7)..(12): n is a, c, g, or t
  misc_feature (19)..(21): n is a, c, g, or t
  misc_feature (25)..(25): n is a, c, g, or t
  misc_feature (1010)..(1010): n is a, c, g, or t
  misc_feature (1409)..(1409): n is a, c, g, or t
  misc_feature (1414)..(1414): n is a, c, g, or t
  misc_feature (1429)..(1429): n is a, c, g, or t
  Peptide Sequence Number=SeqID_8522
  Probeset Number=SeqID_15538
ncttttnnnnnnttttttnnntttnaaattcttacccgccatggtggccgctgcttaaacaccaacacacaaacagaacaccgcaagcacacacataaaataataataataaaacaaatacaacacatgcgagtgtggcccgcagacacaccggactaaaaaaataaaccgaagtgattaaaataaataatacaaaaaaaattatatacactggggcttacactagtgcatacagaagagggtctggaaccatgagcttcgtccgcgcacatcgtcgaatatagcgagtcttctagtgtttgtcttcccccccacgcacaccgcactcatatactcaatcaattacccacttgcacatgaccggtgaacccccccccacgcatatattatcccactaattattaaaagaaaaataatcaaaagacatatattttccctctctatgaacccatatattaataacaaaactaatatctgattccagcaattcagtatgatatatgctattaaactttacaccctcttattttctcttatacaatcttaaccgccccaaccacactatattattgtcttccacttaaaatgggatcttattagaataaagcgaaaataacgcatataaggcatcattcttaatttaccccagcggcatacacctatgcgttatatgcactattatacccacgtacgccgtcctacatgtgcgccttcgacgcaatacgatacgtgagaactacgttctagtatattgataggtaaggagctcacgcgacacaatatagaatgtaatactagaggaaataactattatgacgtgcacgtcgacgatcgaaatgatataacaacagactgcgtacacactgactcttgctcaccgccaattatactattatcacctatattatcgtactcctatgcgactactgtgaccaccgccagcttactcaagtaaatgagcgatgagccgactctgcgttctacaacattatacccacggcttaatcagntttcgagcgcaccactgtctcttctcaacaaatgcagaacacccttcacgatcctcctacgtggctctctacccccatcttctctctgctcgatagatgatcgtcgagcggaccgaagcgttgcacaaagcaatggagtcgcgcgggaagatcgctcactccatcgcagacgacttcactaaaactctatcgttctttgcagattgcatactaagatgtatatagacactaacgaataatatgagtatatcatattaattagacagagtcgccgacctgacgtacccctcatatgcgtatatatcctctgtgatgtcacgacctcgtactatccatcataactcttctgttcgcaatatacgcgatttgtgacagtctctctatgccgacatcaccatncgcancatatgctcgtctcn

SEQ ID NO: 5760 - DNA, 1873 bp, Glycine max
  misc_feature (63)..(63): n is a, c, g, or t
  misc_feature (65)..(65): n is a, c, g, or t
  misc_feature (73)..(73): n is a, c, g, or t
  misc_feature (87)..(87): n is a, c, g, or t
  misc_feature (89)..(89): n is a, c, g, or t
  misc_feature (92)..(92): n is a, c, g, or t
  misc_feature (95)..(95): n is a, c, g, or t
  misc_feature (117)..(117): n is a, c, g, or t
  misc_feature (126)..(126): n is a, c, g, or t
  misc_feature (133)..(133): n is a, c, g, or t
  misc_feature (138)..(139): n is a, c, g, or t
  misc_feature (151)..(151): n is a, c, g, or t
  misc_feature (161)..(161): n is a, c, g, or t
  misc_feature (204)..(204): n is a, c, g, or t
  misc_feature (238)..(238): n is a, c, g, or t
  misc_feature (250)..(250): n is a, c, g, or t
  misc_feature (264)..(264): n is a, c, g, or t
  misc_feature (279)..(279): n is a, c, g, or t
  misc_feature (313)..(313): n is a, c, g, or t
  misc_feature (320)..(320): n is a, c, g, or t
  misc_feature (327)..(328): n is a, c, g, or t
  misc_feature (390)..(390): n is a, c, g, or t
  misc_feature (399)..(399): n is a, c, g, or t
  misc_feature (457)..(457): n is a, c, g, or t
  misc_feature (472)..(472): n is a, c, g, or t
  misc_feature (495)..(495): n is a, c, g, or t
  misc_feature (540)..(540): n is a, c, g, or t
  misc_feature (667)..(668): n is a, c, g, or t
  misc_feature (680)..(680): n is a, c, g, or t
  misc_feature (683)..(683): n is a, c, g, or t
  misc_feature (692)..(692): n is a, c, g, or t
  misc_feature (733)..(733): n is a, c, g, or t
  misc_feature (749)..(749): n is a, c, g, or t
  misc_feature (763)..(763): n is a, c, g, or t
  misc_feature (774)..(774): n is a, c, g, or t
  misc_feature (904)..(904): n is a, c, g, or t
  misc_feature (926)..(926): n is a, c, g, or t
  misc_feature (947)..(948): n is a, c, g, or t
  misc_feature (969)..(969): n is a, c, g, or t
  misc_feature (972)..(972): n is a, c, g, or t
  misc_feature (1011)..(1011): n is a, c, g, or t
  misc_feature (1020)..(1020): n is a, c, g, or t
  misc_feature (1052)..(1052): n is a, c, g, or t
  misc_feature (1055)..(1055): n is a, c, g, or t
  misc_feature (1057)..(1057): n is a, c, g, or t
  misc_feature (1106)..(1106): n is a, c, g, or t
  misc_feature (1172)..(1172): n is a, c, g, or t
  misc_feature (1179)..(1179): n is a, c, g, or t
  misc_feature (1276)..(1277): n is a, c, g, or t
  misc_feature (1283)..(1283): n is a, c, g, or t
  misc_feature (1381)..(1381): n is a, c, g, or t
  misc_feature (1446)..(1446): n is a, c, g, or t
  misc_feature (1464)..(1464): n is a, c, g, or t
  misc_feature (1502)..(1502): n is a, c, g, or t
  misc_feature (1536)..(1536): n is a, c, g, or t
  misc_feature (1592)..(1592): n is a, c, g, or t
  misc_feature (1594)..(1594): n is a, c, g, or t
  misc_feature (1666)..(1666): n is a, c, g, or t
  misc_feature (1712)..(1712): n is a, c, g, or t
  misc_feature (1736)..(1736): n is a, c, g, or t
  misc_feature (1741)..(1741): n is a, c, g, or t
  misc_feature (1743)..(1743): n is a, c, g, or t
  misc_feature (1752)..(1754): n is a, c, g, or t
  misc_feature (1758)..(1758): n is a, c, g, or t
  misc_feature (1763)..(1763): n is a, c, g, or t
  misc_feature (1768)..(1768): n is a, c, g, or t
  misc_feature (1781)..(1782): n is a, c, g, or t
  misc_feature (1787)..(1787): n is a, c, g, or t
  misc_feature (1792)..(1792): n is a, c, g, or t
  misc_feature (1808)..(1808): n is a, c, g, or t
  misc_feature (1841)..(1841): n is a, c, g, or t
  misc_feature (1852)..(1852): n is a, c, g, or t
  misc_feature (1867)..(1869): n is a, c, g, or t
  Probeset Number=SeqID_15539
gctgggctagtctaggtagcggacctaatgaggcagtgagcgaattgacgtacgctagtactngngtattgcntttgatgtagcatntngtntgntatgtgtctcgatacgctaganctgacatgntgtgtgnttganngatacatcgctntacgcgatancgcgctgtacatactctacagtatagagatcgattgctacgtnagcgcactttgcgatgtaggtcagggctaacacngggtagtatagncgacgctatgtgtncgctattcagagtgngttagagctacaatcacagtcgagatatgacgtngatgtgnctgtgtnnatgcgtagagttgtgtgtgaggtcgagtcagcatgtgcacatctcgatcacactcgcatctnatctcttgnatcgcatcgcgtgcagcgtcacgtggattggatcgtagctgatcacttacttttatanctacgagctggtcangagtgctgatgacgactaaggtnatgcgacgtgggagcaatgacgacgtacgatcagcagcgatactnagtgagcgcacatgtcgtgcgagtgtacgcgagtcgtagctctcgatagtagtgagacgtgcagtggtggagacggagcctcgcacgaccactacatagcgtgattgttgatgggtggttcttgtgnntgttgttgtcgntgngtgtggtgntgggtgctgcgcaccgttctccttacactacgtctatcgcncatactcgtgctgtgncgaagtcgctggcnaacggatacgntggtatgagagatatggtagtgcaaacagcattatggaacgacctgcagaatgcgtacgtacgcgcagtcacgcgacgagcaaagtcgcacgtagccacgagcacccacacgtccccgtggtctatggtntacgagatgtaaagtcttatantcattgatataacatacttcnnctcctatactatcttctctcnctncctcttcctcctcacccggccgcacgtcatatgtgcagngtgatgatnatacacagtaagagacagtcgcgtaacgccgncgnanatgaaggtagtaagacagctgggtcgtcacgctgcccatgactgctgtnggtgagcgcgcacgagatctacagattgcagtaatttccatactagtagagcgagtaggtgagaantgagaanagagagaggacacaacactagtcatacaagaaattagaccatgtacacgaactcctcagtatttatttcacatagccctcttatccttcctatctcnnctcttnatatttcgtctgcactggcgccgtaggctgcggtacgtaacaattcgctttcgtagcagtgacggtcgacgaggcgagcagtatattagatatacatnctatcacaaacacacacaggcactagaagcaagagatcaccaggagctgtgtgtcgcatatgcancgaggaggacgtcgacgnacaatatatagtaagacagtagtcacagtaagacacantccgagcagtgccgcagcagcgacacgacgcagngaggtaggatggtgtcgagtgacgagacagtaggacgggcgaggagtgtcgcgtgntntcactactctcagcttataacattattctccttcgccccctctcactccaccggttgggtcacacattatanctctactactcattctaatataattagcgaccgcgcgtacctcagntgatgacatcactacacccacaancttcncnacatagcgnnntggngggtnttgtntctttctttggtnntcttntcctnccttctacctctcctnctctctcgcctgttgttgtcgggggtgccgtgngggggggttgnggggggggggcgggnnngggg

SEQ ID NO: 5761 - DNA, 1573 bp, Glycine max
  misc_feature (22)..(24): n is a, c, g, or t
  misc_feature (29)..(32): n is a, c, g, or t
  misc_feature (37)..(40): n is a, c, g, or t
  misc_feature (86)..(86): n is a, c, g, or t
  misc_feature (98)..(99): n is a, c, g, or t
  misc_feature (116)..(116): n is a, c, g, or t
  misc_feature (147)..(147): n is a, c, g, or t
  misc_feature (244)..(244): n is a, c, g, or t
  misc_feature (261)..(261): n is a, c, g, or t
  misc_feature (263)..(263): n is a, c, g, or t
  misc_feature (272)..(272): n is a, c, g, or t
  misc_feature (274)..(274): n is a, c, g, or t
  misc_feature (353)..(353): n is a, c, g, or t
  misc_feature (536)..(536): n is a, c, g, or t
  misc_feature (552)..(552): n is a, c, g, or t
  misc_feature (564)..(564): n is a, c, g, or t
  misc_feature (593)..(593): n is a, c, g, or t
  misc_feature (639)..(639): n is a, c, g, or t
  misc_feature (829)..(829): n is a, c, g, or t
  misc_feature (838)..(838): n is a, c, g, or t
  misc_feature (1042)..(1042): n is a, c, g, or t
  misc_feature (1164)..(1164): n is a, c, g, or t
  misc_feature (1274)..(1274): n is a, c, g, or t
  misc_feature (1399)..(1399): n is a, c, g, or t
  misc_feature (1478)..(1478): n is a, c, g, or t
  misc_feature (1524)..(1524): n is a, c, g, or t
  misc_feature (1562)..(1562): n is a, c, g, or t
  Peptide Sequence Number=SeqID_8523
  Probeset Number=SeqID_15540
gttaaagggtgtggagtgggtnnngggtnnnnggccnnnncctcagacctagcccgtatcgactgcctgtatcgcactcattaccnctctatgacctnncaagtagaacaataggngatgacgccaccctctctcgcgcgggtaggnatgagagcgcggcgatcctctatcactaccttagacatagatgtatgcgcactacacgcggcgcgccgcggcgacgagcaaaggaacacaatgtacntcatttctcttataatntntaatcactntnattcacagccccaacacaccgacccgtaggccatctattctcgctgtcacgatgatagttcgtgtagaaccgttgcggntcattcttttacctggctgtcgtgaatcgagagggacatacagcgacgatatcaagatatactctctagcgtgccgcgtgaggtattgtgatgtagtgagctgtgcgccaatactagacattcattgaactatgatgagccctgccgttgatagttacatagagaatataggtataccgtgcncgcttgcgctcgccanaccgcacgccgncgcgcctcaggtgtgtgtgtttatggaanagacgcctatatcgactcgtgcgacataagagtcagcgtagtgcgngatctcacggacaagtccactctatagagtaccaccacctcatacgaacacattcggctctaccacacaccaccacagtatacgtcagctcacgctgccgcaaccaaccagcatcatccgcagctcaatcgtcttatctagctgctcgcgtcagggctggtggcgctatgtctcgttgatgtattgtganctagagganctcacatacactagactaataacaaccataatatggataataagaccaagacgaagcatcaacatataagagcctagataggactcatgaactacacaacaacaagagccaaccacgattactgcatccccactcacttaactgatcggtatcaaagcgagaaggctcttacctagtctattgcgtgatataacttatattacngtaacgaggaggagcagcccagcgcacacgcgccctcttcatagtacagctatctaacatctatctcacagatgaggtgataagctatcacagagcaccctgctctgctcattatcatctancacggtccagtcgtgcgtgttgtcgtcactgtcgtagctctcgttcccacaccacgcttatcacacctgcgctacgcggtgctctatcacgacctccctggctacccacntcaactcatcccctacactacaaccctcacctgcgacgtccgaacaaccgagcgaggtggctctcctcgcgaagactcacctctgccgataacacacatatgttcaataatagaatataataaanaagcaccaaatcacgtgactctgatgtcgtcatctcggtgtgttgtatgctctgcctaggacgaccgttacatattggntatgaaccactacgatcgcgatcgtcgatgtaaaaacatctcaccnacctatctccacacataaccactctcagtcacgcgcanacaccattctg

SEQ ID NO: 5762 - DNA, 1502 bp, Glycine max
  misc_feature (42)..(42): n is a, c, g, or t
  misc_feature (69)..(69): n is a, c, g, or t
  misc_feature (631)..(631): n is a, c, g, or t
  misc_feature (987)..(987): n is a, c, g, or t
  misc_feature (993)..(993): n is a, c, g, or t
  misc_feature (1249)..(1249): n is a, c, g, or t
  misc_feature (1408)..(1408): n is a, c, g, or t
  misc_feature (1413)..(1413): n is a, c, g, or t
  misc_feature (1476)..(1476): n is a, c, g, or t
  Probeset Number=SeqID_15541
ttgtatagatgccgctgtgtctatatataagtatcacgtacngaagaactacacattcttctatattanagtgatagcatacacgaatatgcgctaggtctgtgactctttgatcatctgttgtataactctcatatagtgaacacaagatagtatgttataattatgtatgagagtgtcgaatatatatagagaatagtacatatgtagatgagagtgactttatagaatagcgcgtctcgttaacagagtggtttattctactttatactttatcgaattctgcgtgagttggttttccacgtgaacggtggatgtgggtggtgtcgtcgtggtgcggtgctgtattgtgtggacagtgcatcctctctcattcatgtactccattatatgataacatatttatgttatgtggttgggtctgccttgtgtacttagagagcgtaactagtcgtagaagaattaatcgatacgtagtgtgtcgtctgtggaatgtctttagcagatcagtgttatataagtggtgtagcctatgcgaccttgcggaacaccgggttaagcacggtattcagtcatgcagaggtgcggctgcgcgcagaggcttgcatcgaagtacaccaagacaatgatnctagtcatgtacgagcgcgcgcgcattctgcaactagcaagatgtttagtagtctgacgcagacatactttccccttaataacacggcgacgaacgataaaaagtcatctgtctgagttgagcgtgtcgacgagcctcgagaaccgtggagctcgtacattctgtgccgcgccgtttcgtcggtcgtgacggcgtgcaacggtgtacttatcgtttcgttggtctctctaggttatttgtgtcatttattaacctgagcatgctagcgagtaccatgcctgggcgattctcttattctactagagaaacatacaggagtgggggtgagagatgaggtgcagcggagagaagacggntgtganaggaggcatacagaataaagagggatgagtaagacctcatgtctgcgacatatataagacgtgtacctgaatcagcgatcaatcatacacgagaatattgaatttcattcaccaatagagtcatacacgacaattgagcatcgtgcatcgggtggctcgtacagtgtgttcctcgctatttaaaagtcatgttacgtaatgtgtcgcgcatgttctttgatgacttcgcggcgggcggtgtaactcgtcattaaanctgtactcatgcctactattagaagacagtaataagtagatacagtaccggactaatggtaaaaccaacgccagagacggatggttgtatgaaaggtctttatttttttatatcttactctctgttctctcccatcggcgtatgtagtgttagtcttgnttccntttggttgttggagcaagtgtcgtcctcatttatgtgtctttccttgtctgtaataaggatanagtattaggatggatgggagtggggc

SEQ ID NO: 5763 - DNA, 1919 bp, Glycine max
  misc_feature (49)..(49): n is a, c, g, or t
  misc_feature (54)..(54): n is a, c, g, or t
  misc_feature (65)..(66): n is a, c, g, or t
  misc_feature (68)..(68): n is a, c, g, or t
  misc_feature (121)..(121): n is a, c, g, or t
  misc_feature (124)..(124): n is a, c, g, or t
  misc_feature (165)..(165): n is a, c, g, or t
  misc_feature (170)..(170): n is a, c, g, or t
  misc_feature (219)..(219): n is a, c, g, or t
  misc_feature (242)..(242): n is a, c, g, or t
  misc_feature (363)..(363): n is a, c, g, or t
  misc_feature (392)..(392): n is a, c, g, or t
  misc_feature (412)..(412): n is a, c, g, or t
  misc_feature (468)..(468): n is a, c, g, or t
  misc_feature (569)..(569): n is a, c, g, or t
  misc_feature (578)..(578): n is a, c, g, or t
  misc_feature (590)..(590): n is a, c, g, or t
  misc_feature (767)..(767): n is a, c, g, or t
  misc_feature (769)..(769): n is a, c, g, or t
  misc_feature (833)..(833): n is a, c, g, or t
  misc_feature (937)..(937): n is a, c, g, or t
  misc_feature (964)..(964): n is a, c, g, or t
  misc_feature (983)..(983): n is a, c, g, or t
  misc_feature (1008)..(1008): n is a, c, g, or t
  misc_feature (1034)..(1034): n is a, c, g, or t
  misc_feature (1126)..(1126): n is a, c, g, or t
  misc_feature (1184)..(1184): n is a, c, g, or t
  misc_feature (1211)..(1211): n is a, c, g, or t
  misc_feature (1254)..(1254): n is a, c, g, or t
  misc_feature (1256)..(1256): n is a, c, g, or t
  misc_feature (1288)..(1288): n is a, c, g, or t
  misc_feature (1290)..(1290): n is a, c, g, or t
  misc_feature (1298)..(1298): n is a, c, g, or t
  misc_feature (1302)..(1302): n is a, c, g, or t
  misc_feature (1305)..(1317): n is a, c, g, or t
  misc_feature (1319)..(1320): n is a, c, g, or t
  misc_feature (1326)..(1326): n is a, c, g, or t
  misc_feature (1338)..(1341): n is a, c, g, or t
  misc_feature (1346)..(1346): n is a, c, g, or t
  misc_feature (1351)..(1351): n is a, c, g, or t
  misc_feature (1369)..(1370): n is a, c, g, or t
  misc_feature (1372)..(1373): n is a, c, g, or t
  misc_feature (1380)..(1380): n is a, c, g, or t
  misc_feature (1394)..(1396): n is a, c, g, or t
  misc_feature (1399)..(1399): n is a, c, g, or t
  misc_feature (1413)..(1416): n is a, c, g, or t
  misc_feature (1421)..(1422): n is a, c, g, or t
  misc_feature (1477)..(1477): n is a, c, g, or t
  misc_feature (1488)..(1488): n is a, c, g, or t
  misc_feature (1555)..(1555): n is a, c, g, or t
  misc_feature (1572)..(1572): n is a, c, g, or t
  misc_feature (1586)..(1586): n is a, c, g, or t
  misc_feature (1615)..(1615): n is a, c, g, or t
  misc_feature (1631)..(1631): n is a, c, g, or t
  misc_feature (1642)..(1642): n is a, c, g, or t
  misc_feature (1690)..(1690): n is a, c, g, or t
  misc_feature (1699)..(1699): n is a, c, g, or t
  misc_feature (1720)..(1720): n is a, c, g, or t
  misc_feature (1749)..(1749): n is a, c, g, or t
  misc_feature (1751)..(1752): n is a, c, g, or t
  misc_feature (1784)..(1784): n is a, c, g, or t
  misc_feature (1786)..(1790): n is a, c, g, or t
  misc_feature (1794)..(1794): n is a, c, g, or t
  misc_feature (1844)..(1844): n is a, c, g, or t
  misc_feature (1866)..(1866): n is a, c, g, or t
  misc_feature (1870)..(1872): n is a, c, g, or t
  misc_feature (1875)..(1875): n is a, c, g, or t
  misc_feature (1911)..(1911): n is a, c, g, or t
  misc_feature (1915)..(1915): n is a, c, g, or t
  misc_feature (1919)..(1919): n is a, c, g, or t
  Peptide Sequence Number=SeqID_8524
  Probeset Number=SeqID_15542
atacgacttgtctatacgttcgtctgtttcggtcggtgtgcgcataccncactnacatcccatanncnccatctacacacgcattactgtactgtgaggatgtacggcgaggcgtgcgttnatnggtgggtcgtctcgacgctgacggcacgctccgcctctctnaccanatgaaatcctgcatagagacgtcatattctctgtctaccgcaccacctncaccttctttgtcgtctcgctgntctgactattactcgcagagtgatacgaccgcgcaacccgccagcaacgcagcacggtgctgctgcgcaatctatatcatcgaatcgctcgatgacagccgtcgcatctaagtcgcttgtntcagcgcatactcatccagtgtacggatntctacatccacacatatatnttactagaaatatataataattgtactaggtatgtgcgagagagaatatgcgcgcncgagtgtacttctcatcattcatctgctatgagagcacgtcctccgctactcctatgctcttctcgcagccttgagcatcgtcgcgatcgtgctcgcgtgnctctttttngtagcactattntctcttctattgatatatattatctactatatgttactcatttcgcatcgcgcgcattacttgtcgctcgtgtgatgattctggtacacgagtgcatgatgagtgttgcggcgactgtgctagtgtctgcctctcgactgtctatgcatgtatcacatatatcgtactccccgcccncntcgctctatctcgatatatcgatagagacatgctaggccagcatatgatcatactgctatgacngtagcgtgtggtactatctcgtaagtaagtctgacgatcgacagactcacggtagcgacatgtgtctgtctcgctttagatctctgtagccagcgacgtcgacncgtgtggctgcacctcgtgcgtctctncatctagaccggaggccangtcgctatcactacgagtgtgtgantctatcaacacgatcgattattacanccccactacacctcagatgacgcacatactgtagtaatgtatggcattccgatggcatggatgtatgtgtgcacacatcacaccaccactcnttaggtcagaagtgacatatgtacatcattaactcatatgctctcactctcttctccncctcgtcttttctctgcgcgtccacantcacaacatgacaagcccagtatgggacgcgatatatctcatncntcacgccgcacatggtgagtgtggcaaggacncnttactctncgcntcnnnnnnnnnnnnntnntatgtnccagtctcagtnnnnacagntcatncgtcatatagtgaggctnncnnatcattnctattctatctcannnccntcctcctctgtgannnnaagcnnctcctagcttcgtgatggcatcaatgcatgatctgtcgactgctgcgtgcgacgnacgctccgccnatatacatgcatagtagtacgtaacagtggaggctacgcgtgcgtctatgacagaattcgcgatcgntgtatgtagtgtcttcnctctcatatagacnaacatgtgaaatcagacgtatattgtacnctagaagcgatacatncatatgcctcnagagcatacaagatgacgcacatcacacgatggacgtcgtactcacgnaattggcanaccatatatgactggcataanccgcagcatcgatatcacagagacgactntnntctcactatcgtgttatcatctactcgtttcngnnnnngcantgctgcttgagtgatgcgcgtcatgtagatgagatacacagtgactcgtncgcgcgcccgtcattgatgcantctnnntcngtcgtccctgatcagctctgcacgtgtgctgcatgncacngagn

SEQ ID NO: 5764 - DNA, 389 bp, Glycine max
  misc_feature (96)..(96): n is a, c, g, or t
  misc_feature (291)..(291): n is a, c, g, or t
  misc_feature (349)..(349): n is a, c, g, or t
  Probeset Number=SeqID_15543
aacatcctaatcgaaaaatcaacccttctcccgttcccaaatctctcgacctcggagcagccatgactcatatccttcaccgcgaataaaatcgcnttctctgttcatctaattttcgttgattcttgtcaagaattggccggattattactttatatctgttaccgtgtgcgagtgtgttgtgttttggttggatctgtccgtgttgttccttgaccttgctggcggctgcacgcggcgaccagagggagcgggaccggcagcgggcgcaggcgcggaagccggggaccnagggccgcgacgacgggctcacgccggagcagcgacgagagagggacgccaaggcgcngcaggagaagaccgccaagaaggcggcgcaggccacgcag

SEQ ID NO: 5765 - DNA, 1642 bp, Glycine max
  misc_feature (1)..(1): n is a, c, g, or t
  misc_feature (67)..(67): n is a, c, g, or t
  misc_feature (100)..(100): n is a, c, g, or t
  misc_feature (104)..(104): n is a, c, g, or t
  misc_feature (107)..(107): n is a, c, g, or t
  misc_feature (156)..(156): n is a, c, g, or t
  misc_feature (159)..(159): n is a, c, g, or t
  misc_feature (168)..(168): n is a, c, g, or t
  misc_feature (236)..(236): n is a, c, g, or t
  misc_feature (258)..(263): n is a, c, g, or t
  misc_feature (266)..(266): n is a, c, g, or t
  misc_feature (268)..(268): n is a, c, g, or t
  misc_feature (337)..(337): n is a, c, g, or t
  misc_feature (395)..(395): n is a, c, g, or t
  misc_feature (398)..(398): n is a, c, g, or t
  misc_feature (401)..(402): n is a, c, g, or t
  misc_feature (404)..(404): n is a, c, g, or t
  misc_feature (465)..(466): n is a, c, g, or t
  misc_feature (543)..(547): n is a, c, g, or t
  misc_feature (594)..(594): n is a, c, g, or t
  misc_feature (676)..(676): n is a, c, g, or t
  misc_feature (785)..(785): n is a, c, g, or t
  misc_feature (791)..(792): n is a, c, g, or t
  misc_feature (800)..(800): n is a, c, g, or t
  misc_feature (802)..(802): n is a, c, g, or t
  misc_feature (852)..(852): n is a, c, g, or t
  misc_feature (886)..(886): n is a, c, g, or t
  misc_feature (1032)..(1032): n is a, c, g, or t
  misc_feature (1052)..(1052): n is a, c, g, or t
  misc_feature (1109)..(1109): n is a, c, g, or t
  misc_feature (1161)..(1162): n is a, c, g, or t
  misc_feature (1166)..(1166): n is a, c, g, or t
  misc_feature (1172)..(1172): n is a, c, g, or t
  misc_feature (1204)..(1204): n is a, c, g, or t
  misc_feature (1213)..(1213): n is a, c, g, or t
  misc_feature (1271)..(1271): n is a, c, g, or t
  misc_feature (1353)..(1353): n is a, c, g, or t
  misc_feature (1356)..(1356): n is a, c, g, or t
  misc_feature (1406)..(1406): n is a, c, g, or t
  misc_feature (1409)..(1409): n is a, c, g, or t
  misc_feature (1449)..(1449): n is a, c, g, or t
  misc_feature (1477)..(1477): n is a, c, g, or t
  misc_feature (1484)..(1484): n is a, c, g, or t
  misc_feature (1486)..(1486): n is a, c, g, or t
  misc_feature (1531)..(1531): n is a, c, g, or t
  misc_feature (1569)..(1570): n is a, c, g, or t
  misc_feature (1616)..(1616): n is a, c, g, or t
  Peptide Sequence Number=SeqID_8525
  Probeset Number=SeqID_15544
ntatcttcagcatcgtctacttatcatctcactcgcgtcgtcgatctctagtcactgttactgcgtntcaacgtagtctcacgttctgctgagaatgtanacantantcacagcatcactctcatcatcgtactatacatcgacgttacaccgttncgncgactgagnagtctctctgagtgtatatgaagcctgaagatgacgcaaatacgacgttctagcgatacgatgtagtnggatgaaaataccatagttgannnnnnaananatcatcgatcgacgcgtgcgcgcaccatgtctcggatacttaaaacacaacgcacctgtacgttctctncatgccactctctaatcttacacactatctactcgctactacactatacactcacgancangcnngngacgccgctcagcacacgtaccggactagcgacacatctatcgagattcataatcacagannccgcgccgcgcgcgtccacgctcgccgcgtagttcgatgaggtcgatggagtcgcgcgctggagtaacacatatgannnnncgcagagaattgtcacgagcagcgttcgcgtgccgatacgtcaaacncacactatctcctcttcgctcgcacacctgccgccgcgcatcctctccatatattatctcaatgcgtatatacgcgtagtanaccgtgccactgtctagttaaccatactcatatcatgtcacttcataatctgagcgattcatatacgtgcacatcagatacaaatccaagaggatagattgtatagtanaaaaanncataatcncnaacatatcttctttcgtgctctcctcctctcgtcgcgtgatcggcgaagntactaggggtgccgccgctcgtctcacactatgncaatctattctcctctctttcgtcacactctatccatgcacctatgtcatcgtgatctatacttaagtatgagctactcgacacataatttctcatgatacatacgcgccgtgtaccgtgatacgagtcaactccatgtgaaattnagatactagctgcgctggangtcagcttatctgagatcgcactcacatatgactctagcatatataacacacgcagncactcgctcccaccgcacggtcggcgtcgcactacacgccaccctaccgatnncggncgccgncgaccgctgttgatatatatatcactggtctnaatatgcanacgacgaggtgtcgggagcaagtagagatgaagaatagagctatatattatcggcatncactttatgtataacacagtaacaatggcggcacgtgcgcgcaccacgcagacatccgatccatgcagagaacacgtacacncanccatcatcgaagcacagataacgcactataacaaactagaacacatacanaangtatgagagagacagatcaagatatgggtgtaggctgcgngcttaggtgtcgtagtagggtgtgtagntttgatnantgttttctcctgtgtgcctgcgtcgtcgcgcttcgagcgggtggnaatgtgcggcacgttggctggttgactggacgcgacgnngcgttgctatgtgagctgtcataatgtgaatagagcgtgtgagagnaagggacgaggcgatacatagacaat

SEQ ID NO: 5766 - DNA, 491 bp, Glycine max
  Probeset Number=SeqID_15545
tgtttggagcccagctaccgttctggacttgggaaagcagcttctggttggaatcatttaggaaagtcttactgatggagactctgcaccatcccttggtaaaaatggaagaggactatgccttgaactccgactgtgaaccgaattcttcttacatggcccgcacctgggattggaaaagtcatgatgagagctactcacttagccagactccatcaccacagagtttgtctccttcagcctcttatgagtctccttattcctccagcccacacactggacaaggtttggaggagatgccattcagctacagcttgttacagtatcctacactttgccatggagacaatagagaccttaccaagaaggatcatgggcataaaactttaatgacaactcaacgtaggagaaaagccagtgagagggaaaaagttccccttgagtcaatcgctgaggccctttatacccttcgcaacaatttaccttcaatg

SEQ ID NO: 5767 - DNA, 320 bp, Glycine max
  Peptide Sequence Number=SeqID_8526
  Probeset Number=SeqID_15546
tacggctgcgagaagacgacagaaggggatgaccagcaagcatcaatccccgctaatgcgcctactgcacctattgcatacaccgccggcgcatctaaagagacaacagatggagtaacacctgctaagagcattgaattcaaggacaaattcaagaatatacgtgccagtcttgtaaagtaggttgctaatgctactaatgacgtggctggtgatggaaccacttgtgctacaattcttactaaagcaatattgacggaaggatgcaaatcagttgcagatggaatgaatgcggtggtcctaatacaaggtataaactt

SEQ ID NO: 5768 - DNA, 242 bp, Glycine max
  Peptide Sequence Number=SeqID_8527
  Probeset Number=SeqID_15547
tctgctcatctccaccctcaatcttgaatcccttaatcccaaaatggcgtcagagaagaagctctcgaaccctatgagggacatcaaggtccagaagctcgttctcaacatctctgttggtgagagtggtgatcgtctcactcgtgcctccaaggtgttggaacagctcagtggtcaaacacctgtcttctccaaggcgaggtacactgtgaggtctttcggaatcaggcgtaacgagaaga

SEQ ID NO: 5769 - DNA, 1585 bp, Glycine max
  misc_feature (12)..(12): n is a, c, g, or t
  misc_feature (31)..(31): n is a, c, g, or t
  misc_feature (33)..(33): n is a, c, g, or t
  misc_feature (96)..(96): n is a, c, g, or t
  misc_feature (133)..(133): n is a, c, g, or t
  misc_feature (136)..(136): n is a, c, g, or t
  misc_feature (164)..(164): n is a, c, g, or t
  misc_feature (198)..(198): n is a, c, g, or t
  misc_feature (231)..(231): n is a, c, g, or t
  misc_feature (363)..(363): n is a, c, g, or t
  misc_feature (433)..(433): n is a, c, g, or t
  misc_feature (535)..(535): n is a, c, g, or t
  misc_feature (596)..(596): n is a, c, g, or t
  misc_feature (720)..(720): n is a, c, g, or t
  misc_feature (763)..(763): n is a, c, g, or t
  misc_feature (792)..(792): n is a, c, g, or t
  misc_feature (1431)..(1431): n is a, c, g, or t
  Peptide Sequence Number=SeqID_8528
  Probeset Number=SeqID_15548
ccgatctgactncactcgctcttctatactnantgcttcaccagcgcgtgtcagggcagcacacgtatgcatctctgattcagtgtattagactangcgcgtcgctggcgcgttgtagcagaatacgagactngcncggtcgcgacacggacatcgtacgactncgacagtacgagggacatgattcgcgcggatcgngttcctgagagtgagaggtgtagccggagcgantaaggtctcgcatcagcttgatcggcgcgtgcgggtatgtgtgctcgcgtattgcgccggcacgagtacgtcatctgcgatacatagtctccgatgttagttcgcgcatggtgatgactcacaacctatatncgatgaagcgtgggcgcatcacatggcgcaaacagaagagattgtagaagtgcgagcgtcgggccgtaangagatgctaacgtagtcgcgactaggcgtgcgcagagtaatgccgtcgaggataggcgcatagctaatgtacagatcgagagcgcatacaatctattcggcnacgactctcagatcacgacaagtcaccatacgtgcatagtcgctattatacacgacaccgntgagttggcgtgctacactcagtctctcgcgagatctggagcacagtctactaccaacggacgacgcgagacgcagacaatgtgatatcgggctcgcaacgcacgctgtatgcagcgcaatagngaccagacgtgacgaatagcctgaaaccatactagcgccgtgnccgctatcgtacacgcagctcggatcaanactacagtaccatacaattgagcgcgctactaatctagtatacactcacgtgcatgaacagtctgtcggccgagtgcaacatacactcatatcatagtcttatgtattgctctctgtagtatggctgtcgcgacgaccgcagcatagcgatcctcgagcatacacgtcagcgcaagagtcgggacgatgagcgaaaaacgcaataaagcagtgacagacatcgtacagcgaggcagtgacaagtccggtcggcgtaatagatgtcagcgcgcatatacacgtagtacctactatattataagctgcggagctgtgctagatacatatcgacatacaacgcatacgcgtgctgcgtggtcggatctggtgtcggcgtgtgcgaattataataacagcaagtgtaagtgctgtcgtaagtattctagtgactctcagtctatacacatcacatatcgtcaactcggtacccgagtcacgaggatcgcggcacagtgcatacatcctacagccacctgcatatctctgacacaggcgccgctaaaaagtcgggattgactagggtgctactaaggtatgagggtctattcagagagtagtacactatataagaaactagaaaattcattgtagtgtgcatanaccttctcaccgagataccaagctacattcattgtcatcgcgaccgcccataatcatgctaagttgtgatatttgatacgcatgagatgtatacgaatcggaataagcatagttcctctacaagagaaagatcaacgcatcgcagggtgggatg

SEQ ID NO: 5770 - DNA, 506 bp, Glycine max
  misc_feature (128)..(128): n is a, c, g, or t
  misc_feature (217)..(217): n is a, c, g, or t
  misc_feature (263)..(263): n is a, c, g, or t
  misc_feature (343)..(343): n is a, c, g, or t
  misc_feature (369)..(369): n is a, c, g, or t
  misc_feature (371)..(371): n is a, c, g, or t
  misc_feature (378)..(378): n is a, c, g, or t
  misc_feature (390)..(390): n is a, c, g, or t
  misc_feature (393)..(393): n is a, c, g, or t
  misc_feature (395)..(395): n is a, c, g, or t
  misc_feature (404)..(404): n is a, c, g, or t
  misc_feature (406)..(406): n is a, c, g, or t
  misc_feature (425)..(425): n is a, c, g, or t
  misc_feature (444)..(444): n is a, c, g, or t
  misc_feature (451)..(451): n is a, c, g, or t
  misc_feature (455)..(455): n is a, c, g, or t
  misc_feature (458)..(458): n is a, c, g, or t
  misc_feature (498)..(498): n is a, c, g, or t
  Probeset Number=SeqID_15549
aacatcctaatcgaaaactctctctcactctttctccgagaacaaaaaaaaaaaaaaaaatccgcgattcgctcttctcttggaaaagtgaaaaccagaagtacgaacgaaagagaagagcgatttanaagtgagagaagatgggggttgtcgttcacgaagctgttcagcaggttgtttgcgaagaaagaaatgaggattctgatggtaagtctcnatgctgctggtaagacaaccatcttgtaccagctcaagcttggganaaatcgtcaccactatccccaccatcgggattttatggttgagaactgggggagtacaagaaacatcagccttcccttgngtgggatgttgggtgggtcaagaacnanatcccgncccctggggganggncnttatttttncngaacacctcaagggcctcntttttttggggggtggatnagcaatngganaanaaaatcccaccgggtttgagggccaaggggatgaagctgncccccaca

SEQ ID NO: 5771 - DNA, 458 bp, Glycine max
  misc_feature (12)..(12): n is a, c, g, or t
  misc_feature (273)..(273): n is a, c, g, or t
  misc_feature (420)..(424): n is a, c, g, or t
  misc_feature (429)..(429): n is a, c, g, or t
  Peptide Sequence Number=SeqID_8529
  Probeset Number=SeqID_15550
gaaatggggtgngcccacaggccccggtccggatttcccgggtcggcccgcgtgtcagagcgtggcgctctcgagtttgtggcggttccccatagcacgagtctcgtgctctagagcactttgtaccccatgaaaagtgaggttttcttctctctgtgtggccctgtgagagatgatgtcgaggtggtgagcgtgtgtaacccatgatgatatatagggtgtgagtattctctatcagagttttatatatatatatatatatgggttcagagnctagcctttgattttatatagttaggagaataattaagaatgtttcttaataatttctgtctttttttctcaagaggcctgagaggtaatgagtttgattttcattttaatatgagaaaaaaaaaagtgtgtatatcaagtatcatnnnnntatcnacgtatagtatatatacgctggcgtgttt

SEQ ID NO: 5772 - DNA, 632 bp, Glycine max
  misc_feature (1)..(1): n is a, c, g, or t
  misc_feature (30)..(30): n is a, c, g, or t
  Probeset Number=SeqID_15551
ntccgacaccgggggggttccagccccgcnttgctgtaaaagaaggtcgcatgtgtgccctcccctctaagacgtaccactccgaaggcgggttgtgagcttgcgcggagtgtccgtctcaataatatgacatattttgtgccaagcggggacaggggggtgaattaaaccattcggtttagaatccgcctcgccacgcgaggtgatttttttttaaaaacctttttttttttcggggaaggggccagagcatttcggcaacgtggcctggcaacagggcccttttaaaagaaaccggggggtttggcgcgacactccaacaattggtccgggcttcaacttggcattacccgtaacgggggccttgagccttgcccagcggggggcaaaaacaaaaaagaaaaaaaaaaagggttacgggggatcccctgggaactcgagaaccgaaattccgtgctaattcataggagcgaggagaggagagaatggttgaacgccaggagacgggccactaacaagcattgggtccggagtgttgaaggagcgaaattggaagatcactagaaaccttgaaggagcacaacattcgttcgaacaggttttcgttcatgctgaagtccagaggtttaact

SEQ ID NO: 5773 - DNA, 725 bp, Glycine max
  misc_feature (1)..(7): n is a, c, g, or t
  misc_feature (101)..(101): n is a, c, g, or t
  misc_feature (109)..(109): n is a, c, g, or t
  misc_feature (725)..(725): n is a, c, g, or t
  Peptide Sequence Number=SeqID_8530
  Probeset Number=SeqID_15552
nnnnnnnagtgcattgactgatacttaaatgaaattaaaattaaaactgataaaatgtatgaagaatttgatacatttaaatcaatatacaatagtcaacnactaaaantatcagaatttatgcaaactgatacaaatagagtaaatcagattactaattcagtaaatgaattaaaaacattatctaaaacattagctgacttagggagtaatgaattacagaagaaattttttacaaatcaaagcagaaagtataatgtgggagagttaacaaagacacatgctcctgtatcattagtaacacagaagaactcagtatctgtgagttctaaatcatcaacttcagatcctccattaaatcatcttgatatattctctaaaatatatccaagaattacagaacaaaatttcaaaactataatggtcaatttagcaaacagagtttttccaaatgactctatgaatttacattcaacaataaattacgctaatgtacagaagataaaagttttagtggaaacacataaatctaaagagcaacctagaagatcattattattagggataaactctttttaaaacaaattcatataagttatatataacaaaaagattaaattgtacttgaacatgtatagttttatagatagagtacatattttattttaatcattatttaataaaaaaaaaaaaaaaaaaaaaaaaaaaaaaaaaaaaaaaaaaan

SEQ ID NO: 5774 - DNA, 1634 bp, Glycine max
  misc_feature (10)..(10): n is a, c, g, or t
  misc_feature (54)..(54): n is a, c, g, or t
  misc_feature (93)..(93): n is a, c, g, or t
  misc_feature (134)..(134): n is a, c, g, or t
  misc_feature (180)..(180): n is a, c, g, or t
  misc_feature (215)..(217): n is a, c, g, or t
  misc_feature (268)..(268): n is a, c, g, or t
  misc_feature (321)..(321): n is a, c, g, or t
  misc_feature (486)..(486): n is a, c, g, or t
  misc_feature (760)..(760): n is a, c, g, or t
  misc_feature (813)..(813): n is a, c, g, or t
  misc_feature (1162)..(1162): n is a, c, g, or t
  misc_feature (1314)..(1314): n is a, c, g, or t
  misc_feature (1318)..(1318): n is a, c, g, or t
  misc_feature (1583)..(1583): n is a, c, g, or t
  Probeset Number=SeqID_15553
gtacgcactncatcatgtctagttgttggttgcaggtctacgatcactataaangacgatgtactcgacacatagcgcgtgtacatatatgancgatatcgtgctgcgcgtgagtgtattgcatacgtatggantgcttgcacctactggtccgctcgctgtcagtctcttgagtcacgnccgcacgatcgcactcactgtgtcatcgacgagannntagcgctaggtgcagtggcagtgtgagagtgcgacttcgatggtcacgcancgcctcacacgtgtcgagtcgatatactgagagacacgcgatacgcgcatcantcatccgtgcgcttcacatcagtacatatcacgtcatgcattgtatctgtagaatcacttatatttacccatacactcatcatgtgagtagatgtatagtagtgtggtcggatggtacatgatgagaccgaacatgactgtgcgatacgacagcgaccgcttctntgtaatggttgatatcatgagtactctggatccgtgatcgtgtgctagttttgctcggtgtataagtctatcacgccagtctgcactcaactgcgcccttcatcagctacacacggtaatatcacacacgttgtgctcatctccggccttctgcgcgtgtgcataggtagttgatttcattaacatctaccagtacgcttctctcgtgcaatactcgtcacggcatccttatagcacgaacagatcggaggcgctgagattcaccatgagagtnacctgtctcatatagtggacgtgtgcgcgcgagtcgtagtacactgatatctntctatccagatcgcttcgatagatgtgttgagtgtgcgtatatcactctatgtatctcgggtgcatgcacgatccatgctgcagcaacgggcttcctgacacttcgagagagtttgactcatgcatcatttcgttctggtaccatagtaatcgtccacagcctaacgctgtgccgcagtcgctatcatcttaagtggctgtatcggtcgtcgttgaggctaggttagttggaagtgagtgataagggaagggtatgccagagcggctggaatcgcgtggctcgtcgtagatatttcacgtgacagccgcctggcgttcctcggcgagacggagatagatgccctcctanagcctcatcatcgtagtccatccgtacagataatgagaggagttccgatgtgagatcgcgttggtgtgtatcgcttaagagaaatgaatattacggttggtcatcacagcgcatagcatgcgtacgtacagaccacgcgtcgacgagcaganaaanaacgcatctgctgggttaatagcgagcaacactgccctcacaacactcgcactaacacagccagtgcagcgacatcacgatagagaaggtacatacatgacaccactatcataacatatataaatgattaattacttcgactatgactctaatgagacattccatatttccatggtggggtgagaggtgttctagtagtagtactctcagttggtgtgtgcgcgtaataacgcatcgacagcgataatgggtagatgttgtctcntgccgcgcgcagatggcgattggggggtagaggaggggggctcgctctagg

SEQ ID NO: 5775 - DNA, 1853 bp, Glycine max
  misc_feature (1)..(1): n is a, c, g, or t
  misc_feature (65)..(65): n is a, c, g, or t
  misc_feature (83)..(83): n is a, c, g, or t
  misc_feature (94)..(94): n is a, c, g, or t
  misc_feature (155)..(155): n is a, c, g, or t
  misc_feature (364)..(364): n is a, c, g, or t
  misc_feature (386)..(386): n is a, c, g, or t
  misc_feature (400)..(400): n is a, c, g, or t
  misc_feature (619)..(619): n is a, c, g, or t
  misc_feature (669)..(669): n is a, c, g, or t
  misc_feature (676)..(676): n is a, c, g, or t
  misc_feature (773)..(773): n is a, c, g, or t
  misc_feature (803)..(803): n is a, c, g, or t
  misc_feature (814)..(814): n is a, c, g, or t
  misc_feature (1046)..(1046): n is a, c, g, or t
  misc_feature (1123)..(1123): n is a, c, g, or t
  misc_feature (1170)..(1170): n is a, c, g, or t
  misc_feature (1307)..(1307): n is a, c, g, or t
  misc_feature (1319)..(1319): n is a, c, g, or t
  misc_feature (1347)..(1347): n is a, c, g, or t
  misc_feature (1446)..(1446): n is a, c, g, or t
  misc_feature (1603)..(1603): n is a, c, g, or t
  misc_feature (1606)..(1606): n is a, c, g, or t
  misc_feature (1611)..(1611): n is a, c, g, or t
  misc_feature (1627)..(1627): n is a, c, g, or t
  misc_feature (1631)..(1631): n is a, c, g, or t
  misc_feature (1660)..(1661): n is a, c, g, or t
  misc_feature (1715)..(1715): n is a, c, g, or t
  misc_feature (1719)..(1719): n is a, c, g, or t
  misc_feature (1724)..(1724): n is a, c, g, or t
  misc_feature (1730)..(1730): n is a, c, g, or t
  misc_feature (1740)..(1740): n is a, c, g, or t
  misc_feature (1759)..(1759): n is a, c, g, or t
  misc_feature (1766)..(1767): n is a, c, g, or t
  misc_feature (1770)..(1770): n is a, c, g, or t
  misc_feature (1776)..(1776): n is a, c, g, or t
  misc_feature (1818)..(1822): n is a, c, g, or t
  misc_feature (1826)..(1827): n is a, c, g, or t
  misc_feature (1834)..(1834): n is a, c, g, or t
  misc_feature (1836)..(1840): n is a, c, g, or t
  Peptide Sequence Number=SeqID_8531
  Probeset Number=SeqID_15554
ncggtcacatagaacgaggtgtgagaagtacaatgatctgagataatgagatcaatatcgtaatnaacaccacagtcagctangttatcgtgcntattatcatatactatcagcaagcgactacattatcatgtctgcatcactgcatcacagtnagatatcacgagatatatgtgatatagcacacgtatcgatagaatcagacatcagatacgcacagtgcgggtcatgtaagtcatagagatagttgtcgtgatgagcagagcagtcgcgctgaagtatgcgtgtgcgtgagtcgcggatgctcgcgtcggtgatctgacgagtgcgcggcggcgtcgtctggcgctagtactagacatantgacgtacgagcgccgtgcgantacgcaccacagancagtgaaagtgcatgagattagtgtacatatcaagtgagcgcatgacgtgccgtagagagggggagcgagtgcgtgtcggtgtcgcgcggtcgcgtggaaggtagtcgcagtcagtacagcagctcgcgttactacagtatactatcaagtgacacacacagtatggacgtaggtactatagagtgacagcgcgcgcatatgcgtgattgaggcacganacacatacgtttagtgtatagagagagagtagtagtgtatcgaatgagangaattcntcactgtccagtgcgctccgtggtacattctgcgagagagaagatatgttaggtatcacattagatggccgatacatactgtataatgataataatnttctaacccatatccaactggctgtgtagntgagtcacacntcgcatgagttaactcgggagaactgttgcgtcgagcgcatgcgttgcgctacgttatcatcgtgcgagcacgtagagatatatagcggactgagatacacacagagaatgagagagacagagagcggagcgtaagagtgcggagatcatgtaagcagtgcatatgatgcattgtgctgagtagacgggagcgcgcatcgcctgaggctgagattcatttcagtcccatgancatacgtacagctcaatgtcgcagcagtgccgcgcgactcacgtcatcgtctcgcgaattcatagctattcgaaacnccactctgtgtgtaagagtatagacgcgcgtcgctactagagatatngaaagatgagtgtgagtgagctagaagacgacaaataagagaccatcgatactcacaatacattataataaaaatgacatatatatatatatcatcacatcatacgcatagagatagaccgtagagtaagaagaganaaacgtattcanagatacatagtagagagagatacataantcaaacatcaagagcataagtatagtgttagtatagtgagtatacgcgcacgatatcagtacgattatgcactatacgctaacgactacactatcagancgtacacacagcatgacgaagcagaatattaactcgctcatcagagcagatcacatacacacgtgacgatcgcacgtgtacagcatagatctaaatcatacatcacatactcgacacacaatacagcatcatcctccaccataccactcagatggtntgngcttnacgcgttggggcgtgnggcngggggcggaggatgttgggtggtttgctnnccagagtcgaagcgctctttgtccggcctcgtcgcgcccccgctctcacgcagntgcngcccncgtccntcctctctcnccctctcgctcccctcgtnccctggnntcnctctcnctctccctcctctctcctctctctcctctctttctccttccnnnnntttnntttttcntnnnnnccttttttttttt

SEQ ID NO: 5776 - DNA, 634 bp, Glycine max
  misc_feature (293)..(293): n is a, c, g, or t
  misc_feature (314)..(314): n is a, c, g, or t
  misc_feature (319)..(319): n is a, c, g, or t
  misc_feature (404)..(404): n is a, c, g, or t
  misc_feature (442)..(443): n is a, c, g, or t
  misc_feature (446)..(451): n is a, c, g, or t
  Probeset Number=SeqID_15555
ttttttttttttttttttgaaaaaaaagtttctcccttttcctctaacctttttcatggaagacagattacaagagttacgtgagcttaattgaacatggatagaatttaagtctctgtttggtttgaaaaaatgttctttgttttcttttcttattttcactaagaattacaatagttactttgttttcacttggtcaactgttttcaaagatatatacaaaaatcggtgaatacaaatctttgatcttcacctaacctttcatcatttcctatagtaaatttttgcaaacngggggatatataaaaaccacntagcntttttcatagtactagtgaaaacaaaaaaatgagaacaaaaattttttcttggataaaaaaatcccttaaatttctttttcccanttgcccattaaaaaaaagctttggtttccctagaaaannttnnnnnnaaaaaaaaaacctccccaaaaggcaaatctttttttgaaaaaaaactaaattttccctttaacaattgtttttccccaccccataattttgggtgcaaaaaaaaatttttaatggcgggggtttttttttcctaaaaccggggccaaaaaaaaatttttttcccgggggataaaaaaaaaaaa

SEQ ID NO: 5777 - DNA, 497 bp, Glycine max
  misc_feature (26)..(26): n is a, c, g, or t
  misc_feature (322)..(322): n is a, c, g, or t
  misc_feature (385)..(385): n is a, c, g, or t
  misc_feature (457)..(457): n is a, c, g, or t
  misc_feature (459)..(459): n is a, c, g, or t
  misc_feature (472)..(472): n is a, c, g, or t
  Peptide Sequence Number=SeqID_8532
  Probeset Number=SeqID_15556
ttttttttttttttttttgttctaanaaggatctttattcataaaaatctttatagaagtattcatagtcagttttttatgcaaataaatttcaaaagtaaaaaaaattgaacggatcatactaaatcaaaagtaaatcaatacgaaagcaaaggattattaatattcaattgtctgcatatatcaaagaccgctctgttaagttgctcattctttctgctaacactatgctcatgatctgatatcatcgccccaagatcttctctattctttcctactgatccttccaatactgcaaacttcttatacaagatcttattgncattattaatagaactaatcgccttttcaaagtccacaataatctgagtcgaactttccttgngaatctttgccaactcttgaacattatcctggaactcatgttgaacttgattgaccaagtcctcaatttcananaatctttgttgancacttaactgatcagcatgaacctt

SEQ ID NO: 5778 - DNA, 1075 bp, Glycine max
  misc_feature (601)..(1075): n is a, c, g, or t
  Peptide Sequence Number=SeqID_8533
  Probeset Number=SeqID_15557
acggcccaggcctccgagacaacagtgtacttgggatagttataataactctgccccatggtctcgggtaggaagctccaacagtaacagttctgccagagttcagcagaagtttactaaagaaaaccgaggttctacaagagaagagcatgttgacaattttcattatcaagatggccgaagaaatgaggtttattttgatgatagaacagcaaattctgagttgtccagtgcacctcctttgagctcctttaagagtaggacctcttctgaaagctcatgggatggatcatcagccaaatcctcaaaatcaactagggagagaagggggaggaaaaatacttcctcaatagcatctcctgtttatcgccaaggctacagaatgtcccattaacctccatgtaatcgagcagatgatgaacatagacagtgttcccgtctctttccttttctccggccttccatttatccccccctttctcatccttctcccgccccccctccccacccttttccccctcctctccccgtttttccccctttgcccccgttggtccccgtccgccgccgaccctccattccgcccctttgtcccgctttnnnnnnnnnnnnnnnnnnnnnnnnnnnnnnnnnnnnnnnnnnnnnnnnnnnnnnnnnnnnnnnnnnnnnnnnnnnnnnnnnnnnnnnnnnnnnnnnnnnnnnnnnnnnnnnnnnnnnnnnnnnnnnnnnnnnnnnnnnnnnnnnnnnnnnnnnnnnnnnnnnnnnnnnnnnnnnnnnnnnnnnnnnnnnnnnnnnnnnnnnnnnnnnnnnnnnnnnnnnnnnnnnnnnnnnnnnnnnnnnnnnnnnnnnnnnnnnnnnnnnnnnnnnnnnnnnnnnnnnnnnnnnnnnnnnnnnnnnnnnnnnnnnnnnnnnnnnnnnnnnnnnnnnnnnnnnnnnnnnnnnnnnnnnnnnnnnnnnnnnnnnnnnnnnnnnnnnnnnnnnnnnnnnnnnnnnnnnnnnnnnnnnnnnnnnnnnnnnnnnnnnnnnnnnnnnnnnnnnnnnnnnnnnnnnnnnnnnnnnnnnnnnnnnnnnnnnn

SEQ ID NO: 5779 - DNA, 1503 bp, Glycine max
  misc_feature (5)..(13): n is a, c, g, or t
  misc_feature (17)..(22): n is a, c, g, or t
  misc_feature (25)..(27): n is a, c, g, or t
  misc_feature (64)..(65): n is a, c, g, or t
  misc_feature (179)..(179): n is a, c, g, or t
  misc_feature (1432)..(1432): n is a, c, g, or t
  misc_feature (1487)..(1487): n is a, c, g, or t
  misc_feature (1503)..(1503): n is a, c, g, or t
  Peptide Sequence Number=SeqID_8534
  Probeset Number=SeqID_15558
ttttnnnnnnnnntttnnnnnnggnnntttgttattgtaatatatttatgttaatattttagtnncgaatcgtagtatatatactttgtagatcttgattattgttattcatagaatgttgtaatgtagtttaaatgttggagttatatacaccaataggacagatgtgtatatttttngcagttgtgttgtgtctgtgggcggagagagtatggagggattatttagctgtcattaggattaaaggcggttcggatggggatgaatgtgagaataggtataaggagagagagctaagagcggtggaggagagttggatgagaggggagaggtgtgtgttttcgagtttatatgtattttcgttcggtatttttgattgttaagttgaatattgttcttcattgatttcttcttcgaattcgtgtttcttgttgtggtgatgtttctctttctcgctctctatatcttctgtattattattctgttatttgtgtcttaattatgtgtcatataaagttcgtgataatgcatcgtgagagtgaagagtacgaaggtgcagggcgcacacaagctagggggccagaatataattatgatttatcggtagggcgagaaggtggtacaagcgagcgagatgataacaaacgtctcgcggttggtgcgctatattgagcgcgcctacgcatttgatatgctgtaggagtgcgtggcgtgtgtgtacttattgaaagattctttgttcgttctcgcgtgtgcttttgctatatagtgtcagtaggtaattattcttatgacagtatgatgtatctttcgtatattcccctctctctggtgcgtcttaattgatgcggaacgagctacggacattctccatgacgagtgtgtgaatttgtctcagtgtattacagggctaatgtctgctgagtctacaactcatatcacgatcgcgcgtcgtagccgctgtctcactatctatattataggtgcagaagacgaggacgggtggactgctggccaccttatcatcacgcatgtatatgacgcacaccatataagtataatatatatatataatattattatctaattcaatctacccctacgcgctctcttctcactccaattacatcggcatatatagatgagcggacgagtggctgagtctggtcgcgcgcgggtcgatatggatacgacggcggatgatgagaattgcggagtgggacagcgatgcacagtctgagaagatgagtaatacccacaaatagtagcatataaatatggtgtgagtcggagcacacccactatattactcaattcctgtagccacgagtattcacaatgtgcgtgttatttattaacattcaagagactatatacataccagacgaagaaccagtacacatgtattattggtcatctgattggcgccgcngcgcgatgtcgcgatggtgtacggttatgtggtgtagacgagagcggatacgcgnctatgttgctgtcgtn

SEQ ID NO: 5780 - DNA, 1948 bp, Glycine max
  misc_feature (1)..(1): n is a, c, g, or t
  misc_feature (7)..(7): n is a, c, g, or t
  misc_feature (23)..(23): n is a, c, g, or t
  misc_feature (26)..(26): n is a, c, g, or t
  misc_feature (33)..(33): n is a, c, g, or t
  misc_feature (37)..(37): n is a, c, g, or t
  misc_feature (43)..(44): n is a, c, g, or t
  misc_feature (48)..(48): n is a, c, g, or t
  misc_feature (53)..(53): n is a, c, g, or t
  misc_feature (56)..(56): n is a, c, g, or t
  misc_feature (75)..(75): n is a, c, g, or t
  misc_feature (83)..(84): n is a, c, g, or t
  misc_feature (86)..(87): n is a, c, g, or t
  misc_feature (90)..(94): n is a, c, g, or t
  misc_feature (98)..(98): n is a, c, g, or t
  misc_feature (101)..(102): n is a, c, g, or t
  misc_feature (104)..(104): n is a, c, g, or t
  misc_feature (114)..(114): n is a, c, g, or t
  misc_feature (118)..(118): n is a, c, g, or t
  misc_feature (130)..(130): n is a, c, g, or t
  misc_feature (146)..(146): n is a, c, g, or t
  misc_feature (164)..(164): n is a, c, g, or t
  misc_feature (167)..(167): n is a, c, g, or t
  misc_feature (169)..(169): n is a, c, g, or t
  misc_feature (184)..(184): n is a, c, g, or t
  misc_feature (187)..(187): n is a, c, g, or t
  misc_feature (190)..(192): n is a, c, g, or t
  misc_feature (196)..(196): n is a, c, g, or t
  misc_feature (220)..(220): n is a, c, g, or t
  misc_feature (259)..(260): n is a, c, g, or t
  misc_feature (265)..(265): n is a, c, g, or t
  misc_feature (281)..(282): n is a, c, g, or t
  misc_feature (294)..(294): n is a, c, g, or t
  misc_feature (302)..(302): n is a, c, g, or t
  misc_feature (306)..(306): n is a, c, g, or t
  misc_feature (315)..(315): n is a, c, g, or t
  misc_feature (317)..(317): n is a, c, g, or t
  misc_feature (333)..(333): n is a, c, g, or t
  misc_feature (342)..(342): n is a, c, g, or t
  misc_feature (345)..(345): n is a, c, g, or t
  misc_feature (365)..(365): n is a, c, g, or t
  misc_feature (391)..(391): n is a, c, g, or t
  misc_feature (397)..(397): n is a, c, g, or t
  misc_feature (433)..(433): n is a, c, g, or t
  misc_feature (454)..(454): n is a, c, g, or t
  misc_feature (456)..(456): n is a, c, g, or t
  misc_feature (469)..(469): n is a, c, g, or t
  misc_feature (504)..(504): n is a, c, g, or t
  misc_feature (508)..(508): n is a, c, g, or t
  misc_feature (514)..(514): n is a, c, g, or t
  misc_feature (566)..(566): n is a, c, g, or t
  misc_feature (568)..(568): n is a, c, g, or t
  misc_feature (570)..(571): n is a, c, g, or t
  misc_feature (580)..(580): n is a, c, g, or t
  misc_feature (594)..(594): n is a, c, g, or t
  misc_feature (596)..(596): n is a, c, g, or t
  misc_feature (629)..(629): n is a, c, g, or t
  misc_feature (633)..(633): n is a, c, g, or t
  misc_feature (644)..(645): n is a, c, g, or t
  misc_feature (664)..(664): n is a, c, g, or t
  misc_feature (705)..(705): n is a, c, g, or t
  misc_feature (708)..(708): n is a, c, g, or t
  misc_feature (723)..(723): n is a, c, g, or t
  misc_feature (861)..(861): n is a, c, g, or t
  misc_feature (868)..(868): n is a, c, g, or t
  misc_feature (1047)..(1047): n is a, c, g, or t
  misc_feature (1140)..(1140): n is a, c, g, or t
  misc_feature (1146)..(1146): n is a, c, g, or t
  misc_feature (1156)..(1156): n is a, c, g, or t
  misc_feature (1231)..(1231): n is a, c, g, or t
  misc_feature (1258)..(1258): n is a, c, g, or t
  misc_feature (1290)..(1290): n is a, c, g, or t
  misc_feature (1391)..(1391): n is a, c, g, or t
  misc_feature (1397)..(1397): n is a, c, g, or t
  misc_feature (1444)..(1444): n is a, c, g, or t
  misc_feature (1450)..(1450): n is a, c, g, or t
  misc_feature (1453)..(1453): n is a, c, g, or t
  misc_feature (1544)..(1544): n is a, c, g, or t
  misc_feature (1563)..(1563): n is a, c, g, or t
  misc_feature (1697)..(1697): n is a, c, g, or t
  misc_feature (1779)..(1779): n is a, c, g, or t
  misc_feature (1834)..(1834): n is a, c, g, or t
  misc_feature (1899)..(1899): n is a, c, g, or t
  Probeset Number=SeqID_15559
ngatcgngagtatatcgatcagncantagttgnatcntacgtnncgtncactncancagcagtgcttcagtttantatcctcnntnncannnnnctgnctnncnatgctcatgnatanctctcgtctgancaccatctgccgctcngcatcgacgtagtgtacnacnancgcatcagatcatgnccncgnnnccgncacatatcacacagcattactagngtactacatcactgctctgcagcagcacagcaccgtacnnatcgnctgacacagccgttgnntctacctgcagntgctctcnctgntcatgacgntntctgcatctacgttantccttcgtngcntgatcatgcatctaaatctncttctagcatagatctccgctgctgntactangcatgtacattcatctagatcgcgctgtagtctatntcatctgacatcacactgacncnactcattccctgnctcattgatagtgtcgtcgtcagcgcgtattgacncttnctcgtncaatttactctactccatctatcatccagatatcagaatctatcatactatngngnntactcatanatatgctgaatgantnaaagagagtcagtagacataaatcacgatcagncatntacgcgcgtgnnagacgccgcacgagtcatngtcagtagtcagactactgcgtcgctagacgaaccactagncgncatgcatggacacantagtacatagatcgtgtgagatgtatgcgtcacataagcatcacattagatacatcgctgtctctgctcgctgcctcgttgctccgtcctctggtctcgtccgacacgcagatgcatgcaacaacataacgcgagtcnccgcgcnactaatacatacaccgtgcgtcctgcacatgataacaatacccagatcgttgcacagaggatgacagatatgcgtcgctaggcatagacaatcgtgtctctcgtgcgatatgatatcatgtaggctgcacgtggcatcgggcatgcagacggcacatatgactgtcttctctgagatgntggatgcgagtatatcgtcacgtctccgactcatacgcgtgttcatatagacagatcagcatcaagagcgtgcacaacactatagtgctctcncgcctncgataagagntgaacgctaccatgtcgagatgacgatatcgacgcttggtgtgtaaggtatacggcgttgtgtgtcgctctctgncgtacagagcatgacagcagatagacnataacagtgatgtacgctacgctctacgaacnactcaacaggagaatgcacgattaatgtactacctcgacattcacatacgcactcacccgtcggcgagcgcctgagcgacctctgttcctcccttactcgncagtcntctatctatagctggtggatgtatctagcaccacactcccaccaatntatctnctntctatcagaacagaatacacaccgcatagtactctcatcgagccagtctagacgcacatgtatcctgcgcgctaccactcctctactctancagcatccgtggcctcccngccgcagacgacctacacgagtatacgcacagcactcggtccatacagcgagcatgcggtgtcggcacaggccactagcacacgcgttgtgctcgcaagatcagcctaggcgagcgtacagtacgcgcgagtgngccgcaagacatagtagaaacactctctcgcgccgcactcattgactacgaccgctctacacaggtcactctcatctctgtnccgaaacgccgcctgagcgtcaggtgcgtcgcgcgtcagcggcgctaccgacgcngccggatgtgcgagttgcggctatcgacagtagtcacaccgcacactacgcgctatcgctcatancagaatataatacctcttcgcctcgttcgctctcctgcgcgcgcctacg

SEQ ID NO: 5781 - DNA, 2107 bp, Glycine max
  misc_feature (1)..(1): n is a, c, g, or t
  misc_feature (11)..(14): n is a, c, g, or t
  misc_feature (20)..(21): n is a, c, g, or t
  misc_feature (23)..(24): n is a, c, g, or t
  misc_feature (26)..(27): n is a, c, g, or t
  misc_feature (29)..(29): n is a, c, g, or t
  misc_feature (31)..(31): n is a, c, g, or t
  misc_feature (75)..(75): n is a, c, g, or t
  misc_feature (79)..(79): n is a, c, g, or t
  misc_feature (81)..(81): n is a, c, g, or t
  misc_feature (153)..(155): n is a, c, g, or t
  misc_feature (157)..(157): n is a, c, g, or t
  misc_feature (166)..(166): n is a, c, g, or t
  misc_feature (196)..(196): n is a, c, g, or t
  misc_feature (199)..(199): n is a, c, g, or t
  misc_feature (209)..(209): n is a, c, g, or t
  misc_feature (212)..(213): n is a, c, g, or t
  misc_feature (305)..(305): n is a, c, g, or t
  misc_feature (391)..(391): n is a, c, g, or t
  misc_feature (414)..(414): n is a, c, g, or t
  misc_feature (497)..(497): n is a, c, g, or t
  misc_feature (576)..(576): n is a, c, g, or t
  misc_feature (683)..(683): n is a, c, g, or t
  misc_feature (816)..(816): n is a, c, g, or t
  misc_feature (879)..(879): n is a, c, g, or t
  misc_feature (911)..(911): n is a, c, g, or t
  misc_feature (928)..(928): n is a, c, g, or t
  misc_feature (1068)..(1068): n is a, c, g, or t
  misc_feature (1072)..(1074): n is a, c, g, or t
  misc_feature (1163)..(1163): n is a, c, g, or t
  misc_feature (1227)..(1227): n is a, c, g, or t
  misc_feature (1485)..(1485): n is a, c, g, or t
  misc_feature (1509)..(1509): n is a, c, g, or t
  misc_feature (1511)..(1511): n is a, c, g, or t
  misc_feature (1517)..(1517): n is a, c, g, or t
  misc_feature (1523)..(1523): n is a, c, g, or t
  misc_feature (1590)..(1590): n is a, c, g, or t
  misc_feature (1671)..(1671): n is a, c, g, or t
  misc_feature (1721)..(1721): n is a, c, g, or t
  misc_feature (1738)..(1738): n is a, c, g, or t
  misc_feature (1749)..(1749): n is a, c, g, or t
  misc_feature (1785)..(1785): n is a, c, g, or t
  misc_feature (1795)..(1795): n is a, c, g, or t
  misc_feature (1798)..(1798): n is a, c, g, or t
  misc_feature (1824)..(1824): n is a, c, g, or t
  misc_feature (1854)..(1854): n is a, c, g, or t
  misc_feature (1857)..(1857): n is a, c, g, or t
  misc_feature (1872)..(1872): n is a, c, g, or t
  misc_feature (1875)..(1875): n is a, c, g, or t
  misc_feature (1897)..(1897): n is a, c, g, or t
  misc_feature (1899)..(1899): n is a, c, g, or t
  misc_feature (1914)..(1914): n is a, c, g, or t
  misc_feature (1917)..(1917): n is a, c, g, or t
  misc_feature (1927)..(1927): n is a, c, g, or t
  misc_feature (1971)..(1971): n is a, c, g, or t
  misc_feature (1980)..(1981): n is a, c, g, or t
  misc_feature (2065)..(2065): n is a, c, g, or t
  misc_feature (2107)..(2107): n is a, c, g, or t
  Peptide Sequence Number=SeqID_8535
  Probeset Number=SeqID_15560
nggaaaatttnnnnaaaaannannannancnacccaccaaccgcgaccgaaaccacacgaccaaagccacagaangggngnggagaacttaagtgatatagttatacaatctatgtattaatatatttcacatcgaaatcagtaaagtataannngntaagggaangatgttatatctttagatacattattaatnttnagtataatgnttnnttagtcctcttccttcttcattctctcttctccttcctcacattcttatacctccttcttcctttcctctcttcgcttcgttcgctcctctntgtgtttgttgctaagactctctgtatatctctgtctattctccacatcaactcttctatataccactctggaccacctacactantattgacgaccaccgctacacangccaaccacgtcccagcacgcctctcccgacatacacataaatcaataaatacacaacaaataactaaatgcatcagctgacngatatcaatagacgtcttctgtcgaggtgttacagatcatactctaacggatgatgatgcctgctacgactatactctnctaaacgcactgtatacctcatattaggacgtactataatatagacatataggtagtgtgaatataagcaaacacactatccgagctagaaaagatagatatatcangcgtaaccacatactcgctcacgtatgacatacattcataatcgatgtgtatagcggtgccgtgactttatagtatatgtatataattcgcatgaatcatatagacgtagtatgctgtactatagttacgatntcgtacatactctatctctgactcgcaacttcttcgtacttcttcgtatactgacacagacanaatcaatcaaatactaatagtagattcactgngcgacaacagccgtgancacttcacgttggcatatacctacacgcatacataatcactgtcattaatcaccacctatctctatcttctctcttgatctatccatatcacaactctctctatagagcgagtctttgtgatacacacaacaatcatccnaaannnaattacatacataatctataatacatatcctctgataccttaacatactacaacacatatcacgattcgcgccatagtcatactaaaanacttcctctctctatcatcattgcacacttctctgcattctcgctgctcgcacactatcgctcnctacactcgatagcaacggctcgccacacagctatacatatcccgtgccgtagaatacacaagacaagacgtcggaggtcgtagcagccgacagaaacatacttaagttctgtccacctaatcgcacgtgccgccacaaactacgcgctgtctccctcgctctctgtctactctgacgttcactcctctgttctatactgattcgcgcgacaccggacacgacgatcgccgcgcatgataagatagcactctgtcagncgctctctctagatgcatagatanantctcanagtatngatctaccgcctctcatctcactcccacatgataccatcctctcatctctctatctctactacaccncacacctctagagatgccacgtcagtaccacgagcactaccaactcacgacacactgacagctcggtatcacctacactanaccacataccatctgcagacgcctagcccaccgtatataactgactctcntgaagatacgcgtacgncgcacagctantccactcatgaaatgcatctactagagatccgtatnctgtctgagntgntgtcactcgcagcgagtagcgcgagnagaatcctgatgctcgcctgagataccatnagnaatatgttaaatcancantagtgcagatcaagattgcctncntatcatcaccacatnatnattctcacangacgtcataaaataatagtttcacacgtacttacaatactacanacatacatnntactagttaccgacatgaataggaaggcaagaagagacgatcgttgttagatgtatgatatgaatagacaaaggagcacgcaanagcaggactatgagagatgacgacagtaatgaataaggactn

SEQ ID NO: 5782 - DNA, 1348 bp, Glycine max
  misc_feature (17)..(17): n is a, c, g, or t
  misc_feature (668)..(668): n is a, c, g, or t
  misc_feature (953)..(953): n is a, c, g, or t
  misc_feature (1075)..(1075): n is a, c, g, or t
  misc_feature (1196)..(1196): n is a, c, g, or t
  misc_feature (1348)..(1348): n is a, c, g, or t
  Probeset Number=SeqID_15561
ttttttttttattttgnccccccccccctctgcgtgtgtggtggggtggtgggttgtggtgtgccccccacccaaaacaaacgaagggcccccctccaaagagaaagacgaactcgaggatgcgttatgcgtaagtttgtgggtattgtgtgttattatgttgcttgttcccccccatagagcgccgagaaagaagcggctcgctaattcacatcgccgtagcacaacagtatcaaacaattaatccggattctcaccatcttcacgcccacgctgaggtagctgcggtcttaaagattattaggtgataggctgctcgggtggtgtgtgatgtgtaaagatagagttttggagagttatgtatatagatctgatgtagcagcggatgttgtggtttgtgttggatataaacaataatagttgggtgcacgtgcggatggatgaatgtgaagggaatgatgcgcaaatagacagagagaggagatggagtgggagcaggtggtgtgttgtttagtggggatagtttgctggtttggtgccgaggtggtgcgtgtgtgatgtggtggacagcacgcggccaggtagtgtgttgctgcggtttatcactgggccagtccgccaaaacggaagtactgcggtgtgggctgtttgtgcttcttcacgactcncaaccagccgtgtgtgcatgtatggtgggagtgagttgagagttggggtacaatcaggagagcagtagggtgctatgaaaatggtatgacgtgaagagaatctcaacctccgccgcaccacctggctgtagtgtgttggggtggtgtgagtgtacgacaatcccccccacccccggccgtgcttgttgtttttatatgattttaattttgctgataataaatgtgcccgcccgcgcccaccccccactagctggcgcgggggagagtgatgtgtgtcatatcggncttgggcattaacgagcctggtgaggtgatagtagtttccgaggcacttcacagcaggagcatgtgccttgctgtcctcggtacgtgcgagtgctggatacgagccacacacgatggtgggntcttgtctgacgcatgacgatgagactatgtcgggagagggatgaaggcccgaggccacgtctatttctggtcgctcgacattgtatgtttgtgacttgcttgttttgtggccgtagtagngtgtggggactgtgtacctacgtcgtcgcgtgggtgctgtcgtgtcttcgcaggcaccgcgagacgagatcgactcgctcggcagtcaggtgacagatggcggtatctatcacgacacgagtatctgcggagctgcagacaccgatgcacgn

SEQ ID NO: 5783 - DNA, 702 bp, Glycine max
  misc_feature (534)..(537): n is a, c, g, or t
  misc_feature (563)..(563): n is a, c, g, or t
  misc_feature (570)..(576): n is a, c, g, or t
  misc_feature (579)..(581): n is a, c, g, or t
  misc_feature (604)..(609): n is a, c, g, or t
  misc_feature (637)..(646): n is a, c, g, or t
  misc_feature (668)..(674): n is a, c, g, or t
  Peptide Sequence Number=SeqID_8536
  Probeset Number=SeqID_15562
acgagcagaggaaggaacctgaaaagcctctttatcaagtccttgaagagaaggaggaaaaaattgctccaggaactttgcttggaactacacacacttatgtggttaacactggcacccaggacaagtcaggggctaaaagggttgatttacttagaggacaaaagtcagataaagtggatgtcactttacttgccagagagttggatgccatggaaaatgttttacccgcgaagtatgaagaagcaagggaggaagagaaagatgcaagaaaaggagggcaagtccaagaggaataaggagtttaagttctaaaggtggtttcgtgtctttttctttcgcagaaaaaatgggggacccggaagttatccattcatcagagagtcattttccacgtaaagaggattgatggttagctttgttgtatggcatttctttcacaagtagttgtccgcaagtagcttgaatatttttggataggaacatactactcgtaatttaaacacctcagacagcgctggttccaataagggnnnnaaagatggaaatttagaccagtgccntatatcnnnnnnnggnnngaaaaacataaggaacagaaaannnnnnaaaaaaagttaataaaaacagagtatannnnnnnnnnaattcatgggcatcatcagtannnnnnnaattaagctccacttgatttaagagttg

SEQ ID NO: 5784 - DNA, 1626 bp, Glycine max
  misc_feature (25)..(25): n is a, c, g, or t
  misc_feature (62)..(62): n is a, c, g, or t
  misc_feature (229)..(229): n is a, c, g, or t
  misc_feature (241)..(241): n is a, c, g, or t
  misc_feature (364)..(364): n is a, c, g, or t
  misc_feature (373)..(373): n is a, c, g, or t
  misc_feature (436)..(436): n is a, c, g, or t
  misc_feature (447)..(447): n is a, c, g, or t
  misc_feature (460)..(460): n is a, c, g, or t
  misc_feature (471)..(471): n is a, c, g, or t
  misc_feature (485)..(485): n is a, c, g, or t
  misc_feature (602)..(602): n is a, c, g, or t
  misc_feature (722)..(722): n is a, c, g, or t
  misc_feature (839)..(839): n is a, c, g, or t
  misc_feature (884)..(884): n is a, c, g, or t
  misc_feature (902)..(902): n is a, c, g, or t
  misc_feature (965)..(965): n is a, c, g, or t
  misc_feature (990)..(990): n is a, c, g, or t
  misc_feature (1028)..(1028): n is a, c, g, or t
  misc_feature (1145)..(1145): n is a, c, g, or t
  misc_feature (1147)..(1147): n is a, c, g, or t
  misc_feature (1157)..(1157): n is a, c, g, or t
  misc_feature (1180)..(1180): n is a, c, g, or t
  misc_feature (1236)..(1236): n is a, c, g, or t
  misc_feature (1266)..(1266): n is a, c, g, or t
  misc_feature (1336)..(1336): n is a, c, g, or t
  misc_feature (1353)..(1353): n is a, c, g, or t
  misc_feature (1393)..(1393): n is a, c, g, or t
  misc_feature (1408)..(1408): n is a, c, g, or t
  misc_feature (1608)..(1608): n is a, c, g, or t
  misc_feature (1623)..(1623): n is a, c, g, or t
  Peptide Sequence Number=SeqID_8537
  Probeset Number=SeqID_15563
gatgtgagctagctcagcgatgcanacaactatacttacatacactcgaacttactgcacanatataatattatttaatcctcttaactactatctacttgtatactatcattatgtactctcttacatctcatgtgtgtgcatatactctcatatcatatcatgcgtcgtctgaatgctctcgtcgtgcatcatcacttcgcttcatgagagctcgtcgatgtagtantctgtatcatcnattcatgtagtccgtgctatgcattatgcgtatagtctctcgatctgtgctaatcggacgttcgtactgctgtatatagatgatctctatgagtcttagtatgcgtgatcatagactgtgatngtgcagtgntagtgtgcgcgactgtacatgtatccacactgtcagatcggatccaattactgtatattagtngcatgaactgnacgatgacagacntgcgtaccgcncattcgacgtgatncaaaccatacaactcgtacgatctcgcctagctcttctcttgatcgatgctcatcgcatgatgctgaatggatgagtataacatacatggcacactagcgaataatagtgaatcctntctcgacatcctcttacgagcgcagatgacgccacagtcgaatgcacagtgtgctacagtgcgaacgcgagtgctgctgccattgagtcgattggtctcttctatctgtagcattctgcngtcgactttctattagcactactctacttcaccgtccgctctcaggatactgatgtgtatattctgtcgtgcgcggtgcgacgtgtgacgagctaataaactagtacgtgtgtctantactactatctcactctctagttgtacatggtatccgtgcctcgntggagctgcggtactgancgatgcgtcgctcgtcacgacgcgtagtgatcacacattcatagtctactgaactagccgatngtctatgtagtgtcgcactgtacancgctcttatgtatgatgtatgtcgacagatacaagaanttactagtactcatacactgatgagcgtagcgtactgaacagatcatcttatgaactatcacaaccgcatctgctcatcacaatgcagctgcgatgtctcatggtgttgcatgtgangncgattgcgtncgagatgtatgcttgcgacgtcnatcacgcgtagctccgcgacgcagacgtagtgcaatgaggaagcatgaattgctcnatgattgctcctcattcatcacacaccacnttagaactgatataatactatactaccacggtcgtgactcgttcgcattgtagcttcggatctctgctgncgtgatcgtatgtgtangactatgctggtgcgtacggatgtgcgatgagcatcagangttgtagtctgtatncaacgctcgattcatgcgctcttctaatactaatatataatgagcttagtactgcacgcgactactatctgatctgtgactgctgagtacgtatggcaacagtatggctggcagaaaagtcgtaagtgccagacgtgtactatcagttcatacatgcgtctagcactgcgcacgtatcgctaaatacttgattatcattnctgccgtagatcgcncag

SEQ ID NO: 5785 - DNA, 631 bp, Glycine max
  Peptide Sequence Number=SeqID_8538
  Probeset Number=SeqID_15564
gctggtgtggcatgtggttataccactcctttgcaaggaattgcgaggtatgtgaagacggctcatcaagtggggtgtaggggtgtggcttgtaggggaaatgagctatttaacgctgcagaaaccatttctatgcaagctgattcaaatgaatggggattggaccaagatcatactataaactcgtacacaaaacaatgaagaggacttcttttacggggcgtacaacgaaatctcgagagatgggtagatgctgcctcatatgtccacactatattgttcataatgtgatgcgttccaggcgatctatgcgacgacaaaattgacttcaagatatcaggcattgtgggaattggccatccctaggtactttgagcaattgtcatctgtgatgaaagcttaccatctactatataagaaggatcggtacgaagaagatgctcctcacacagctacagagtccaatgagctcatactacctttgacaatgcgttatagacatcaacgaggtaaggaggactaacctatggataatactgaagccctattgcttccctatgacgatcatagactaggttactatgatgacgactcaattaagctcttgccccaaagcagacataacgaccat

SEQ ID NO: 5786 - DNA, 479 bp, Glycine max
  Peptide Sequence Number=SeqID_8539
  Probeset Number=SeqID_15565
aacagaaaaaaaaaaacagaactcgcacggttctcgtctaatctctctctccctctctctctacaatggctcgatcttcgtctccgtctctttctctctctcgctgccgattcgccgcggtctccctcctcccttcatctcgatccatcttcttccgatctcaatcctcgaaccgccgctccaacctcggggagttgattgagatcgacgtcgccgcgtcgcagtcgcagtcgcaatcggatcctctttcgcagaagctggaggacgcggtgcaccggataatggtgcgccgagccgcgcctgattggctccctttccttcccggcgcttcgtattgggtcccgcctcgtaggtcccagtcccacgggatcgctaagctcgttgagaagctggcgaatccggtcggagatgaagagtcagtctctgtcgcgtcgggtcgtggatggccttgttctgattacttcatcaaaggtgtagag

SEQ ID NO: 5787 - DNA, 961 bp, Glycine max
  misc_feature (1)..(154): n is a, c, g, or t
  misc_feature (755)..(961): n is a, c, g, or t
  Peptide Sequence Number=SeqID_8540
  Probeset Number=SeqID_15566
nnnnnnnnnnnnnnnnnnnnnnnnnnnnnnnnnnnnnnnnnnnnnnnnnnnnnnnnnnnnnnnnnnnnnnnnnnnnnnnnnnnnnnnnnnnnnnnnnnnnnnnnnnnnnnnnnnnnnnnnnnnnnnnnnnnnnnnnnnnnnnnnnnnnnnnnnncagtatatatatatgtatgtatatcgggtaaattaggtggcggttcaaatttgttccccgtatatgcatgatatccttttcagatggttggttgataatattggttacttgtttgcacctgcttgcattttctgatggtagagaactcaaggttagacataaaaagcctcattaccaatacaatcatacgcttgctacaatattagtggaatatgcttctgcggtatacttgtcagatttaactgaactttttacatggacgtgctttaagtgtaatgactggttcaaggcatttgttggggtggccgagatttgtaatgatagagttagttgttgacgtcgagcattgcttacaggcattcatagtagtggccgatgatcctattgccattatcattatattcagtggaacaaatggacacagctaacagaattggattgaagttatatagtgtacccaaattgaactatacttcctacaattttagattctaatgatagaccagtggatttttttggagatattgaaattatagcaacagggcattcaatgggaggggcaatggcttcattttgtggacttgttttaacggtaaatatnnnnnnnnnnnnnnnnnnnnnnnnnnnnnnnnnnnnnnnnnnnnnnnnnnnnnnnnnnnnnnnnnnnnnnnnnnnnnnnnnnnnnnnnnnnnnnnnnnnnnnnnnnnnnnnnnnnnnnnnnnnnnnnnnnnnnnnnnnnnnnnnnnnnnnnnnnnnnnnnnnnnnnnnnnnnnnnnnnnnnnnnnnnnnnnnnnnnnnnnnnnnnnn

SEQ ID NO: 5788 - DNA, 893 bp, Glycine max
  misc_feature (1)..(2): n is a, c, g, or t
  misc_feature (24)..(24): n is a, c, g, or t
  misc_feature (893)..(893): n is a, c, g, or t
  Peptide Sequence Number=SeqID_8541
  Probeset Number=SeqID_15567
nnatttcgctttctattatggcgnccgagagtgcttctcgattgacttccatggctgattcgtacattgggagcttgataagcttgacctctaagagtgagatcaaatacaaaggtattctctaccacatcaacactgaagagtccaatattggcctcaaaaatagtattcttctgctacccacttcttttttcttatgaatttcctttcaagatgttaataatatgcgtcactcgagaatgagttgcatttgcagagcctctctgaccgcatggcggagctagagatcttggggctattcatttttgtgcagattcggttttattgtttgcaaaacagagggagcggtgagtcactgatggcgaaggcagtgatgatgggtggggtcctgtttggaaaaagcactgttgttggtgcttagctcagttggctgagtctaattataggcaggttaaacacattttaccccacttttcttataattatacttcatccaaaggcctaggaatatgatccaagaatgctccataagataaatgtagttgcataatattatatgacaagaaattaagttttctatgacaaccccccaaaaatattcttattgggaatcaaatctaccagttggttgctcagaaacatgggttttacctgacaagcaagtgtggcagctccaattccacaagtacttcacgtacaagtttgcagaaaggagacccctaaaagaaacaagtattcaaatttaaaattctgttccagcagataatggctacattatcatgcatgctgatctataatttggagataaaagtcctgaattcattaagcattagggtgtatggtttgtgtatattgtggaccaacctcatatgcccataaaataagaggctttn

SEQ ID NO: 5789 - DNA, 1608 bp, Glycine max
  misc_feature (20)..(20): n is a, c, g, or t
  misc_feature (195)..(195): n is a, c, g, or t
  misc_feature (895)..(895): n is a, c, g, or t
  misc_feature (946)..(946): n is a, c, g, or t
  misc_feature (962)..(962): n is a, c, g, or t
  misc_feature (1015)..(1015): n is a, c, g, or t
  misc_feature (1034)..(1035): n is a, c, g, or t
  misc_feature (1090)..(1090): n is a, c, g, or t
  misc_feature (1174)..(1174): n is a, c, g, or t
  misc_feature (1247)..(1247): n is a, c, g, or t
  misc_feature (1318)..(1320): n is a, c, g, or t
  misc_feature (1379)..(1379): n is a, c, g, or t
  misc_feature (1383)..(1383): n is a, c, g, or t
  misc_feature (1414)..(1414): n is a, c, g, or t
  misc_feature (1477)..(1477): n is a, c, g, or t
  misc_feature (1479)..(1479): n is a, c, g, or t
  misc_feature (1481)..(1481): n is a, c, g, or t
  misc_feature (1505)..(1505): n is a, c, g, or t
  misc_feature (1560)..(1560): n is a, c, g, or t
  misc_feature (1588)..(1588): n is a, c, g, or t
  Peptide Sequence Number=SeqID_8542
  Probeset Number=SeqID_15568
tatgtgcgccacctcatcantaaatattttactctcactacacaattgattgtttatcactctaataactctcgcgccctcacgcgaccatgatctctaccatacgcgacctcgtagataataacaagaatcttaagtaatccgataagaaggcgatttacaatatacgtagatcgcataacgcagaaaagcggnccgcaggtgtgagggctgttatatggttggttataatcctcttccggcctccgccatacacacacgcgccgtcccctatcttgtatttgtggtatgttatttaagacgacgtacctggacactgaatcttggctctcttgtgtactgtccgaagtgccacacactatctactcactccctacataccaacgcgcgagatacttcgtacctcatttgctcacatgcgtcgtatgcgtataatatcgattgtgctatcgcgttcgttatcggctcctgtatgtgggactagtaagaggctggcgcgcactgacgtgtccgtggtcctgagccgaacacagagctatatatattttgagatgaaaggtataccgcgactaatcagcccgaacacgacaacgagaaaaagcgaagaaggccgccgtagggagcgggttctccaaatctacgtgtttcgccggcgcaggtgtgagtatgtactcgtctatctatcacaccacgaccgcgcgagtatatggcgcgatacggtgtgcggggtatacgtgtctcgcgcgtagatacacgtagagcgaaatgagtcgcgatcgacgctcgcctgtatcgcgtgcgtcgtgattgtctggctaatgtatatccacattatgcacatctatatgtgctcagtgcgtcgttagtgcatgtagcgcgatcatacataacgttntatctagctattagtactactactctcctgcgttacgccggtgacacgagnacgaaccgccagtcantcgctccacataacctaatatcgtactgtattctcgtattactcagcgttacntcgtgatatattatgaagnngacttgagtatatgcacgcgattattgtacactagcgatactgctcgctctttantacaaatatatcactatcagtcttatatcactctcccacgccgctgtatactgtgcggtgagcactggcattagtgtatgtgtngtgttacgctcccacacgcgcgctgacagcgcgagatcgcacgatggctaacgtatccgtgtactatatattnatatacacgcggcgcgacgtacgtgcggacgcctaggtacacggtctctgaccggtaacgcagttagtagnnngtcgcgatctacacatgaaggtacagacatatcgtatatattagtatcaccacacggcncgcnatcgtcagagtacaccatcaagcactcgcancctagttctgcgccgacactcaacctactctgcagcgcgatccagcacgacaataatgatcgntnanatacggctgactcgctggcagacngcagcatgagattagcgcgtacgcgagtatacataatgatcatcgaatgcgcgcncgtagcgatcgtttgcatactatgacancgtgatagactctacagtag

SEQ ID NO: 5790 - DNA, 1443 bp, Glycine max
  misc_feature (22)..(23): n is a, c, g, or t
  misc_feature (35)..(35): n is a, c, g, or t
  misc_feature (39)..(42): n is a, c, g, or t
  misc_feature (58)..(58): n is a, c, g, or t
  misc_feature (63)..(63): n is a, c, g, or t
  misc_feature (101)..(102): n is a, c, g, or t
  misc_feature (123)..(123): n is a, c, g, or t
  misc_feature (182)..(182): n is a, c, g, or t
  misc_feature (240)..(240): n is a, c, g, or t
  misc_feature (242)..(242): n is a, c, g, or t
  misc_feature (265)..(265): n is a, c, g, or t
  misc_feature (298)..(298): n is a, c, g, or t
  misc_feature (300)..(300): n is a, c, g, or t
  misc_feature (303)..(303): n is a, c, g, or t
  misc_feature (349)..(349): n is a, c, g, or t
  misc_feature (389)..(389): n is a, c, g, or t
  misc_feature (406)..(406): n is a, c, g, or t
  misc_feature (431)..(431): n is a, c, g, or t
  misc_feature (456)..(456): n is a, c, g, or t
  misc_feature (490)..(490): n is a, c, g, or t
  misc_feature (549)..(549): n is a, c, g, or t
  misc_feature (558)..(558): n is a, c, g, or t
  misc_feature (560)..(560): n is a, c, g, or t
  misc_feature (567)..(567): n is a, c, g, or t
  misc_feature (649)..(649): n is a, c, g, or t
  misc_feature (801)..(801): n is a, c, g, or t
  misc_feature (809)..(809): n is a, c, g, or t
  misc_feature (881)..(881): n is a, c, g, or t
  misc_feature (909)..(909): n is a, c, g, or t
  misc_feature (911)..(911): n is a, c, g, or t
  misc_feature (915)..(915): n is a, c, g, or t
  misc_feature (924)..(924): n is a, c, g, or t
  misc_feature (994)..(994): n is a, c, g, or t
  misc_feature (1022)..(1022): n is a, c, g, or t
  misc_feature (1037)..(1037): n is a, c, g, or t
  misc_feature (1062)..(1062): n is a, c, g, or t
  misc_feature (1164)..(1164): n is a, c, g, or t
  misc_feature (1172)..(1172): n is a, c, g, or t
  misc_feature (1274)..(1274): n is a, c, g, or t
  misc_feature (1330)..(1330): n is a, c, g, or t
  misc_feature (1406)..(1406): n is a, c, g, or t
  misc_feature (1408)..(1408): n is a, c, g, or t
  misc_feature (1414)..(1414): n is a, c, g, or t
  misc_feature (1442)..(1442): n is a, c, g, or t
  Probeset Number=SeqID_15569
tgtgagtgtgatcgctgtgttnnattgtttctttntatnnnntctgcctcacgcgacngcacngcgactctactgtcagtgaatataacataaatcagacnngcgagaagcgagcaagatacnaccagcaccatacgagatgatcaaaacgctaatatcgccagtagatatatagcatgtcnggtcaccgcagcgaactcgctcgatatatcttgtcgtctactccgacgactatctcancntcagcctcagtcgctcatcgcanatgctgtatcagtcgatcgctcaggcaacacgncntanataagccgaatcgctatgtctgctctattcacgatcactacatacncagtcggtattaggagatatacagagagtattactacgcngatgttactacacggtngagtcctacctatagctcgtgaatncagctaaagtcgtcagtcctctcgntgacacctccaagtgcgattattctaagtatagntgcacacccacgtcagctacactcgtttgtctagtaagccactgctcagcgctcacgcntacaatctnangtctctntctctgagcatacagctctcggtactgaatcgtcgtagttcgcggatcgctcataaaaaaagactttcattttaacctacancaactagagctgtatcgtacactgaggaacatattgcttcttgtatctgtgcacacacatgaccgctcgatcatcacaacaattatgactgatacgttccacgcgcataaagctgcacgacgatcatcttcgctcgcccaatccgcgagcancatgcgtnggcgcacttctctcctgtgctgtggcaataggacatcgtgcgcttccaagcactctattctatatacgtcgngaatgtgtattgtctcgtgtctcatttntnatantagtaatanatgatagagcacggagatcacgcacgacggaccggttgctagtgacgacaccatctaccacgcacttccnctatcagacgagagtgtgggacgcaccncccccacccctcacngcgctcgcagattagaacttaagcnagtacgacaccaacatacacgcatctgtaatgtctcacgcactcatgagtaatagtgtatcatagagttgacgcatagtcgagtacgccacagcgctagacnagatctcnatctaccagctcactcacaatcgtgacatacgcactgcagatgatacatggtgcagcgaaaccgtgagcttgtcgctatcacgatgtatacacacccgtttnattctcaccaacaccgctggctaccgacactacatacgtctactcgcgacgacgcnactgatctgaattaggcggtcaatcggtatagccagaaaagaccacatgacatatgatgtgtaaatactactacancnattgangacacattgtgatacgcgtgtacctccng

SEQ ID NO: 5791 - DNA, 557 bp, Glycine max
  misc_feature (507)..(507): n is a, c, g, or t
  misc_feature (510)..(510): n is a, c, g, or t
  Peptide Sequence Number=SeqID_8543
  Probeset Number=SeqID_15570
tcagctacgtaggcccccccccccgtgataataatcgatagaagtgtaatctcgaaataatggcgtcgcgcttcttcgtgtatagggtagctcagtaccccgccatcccccaccaaatcctcggtgagcatgggtcgcgcattgagtcacccaaattttggacttttgttccttcgtcaaacatccttcgtctgtacctgagtcacgccacgcagcccctcaagacccgacaatccagctatgtcgcaaaaggggaagcagagcgccagctcggcgaagggaaagaagtcctccaagccgggcgctgagagcaagagcgaggatgtcttgcaggcagtggtacgcaggcattcgaagagctcttgtcacaagcaatgctaatcagggcgcaggttcttgccgactcattccaggaccggttcaagcctctgaccgtcgaaaagccaagagtaagcccccgcccggacggtgttagagcgatgtgctcacttggtatacagtgtctgntgnctcttgcgaacacgcccctcatcgaatacactcttgaatttctcgcc

SEQ ID NO: 5792 - DNA, 468 bp, Glycine max
  misc_feature (278)..(278): n is a, c, g, or t
  Peptide Sequence Number=SeqID_8544
  Probeset Number=SeqID_15571
gtttagcgcgcctgttggagatgctctaacagcgtggaaaaacgagcgggggtgtcgcttgcagcctctggtaaaactcgttcgcacaaaggagagaggccgaaaagaggagacgctgagagaggaacagatacatcctcgtcgcagcaagaccacacgacggctcaccctcgtcagcgacagctcccctctccctgtaatccttagccccttgccatctgggtgcgccgtccccttccaggcacagctgccggcgacctctccttcaccatcaccanctctccaccctgagctccgacctacccaccatgtcaagcaggtccagatccgccacggctcccgcagccacgcgccggcagaccaatcgggtgcgcaggtgcacgacgtgtggttatactcttccactctcgtggccaccattctgcttcctcccctcccctggttcagcagcagcagtagtgacacacg

SEQ ID NO: 5793 - DNA, 1902 bp, Glycine max
  misc_feature (224)..(224): n is a, c, g, or t
  misc_feature (244)..(244): n is a, c, g, or t
  misc_feature (462)..(462): n is a, c, g, or t
  misc_feature (788)..(788): n is a, c, g, or t
  misc_feature (832)..(832): n is a, c, g, or t
  misc_feature (933)..(933): n is a, c, g, or t
  misc_feature (1129)..(1129): n is a, c, g, or t
  misc_feature (1156)..(1156): n is a, c, g, or t
  misc_feature (1191)..(1191): n is a, c, g, or t
  misc_feature (1276)..(1276): n is a, c, g, or t
  misc_feature (1284)..(1284): n is a, c, g, or t
  misc_feature (1327)..(1327): n is a, c, g, or t
  misc_feature (1341)..(1341): n is a, c, g, or t
  misc_feature (1379)..(1379): n is a, c, g, or t
  misc_feature (1602)..(1602): n is a, c, g, or t
  misc_feature (1635)..(1635): n is a, c, g, or t
  misc_feature (1668)..(1668): n is a, c, g, or t
  misc_feature (1742)..(1742): n is a, c, g, or t
  misc_feature (1763)..(1763): n is a, c, g, or t
  misc_feature (1796)..(1796): n is a, c, g, or t
  misc_feature (1868)..(1868): n is a, c, g, or t
  Probeset Number=SeqID_15572
taggtggtgtgcgctacccggcggcgcgcttctgtttatgggacggcgcggatatatgtaccgcgcagataaacgtgcctctccatctgtttccgttgtcggtgttgccataccacgtgtcccggcgtgacaattacccgcatttaatatgtattctgatgctgcgtatctcaacgacgagtgagtgtgtaagaaggaggatcgtgtggcgagtggcgcgcgcnatctgacgaggcgctggtgntgtgtatgcagcgcgctgcatattatatatatagcataattgtactcctcgcgcgctccatgcttgtatgttgctgcgtgtatatatatataaatatgttagacgaactcgatgctctacgctcgatctactaataccgccggtctttatgtattgatctatatcgcatctatgcgtcgccccgctatacgtattatataatattcgcggttctcccntattcgtggatatcggcttctagtgttcctcgcgtcggcgtatatatacgatccgcggcgcgcgcgtgcgtccgcgccgcgcggccgcgcaccatagacgaacacgcggtgacagtagtctgatttaccgcacattcgcgttagtgttgtggtatatttatcacggctgcgatcgcgataccgcgccgcagagcgagatctataagtgtagtatattatatactctcctgataatagatattctcggtaatatcgcgcgcacgtacactataccgattcctatgatttctcttcgcgcgccgactacttatataatatgtgcgcancgctagatttgatatagatacgcggcaccgcgcgcgcgcgttantatatatattgagatgtgtgcgagagtgcgaactcagagagcacacgcgcggcgttgattatattcacgcggcgacacaatcttgtgttacgattgtagangcgtgttgtgtgtgactcgatagaaatcgactgacaacgtagctgcgcgactgggtatatataatatccgcgtacttcagagagaacgtacattatgtgtgtcacgcacgacgcgctagcagtgtttgtgttgatgtcgatcaccaccgcgcgtcgatggcgcgtttgtgacgcacacaatctgtttattttctcngacgagcaactgtatgctaggggcttnctctgcgttcgtgcgtctatctattgctcatcgcnatacgagagaatggatgtcgttgggtaatattaatcctatcatcattgatgattcatagatgctcgtctattacgttgatggtgngtgctatngtctcggcgtatatataactgtacacgcgacagcacgtagtgncggtctacgtcgantgtgatatagtataaatataataatatgatacgcgagncgcgccggcagattatatatgacgcggcggcggcgtgtgtgcgtagacagatggctgacgtatggcgatatatgcgtcgcgatatgtcggactcgcggtgcgcgcgtatatacttataaatatatataagtaatcgtctgtatagacaagcacgcatgcgctgcggcgcgcgcattccgttgtgcacgtgcgtgtataatatatatagcggacgactgatcgngcgcgtgcggatgatagtgagacatagagagtnactgagtcattcacatgcgcgtgcgtggggctngatcagacgcgacgtgagatatgtagactgagtcgttgagtgatccattagcgagtggcgacgcgcggcgcggngagcgactatatgtataggtnatatatgcgtcgagccatgagacggtggtcagngcgggcgtcgcgattagtacgatatgtgtatatactcgctgatcgcatctctcaggcgtgattatataacancacacatattgtgttggactacgcctacaccacg

SEQ ID NO: 5794 - DNA, 1419 bp, Glycine max
  misc_feature (91)..(91): n is a, c, g, or t
  misc_feature (123)..(123): n is a, c, g, or t
  misc_feature (250)..(250): n is a, c, g, or t
  misc_feature (306)..(306): n is a, c, g, or t
  misc_feature (552)..(552): n is a, c, g, or t
  misc_feature (734)..(734): n is a, c, g, or t
  misc_feature (1026)..(1026): n is a, c, g, or t
  misc_feature (1073)..(1073): n is a, c, g, or t
  misc_feature (1137)..(1137): n is a, c, g, or t
  misc_feature (1158)..(1158): n is a, c, g, or t
  misc_feature (1260)..(1261): n is a, c, g, or t
  misc_feature (1274)..(1274): n is a, c, g, or t
  misc_feature (1332)..(1336): n is a, c, g, or t
  misc_feature (1346)..(1347): n is a, c, g, or t
  Peptide Sequence Number=SeqID_8545
  Probeset Number=SeqID_15573
agtttaggagtatgtgagctggagcggtggggtgtgatatgcacgagtacaggcgaggaacagaatggtgagttatagcatagagtagcgnttgagcgttgcgtgtgtatgttgtggagcgcnctgtctctagttgcacaatagagcgagaagtgcagaaacacagtcgcgagcaggtgacaggcagcgcactgtatgtgactagcagaggccgcatcggtgcggttggttgcgttggtgcgtcggtgcncacgacaggcgacgtatatatattcttgtgtaaatctcacgatctttatctgttcncgcatgtcagtagagtgttggtgagattgtccaatgtggcgtcgctagctgcggtggggcatgattgagtgtatgttgacgtgtggagtgtgcatgtgtatatcaaatgcagataagtgataggatttgcgtagacttatgtatgctacgtatcgcgggtgcgggatacactactatctattgtattcatgagacgcacaggagcggtggtgttgtgtgcgacatgatatactcgtctacactacntacgatgggtagagagatatgtaaatgaagcgaaagggacgatgcataacacgcgagcgggtgagcggcgaggaggctcggctgatctacgtatgaaagagaagagcagtgggtgagggcgctagcgtgtcgcccagatcgatttatacgtcttcccccgccgtcggtcattaagtatattngactaagacatgtacctactcacctctcctcatcctcgcttcctccctccttatggtcgccgcttggccatcatactcgctcacattgtcatgtttaactgcacacatgcccgtccagacctttacacgcgtcctctatacactacaaccaccgctcgctacctctttctctatttataaagttttattttatgtttattgtatttatttgttgctttcttattttctccttgcagtctccgtgttcacgtttcgcacttgttctggcggctcgcgtcgtgatcggcgtatncgttgcgtgtcttggtcggcatgtggagcagctacgtcctcgctgcntagcgtcgaccacccaaaaccgtatgctagagatgaataagggaatgtccacgtactggtgacnctgaatcattcggtcgtcctntgcggtgatggcctcttctagggcggtctcaggtggtggtgaggatcgcgtggtggtggtgatcttcacgtcaggaccgtgtaaaataagagacgacaaacnnaattaaatagaanaattacaggggagagaatggcgagttcgatatatatcacaggatgcggcggtgtgccnnnnncggcgggggnnggggtgagaaggaggagaaatatagtgagaaaaaaaggaaggggacgcccaaacacagccccaccccaaaac

SEQ ID NO: 5795 - DNA, 528 bp, Glycine max
  Probeset Number=SeqID_15574
ttttgtgaattttggatacccccaaggtgatggacttggagctgaaattgttggcccttttggttttgtttaccccgttttttttgcccctgatgccaagaaaaacgctaaagactctcccgttcctattttggctccccttccccttggatttgctgtgtttttggtccacttgggtaccatttccctcccaggaactggcatttacccagctaggagttttggagctgccctcattttcaacaaaggccatgcatgggatggccaatggattttttgggttgggcctttcattggaactgcccctgctgctgtgtttccccaaaaagttatccgagcccttccttttaaaacaaagggttaggctcttgtttttgtatgggcctgcctgtattagttgttatttatgggtctggggtttttttccttttgaaaaatcaagtcaatctttttgcctttgtgttaatcccttgtatggatgtaaattatgacatgatttcttccttgattgtatttgtggccctttgg

SEQ ID NO: 5796 - DNA, 998 bp, Glycine max
  misc_feature (998)..(998): n is a, c, g, or t
  Peptide Sequence Number=SeqID_8562
  Probeset Number=SeqID_15575
atataatcctaaccaatctctatatgacataatatagttgtgttatctagaaattggtcgaaactcgaaaccacataatctttgactgtgtaataatttccccatacagaactactaaaagcaaacattgtacttattgtgaattatacattaaaacatgtttttttttttatgacagatcagcgtgacggcagggtcctttgtccatacgctgcttctaactggttatgcgtttatccacgaggactccgacaactgctgctttacatcaagaagcaatacaacagccccgtaatttacattactgaaagtggtaacagatctgtcatattttattttctcggataattctctgcatactgtaahcaatattgataaagctaatgtttcataacaaacaaatataaaaagagctaatgaaaatataaaacaaaattaattgataggttatgatgagctcaacgatccaacactatcacttgaagaaagcatgatagatacttacagagttgattacttttatcgttatctttattatcttcaaatggcaatcaggtaagtaatgcttttatcagaggagcctctgaagctctctctattaattgatttgtttgttttatgcattttaattcagagtaatattaatcctattttgtttcatagttcttttttacatttacagaaaaaggaaagtgtagaaaaccagtataggagtgtgacttttttggttaattcttttgtttttgttgacttttatgcacacaagggatggtgtaaatgtcaagggatactttgtatggtcattgctggataacatggagtggagtgctggctatactgtgcgatttggattggtctttgtggattacaaagatggcttgaaaagatacctcaaactctcggcacaatggttcaagaattttctcaacaaatyttagtagttacacatatatgttcagcatggttccaagtaaaataagatatgaagttgatgtttn

SEQ ID NO: 5797 - DNA, 2045 bp, Glycine max
  misc_feature (1)..(2): n is a, c, g, or t
  misc_feature (22)..(22): n is a, c, g, or t
  misc_feature (28)..(28): n is a, c, g, or t
  misc_feature (47)..(47): n is a, c, g, or t
  misc_feature (80)..(80): n is a, c, g, or t
  misc_feature (83)..(83): n is a, c, g, or t
  misc_feature (110)..(110): n is a, c, g, or t
  misc_feature (140)..(140): n is a, c, g, or t
  misc_feature (157)..(157): n is a, c, g, or t
  misc_feature (173)..(173): n is a, c, g, or t
  misc_feature (212)..(212): n is a, c, g, or t
  misc_feature (225)..(225): n is a, c, g, or t
  misc_feature (241)..(241): n is a, c, g, or t
  misc_feature (247)..(247): n is a, c, g, or t
  misc_feature (270)..(270): n is a, c, g, or t
  misc_feature (284)..(284): n is a, c, g, or t
  misc_feature (289)..(289): n is a, c, g, or t
  misc_feature (345)..(345): n is a, c, g, or t
  misc_feature (385)..(385): n is a, c, g, or t
  misc_feature (398)..(398): n is a, c, g, or t
  misc_feature (427)..(427): n is a, c, g, or t
  misc_feature (509)..(509): n is a, c, g, or t
  misc_feature (521)..(521): n is a, c, g, or t
  misc_feature (526)..(526): n is a, c, g, or t
  misc_feature (550)..(550): n is a, c, g, or t
  misc_feature (552)..(552): n is a, c, g, or t
  misc_feature (576)..(576): n is a, c, g, or t
  misc_feature (581)..(581): n is a, c, g, or t
  misc_feature (608)..(608): n is a, c, g, or t
  misc_feature (626)..(626): n is a, c, g, or t
  misc_feature (636)..(636): n is a, c, g, or t
  misc_feature (670)..(670): n is a, c, g, or t
  misc_feature (732)..(733): n is a, c, g, or t
  misc_feature (736)..(737): n is a, c, g, or t
  misc_feature (746)..(746): n is a, c, g, or t
  misc_feature (761)..(761): n is a, c, g, or t
  misc_feature (769)..(769): n is a, c, g, or t
  misc_feature (794)..(794): n is a, c, g, or t
  misc_feature (812)..(812): n is a, c, g, or t
  misc_feature (823)..(823): n is a, c, g, or t
  misc_feature (825)..(825): n is a, c, g, or t
  misc_feature (838)..(838): n is a, c, g, or t
  misc_feature (858)..(858): n is a, c, g, or t
  misc_feature (860)..(860): n is a, c, g, or t
  misc_feature (866)..(866): n is a, c, g, or t
  misc_feature (875)..(875): n is a, c, g, or t
  misc_feature (878)..(878): n is a, c, g, or t
  misc_feature (940)..(940): n is a, c, g, or t
  misc_feature (962)..(962): n is a, c, g, or t
  misc_feature (964)..(964): n is a, c, g, or t
  misc_feature (969)..(970): n is a, c, g, or t
  misc_feature (991)..(991): n is a, c, g, or t
  misc_feature (997)..(997): n is a, c, g, or t
  misc_feature (1001)..(1001): n is a, c, g, or t
  misc_feature (1003)..(1003): n is a, c, g, or t
  misc_feature (1005)..(1005): n is a, c, g, or t
  misc_feature (1007)..(1007): n is a, c, g, or t
  misc_feature (1046)..(1046): n is a, c, g, or t
  misc_feature (1094)..(1094): n is a, c, g, or t
  misc_feature (1153)..(1153): n is a, c, g, or t
  misc_feature (1155)..(1155): n is a, c, g, or t
  misc_feature (1161)..(1161): n is a, c, g, or t
  misc_feature (1163)..(1163): n is a, c, g, or t
  misc_feature (1172)..(1173): n is a, c, g, or t
  misc_feature (1175)..(1175): n is a, c, g, or t
  misc_feature (1193)..(1193): n is a, c, g, or t
  misc_feature (1208)..(1208): n is a, c, g, or t
  misc_feature (1252)..(1252): n is a, c, g, or t
  misc_feature (1261)..(1261): n is a, c, g, or t
  misc_feature (1277)..(1277): n is a, c, g, or t
  misc_feature (1282)..(1282): n is a, c, g, or t
  misc_feature (1340)..(1340): n is a, c, g, or t
  misc_feature (1374)..(1374): n is a, c, g, or t
  misc_feature (1386)..(1387): n is a, c, g, or t
  misc_feature (1389)..(1389): n is a, c, g, or t
  misc_feature (1449)..(1449): n is a, c, g, or t
  misc_feature (1471)..(1471): n is a, c, g, or t
  misc_feature (1473)..(1473): n is a, c, g, or t
  misc_feature (1475)..(1475): n is a, c, g, or t
  misc_feature (1481)..(1481): n is a, c, g, or t
  misc_feature (1648)..(1648): n is a, c, g, or t
  misc_feature (1650)..(1650): n is a, c, g, or t
  misc_feature (1737)..(1737): n is a, c, g, or t
  misc_feature (1758)..(1758): n is a, c, g, or t
  misc_feature (1787)..(1787): n is a, c, g, or t
  misc_feature (1790)..(1790): n is a, c, g, or t
  misc_feature (1793)..(1797): n is a, c, g, or t
  misc_feature (1816)..(1817): n is a, c, g, or t
  misc_feature (1827)..(1827): n is a, c, g, or t
  misc_feature (1836)..(1837): n is a, c, g, or t
  misc_feature (1839)..(1839): n is a, c, g, or t
  misc_feature (1845)..(1845): n is a, c, g, or t
  misc_feature (1851)..(1851): n is a, c, g, or t
  misc_feature (1871)..(1871): n is a, c, g, or t
  misc_feature (1881)..(1881): n is a, c, g, or t
  misc_feature (1885)..(1885): n is a, c, g, or t
  misc_feature (1912)..(1912): n is a, c, g, or t
  misc_feature (1914)..(1914): n is a, c, g, or t
  misc_feature (1916)..(1916): n is a, c, g, or t
  misc_feature (1918)..(1918): n is a, c, g, or t
  misc_feature (1933)..(1933): n is a, c, g, or t
  misc_feature (1937)..(1938): n is a, c, g, or t
  misc_feature (1941)..(1941): n is a, c, g, or t
  misc_feature (1959)..(1959): n is a, c, g, or t
  misc_feature (1961)..(1961): n is a, c, g, or t
  misc_feature (1963)..(1963): n is a, c, g, or t
  misc_feature (1985)..(1986): n is a, c, g, or t
  misc_feature (1992)..(1993): n is a, c, g, or t
  misc_feature (1995)..(1995): n is a, c, g, or t
  misc_feature (2004)..(2005): n is a, c, g, or t
  misc_feature (2007)..(2007): n is a, c, g, or t
  misc_feature (2015)..(2015): n is a, c, g, or t
  misc_feature (2033)..(2035): n is a, c, g, or t
  misc_feature (2045)..(2045): n is a, c, g, or t
  Peptide Sequence Number=SeqID_8563
  Probeset Number=SeqID_15576
nnagtgaaaaatagacagaganacgatnatatatagagtatgagcgnacgcgtgatgtgatgtagtagtggagaggagtnganatcagaggtagtaatagagcatatcancatagcagacgaatagatatacttacactnaacgaagcatgacgagngcaggctgtcgatcgnctagcatggatgtactagaatgtaatcatcagacacagntacgcagagcagntggtgaacggatagtncagtangcagcgctgctcagctacgaaanaggttctacgcgtnggcantgagagtcaatactgcgatatgtatgcgcagatgagctagtaagatatatacgagntacgatgtgtcagatgacgcattagacaatacatcggcancacacagtcgtcncacgtcacatcaatacgtctacgatgganatcacgatcgtcatagagtcgtggcgtcgtgtggtatcggctgcgtcatcagcgaaatacgagcacatgatgcagcggatcncatatcgtagantatgncttgatatgagtgacggcataacnangagacgtaggagtatgtgtggcgnacgancagccgatagtgatgcagagtgcgcangctgtgcagtgtgtatgncgcctaacanttatctgacgtggtgattggtgttagatcagtancgtgagtgctgtgtcagtttgagagtcatgactcgatatatgtagatagagaatgtgtatcnngtnnaattagctnagagaaggcatattntgtatcanattcatcatcatgtaacatatctcncacagtctagtgcagtgngtgctaggatngntgacagatatgtngatcgtatgtagtggtgtgntnttgtangagtcgcanctncatcatcatcatatgtatctctacacgcgcgaatggtgtagtagacatagtttagatacgancgtgtgcatggcgagtgagatnanagacnnatcgatatcagacgattaatnctatanatantnanancgatacttgcgcatcatagatagagcgatgagaggggtnggtgcgggcatgcatgcggttgtatcgttgacagctgcgcatctctancgaacatcgaggtgcatgagtattatacacatagtagaatgttagtagagtataggtcntntttctntntctcatacnnancacatctatatctcacanactatgaatagtgtntttatgatatttgttgcactagattgtgtgtgtgtgtgagctgntggcgcgcntggcgtctgtcttttngtcgntctcagatacgtgatgtagggagtgtgtggagcagagaacgacgtagtgagagagagngaactgacaaacagataaatgagacgacagatancaacaaactccnncnccacaccacatatcgcaagatactacgcacactatcgacacgcaaacccacatcttactncacaatatcagtacgagaggcngngngtgtcnccgctgtctcatcgctatgttgtgttgtcgcagtctgccgtgttgtagactaaagtcagcacacattttagttatcttgtacagctatgcaagatatacactcgatgaaaatgagatgcaccacgcatagcagtgatatattcagcgtcgcagtgagatgtgctgcntnagtcagcatttgtcaccccatgagtatgtcactagactatacttcatatggatttgctatgacgatatttaatatgctgtttgattntgattattattttgatacttnagagagttggcatgagcagcgacactacngtnttnnnnnttgtggagagagagaaacnnaaagacaaanaaaacagcnnanttcttnttcgcncatgagtattgtgccgtatntaacatgacnacancgtacccatacgactcatatatttgtncntnanctgctgtgttctctnctcnnctnttgtgctttcacaccaanananaatatatattattaacaacacnnactatnnanaccacaaanncnaccaacanacacccaaacacaaaaannnattcccaaan

SEQ ID NO: 5798 - DNA, 1778 bp, Glycine max
  misc_feature (1776)..(1778): n is a, c, g, or t
  Probeset Number=SeqID_15577
atagaatgcaaatgttatgacctaacatgcctcgtttgcttaggatatatgatttttggatttttctttatcaattaggtgaatttatcatacccatatctattcaattacttgtcccggctcgagcacgatgacaagcctattttatctacctatctcccaaatgcctttgcaaatattcaataaataaaatgcatgaagccttgattttagatgtgtgctttaatgcatgggcataatattatcatcctatgtctagcaatgatttcattatgatgtctttttcttttagttcttttagaaaaaagacagtaggatagaaaacacctgcatctaacccctaacataatataaagatgagtaatgcatgaaatataaatagaaaaagacaataggatagaaaacacttgttgagttgataaatatggagtacatcatacatatctttggctttttaggcctgtcaggccctaactaagagttttagcctttcatagtcatgaggaccttacattgaactgtggatataagaattggtggattagaaggaatggaagaagagaataaagaaaatgatgagagagaagagaggattccctaaggaagagttctcaagctttgggtgtgtatgataatgctcttagactcggcactctgctcgctcagcgcaggtgtctgttttcgcgcttagcccactctgctcacttagtactggtaccagttttcgtgcttagcgcgcactgtgcgctaagcacgtcttgggttgggcctgatgctcaaaccttcatcttttttcctattttctgcatctttttgcttttaattcctccaatttttagatctgcaagctctaaatagaaaaatatcaattcctaccgattaagtctggataactgttaaataattatttttaaagatattttaactctattttcattatcaaagacaactcatatttaacatttatcaacgggggtttgatcccctacacgcagattggtccttaccctagatcttaaattcccaatggagatcctcctacttacccaaaaacatctagggaaaaagtgacactatatcttcatgttagcgtgtgtttgaattggtggtgagttgaccttattatgatatttagaagcaacaaatagttgcctttgtggtgaactcaccatgattttctatcaccaaaccaaacactataaattctgttttccctattacctgttatgccatgccttattgatactcttctaaatttaacatcaaataagaaatataaaaggaaatagtcaacattgtgggagttttttgtaacttaatgtaattagcgtgatccgaacaggataaccttgtatgagtatatcttcttctttttttaaaaaaaactttttaccagaagtattataacctattaaccagttcattttgtttttaaaatctcctatcttgtttatgccatcttaatgaggtctctctattcatgcatgaaatgacattttactgatgcaggtagcacagaggattggggttcaggtctgaaagatgatctctttacaataagtttgatgttatgtatagagtcctttaggctttagctgtaaggctgtacatgttctgctcccttttacaatgtatgtatatatgtatgaaaaagatgtgaacctataaaaaccattaataggtgtaggtaggagcttttgtttttccattgatccgtgttttttacgaagtttattttaaaattataaataaaaccaatgaaaaaaaaaaaaaaannn

SEQ ID NO: 5799 - DNA, 542 bp, Glycine max
  misc_feature (201)..(201): n is a, c, g, or t
  misc_feature (209)..(209): n is a, c, g, or t
  misc_feature (331)..(331): n is a, c, g, or t
  Peptide Sequence Number=SeqID_8564
  Probeset Number=SeqID_15578
ctagccgccgccgccccctcctcttcgtcctgcaagcagcgccgccgccttccaccggcccgagctccagccttcccttcaaccatggctgacgttgatgtcgaccccgaggtggcggccgccggccccaagaagaggacgttccgcaagttcagctaccgcggcgtggacctcgacgctctcctcgacatgtccagcganggacctcngtcggcctcttccctgcccgcgcccgcagaaggtctcgagggtctgaagaggaagcgatgcgctcgtcagaagctgcgcagggcgaaagcgagcccctgctggtgagaagctgagcagtgangacccacctcgcaacatgatatcatgcctgaaatgatcggagccgcctgggcatctaccagggaagggctttcaccaggggaaatcaagccgaaaatgttgggcactaactgggaaaagttccccttgtcaaaaacccgggaaaaaacggagggcctggatatcgggcccccccaccctccggggtctttcccccccaaggggaaaatggg

SEQ ID NO: 5800 - DNA, 592 bp, Glycine max
  misc_feature (310)..(310): n is a, c, g, or t
  misc_feature (564)..(564): n is a, c, g, or t
  Peptide Sequence Number=SeqID_8565
  Probeset Number=SeqID_15579
tcagctacgtaggccccccccccccattatctacatgccaatgattccagaggttatattctctatgcaagcaactgcccgtgtcggagctatccactcagttgtttttggtgggtttggagcacctgaacttgcaggcagaattcaggatttaaagcccaaagttgtcctccttgccagttgtggtatcgaaccaaacaaagttgtcgattacaaaaaaatcttggatgaagctcttaagcttgcagctattcccaacataaaaaaaatccttgtgcaaagagaaatgtataaagtcccaatgatccanggagaagattttgattactatgaagaactcgctcaagccaagcctatggatccagttccagtcgatggctctgattatctttatattttatacacctcaggaactactggtcagcccaaaggtattgttagagaaaacggaggcaacgctgtggctctctgctacacaatgaaatatctttttggcattactgaaaatgatgtcttcttctgcgctgctgacgttggctgggttactggccattcttacattgnttatgctcctttattgattggagctaca

SEQ ID NO: 5801 - DNA, 1897 bp, Glycine max
  misc_feature (115)..(115): n is a, c, g, or t
  misc_feature (139)..(139): n is a, c, g, or t
  misc_feature (216)..(216): n is a, c, g, or t
  misc_feature (225)..(225): n is a, c, g, or t
  misc_feature (334)..(334): n is a, c, g, or t
  misc_feature (373)..(373): n is a, c, g, or t
  misc_feature (402)..(402): n is a, c, g, or t
  misc_feature (447)..(447): n is a, c, g, or t
  misc_feature (482)..(482): n is a, c, g, or t
  misc_feature (557)..(557): n is a, c, g, or t
  misc_feature (623)..(623): n is a, c, g, or t
  misc_feature (638)..(638): n is a, c, g, or t
  misc_feature (701)..(701): n is a, c, g, or t
  misc_feature (745)..(745): n is a, c, g, or t
  misc_feature (767)..(767): n is a, c, g, or t
  misc_feature (773)..(773): n is a, c, g, or t
  misc_feature (820)..(820): n is a, c, g, or t
  misc_feature (835)..(835): n is a, c, g, or t
  misc_feature (837)..(837): n is a, c, g, or t
  misc_feature (843)..(843): n is a, c, g, or t
  misc_feature (910)..(910): n is a, c, g, or t
  misc_feature (914)..(914): n is a, c, g, or t
  misc_feature (952)..(952): n is a, c, g, or t
  misc_feature (985)..(985): n is a, c, g, or t
  misc_feature (995)..(995): n is a, c, g, or t
  misc_feature (999)..(999): n is a, c, g, or t
  misc_feature (1004)..(1004): n is a, c, g, or t
  misc_feature (1032)..(1032): n is a, c, g, or t
  misc_feature (1036)..(1036): n is a, c, g, or t
  misc_feature (1074)..(1074): n is a, c, g, or t
  misc_feature (1078)..(1078): n is a, c, g, or t
  misc_feature (1100)..(1100): n is a, c, g, or t
  misc_feature (1124)..(1124): n is a, c, g, or t
  misc_feature (1130)..(1130): n is a, c, g, or t
  misc_feature (1140)..(1140): n is a, c, g, or t
  misc_feature (1144)..(1144): n is a, c, g, or t
  misc_feature (1157)..(1157): n is a, c, g, or t
  misc_feature (1209)..(1209): n is a, c, g, or t
  misc_feature (1235)..(1235): n is a, c, g, or t
  misc_feature (1280)..(1280): n is a, c, g, or t
  misc_feature (1283)..(1283): n is a, c, g, or t
  misc_feature (1297)..(1298): n is a, c, g, or t
  misc_feature (1319)..(1319): n is a, c, g, or t
  misc_feature (1340)..(1340): n is a, c, g, or t
  misc_feature (1346)..(1347): n is a, c, g, or t
  misc_feature (1394)..(1397): n is a, c, g, or t
  misc_feature (1401)..(1401): n is a, c, g, or t
  misc_feature (1413)..(1413): n is a, c, g, or t
  misc_feature (1434)..(1435): n is a, c, g, or t
  misc_feature (1437)..(1437): n is a, c, g, or t
  misc_feature (1462)..(1462): n is a, c, g, or t
  misc_feature (1466)..(1466): n is a, c, g, or t
  misc_feature (1537)..(1537): n is a, c, g, or t
  misc_feature (1546)..(1546): n is a, c, g, or t
  misc_feature (1551)..(1551): n is a, c, g, or t
  misc_feature (1555)..(1555): n is a, c, g, or t
  misc_feature (1566)..(1566): n is a, c, g, or t
  misc_feature (1600)..(1600): n is a, c, g, or t
  misc_feature (1604)..(1604): n is a, c, g, or t
  misc_feature (1623)..(1623): n is a, c, g, or t
  misc_feature (1637)..(1637): n is a, c, g, or t
  misc_feature (1668)..(1668): n is a, c, g, or t
  misc_feature (1694)..(1694): n is a, c, g, or t
  misc_feature (1702)..(1702): n is a, c, g, or t
  misc_feature (1711)..(1712): n is a, c, g, or t
  misc_feature (1715)..(1715): n is a, c, g, or t
  misc_feature (1718)..(1718): n is a, c, g, or t
  misc_feature (1743)..(1743): n is a, c, g, or t
  misc_feature (1796)..(1796): n is a, c, g, or t
  misc_feature (1798)..(1798): n is a, c, g, or t
  misc_feature (1800)..(1800): n is a, c, g, or t
  misc_feature (1834)..(1834): n is a, c, g, or t
  misc_feature (1840)..(1840): n is a, c, g, or t
  misc_feature (1844)..(1844): n is a, c, g, or t
  misc_feature (1846)..(1846): n is a, c, g, or t
  misc_feature (1849)..(1849): n is a, c, g, or t
  misc_feature (1863)..(1864): n is a, c, g, or t
  misc_feature (1888)..(1888): n is a, c, g, or t
  Peptide Sequence Number=SeqID_8566
  Probeset Number=SeqID_15580
gaagcaggcccaccacaccgcatatcgtatatctgccaagaagacggtgtgagttgagtcgcgagtagtgtcgcgccgcacatatcacagcaaaggaacgaagcgcggcgtgagngggtggtgtaccgtgtgtcgtaanacatgctcgtcaacttgcgtgataatgttgatgcgacatagcatatagacagtaatatcagtcgcgagggacgtacngcgtatgtngtatggtgcttattatctcctagccggcaactcgccgagcaaacagcgtatgccatggcgataatatgatacgatatgtatatagcgagataggaaggcgaacgcgcanactagattatcggcgcgcttgtattgctatatgacgatngctcgacatccatacgcagaaactgcatncgactagaacatatgcggcgcgaagagagaggaagcgccataggngtgcacgcgtagacggcgggagatatagagacacncgtataccgtcagacataataggtaatatctcgcgacatagtttacgtgcgcgatcgatatatctcttatacacncgcgtcatgtctatatatccgtcattctgcgacgatccttatatacatcatactattgtattaaanagagtgatgacgaantacgatattacgcaggagattcgagcgaagcgcgcgacagcgcgcacgtgcgaccatgagtangtcagaataggcgatgccgagcgcgatgacgaggcgtgcgtgcncgctcaatgcgcgacgcggcgncggttngcgtgcactgggtgagtcggagtatcaacacgtacagaatcctagtnagcgtcacgcgtccngnctcgcntgactggacgtgcagctacacgctaggtcgccggctatagtagtgcttgccgtcggacgagagtgangtantactacgaagatatgacgaggtacggcgacgacgcggncaatgatgtggtgtgggtaggtatatcatatcnatacgtctcncgtncgcgntctggcgcgatactgattatggagcgangtgntgcgcgcgttgtaggtgtaagttgattagtatagtgtncgcntcgtgattgcctcgtgtgagtnatatatagcacgatcgcgcgggcngcaganatagcacagncaanacgactcagacgnccacgcgacttacattcatataccgtacctgcattgtacgtaattccgtaantcgtaccgttgtctagataataacgngcgccgctgtcgtcttccgcacgcgtataatctagatatatgtanctngcgcggttgatttnnctacatatttgttaataatantgtgagatatatgatatcacnacgcgnncgcacagacgatatagatgcgcgtagtatagtatatagagtgctccnnnncccnccgcaccgctcncacgatcgtccaagagatacnncnacctatgatacgggtgcgtattagntgtngtataatgcaacgcgccggcgacgttatcgatgacgcagcactactaatagtcgatatatcaagacgtaanatgataagntatantcgngctccgcgccnacgagatcgatgcctcgcgctgtcgaagcagcanatangatgattgtagacatgagngtgcgcgcgcgggncgcggctaacgtatctatataacagattcgncggatgaatttacctgagtactagangagctatnatcacgctnngcncgncatatagaactggatgatataaagnatcagtcactagtcacacatgaaagtgaatctccccgacgtatgtagtgtatncngngccactaaatctaaaacgcagtgatatagaatancggcgntgcntnacnacgtgatgcgcggnntataagactgcagctacatcatantctcatctg

SEQ ID NO: 5802 - DNA, 1210 bp, Glycine max
  Probeset Number=SeqID_15581
aaatataaaattttccaatgtcagtgactctcgctaactacaacagaggaatgtcttccaaaagtggccgttcaaacagccaaacagcccccgctcttcaacagaaaaagcaggttgaggctgataagaaacctactcaggctcagactactgccgttaaaactctacaacaacaccaacaccaagaagctgagcctgtaagacctcataaacatggaggaattgactccgaaacagttagagagactatgaaaaaggcttttcttgctaatccttacttgaagtcagaagatgaagctgagtattacgaaactgttagaagactcgatgaatgcggtacttgttgggcagcacaacaaaagttttatacaagtccattcaagctcatggaaaaaggtccaggagccactctttatcaaaaggattttgttaaacaccccattgaaagcgctcctaagattaaaaacgatttttacagcactttcaacattgaagaaccaatggactttggaactaccatggctaatgattacaaggcttggaaaccagaaaagaacgcacctttcaataacgaaaagagtttaacttcaggaattccttttggaggcagatctggttataaggctgagtacattgattggggtaagatgcctgttgagtttgaaaaggctcccaatagcaagactgttatcagcgaacttccatttgtaggtaaatcagcctaccaagagaactttgcatacaacccaagtgatcctgcccagaaacttaaaaagaccgacaccagatcccctctgtctcctggtatccccttcttgggcagaacaactcacaattctacttataaaccctacaaagttggtgacgctccaatgttctcacccaaagaagaatatgaacctactgaagcataccctaaccaattcaatactctttacagacaagattatgctaagccaaacaaatacaaatgtcctgctaagatctttatggagactcatactcatcctaaatacaagactttaaagcaataaactgatcaggctgtagaagattttgttaagaataatgaatgaatatatataggtgtttttctgccttggaaaatttatagaataaataaataatatgagcatgcatatatgtgcataagtatggctcaaagcatttgtacagactaatgctgcttttttctcttaaacaaatactg

SEQ ID NO: 5803 - DNA, 591 bp, Glycine max
  Peptide Sequence Number=SeqID_8567
  Probeset Number=SeqID_15582
tttttttttttttttttttttttttttcttttttttttttttttttttgtttccagttttttttttttttttttaccaaaaagaagttgaattatcccaccctcaacattcgtatacatttgtttacttttttttacaaacagtgaataaagaatgagcatatgatacaaatattaaatgaaacctttcaacaatttctccaacaatagctaattcctgtgtagtaaaaggtgccatcgataaagggcctggcgccgaaatcggcagcgggagagagcgcgaaaaccagggttccgggcccatttttaccaaagaaggctggtggaattaccccttttggtgggccccggatggctttttaaccttccgggggctctgggtttggaccaaaatttttggtttgggcaaggcccccaacccttgttgcctccccaggctggtttgggttcccaccaccaactaagtcccggaattgaaacttgtggttggtcccatcccaggttctttggttccattggttaaccaggcccaccaagggcacccccaatggggcggccgagaaaaagtccttgtcaacacccccaccgccaa

SEQ ID NO: 5804 - DNA, 2106 bp, Glycine max
  misc_feature (1)..(1): n is a, c, g, or t
  misc_feature (13)..(13): n is a, c, g, or t
  misc_feature (16)..(16): n is a, c, g, or t
  misc_feature (28)..(28): n is a, c, g, or t
  misc_feature (34)..(34): n is a, c, g, or t
  misc_feature (75)..(75): n is a, c, g, or t
  misc_feature (81)..(81): n is a, c, g, or t
  misc_feature (87)..(87): n is a, c, g, or t
  misc_feature (91)..(92): n is a, c, g, or t
  misc_feature (113)..(113): n is a, c, g, or t
  misc_feature (120)..(120): n is a, c, g, or t
  misc_feature (181)..(181): n is a, c, g, or t
  misc_feature (213)..(213): n is a, c, g, or t
  misc_feature (242)..(242): n is a, c, g, or t
  misc_feature (264)..(264): n is a, c, g, or t
  misc_feature (267)..(267): n is a, c, g, or t
  misc_feature (269)..(269): n is a, c, g, or t
  misc_feature (272)..(272): n is a, c, g, or t
  misc_feature (274)..(274): n is a, c, g, or t
  misc_feature (287)..(287): n is a, c, g, or t
  misc_feature (294)..(294): n is a, c, g, or t
  misc_feature (336)..(337): n is a, c, g, or t
  misc_feature (342)..(342): n is a, c, g, or t
  misc_feature (356)..(356): n is a, c, g, or t
  misc_feature (361)..(361): n is a, c, g, or t
  misc_feature (369)..(369): n is a, c, g, or t
  misc_feature (428)..(428): n is a, c, g, or t
  misc_feature (439)..(439): n is a, c, g, or t
  misc_feature (452)..(452): n is a, c, g, or t
  misc_feature (454)..(454): n is a, c, g, or t
  misc_feature (456)..(456): n is a, c, g, or t
  misc_feature (471)..(471): n is a, c, g, or t
  misc_feature (492)..(492): n is a, c, g, or t
  misc_feature (499)..(499): n is a, c, g, or t
  misc_feature (554)..(554): n is a, c, g, or t
  misc_feature (578)..(578): n is a, c, g, or t
  misc_feature (589)..(589): n is a, c, g, or t
  misc_feature (607)..(607): n is a, c, g, or t
  misc_feature (615)..(615): n is a, c, g, or t
  misc_feature (640)..(640): n is a, c, g, or t
  misc_feature (674)..(674): n is a, c, g, or t
  misc_feature (736)..(736): n is a, c, g, or t
  misc_feature (748)..(748): n is a, c, g, or t
  misc_feature (786)..(786): n is a, c, g, or t
  misc_feature (808)..(808): n is a, c, g, or t
  misc_feature (845)..(845): n is a, c, g, or t
  misc_feature (863)..(863): n is a, c, g, or t
  misc_feature (876)..(876): n is a, c, g, or t
  misc_feature (900)..(900): n is a, c, g, or t
  misc_feature (944)..(944): n is a, c, g, or t
  misc_feature (989)..(989): n is a, c, g, or t
  misc_feature (1013)..(1013): n is a, c, g, or t
  misc_feature (1074)..(1074): n is a, c, g, or t
  misc_feature (1220)..(1221): n is a, c, g, or t
  misc_feature (1348)..(1348): n is a, c, g, or t
  misc_feature (1390)..(1390): n is a, c, g, or t
  misc_feature (1499)..(1499): n is a, c, g, or t
  misc_feature (1539)..(1539): n is a, c, g, or t
  misc_feature (1597)..(1597): n is a, c, g, or t
  misc_feature (1613)..(1613): n is a, c, g, or t
  misc_feature (1618)..(1618): n is a, c, g, or t
  misc_feature (1680)..(1680): n is a, c, g, or t
  misc_feature (1701)..(1701): n is a, c, g, or t
  misc_feature (1743)..(1745): n is a, c, g, or t
  misc_feature (1764)..(1764): n is a, c, g, or t
  misc_feature (1766)..(1767): n is a, c, g, or t
  misc_feature (1783)..(1783): n is a, c, g, or t
  misc_feature (1801)..(1801): n is a, c, g, or t
  misc_feature (1830)..(1830): n is a, c, g, or t
  misc_feature (1838)..(1839): n is a, c, g, or t
  misc_feature (1843)..(1844): n is a, c, g, or t
  misc_feature (1869)..(1869): n is a, c, g, or t
  misc_feature (2021)..(2021): n is a, c, g, or t
  misc_feature (2023)..(2024): n is a, c, g, or t
  misc_feature (2029)..(2029): n is a, c, g, or t
  misc_feature (2031)..(2032): n is a, c, g, or t
  misc_feature (2047)..(2047): n is a, c, g, or t
  misc_feature (2050)..(2053): n is a, c, g, or t
  misc_feature (2059)..(2060): n is a, c, g, or t
  misc_feature (2062)..(2083): n is a, c, g, or t
  misc_feature (2086)..(2088): n is a, c, g, or t
  misc_feature (2091)..(2093): n is a, c, g, or t
  Probeset Number=SeqID_15583
ncaccgccgcatnagncgcctcggtgtntgacgncagcctacgcgcgtcgtgactgcgtcgtcgtcctctgccgnacacgntgcgtngagnngtcgaccactgtacgcgtgangaagatncggcatcgtcatcgagtacataatcattgacagtaacataatcgttataacgtgataatanggacgagtacgagtacagtcagctgacctcancagatccgatagtcatctctgtatcagtnatcgtacgactgactactaaanatnancananacataggtcagcngatacgnagatgatcacgacactgagcagcggacgacaaatcgtagcanncgcancgtatgagcgtagntcgancatgtgangacatgatgtgttgtcatagcgtccgccatcatgcagtagtgcgagtatcgtactcatnacactcatcanctcctacttcaantnantgctgtactggttcnttactatatactatattacgnaagctcnactatatgcgcacagcaatgcgagagaaacgatcgtatcagatagtgacgtcgtngaagctggatgtcgcgtcgacacnctcgcgtcatnagatacgcggatgctcgnagctgtgntgatgacgacaacggccgtgtacantgatacgaagtcatgtcgtcgtgagcctatgcancggcgtcgtctgtcgtcacgtcagcgctcgcgtcgtggtacgcactacgtgtactagaccgntcgtcactcgangcagaagcacatacaacaccatcacgactacctcaganacattcgcgacatctatatgtnaaaaatcaccgatactcgacatgatctcacatctgcncgcatcaatatgtcacanagcgcacacatgngtcatgtcgtgcgatgtgcgagtngtcgagtggtcgacaccacgctcgacatacaggcgctgataganctgtgtatgcgtactgatctctgagtgcgtatgcgtatgacgcgnaaggtatctcatgtgctacaggtntccatcgttatatgtgccatctactaatcgcatcattctcacatatacatattctcattanatatactgtcgacgcatatagctatatgttattatacgagtcttctacatatcgaagtcagtacacgcggcgcgagacgacaaacacgcacgcaacacaccgagcactgcagcgacacagacgacccacgacaagacgtgcgctcnncgtaggtagtacgagaagagtaaatacatagagagagagcgtacgaggtcggggatggttgcgtgttgtgttgttttgtggtgtgtggcgggtgtgcgagctgtagaaacatacatatactgtgatntaaattattgtatatattatttgtttattcattactcgtctnttgttcgttttggtcgtggctgttcgtagcgcgctacgcacacatgtactagaagtctgcactgcgtcgctttgcgcgtcgtgcacgacacgcttcgtcgcggcgagcntcctcacgccgtccactgggccactcagcaactccgagancgaacgacaaacacacagagtactgagatccacgtaggatacatatacactactgcgntgtcgcatccacatancagcnaccgtatacgtcacagactaatataattaataatacatgtgtacgtgtcacggtaaagtagntcatgtgtgctggtagttccnccgctcacgcgggcggccgccgcgcaccacagcccgcgcctnnnactctctctctcctgctcncnngcgccgacgacgccangcgacaatgagtagtggntaagtgatgattatatgtggagtgaggtnaaatatanntcannctcatatcgcctctattcgtacatnagatatttgagcggcttactcgtgcttgcacaattgatattcatacttactcgcagcacgctacacgtgtctcaccgatgcactatagactgctctatgataggatcatatagcagcgatgtgaagaaaaatgacgggatgtacacctgctnanntaagnanncctaataaagaagangannnngaggannannnnnnnnnnnnnnnnnnnnnnaannnggnnnggggggggaaaaa

SEQ ID NO: 5805 - DNA, 612 bp, Glycine max
  misc_feature (15)..(15): n is a, c, g, or t
  misc_feature (578)..(578): n is a, c, g, or t
  misc_feature (612)..(612): n is a, c, g, or t
  Peptide Sequence Number=SeqID_8568
  Probeset Number=SeqID_15584
tcgagtcagctacgntaggcccccccccccgcacatttgggaacaagccttacagtgatgtgtccctctaaagacatttttaaggaagcaactaaacagatggactctgaggatggactaggagaggattggttatctgagtattcaggtgatgaggactatgaccctgaagaaaatgacttcacaagcagcagcctggatagtggtgaagaaagtatatctgatcagtccaattgttcaggaagtccgctttattctccaaacgatgatattccaggctttatatcagcagatttcactgatgcggaaggattctaccacaccaattcaaatttaggaattgattctgatgatgatgatgttgccgagatgcttacctaccaaaggccaaagagagaggaaatgtttggaaagctgactgagaatgaaaagcagagtgaagatgaagattggggtactaataataggagaaagaaaagaagagtggattcagctggtgttggagttaagtctgccgagggttccttagatgtaaaatcgaatgagaaagcccaaccgcagaggagaaaactcttcanaattccacctgaggcagttcaggtactgcgcaan

SEQ ID NO: 5806 - DNA, 797 bp, Glycine max
  Peptide Sequence Number=SeqID_8569
  Probeset Number=SeqID_15585
atgagagcagaagaggtgcctcttactccgttacgagttcgacccctcctctcgctcttctcttctcttctcttctcttcatagcaaagcaataatcctattagaatatggaagagagcttcgttttccagtggagcgttatcagatctctctttgtccatccttcagtggtgggccttcaatgtcactgtcatcatcgtcaacaagtggatctttcagaaattggatttcaagtttcccttatcaggttcctgtgtccactttatctgttcatccattggagcatatgtggtatttaagttgctgaagcttaaaccactgataactggtgacccctgaagatcgctggagaagaatccttccgatggcatttgggttctcgattaccattgttctggggaatgtgagcctacgatactttccagtttatcttttatgcttctatacgtcattcccccctgaaccccaagtgtgttttgcatggctagtggggaagaagtattttgactggggattttgggctcccctaatccccattggggggggattccttctccatttggaaaaaagttttaattttaaaaggttgggatttcggggtgccctttttggggtggtgggctaactccaaaaaaactattttttggaaaatctcttttggtgggaaaaaattttgaacgcataaaccccggttttttaatgtggcccttttttgaaccatgattgttggggtttcccccgctggttttttaaggggagggggaacccttggaggggcaaatacacctccccgattg

SEQ ID NO: 5807 - DNA, 1982 bp, Glycine max
  misc_feature (1)..(1): n is a, c, g, or t
  misc_feature (34)..(34): n is a, c, g, or t
  misc_feature (37)..(37): n is a, c, g, or t
  misc_feature (48)..(48): n is a, c, g, or t
  misc_feature (58)..(58): n is a, c, g, or t
  misc_feature (195)..(195): n is a, c, g, or t
  misc_feature (266)..(266): n is a, c, g, or t
  misc_feature (333)..(333): n is a, c, g, or t
  misc_feature (338)..(338): n is a, c, g, or t
  misc_feature (340)..(340): n is a, c, g, or t
  misc_feature (366)..(366): n is a, c, g, or t
  misc_feature (386)..(386): n is a, c, g, or t
  misc_feature (400)..(400): n is a, c, g, or t
  misc_feature (406)..(406): n is a, c, g, or t
  misc_feature (411)..(411): n is a, c, g, or t
  misc_feature (458)..(459): n is a, c, g, or t
  misc_feature (464)..(464): n is a, c, g, or t
  misc_feature (509)..(509): n is a, c, g, or t
  misc_feature (600)..(600): n is a, c, g, or t
  misc_feature (618)..(618): n is a, c, g, or t
  misc_feature (663)..(663): n is a, c, g, or t
  misc_feature (713)..(713): n is a, c, g, or t
  misc_feature (736)..(736): n is a, c, g, or t
  misc_feature (757)..(757): n is a, c, g, or t
  misc_feature (781)..(781): n is a, c, g, or t
  misc_feature (784)..(784): n is a, c, g, or t
  misc_feature (788)..(788): n is a, c, g, or t
  misc_feature (830)..(830): n is a, c, g, or t
  misc_feature (832)..(832): n is a, c, g, or t
  misc_feature (834)..(834): n is a, c, g, or t
  misc_feature (836)..(836): n is a, c, g, or t
  misc_feature (839)..(839): n is a, c, g, or t
  misc_feature (841)..(841): n is a, c, g, or t
  misc_feature (854)..(855): n is a, c, g, or t
  misc_feature (859)..(859): n is a, c, g, or t
  misc_feature (863)..(863): n is a, c, g, or t
  misc_feature (867)..(867): n is a, c, g, or t
  misc_feature (879)..(879): n is a, c, g, or t
  misc_feature (881)..(882): n is a, c, g, or t
  misc_feature (884)..(884): n is a, c, g, or t
  misc_feature (977)..(977): n is a, c, g, or t
  misc_feature (1011)..(1011): n is a, c, g, or t
  misc_feature (1078)..(1078): n is a, c, g, or t
  misc_feature (1093)..(1093): n is a, c, g, or t
  misc_feature (1140)..(1140): n is a, c, g, or t
  misc_feature (1145)..(1145): n is a, c, g, or t
  misc_feature (1236)..(1236): n is a, c, g, or t
  misc_feature (1239)..(1239): n is a, c, g, or t
  misc_feature (1257)..(1257): n is a, c, g, or t
  misc_feature (1277)..(1277): n is a, c, g, or t
  misc_feature (1344)..(1344): n is a, c, g, or t
  misc_feature (1396)..(1396): n is a, c, g, or t
  misc_feature (1530)..(1530): n is a, c, g, or t
  misc_feature (1563)..(1563): n is a, c, g, or t
  misc_feature (1577)..(1578): n is a, c, g, or t
  misc_feature (1625)..(1625): n is a, c, g, or t
  misc_feature (1629)..(1629): n is a, c, g, or t
  misc_feature (1780)..(1780): n is a, c, g, or t
  misc_feature (1784)..(1784): n is a, c, g, or t
  misc_feature (1818)..(1818): n is a, c, g, or t
  misc_feature (1836)..(1836): n is a, c, g, or t
  misc_feature (1838)..(1838): n is a, c, g, or t
  misc_feature (1851)..(1865): n is a, c, g, or t
  misc_feature (1885)..(1885): n is a, c, g, or t
  misc_feature (1892)..(1892): n is a, c, g, or t
  misc_feature (1897)..(1897): n is a, c, g, or t
  misc_feature (1904)..(1904): n is a, c, g, or t
  misc_feature (1906)..(1907): n is a, c, g, or t
  misc_feature (1918)..(1921): n is a, c, g, or t
  misc_feature (1923)..(1923): n is a, c, g, or t
  misc_feature (1925)..(1930): n is a, c, g, or t
  misc_feature (1932)..(1932): n is a, c, g, or t
  misc_feature (1934)..(1934): n is a, c, g, or t
  misc_feature (1937)..(1938): n is a, c, g, or t
  misc_feature (1940)..(1940): n is a, c, g, or t
  misc_feature (1942)..(1942): n is a, c, g, or t
  misc_feature (1944)..(1945): n is a, c, g, or t
  misc_feature (1947)..(1947): n is a, c, g, or t
  misc_feature (1950)..(1950): n is a, c, g, or t
  misc_feature (1955)..(1955): n is a, c, g, or t
  misc_feature (1966)..(1966): n is a, c, g, or t
  misc_feature (1970)..(1970): n is a, c, g, or t
  Peptide Sequence Number=SeqID_8570
  Probeset Number=SeqID_15586
nggcgtgcgcagcagccgacatgctgacatgatnaancgccgtcacgnactgtgcagngtgtgcagtacgcacacagtagcttcaatgacaagatcatgtgatgagtggaaacagatcacacgtgtcactatagtaataaatgcaatagagagcacagggtacgtagtgagacatgagcatgcagatgacaagangtgcgcacgcgtctcctgtggcagaagtacccatgtaccatagtaggcgaaaagtagtgtagagtataaangacaagtatggtatgtcttcctgacgaggcagcgtagacacgcatgcactctcgtaatgtgagcgcngctgngntacagattgtatatggtgtctactgncaatgtggggaacagcgctntgtttgtctgcttngcaatnttgtnacaattacatcactctcaagtgagcgagaggtttggacaggtctgtnntcctncaggatacgtcagatatctacgagacgatgtcaccatcgctacgngccagacaggagcacagcatcacagtatctatcctcgctcgctgtcgttgtgagggctcataggacgtcggcgacgagtgcaggtgttcanagatcacatataactgangactgcagcgaagtgagcgatgtgataggcgtgatgaagggacanggcgcaagtcactatcctactagtcacgcagcgcagatacatcgatgagntgtcagaacgcaccagagcaatngactgtcgaacacgctgcagngggtgtgtgagtcggtgggcggtnggnttgntatcacagcaatacagaacacacacagagggaggggggtgtntntntnttntntatgttttatttnntttntttntttntcattttgttgntnntntataaccaaacacaccacacatcatatcatataatagtatacatatgatctctagcacggtatgcatgctatagcacattcgactatacactnatgagagtatacactactctatgtagtggtagtnatgctccagcacgaacagcgtcagctatccagtggtgctctcatcgttatcatgatctagaatcacntgtgttatatactanatctacatctatatctatgaactgatatccgtgtggatgagttagangtgtngatctgttctctgtacaagcgacaggccgagcctccggccgtcgccacgagatgcgtcatacctcagcatggcacgactaatggacatagnganatctctgcttgacataanatacatatcatccctatacnctgctatattgtatatgagtcgtaggcatcatacggatatgatgttatgcatatttattcataaggntacatcatatctgaccgtcatcatcataccacatacattagtagaagtagtngtagagtcgttctaacgagatatagcacatgacaaacgctctagccgccatagagactagagtgccaggatctcagcacatcgctagtcaacccacatcactgatataaactaaggcaatgtattaggagatgngagagatgggctgccagtgtattagcaggaatnagtgcgagcggtgnngggtgagacgcgtggaggttgacagagtcgtgacgcgtagccacggngcgngcgcatagatacagagcagcgcgctccgtggagccacagccatatgtgtctgtctcaactacaatagaatatatacagtgtgcgcgctggtgaataattgtgttataagtagagagagagagtggtgagcagcgcgcccacgctctcttangtcntcaatacttccccttcatggagtggggggggggngtctccaaggaggatctncnacacttatatgtnnnnnnnnnnnnnnntttgtcgatatctcgatgtntagtcgntgtgngaaattntnntgtctctatannnngntnnnnnnananacnncncncnncncgncgggncgggcgcaccntctnactacacctcct

SEQ ID NO: 5808 - DNA, 1994 bp, Glycine max
  misc_feature (95)..(95): n is a, c, g, or t
  misc_feature (124)..(124): n is a, c, g, or t
  misc_feature (163)..(163): n is a, c, g, or t
  misc_feature (166)..(166): n is a, c, g, or t
  misc_feature (278)..(278): n is a, c, g, or t
  misc_feature (283)..(283): n is a, c, g, or t
  misc_feature (396)..(396): n is a, c, g, or t
  misc_feature (416)..(416): n is a, c, g, or t
  misc_feature (493)..(493): n is a, c, g, or t
  misc_feature (720)..(720): n is a, c, g, or t
  misc_feature (797)..(797): n is a, c, g, or t
  misc_feature (887)..(887): n is a, c, g, or t
  misc_feature (936)..(936): n is a, c, g, or t
  misc_feature (949)..(949): n is a, c, g, or t
  misc_feature (1052)..(1052): n is a, c, g, or t
  misc_feature (1078)..(1078): n is a, c, g, or t
  misc_feature (1127)..(1127): n is a, c, g, or t
  misc_feature (1318)..(1318): n is a, c, g, or t
  misc_feature (1356)..(1356): n is a, c, g, or t
  misc_feature (1375)..(1375): n is a, c, g, or t
  misc_feature (1409)..(1409): n is a, c, g, or t
  misc_feature (1436)..(1436): n is a, c, g, or t
  misc_feature (1460)..(1460): n is a, c, g, or t
  misc_feature (1482)..(1482): n is a, c, g, or t
  misc_feature (1485)..(1485): n is a, c, g, or t
  misc_feature (1532)..(1532): n is a, c, g, or t
  misc_feature (1540)..(1540): n is a, c, g, or t
  misc_feature (1551)..(1551): n is a, c, g, or t
  misc_feature (1560)..(1560): n is a, c, g, or t
  misc_feature (1566)..(1566): n is a, c, g, or t
  misc_feature (1568)..(1568): n is a, c, g, or t
  misc_feature (1609)..(1609): n is a, c, g, or t
  misc_feature (1664)..(1664): n is a, c, g, or t
  misc_feature (1677)..(1678): n is a, c, g, or t
  misc_feature (1694)..(1694): n is a, c, g, or t
  misc_feature (1697)..(1697): n is a, c, g, or t
  misc_feature (1720)..(1720): n is a, c, g, or t
  misc_feature (1745)..(1745): n is a, c, g, or t
  misc_feature (1750)..(1750): n is a, c, g, or t
  misc_feature (1756)..(1756): n is a, c, g, or t
  misc_feature (1783)..(1783): n is a, c, g, or t
  misc_feature (1787)..(1787): n is a, c, g, or t
  misc_feature (1812)..(1812): n is a, c, g, or t
  misc_feature (1828)..(1828): n is a, c, g, or t
  misc_feature (1833)..(1833): n is a, c, g, or t
  misc_feature (1835)..(1835): n is a, c, g, or t
  misc_feature (1840)..(1840): n is a, c, g, or t
  misc_feature (1858)..(1858): n is a, c, g, or t
  misc_feature (1871)..(1871): n is a, c, g, or t
  misc_feature (1878)..(1878): n is a, c, g, or t
  misc_feature (1884)..(1884): n is a, c, g, or t
  misc_feature (1897)..(1897): n is a, c, g, or t
  misc_feature (1928)..(1928): n is a, c, g, or t
  misc_feature (1986)..(1986): n is a, c, g, or t
  misc_feature (1988)..(1988): n is a, c, g, or t
  misc_feature (1991)..(1991): n is a, c, g, or t
  misc_feature (1994)..(1994): n is a, c, g, or t
  Probeset Number=SeqID_15587
cgcggtcgctgcgatcgtcgcgcgctttaatcgtgcgtcgcaacgccgccgccatgtaccgattaggacctataatatgatatacagcgtagaanatacagcagcgacaggggcagcacagtgncgcgcgctcggtcatctcgctcctgatacatatgatcancgncccacacatcaatcgtcgactccccactcccgactcacacgcgctcccgcattgttgcacgctggcgttactgatatgtagtacgggaggcctaactacttatactgtatancgacnccgcaacgtgtcacgtggtgcgacgatatatatatgtttatatcgcgcgccgtcgtccgcgcataattcatgtgtacgccttgtaggctaccgtgttaggcatagtgtgttantgttagtctcgaacacgttntgtatcggttgtcaactttgtctgatccttatatacctatcttgataagcgcacgcatgtatattatagattaatangaaatgagtaatgtcagtacgcgcggcacatgatatgaacgagagcggcgctttaatatcgctgtagatgcagccgcgacggacgccacccccgccgtttatgatgataatgttcgtacgcgtcgactgtcagatccgtacgtcgcgcgagcgcagtcatataacatatacgtcgtctccacaacatcgtcaggcgtgagagaccagagtacgtgagaatgtatagngagagcgcgcgcgcgtgacggccgcggctcggcccatcaaccgctatagcgcgcgataataatatgagtatagcggntcaacataagtagcgccgtgctcgtcgcgctgcacacactatatatgtacttatctctgcgggtcacggtccgatctatgttgaccgccngcgcgagtcgatagacagacgcgcgcggatctgctggtgcacgagaagntatacattaatanatgactagtatgatctcagcgctagtagtattgtgattcgggcgagagaatactgttatcagacagagaggccagctgaaagtcatataggctgacgacggcntcgtatatataatcatgacatagtcntggtgtctgacctatatccactatatagtgtagtacgcagcgcgacacngccgtcaccaccgacgacgcaatatgatatgtcgatagtatttaacgatcgatctagcatgatcggcagagcgactgatgtctgtcgatacgacatcacctacgacacttacatctgctcaatatccagcacgatgtgatgactatctgtagtgtagtataatagcgtcctacgaccggcgtgtcgatcanccatcgctgatcgctgtgagcgtcatatgattatatantagcctgtaatgcgacagntcatgtgcgtgtcgtgttgtgatgtacgccgtgngtcgtcacgccgcgtcggctatgatcntcacgatcgttgatgttttgatgnaatgatgatgcgatatacgacntcncgtatgacatactcgtgtacgaccgtgtcatcatctatgtgactatnttgcaggnagcgtgacgcncgtcgctgnacagcncngagctacgatcgtgtaagttcgcgtgaatgagtgcgtactnctgtatactatagacatgtcgaagactgcgctgtctcgagactgctgacgactanactctacatgatnnttctccgagcccgccnganctcgtcgtgctctatcatcggcnagcgcgctgtagtaggcgactgcgncatgncggagnatcatagtacttaaagggtccacgctnactncttggcatgcggcaacgagcagcgngttagcatgcgtcggngtcgntngtagntctcgatgatctactacnacagataaaccanaaggcantgatanacagtcctgtcangacactactgctgataacgcagcgcacactnatctgactcatcattatttcataccgttccccagcgcgcatgatacgacctcgtcctnancanagn

SEQ ID NO: 5809 - DNA, 993 bp, Glycine max
  Peptide Sequence Number=SeqID_8571
  Probeset Number=SeqID_15588
aataatctcgatttggacaaaagacagagaacgatggagtcttgccagcaaaaggttatggagaagctgcttcacggccatgggtgtgccaaccagctcaagctaatcatggaccaccacgccgagtcagattcgtccgttgaaagggaggatctggccaagtccgtcctccattgtttctcggatgctctctccattttgatcgatacgaatgatcataacaaagatgatgataaatccaataactcatctccccaagactcttcacatgttcttgagagcagcaggaaaccttttcacaagaggggaagaaagacatcaatggcggagagctcagattaccgcagacacgaatccccaaacccgatctaccacgacggctttctttggaggaaatacggacaaaagcaaatcaaagaatcggaccaccaaaggagttactacaagtgtgcgtacacaaacgaccagaaatgcgaagcaaagaagcaggttcaaatgatccaaaacaaccctccattgtactcaaccacttacttcggccgccacacatgtcagcttcatcaagcctttgaaacttttcccattgacacctcagatccccaagattcacgcatgatccgatttgataacccagattcctctacccatcaacatcaaaatcagataattcatctcaaagctgaacaaatgatgccctctgagaaagcagaagagtggtcgtccccatctgagtatatgtcctccgaggttgcctacgctgtggaggctttcgggtttaaccctgctcgcacatcaagtgacttatcatgaccatatatgcccttcccgtcgctatcatcagacatctaaagcaactttagttatttgtttcctcataatatcctatagtatacctcctgttactttttttttgtgttttgcatctcatgtatttgcctacctctactttgaacttttgttttgagtttaatattaatcagctttaataacgcg

SEQ ID NO: 5810 - DNA, 1813 bp, Glycine max
  misc_feature (1)..(1): n is a, c, g, or t
  misc_feature (34)..(34): n is a, c, g, or t
  misc_feature (37)..(37): n is a, c, g, or t
  misc_feature (43)..(43): n is a, c, g, or t
  misc_feature (46)..(46): n is a, c, g, or t
  misc_feature (68)..(68): n is a, c, g, or t
  misc_feature (73)..(73): n is a, c, g, or t
  misc_feature (154)..(154): n is a, c, g, or t
  misc_feature (158)..(158): n is a, c, g, or t
  misc_feature (196)..(196): n is a, c, g, or t
  misc_feature (240)..(240): n is a, c, g, or t
  misc_feature (284)..(284): n is a, c, g, or t
  misc_feature (355)..(355): n is a, c, g, or t
  misc_feature (358)..(358): n is a, c, g, or t
  misc_feature (360)..(360): n is a, c, g, or t
  misc_feature (365)..(365): n is a, c, g, or t
  misc_feature (411)..(411): n is a, c, g, or t
  misc_feature (465)..(465): n is a, c, g, or t
  misc_feature (490)..(490): n is a, c, g, or t
  misc_feature (563)..(563): n is a, c, g, or t
  misc_feature (611)..(611): n is a, c, g, or t
  misc_feature (641)..(641): n is a, c, g, or t
  misc_feature (664)..(664): n is a, c, g, or t
  misc_feature (728)..(728): n is a, c, g, or t
  misc_feature (748)..(748): n is a, c, g, or t
  misc_feature (887)..(887): n is a, c, g, or t
  misc_feature (968)..(968): n is a, c, g, or t
  misc_feature (1001)..(1001): n is a, c, g, or t
  misc_feature (1036)..(1036): n is a, c, g, or t
  misc_feature (1045)..(1045): n is a, c, g, or t
  misc_feature (1121)..(1121): n is a, c, g, or t
  misc_feature (1181)..(1181): n is a, c, g, or t
  misc_feature (1190)..(1190): n is a, c, g, or t
  misc_feature (1255)..(1255): n is a, c, g, or t
  misc_feature (1259)..(1259): n is a, c, g, or t
  misc_feature (1274)..(1274): n is a, c, g, or t
  misc_feature (1289)..(1289): n is a, c, g, or t
  misc_feature (1316)..(1316): n is a, c, g, or t
  misc_feature (1325)..(1325): n is a, c, g, or t
  misc_feature (1383)..(1383): n is a, c, g, or t
  misc_feature (1411)..(1411): n is a, c, g, or t
  misc_feature (1560)..(1560): n is a, c, g, or t
  misc_feature (1661)..(1661): n is a, c, g, or t
  misc_feature (1757)..(1757): n is a, c, g, or t
  misc_feature (1760)..(1760): n is a, c, g, or t
  misc_feature (1775)..(1776): n is a, c, g, or t
  misc_feature (1786)..(1786): n is a, c, g, or t
  misc_feature (1790)..(1790): n is a, c, g, or t
  misc_feature (1794)..(1794): n is a, c, g, or t
  Peptide Sequence Number=SeqID_8572
  Probeset Number=SeqID_15589
ntagcacttcgctcgacagtatgtgagagcttantgngaagtngtngtggcgtggtgtcgagagactnggatnggtgatctatatcaagatcagagtgtgcgactcgcggacagtcggccctgtctgtgtgttgctatatctcgtgctccgcgnccancactagtttgtagtatataagtactgtgtatatatatncgagagactcctacacccgatacgtagcgtcgtgcggtgtgtgngtgttgtgagagcgcgcgcgcacgcacgctctcccacacacggntattatgtgtgcgtgacggcgagcgagtcgaggacggcacggcgcaggtcgagcgcgcgacgatatgtggncgngnaagtnggagagacgcgacggacggccgcacggtgagtcggtacatattatngtagaggcgtgcagtgcgtcgagcacttcagtagaggccatcatgagagagggntctagtatatatttagtagctgtgncgacgtcacgtatgtagagtcatcgcgtacatatactatcgactcgtcgatcaccgtcgcatatgtctatcantctctaggaggtaggtgagaggtgtacgaatctgttcacgatcgcgcngtgtggatgtgcaggtggtgagatagcgcngcgagttcgtcgtcgtgtgtcgngacgatcgcagtgtcatgtatagatataataatacgtatgatgtgagtctggtccgcgtgagancgtccagccgtttgttcgtngtgtcagcgcgcgtcgtactcatataagatgttgttcgatgcatagtgtgtgtgtccgtctaagtgttatatagatgtattgtattgtgtatagatctggtgtagaggttcggcgtctcgtctctagtttcttgcagcnaagcagacactgctagagcgtccgtacatacagtgagaggcgccatacttgagattatggagtctggtgtgcgtccgtttngaatgataagctatacgtagcacgacacacaanatctatcactgtctcattatattacttcctaattnacttattanacatactaaataatatcaccaacaatatagagcgaacattagatcaaataacataatagacgcgttacagatagcnattctctcatctctacacattctatcactattgtacgagtattggtattacgacgcgtcnaggcgcctntcgcgtgttgcccgctcacttgatattagctctctcaccgcctcatcgcgcttgtgttatgtgtntggntggtgtgttgtgctngcagttgtgtcttgntgaggaatttgttctgtcggtcgcgancctgtgccntttgtgtatgttacccttggctagacggctccgcttctctgttgcgctctccatattntcgacatctattgttctctcttgtgcanctcacacagttgtgaagactcttgtcgccgccgtcggtctccacttctatttctgtagcgactgctacttggtttctcggcgcgtagcgctgtaggtgctcttatctgtacaggtgactcgcagcatactaatatacctactaccaacnttcatatcctccacaccacggatcgcgaggcgggcgacgccgaagtttggtaccactttatgttgtgtctatacatcgcatctatttatgtgcgaccggcnccctcatacttcactcacactaatatctatcatttactagtctatactacttcttctctatttatttatgttatattaatatcaattatattatantanatatgcctctgcttnntatttcttcntttntacntgcgcggtgtcacttctat

SEQ ID NO: 5811 - DNA, 511 bp, Glycine max
  Probeset Number=SeqID_15590
aagctcactcaaacacagccacaccacaccatcactatcacaaagccgcacaagcaagacaacatcctgataagtggtagcgcagcctcccagctagcactatggcaaagtgcctcgccgtcgccctcctgctggtgctggtgctcgcgtactgcggcgggaggcagcggaacgaggaggagcaggcacccgcagcggcacgcggtgccggggcggctggtggtggcgtcggcgaggagatgatgttggggttgcctgacctccggcctgtggccgccgttagcggtaccagccccactatcggcccgctcctggcgctccctgcccttcccgggatccctggttacccatgatcacctctagttcatgttctgtctttcaatatgaagctcacctcgtgactttacacttctaggctctagcttaacatcgcccggaaggccaacaccggcgtttcgctcatgtccatgttccttccttaatgggcgtctgtatcatctatccccgtctg

SEQ ID NO: 5812 - DNA, 1666 bp, Glycine max
  misc_feature (896)..(896): n is a, c, g, or t
  misc_feature (994)..(994): n is a, c, g, or t
  misc_feature (1011)..(1011): n is a, c, g, or t
  misc_feature (1028)..(1028): n is a, c, g, or t
  misc_feature (1033)..(1033): n is a, c, g, or t
  misc_feature (1057)..(1057): n is a, c, g, or t
  misc_feature (1165)..(1165): n is a, c, g, or t
  misc_feature (1382)..(1382): n is a, c, g, or t
  misc_feature (1397)..(1397): n is a, c, g, or t
  misc_feature (1434)..(1434): n is a, c, g, or t
  Peptide Sequence Number=SeqID_8573
  Probeset Number=SeqID_15591
gagtggcgcccatccctcctcacctacttattacctcaatcacttatagacccgggcgatgaaccacctctcccttatgaagatgtggttattctctccccgcttcgctgcgatgttaacgccctcgtatttttctctcttgcgcataccaccgcggaggttttgatagtggaagttactcgtggaacgtaagcgcccccgccacaccacctcacctccctctatatcttcgccacgttttattatcaactcaaaattaccttcttctcgctctttgtactcacgccgctagatatatgaataatctgacccgcaacatgcgtgctaatatattcctccaccatatatgagagaatatcacaatatgccgtccgctactattatatataaatcctgcagcgcactatatataataggactagtatatcccccgccagagaaatatgaacgcgcgcgtgctcgcgcccaccgcgcccccctgctacaagaaaacgggcgtagtggaatatagaatgcgcgcgcgaaataagatttataaaaatgagacattcgccgcgctccctcattgtattatgtatatgtccacgctgatatagaataccttattatccacactatatgggactatcagcacttttgtctccgcgcccacgtagattatatggcgaaatataaagaataataataagtgccgccaccgcggatataaatatacctatgtgtctcccgccgtattataattaacgagggcggttaaaatagcccattacaacacgtcgttgaggataacaactcgcggactggcaccacaaaacaacagataccgaggagcggtcgggtatataaataatcgatttatataaaggataatatatcttgtgtttacatctcatccnacacccgataatatctatcacgccacacactggccactatctctagagatatatataccacacaatgttgatatttgtaacacgtgcctctagtatgntgagcacgataatgatnaatatgatgacaatacntatgngatatgcgtgctcacaccccacancaccactggtgctagataatctcatccgcgccagacaccatatatagtaggactcgatctattgtgtggatgcgtgcgccctctctcgacacgatcttatcaaatcancctcgtcgccacagctagaggcacggccacgagaagtaattgtgtaatatatataaataaatagcgcgcgggcgcagagaatatagataagactagcgcgtgtgtcagcgcacacacatacgagatgaatatattattctcgtcgcaatacccgcccgacgctccgcactatatagcatagaacataactacaatgtgcgtgtgtacaacactcagnactaccgtcacgtcnctctagagacccgggggaaacgaatatacatcctctntgtggtatgtgcgagatgttgtgactaacacatactacaaatatttcctccgctaaatgaatatccgcgcgtatatgcgctatatacggtatactttagcgcggcggcgcgcgcagcacaaaggaaagcattgcgtatctcgttgccacgtccgatgagacatctattaggttagacattgttcttaatatgctccgctatatagaacacgcaatgccgacagccaccgccc

SEQ ID NO: 5813 - DNA, 590 bp, Glycine max
  misc_feature (465)..(465): n is a, c, g, or t
  Probeset Number=SeqID_15592
gctggagctccaccgcggtggcggccgctctagaactagtggatcccccgggctgcaggaattcgcacgagaccattacctagaacatcctaatcgaaaaaacagaaaccacttctctcattaaccctaattcacaccctttgcatctgcgaaactcgatctacagatctctccaagctcccaatctccagcagggagattcgaaagatggtgtccgacgctagcaagaagaaggctctccagaagaaagccgccgccgccgccaaaagaggcggtaaagccgccgccgctaaagccgccgcctcttcttcaaacggagctgatagcttgtcgagcggcgtcgacgctattcagatatccgaccggacctgtaccggaatcctctgctctcatccgcagtccagagacattcgtattgaatctctgtctgttacgtttcatggttacgacctgattgttgattcnatgctggagcttaactacgggagacgctacggtctcctcgggctgaacggttgtgggaagtctactctcttaaccgcgattggactcagagagcttccgattcctgatcacatggacatctacca

SEQ ID NO: 5814 - DNA, 502 bp, Glycine max
  Peptide Sequence Number=SeqID_8574
  Probeset Number=SeqID_15593
tccgctttctgaatattctacccgcctctttattttgctttgaggccacgcccccatatcttctatcccgatgctcactactaagaagtccgaatccactgggggtggtgacaacggtagcgacccgcagccccctgcctcttcctcttcttcatcctcctcatcgtcgtcgtcttcgtcttcctcggggatcatggcttcgccggatacaggagctggcctagagaggaccccaaggaaaaaggagagggcctcccccggggcagagcatgggtcctcctctgctcctggtatcatggcgggcggggaagggaggcagcccgagacccctgagggccggaggaccagccgcagaaagagggccaaggtggagtatcgcgaaatggatgaaagtttggcaaatctctcaaaagatgagtattattctgaagaggaaagaaatgcaaaagcagagcgagagaagaaagtgccaccggcttcttcacaagcccccccagaagaa

SEQ ID NO: 5815 - DNA, 2015 bp, Glycine max
  misc_feature (1)..(1): n is a, c, g, or t
  misc_feature (30)..(30): n is a, c, g, or t
  misc_feature (32)..(32): n is a, c, g, or t
  misc_feature (38)..(38): n is a, c, g, or t
  misc_feature (68)..(68): n is a, c, g, or t
  misc_feature (103)..(103): n is a, c, g, or t
  misc_feature (126)..(126): n is a, c, g, or t
  misc_feature (149)..(149): n is a, c, g, or t
  misc_feature (200)..(200): n is a, c, g, or t
  misc_feature (206)..(206): n is a, c, g, or t
  misc_feature (211)..(211): n is a, c, g, or t
  misc_feature (235)..(235): n is a, c, g, or t
  misc_feature (268)..(268): n is a, c, g, or t
  misc_feature (287)..(287): n is a, c, g, or t
  misc_feature (296)..(296): n is a, c, g, or t
  misc_feature (306)..(306): n is a, c, g, or t
  misc_feature (322)..(322): n is a, c, g, or t
  misc_feature (327)..(327): n is a, c, g, or t
  misc_feature (329)..(329): n is a, c, g, or t
  misc_feature (332)..(332): n is a, c, g, or t
  misc_feature (351)..(351): n is a, c, g, or t
  misc_feature (382)..(382): n is a, c, g, or t
  misc_feature (389)..(389): n is a, c, g, or t
  misc_feature (393)..(393): n is a, c, g, or t
  misc_feature (395)..(395): n is a, c, g, or t
  misc_feature (398)..(398): n is a, c, g, or t
  misc_feature (427)..(427): n is a, c, g, or t
  misc_feature (429)..(429): n is a, c, g, or t
  misc_feature (452)..(452): n is a, c, g, or t
  misc_feature (496)..(496): n is a, c, g, or t
  misc_feature (501)..(501): n is a, c, g, or t
  misc_feature (834)..(834): n is a, c, g, or t
  misc_feature (915)..(915): n is a, c, g, or t
  misc_feature (927)..(927): n is a, c, g, or t
  misc_feature (948)..(948): n is a, c, g, or t
  misc_feature (950)..(950): n is a, c, g, or t
  misc_feature (959)..(959): n is a, c, g, or t
  misc_feature (1035)..(1035): n is a, c, g, or t
  misc_feature (1055)..(1055): n is a, c, g, or t
  misc_feature (1107)..(1107): n is a, c, g, or t
  misc_feature (1154)..(1154): n is a, c, g, or t
  misc_feature (1205)..(1205): n is a, c, g, or t
  misc_feature (1207)..(1207): n is a, c, g, or t
  misc_feature (1210)..(1210): n is a, c, g, or t
  misc_feature (1255)..(1255): n is a, c, g, or t
  misc_feature (1257)..(1257): n is a, c, g, or t
  misc_feature (1275)..(1275): n is a, c, g, or t
  misc_feature (1277)..(1277): n is a, c, g, or t
  misc_feature (1291)..(1291): n is a, c, g, or t
  misc_feature (1404)..(1404): n is a, c, g, or t
  misc_feature (1410)..(1410): n is a, c, g, or t
  misc_feature (1430)..(1430): n is a, c, g, or t
  misc_feature (1432)..(1432): n is a, c, g, or t
  misc_feature (1498)..(1498): n is a, c, g, or t
  misc_feature (1500)..(1500): n is a, c, g, or t
  misc_feature (1502)..(1502): n is a, c, g, or t
  misc_feature (1504)..(1504): n is a, c, g, or t
  misc_feature (1528)..(1528): n is a, c, g, or t
  misc_feature (1603)..(1603): n is a, c, g, or t
  misc_feature (1639)..(1639): n is a, c, g, or t
  misc_feature (1657)..(1657): n is a, c, g, or t
  misc_feature (1665)..(1665): n is a, c, g, or t
  misc_feature (1704)..(1704): n is a, c, g, or t
  misc_feature (1711)..(1711): n is a, c, g, or t
  misc_feature (1724)..(1724): n is a, c, g, or t
  misc_feature (1780)..(1780): n is a, c, g, or t
  misc_feature (1787)..(1787): n is a, c, g, or t
  misc_feature (1856)..(1856): n is a, c, g, or t
  misc_feature (1898)..(1898): n is a, c, g, or t
  misc_feature (1942)..(1942): n is a, c, g, or t
  misc_feature (1955)..(1955): n is a, c, g, or t
  misc_feature (1972)..(1974): n is a, c, g, or t
  misc_feature (1982)..(1983): n is a, c, g, or t
  misc_feature (1986)..(1988): n is a, c, g, or t
  misc_feature (1993)..(1993): n is a, c, g, or t
  misc_feature (1995)..(1995): n is a, c, g, or t
  Peptide Sequence Number=SeqID_8575
  Probeset Number=SeqID_15594
ncgatggcgtgcggcgtcgtcgactagtgnancagcanttcacgtcagactcgtatcagctttatgcnacaagtctctcgcgtcacatgagtcatgctgagcntgcacgactacgtatataacatnatgctgcagcgtcggatcagtanttatagcgtgattagtcgatcgtcacacgatgagacgcaaagagacgtccntctcgntcctncggttactggtcatcacgaactgncatatgtgtagtgcatcctcgtacgattgatanatgagacatgacattgatnttctagtantcacatacgntagacacttaataatnatgananatnacatgtcgtgatcgtgtgnatcgtgtcatcgctacgcagcgatcgacatnaactatnagcngngtntgcatacgtcgacacatcgtacgacgagnancactgacatacatgatgatgtgntgcagagcggcgagatcgcgacgagtgcactacgatctcgagtncagancatagcgcggagtgcgcagtatgcgtcctgaccaacgcacatgacgcgcagcgcgcggacgtgtgggtagctgagagagagggtcacgacgctatgagcggtcgagtatgcgcacgtctgcagcagagtacacagtaggaggagcatatgcagtatcgtgagtggtggtacacatcgcacgcgtgatagtacacaccggagtactgacgtctatcactcgtagcgagtactatcgtgacgtagtagattacttcatagtcatagaggtcgtgtgtcgcactggtgtgtggtgcatcgtcaggagagctgatcatagcgtcgtgcgataagtanctaatacatgcatgtaatagcagatcagcgataagtcgcgagacgcacgccagtattaatgcttcatgacgtgcttacgtnatatgaggtgantgagtgctattgctcagacangnatgcgtcangccgtcgctgtgcactgcacacagtacctagagctgatagcgacacgatcctcagctcactaacagtcgttccatntacattcatcatcgacgacncgcgcgatctagcgaggcgctgagcggcgcccgacacgcgacgtagcgcgcnacagactatagtgacgtcgtgcagagactatagaagtaggagtcagnactacgatgatgtatctatatgatgcgcgatcgagtagtgtattagtttcnangtnaacgtatcaatcatactagacgatcaaacatgacgatcgacgtancncatcattcgcaatacgtnancattagatgctgtngacatgctgcgtgccatgtacatacgtcatcgacactcacacgatgataacactcgatgtcagctgtaatataacacacagcctacctcagacgacgtgcactcgcggccganttacanctccaccaatcgtcgctgcngnaactcagatagcggtctaggcgagcagcatcgagatcatctatagtgcagatcactctcccgtacntngngngacgttagtcacatcttaggcacntgcatgatcaattgcgtactgatcactgcggtcgcgtgttgcagtcacagtacgtcttatcacagctagcgctgnagtagcgcgtaaacgtctgagctcgtatcagtgacnagtagatgtggagacganagtagatnatagcaggtgtgagatattacgatcgagatagagacagnggtaagntcttatacatctntcagctggacggtatgacttatcctgttagaggataagagcccagcgagtagaggngagagtnactcatgctgctccctctctgcgtcgtggcctcgtcggtgtgcgagagcaccacgcgaccggctctgcncgtcgcgcgctctcgctcctccgcgccctccgtagatagagncgcgctagcgtacacgaatgtcaaccatcacacaaccacgaacnagtgagatgatgnagtgtagtgggatcttnnntatcatgnncgnnntatcnantgagaatgcttacgagatat

SEQ ID NO: 5816 - DNA, 1404 bp, Glycine max
  misc_feature (53)..(53): n is a, c, g, or t
  misc_feature (56)..(56): n is a, c, g, or t
  misc_feature (119)..(119): n is a, c, g, or t
  misc_feature (121)..(121): n is a, c, g, or t
  misc_feature (185)..(185): n is a, c, g, or t
  misc_feature (210)..(210): n is a, c, g, or t
  misc_feature (217)..(217): n is a, c, g, or t
  misc_feature (244)..(244): n is a, c, g, or t
  misc_feature (249)..(249): n is a, c, g, or t
  misc_feature (311)..(311): n is a, c, g, or t
  misc_feature (395)..(395): n is a, c, g, or t
  misc_feature (429)..(429): n is a, c, g, or t
  misc_feature (481)..(481): n is a, c, g, or t
  misc_feature (507)..(507): n is a, c, g, or t
  misc_feature (594)..(594): n is a, c, g, or t
  misc_feature (653)..(653): n is a, c, g, or t
  misc_feature (655)..(655): n is a, c, g, or t
  misc_feature (1032)..(1032): n is a, c, g, or t
  misc_feature (1063)..(1064): n is a, c, g, or t
  misc_feature (1215)..(1215): n is a, c, g, or t
  misc_feature (1321)..(1321): n is a, c, g, or t
  misc_feature (1348)..(1349): n is a, c, g, or t
  misc_feature (1354)..(1354): n is a, c, g, or t
  misc_feature (1367)..(1367): n is a, c, g, or t
  misc_feature (1378)..(1378): n is a, c, g, or t
  misc_feature (1382)..(1382): n is a, c, g, or t
  misc_feature (1387)..(1387): n is a, c, g, or t
  Probeset Number=SeqID_15595
tgagcatatatggattatgtatgttttatactgtttatctagcgcgccaacgngangtatatatgtaatatattttatatattgagttggtcgtagcgaatgagtgtgtgtgtgtaggngntgctgcatgagtggtggagtgtgctgctgcgtgggcgccgtgtgtgtagttaggcgtcgcagtnactttcgatgcagacacagtgcganggcaagntgagcagtacaattacaaagacacgcncgcgntgcaagatgtgttatgaatacatatcgatgagtttcgtgtagcagttgtatatatactatgnataatttttctgggaatctattgctctatttaacgagtgcgtctcatcctagtatgcatgtatggactagttacgagaggaggncggtgagatgcgatatatcgtgatatatgatcantatgatattctgtttatgtagtagagtatcgtgtctcgctcattctctcgcnaagctgcagtcagcattatgttcagntacaggttgctcgcagcgtttctgcctatacatattctttgctaacttctcttatgtcatctgttatatgatgtttgtggtggtgtntgtcattttattatactatgtcaaattacatttaaattattattgtattgcgggtagtngngggggcgatgtatatatatagagaagtgtatgaaggagtagtgtacattcaatgtggttcgacgtctgggcgaggattgtagttttgtctagtttgtgttattctaactttcacttatttcttaatattttcgcctcttctccgtttttaacttccccctttctttagcgtcgacgcgctatcgcccgcctcaattctccaagaatgtttgttgtgttataagattatatatgttattctcttcattgctctttatatttttaccggtgttgttcactcagatcactctaccctttttatatccacgctcaccaccccatatcccttctttttcttttgactatgcatacttcattcccctctagtgtaatcgtcgncgtagtccggtagagaggtccgccccgcccnncttttcttcttcgtgctctttcggctcaccgtaattatccactccgcacaaaaaaacaccccattatatttgcctggatcttggtagttggtttgttttagacgctttgtgtaggctacggaggatgtgttctgggctattgtctgttttngagtgtgcgtagggtcattgtgtgtggtgctgaatttttggtgctcattggtggtccgtgtgtagtgtgtttcctgtcgtgggtacggtgttgtgagagcgcgcgntagttaacatctatgtttgttttgttnntgttntcgcgcctctcgnctatctcctcnttcnccccnccacaacatcaataata

SEQ ID NO: 5817 - DNA, 1461 bp, Glycine max
  misc_feature (1)..(13): n is a, c, g, or t
  misc_feature (1003)..(1003): n is a, c, g, or t
  misc_feature (1461)..(1461): n is a, c, g, or t
  Peptide Sequence Number=SeqID_8576
  Probeset Number=SeqID_15596
nnnnnnnnnnnnntgacaatgctttttcatgcacctataaaatgcacatatttgtgtagcaatagatatatctctcaatctgtgtgttattaccttaggagttaggtaaatatggcatactctcaacttcaaaagctggaagctaacgtgagtatcaaggcttcagctgaacagttctatgatgttttatgccacaagacacaccaaattcccaaaattttccctgaaaaagcactgtctgttgaaattctgaaaggtgcatggggcaccgagggatctatcatctcctggaattatttatacgagggaaaagtttgtgtggctaaggaggtgattgaaggcatagacaagaaaaacaaaaaaatgagcttcaaggttatagaaggagacgtgctgggacattataagagcttcaagtttataatgcaagttactccaaaggaaaaaggcagcgtagtgcaatgtgtcgtggaatatgagaaacagaaagatcacattcctgaccctcataccttattgcaatccactgttgagttgtgcaaaaaaattaatgcttaccttactcaggacaacaactaaatcaatatcaatagaaagctcatgctctatgctattgctatctaaaataaaaattgatatcttatggggcataatttccccttactttcatcaattataaattatattaaactcttaataaattgcattatctacaattaggcatgagttgggcacgtacgtactttatgtcgttgcattatttattttccgtgtgaacttgtcttcttgtaacctatgggattgaaagtttgttttgaaattaatctcctttaccttttgtgtggaacaaacaaaaaacaaaaataactgtgataactgaaggtgatagggggtttgttcttattcagcatgtaccttgtcttgtaaactttgttgtttccttcattagcgagtaagcgagaatggatgtcatttagagtgaatggggcacctccaaaggagncaaccttcaggatccttctgacaagaggaaaataatatgtgacgagaagctgaaagaactctttgatgtcgactccttcactggcttcaccgttacaaaactgctggctcctcattttataaagacagagcagtgagttgcttgtacattttattaaggttttctttttgtgtcctgttggcaaggtctggcaacaggaggaatagaaattagtaaaatgacagattttctgtaattttttcttgaagattttaatgttatgtgaccgtttattttgttttaaattatcctgttttgccacttggcagttgaaaattttgtatatttgattcctgaagttgcaaggacaatgttgactttatattctcctgcgccagttggcagaataggagaatactgatattgtatgaagaaagcaaaggtaattgtaattcggtcgagcaaaaaaaaaaaaaaan

SEQ ID NO: 5818 - DNA, 1945 bp, Glycine max
  misc_feature (33)..(33): n is a, c, g, or t
  misc_feature (37)..(37): n is a, c, g, or t
  misc_feature (45)..(45): n is a, c, g, or t
  misc_feature (56)..(56): n is a, c, g, or t
  misc_feature (85)..(85): n is a, c, g, or t
  misc_feature (129)..(129): n is a, c, g, or t
  misc_feature (139)..(139): n is a, c, g, or t
  misc_feature (255)..(255): n is a, c, g, or t
  misc_feature (400)..(400): n is a, c, g, or t
  misc_feature (411)..(411): n is a, c, g, or t
  misc_feature (433)..(433): n is a, c, g, or t
  misc_feature (456)..(456): n is a, c, g, or t
  misc_feature (502)..(502): n is a, c, g, or t
  misc_feature (588)..(588): n is a, c, g, or t
  misc_feature (623)..(623): n is a, c, g, or t
  misc_feature (705)..(705): n is a, c, g, or t
  misc_feature (740)..(740): n is a, c, g, or t
  misc_feature (816)..(816): n is a, c, g, or t
  misc_feature (826)..(826): n is a, c, g, or t
  misc_feature (853)..(853): n is a, c, g, or t
  misc_feature (860)..(860): n is a, c, g, or t
  misc_feature (862)..(862): n is a, c, g, or t
  misc_feature (874)..(874): n is a, c, g, or t
  misc_feature (921)..(921): n is a, c, g, or t
  misc_feature (966)..(966): n is a, c, g, or t
  misc_feature (1036)..(1036): n is a, c, g, or t
  misc_feature (1083)..(1083): n is a, c, g, or t
  misc_feature (1098)..(1098): n is a, c, g, or t
  misc_feature (1108)..(1108): n is a, c, g, or t
  misc_feature (1119)..(1119): n is a, c, g, or t
  misc_feature (1258)..(1258): n is a, c, g, or t
  misc_feature (1316)..(1316): n is a, c, g, or t
  misc_feature (1327)..(1327): n is a, c, g, or t
  misc_feature (1331)..(1332): n is a, c, g, or t
  misc_feature (1352)..(1352): n is a, c, g, or t
  misc_feature (1394)..(1394): n is a, c, g, or t
  misc_feature (1411)..(1411): n is a, c, g, or t
  misc_feature (1466)..(1466): n is a, c, g, or t
  misc_feature (1470)..(1470): n is a, c, g, or t
  misc_feature (1478)..(1478): n is a, c, g, or t
  misc_feature (1482)..(1482): n is a, c, g, or t
  misc_feature (1501)..(1501): n is a, c, g, or t
  misc_feature (1519)..(1519): n is a, c, g, or t
  misc_feature (1583)..(1583): n is a, c, g, or t
  misc_feature (1621)..(1621): n is a, c, g, or t
  misc_feature (1624)..(1624): n is a, c, g, or t
  misc_feature (1630)..(1630): n is a, c, g, or t
  misc_feature (1720)..(1720): n is a, c, g, or t
  misc_feature (1730)..(1730): n is a, c, g, or t
  misc_feature (1735)..(1735): n is a, c, g, or t
  misc_feature (1746)..(1746): n is a, c, g, or t
  misc_feature (1797)..(1797): n is a, c, g, or t
  misc_feature (1801)..(1801): n is a, c, g, or t
  misc_feature (1804)..(1804): n is a, c, g, or t
  misc_feature (1820)..(1820): n is a, c, g, or t
  misc_feature (1827)..(1827): n is a, c, g, or t
  misc_feature (1831)..(1831): n is a, c, g, or t
  misc_feature (1877)..(1877): n is a, c, g, or t
  misc_feature (1881)..(1882): n is a, c, g, or t
  misc_feature (1901)..(1901): n is a, c, g, or t
  misc_feature (1903)..(1903): n is a, c, g, or t
  misc_feature (1935)..(1935): n is a, c, g, or t
  misc_feature (1945)..(1945): n is a, c, g, or t
  Peptide Sequence Number=SeqID_8577
  Probeset Number=SeqID_15597
ccgccccacccgcctccccactccctacactcngtcnctccaccnctgctgatacnatctagtacctccacatgacatatccgtnaagcgcgataaatgagggtgtgtacctgcgcgtgatcttcacgncgcgtccggngagtgcgatggttattctgtcctatgagatactaccgcacgcactatgaacgcccgctcgagcgtcgcatagtggtgtgatccctcttatgtcatcatcgagttaggatgtctcgnatcgagatcagctcgacagcatctcaagtctagcaccagcaggtatatatcacctctcagagctactgcactatgcttatacgactcgaacactctattcgcagatgacgaccatacactgcgaatatcacagccctatctactnatgggctgctntggtcatcctctctcacatcgncacgcacatgcattgctgtatcncatctctgatatactattgtgtattgcttattgactgcagtcgcancatcaatagtactgtcatgacccacatatatgctctagacggccccatcctcgcacctcacttattcgatactacataaccgtcancattatacatgacagttctgtaacatcatgcgcgnctacaatcgaacgagtcacacaataatgtaggtgtacgcgaccaaccattagcagaccaactagatatattatcaaccgtcncgagatacactcgaaagctcaatcatgtctagccnagaagactctgtgaccctattcaagcaacgacgctctccgggtcatatatagtggcggcgacaacacgtcaacctnatctctgtanccgctcatgacctctgatcatactacncttcgtncnctcatttgtggntatatgatctgctactcagattgatttgacttgcgctcagtcgcacnatctacactgctgcttgacgtcgatgtaacacgtagtatatcgancacacgagactgcgccgggctacgccacgacacgatatctccattagtactcacacactctacacttcgntagtcgaacgactaacatactgcatactgtgattgcagtcgacgtgncatgtgtcactgcgntctctctgcngtgtcgttacncgttctatcgcgacaacggctgtatgacatgtctacctactatgctcgtcgtgaatagcacatacttctctctagccgcgcactacgagcatactagtaagtcatcaagatatacatatacctctccgacgatatcgancacagtgtgatatatcgcaccacactcacagctcgacgatttatcagtgcgatgtgtngattatgacgngtannctacgacgctcaggaacacnaggacatccttcactgatgtgtcattgtgctaacgcatggtnctgcacgatacatcacngactatctgcactgcccgacgatgcagtagtgtacgtgctgagcttcactccgcngatncctgctantgcnatcggtatgtacgtatacntcgtcatactagctctgntgcttcagtcgttgctacatacgtcgctcactctctgcgtctactactcactgctactcgcgancacgtaactacacgactcattagcacacatatcacgantanagtctncgatacgactagtgtaccctttattacactgagatcacgatccaaatcgtactgctcatctccagctcgcgactagatcatctgatgatnctagactatntcctncatcgtcagcnttgtagatactagcgatcagagtactcgacatcgtcatcgtgacatacgangatnacngctagcactcagcctnctactcncatntcatcagccgcatgcccgacgctagatgaacacttcaacgactaantaanncactacctcagtagcacantnatgcagtcgaacgtgagatacgacagatctcnatccggttgn

SEQ ID NO: 5819 - DNA, 397 bp, Glycine max
  Probeset Number=SeqID_15598
ggtcttccaggccgcgcgtaagggctcagcagccgaatacgagcagaaccgactcgacggtgatcgcttagcaagatggggcggagctttattagagttgtgtcaaggacagagtgctcctggatcgaagaaaatgagcccagaggctgggtcaaagctaaaggacgcgcttgcggtgaatcccaagaagcatggttttttttggaggctgggaagcgctcacacttgaccaccgtttttagtttcggaaccggacgaagcccacgtttatttgggtacggcagctgagtacttgtcggccgctgtggaggaggacccgtcgaatgaactttaccgcaaatcgttggaagtggctgcgtaggctcctcgagtggatgtgaaaatccctacccatgga

SEQ ID NO: 5820 - DNA, 596 bp, Glycine max
  Peptide Sequence Number=SeqID_8578
  Probeset Number=SeqID_15599
gtcacatcagtccttccgtcaccatggctttcaaggttattgtcgctctctccgtgctggctgttgccgccgccctgccccagtaccactccggctacgccccagcccctaagtacgcacctgctccagcccctgcttacaagtcgtacgcccccaagtacgaagagcctgcgcctgctcatcccaagtacgagttcgagtactccgtcaacgacccccacacctacgacatcaagagccagaaggagagccgagacggagactacgtgaagggagtgtacgagctggtggagcctgacggttccaagcgtatcgtcgagtactccgacgacggctacggcttccaggctgtcgtacacaaggaggccggcaagggctacgccgcccctgcttactccgcacccgccccagcttacgccgctcctgcgtactcagcaccttcttactccgcccctaagtactcacctgccccatcatacagcaagtactaggaagtctacgtttacactatcatcatcactatgtatatatgacatcaatcattagtgtatattcttatactttgtaccttaactaataaagtgatattttttatt

SEQ ID NO: 5821 - DNA, 1605 bp, Glycine max
  misc_feature (50)..(51): n is a, c, g, or t
  misc_feature (53)..(54): n is a, c, g, or t
  misc_feature (56)..(60): n is a, c, g, or t
  misc_feature (63)..(63): n is a, c, g, or t
  misc_feature (66)..(66): n is a, c, g, or t
  misc_feature (68)..(69): n is a, c, g, or t
  misc_feature (71)..(71): n is a, c, g, or t
  misc_feature (77)..(77): n is a, c, g, or t
  misc_feature (109)..(109): n is a, c, g, or t
  misc_feature (146)..(146): n is a, c, g, or t
  misc_feature (184)..(184): n is a, c, g, or t
  misc_feature (227)..(227): n is a, c, g, or t
  misc_feature (233)..(233): n is a, c, g, or t
  misc_feature (669)..(669): n is a, c, g, or t
  misc_feature (867)..(867): n is a, c, g, or t
  misc_feature (897)..(897): n is a, c, g, or t
  misc_feature (931)..(931): n is a, c, g, or t
  misc_feature (964)..(965): n is a, c, g, or t
  misc_feature (968)..(968): n is a, c, g, or t
  misc_feature (977)..(977): n is a, c, g, or t
  misc_feature (1038)..(1038): n is a, c, g, or t
  misc_feature (1085)..(1085): n is a, c, g, or t
  misc_feature (1100)..(1100): n is a, c, g, or t
  misc_feature (1118)..(1118): n is a, c, g, or t
  misc_feature (1124)..(1124): n is a, c, g, or t
  misc_feature (1337)..(1337): n is a, c, g, or t
  misc_feature (1364)..(1364): n is a, c, g, or t
  misc_feature (1369)..(1369): n is a, c, g, or t
  misc_feature (1418)..(1418): n is a, c, g, or t
  misc_feature (1438)..(1438): n is a, c, g, or t
  misc_feature (1536)..(1536): n is a, c, g, or t
  misc_feature (1549)..(1549): n is a, c, g, or t
  misc_feature (1574)..(1574): n is a, c, g, or t
  misc_feature (1581)..(1581): n is a, c, g, or t
  Peptide Sequence Number=SeqID_8579
  Probeset Number=SeqID_15600
tgggttttttgttggttgcgtcttccctcccctcgcttttcttttctgtnncnnannnnnttnttngnntntttttntgttcttctttttctccttgtgtttctgattntgattggagtaggggaggcggcagcccctcctatgcnagtgcgtgactttatcgttgtggagtggcctccgcccncccccacccacgcctcaacccgctggggatagcaccatgattngtatgntacatacacacagatacgcacacgtgagatatatgtcatcaatagtgtgagctatctacgatgcactagaactcaacccttacatctcactacgatacatgtatatgttagatataatgtgctctatgtcagcctttctttagtccttattctgtctatccaaatatatatgattaaatagtcatatgtatattctatgaagtctagctactcaactaagacagccatattcggagggcgtcgtgatcgctacacgtagcgccatctcgacttgctcactgaagatattctagtctgaaaccataccatagacaggatatattatagagtagatgtcgaagtattcatcttataatgagataatatagtatttgtgagctatttatagtacaaccctaatccggacgaatatggtaatctgctgcgacgggacatnacgtttcgaaggagggttagttatctgctttgatttatgttgttattgtagttatgatatatgtataataggaatagatgaaaatgtacgattaagcgtaccacgtgatcacatatatatgttctatcgtgtcatgctgtatgttatctgttctaggttgagttgtgagatatattatgagatgggatatagtgtganaaccaccccacggtctatgtctgcgtgttngtgtctcccgcgcccgtcccgcgcgcgcgtgggnatgtgttgtagtgagatgctcactgggaaaggnnganctatctttnctcctcgtcttcttcctctctacgacgtgatagaactagatcaatctatatcatacagccntctcacacctctccctattattatactacgtgattctatacgatatnactcactctctccancttccatgagatgtggcntagctnttgtgatgtattacctgtgcatgtggtggtgcgtgatgtgtcctctcgaccgcgtatcctgccgcgctctcgtgattacgtacagtgatcggactcatgagtgagatgttgtgttcttgtgtgttatctatacgctatactattgtgagagtgtgttgtatctatagaatgatccggagacgctgcttcatccacagttatctacactatatntgatacgacgcagactggaaggagctnttaangatgtctgttatctacttatgccgttgttgtatgttgtgatatgaaatntcactctatcaactgtcttnatcgtacggtataatatgatattttcatcgatgctcttgttagactgtcctatcgcgctcttgcgagctacactcgactcatgtatgcgtgtctagtncgactactatctnctatatcatatcgtcgatactatcnatctcancaacgctctcttactgtctatatg

SEQ ID NO: 5822 - DNA, 814 bp, Glycine max
  misc_feature (22)..(22): n is a, c, g, or t
  misc_feature (814)..(814): n is a, c, g, or t
  Probeset Number=SeqID_15601
tcgagtcagctacgtaggcccncccccctgtattgacttcaagagacaaggaattaaaggaaataaaagagcagatcaggaagaaggaagctcagaatttaaaaatatcagatgagataatgctaaagaataaagatatgaatcaattacaagcaacatcaaagcaattggaacaaaatatcgagacaatgaagaaagagaataaggatatgagtaagactatagaggttttgaaacaaaagcttgtagataaagagagagaaatggcaggtgatatagatgagacatgtgagccaaagccagatttgaataaattgaaagatcaaaataaaaaattagctcaagaagtttatgaacttcaactgaaaattcaaaatcaagaaacagaaaaagagaataataaaaatcatttgaatcatcacaataatggagaagtcgaaaaactactgtcaaatctatcacaaagagagactgaatttgagaatatcaaacagagttttatcagcaaatggctaactgcaaatgaaaaacttgcttcggcagaacaaaaatgcagcaaattagttgaagaaaatacacaattacgcaatcaagtcgaagcaaatgacaacaaaaacggagaatttgaaatgagatcgactgttcattctacaagtgataaactatatcacctgattaagcaataatatcctttgaatgatctctccaaaatgctgagtctactgaaacaactttttggtacagaaatggtagcaagaataggcaaagaataaactgccaaaaccctcctgaaattaacggttcaaagacttcn

SEQ ID NO: 5823 - DNA, 1501 bp, Glycine max
  misc_feature (1)..(1): n is a, c, g, or t
  misc_feature (115)..(115): n is a, c, g, or t
  misc_feature (158)..(158): n is a, c, g, or t
  misc_feature (167)..(167): n is a, c, g, or t
  misc_feature (284)..(284): n is a, c, g, or t
  misc_feature (398)..(398): n is a, c, g, or t
  misc_feature (603)..(603): n is a, c, g, or t
  misc_feature (721)..(721): n is a, c, g, or t
  misc_feature (968)..(968): n is a, c, g, or t
  misc_feature (973)..(974): n is a, c, g, or t
  misc_feature (996)..(996): n is a, c, g, or t
  misc_feature (1003)..(1003): n is a, c, g, or t
  misc_feature (1286)..(1286): n is a, c, g, or t
  misc_feature (1351)..(1351): n is a, c, g, or t
  misc_feature (1355)..(1355): n is a, c, g, or t
  misc_feature (1405)..(1406): n is a, c, g, or t
  misc_feature (1416)..(1416): n is a, c, g, or t
  misc_feature (1439)..(1439): n is a, c, g, or t
  misc_feature (1442)..(1444): n is a, c, g, or t
  misc_feature (1449)..(1449): n is a, c, g, or t
  misc_feature (1467)..(1467): n is a, c, g, or t
  misc_feature (1475)..(1475): n is a, c, g, or t
  misc_feature (1479)..(1479): n is a, c, g, or t
  Peptide Sequence Number=SeqID_8580
  Probeset Number=SeqID_15602
nactaagcaagagagaatacatatagaaagcgtagtgagacaccatacactagcacacggcacagaggacgatagacgagtaacataaacaacaaagatagagcaagaaatatantactcgaactgttgtacgatcataagacatactatcaatcgancgctttctncagagtaacatcatcagagattagagaccaactctctctacactcataccgttattcattgtgcgcaatcactatatatgatctcgtggcgacatctcacgacgagcgcgcacactnatatctcatctgaccgagccccaatgctatcttctcagagagggatgccagtgcgacgagccggaatgagataacgagagaggaaggcgacagcacgacgcgtagcgagtgcgnggggtcgcacgcgacagacacccacgagtacattgacgagcggtggctgtgtgagggatgagcgcagcgagccgaggctcgctgtgtaggactgtcgcgcgataagctgtatgggcacagcgaccgaacatcacaacatcggacgacctgtgtcacaccatatgcaagcaacatacgcggcatgaagaagtgtgtgtggtggtgngcagaagtatatacatctttacccaagacgccatgtgtcaccacctcaccccaccaccacccctcgtgtgtgggcgcggttacacacagcatctccttctgtttcccccgcacgtcgngaatatagtgttgtagtgacgccgatattgtattgatatcatcgcccgccctcatcacaccaccactctggatgatccaccaataaatatatatttctacgataataattatataacactcatcccgccttattctatatatatatatatatcattttacattattgtttattcagcattttcacacctccgttatttgttgtttcctccacacgcgataatacacatcggagagaagaaccacganttccnncacgcctccacccactttctcntctcacnctcccgaggctacccaccccgacgtcattgcaatatttgtatgtgtccaacagctattgttatcaccgttgtttctcccacactcttctaccccaccccactcccctctctctttctctaccagagaatatatgagttctttagaattattgtagttgtcccacccactagcgacaaccagacgcgatcagcgcgattgatctgggtacggcagcgatgacgagatgaaaagaatagcgggagtcccacagaggcaaacagcgtagagcgtacccatcggcancacccaaccccacagtattgaaatattacgccagatctatcgagcatacaccttattattgcagnggcntcacgccaaccccagtgagaccccacaccgtgagatgccacacgggtaannccaaagaganctcctcagaattaagtaagaagnaannntaaanacaaacagaattgtcacnatctcctncctntttttccattccttcctacaac

SEQ ID NO: 5824 - DNA, 1633 bp, Glycine max
  misc_feature (43)..(43): n is a, c, g, or t
  misc_feature (53)..(53): n is a, c, g, or t
  misc_feature (61)..(61): n is a, c, g, or t
  misc_feature (82)..(82): n is a, c, g, or t
  misc_feature (104)..(104): n is a, c, g, or t
  misc_feature (107)..(107): n is a, c, g, or t
  misc_feature (131)..(131): n is a, c, g, or t
  misc_feature (139)..(139): n is a, c, g, or t
  misc_feature (146)..(146): n is a, c, g, or t
  misc_feature (151)..(151): n is a, c, g, or t
  misc_feature (166)..(166): n is a, c, g, or t
  misc_feature (182)..(182): n is a, c, g, or t
  misc_feature (206)..(207): n is a, c, g, or t
  misc_feature (216)..(216): n is a, c, g, or t
  misc_feature (219)..(220): n is a, c, g, or t
  misc_feature (222)..(222): n is a, c, g, or t
  misc_feature (224)..(226): n is a, c, g, or t
  misc_feature (232)..(232): n is a, c, g, or t
  misc_feature (236)..(240): n is a, c, g, or t
  misc_feature (245)..(247): n is a, c, g, or t
  misc_feature (252)..(254): n is a, c, g, or t
  misc_feature (258)..(259): n is a, c, g, or t
  misc_feature (264)..(267): n is a, c, g, or t
  misc_feature (271)..(272): n is a, c, g, or t
  misc_feature (290)..(291): n is a, c, g, or t
  misc_feature (293)..(295): n is a, c, g, or t
  misc_feature (300)..(300): n is a, c, g, or t
  misc_feature (304)..(305): n is a, c, g, or t
  misc_feature (307)..(310): n is a, c, g, or t
  misc_feature (312)..(312): n is a, c, g, or t
  misc_feature (316)..(317): n is a, c, g, or t
  misc_feature (319)..(321): n is a, c, g, or t
  misc_feature (323)..(324): n is a, c, g, or t
  misc_feature (326)..(329): n is a, c, g, or t
  misc_feature (331)..(332): n is a, c, g, or t
  misc_feature (339)..(339): n is a, c, g, or t
  misc_feature (349)..(349): n is a, c, g, or t
  misc_feature (351)..(353): n is a, c, g, or t
  misc_feature (355)..(359): n is a, c, g, or t
  misc_feature (364)..(365): n is a, c, g, or t
  misc_feature (367)..(369): n is a, c, g, or t
  misc_feature (371)..(373): n is a, c, g, or t
  misc_feature (375)..(375): n is a, c, g, or t
  misc_feature (383)..(383): n is a, c, g, or t
  misc_feature (385)..(387): n is a, c, g, or t
  misc_feature (392)..(392): n is a, c, g, or t
  misc_feature (397)..(402): n is a, c, g, or t
  misc_feature (405)..(406): n is a, c, g, or t
  misc_feature (408)..(408): n is a, c, g, or t
  misc_feature (410)..(410): n is a, c, g, or t
  misc_feature (413)..(413): n is a, c, g, or t
  misc_feature (416)..(418): n is a, c, g, or t
  misc_feature (427)..(428): n is a, c, g, or t
  misc_feature (430)..(430): n is a, c, g, or t
  misc_feature (433)..(433): n is a, c, g, or t
  misc_feature (438)..(440): n is a, c, g, or t
  misc_feature (445)..(447): n is a, c, g, or t
  misc_feature (453)..(456): n is a, c, g, or t
  misc_feature (458)..(459): n is a, c, g, or t
  misc_feature (461)..(463): n is a, c, g, or t
  misc_feature (465)..(466): n is a, c, g, or t
  misc_feature (468)..(474): n is a, c, g, or t
  misc_feature (478)..(480): n is a, c, g, or t
  misc_feature (485)..(486): n is a, c, g, or t
  misc_feature (490)..(490): n is a, c, g, or t
  misc_feature (492)..(492): n is a, c, g, or t
  misc_feature (494)..(494): n is a, c, g, or t
  misc_feature (497)..(497): n is a, c, g, or t
  misc_feature (499)..(499): n is a, c, g, or t
  misc_feature (505)..(506): n is a, c, g, or t
  misc_feature (508)..(508): n is a, c, g, or t
  misc_feature (516)..(516): n is a, c, g, or t
  misc_feature (522)..(523): n is a, c, g, or t
  misc_feature (528)..(532): n is a, c, g, or t
  misc_feature (534)..(537): n is a, c, g, or t
  misc_feature (541)..(541): n is a, c, g, or t
  misc_feature (543)..(544): n is a, c, g, or t
  misc_feature (546)..(550): n is a, c, g, or t
  misc_feature (553)..(555): n is a, c, g, or t
  misc_feature (557)..(557): n is a, c, g, or t
  misc_feature (559)..(562): n is a, c, g, or t
  misc_feature (564)..(565): n is a, c, g, or t
  misc_feature (567)..(567): n is a, c, g, or t
  misc_feature (571)..(574): n is a, c, g, or t
  misc_feature (586)..(586): n is a, c, g, or t
  misc_feature (590)..(590): n is a, c, g, or t
  misc_feature (602)..(608): n is a, c, g, or t
  misc_feature (611)..(611): n is a, c, g, or t
  misc_feature (613)..(617): n is a, c, g, or t
  misc_feature (619)..(621): n is a, c, g, or t
  misc_feature (630)..(633): n is a, c, g, or t
  misc_feature (637)..(637): n is a, c, g, or t
  misc_feature (643)..(643): n is a, c, g, or t
  misc_feature (645)..(646): n is a, c, g, or t
  misc_feature (658)..(659): n is a, c, g, or t
  misc_feature (670)..(670): n is a, c, g, or t
  misc_feature (673)..(674): n is a, c, g, or t
  misc_feature (676)..(676): n is a, c, g, or t
  misc_feature (679)..(680): n is a, c, g, or t
  misc_feature (682)..(683): n is a, c, g, or t
  misc_feature (686)..(688): n is a, c, g, or t
  misc_feature (690)..(692): n is a, c, g, or t
  misc_feature (694)..(694): n is a, c, g, or t
  misc_feature (702)..(703): n is a, c, g, or t
  misc_feature (705)..(706): n is a, c, g, or t
  misc_feature (708)..(711): n is a, c, g, or t
  misc_feature (716)..(721): n is a, c, g, or t
  misc_feature (725)..(726): n is a, c, g, or t
  misc_feature (728)..(729): n is a, c, g, or t
  misc_feature (745)..(745): n is a, c, g, or t
  misc_feature (754)..(754): n is a, c, g, or t
  misc_feature (759)..(759): n is a, c, g, or t
  misc_feature (761)..(765): n is a, c, g, or t
  misc_feature (776)..(776): n is a, c, g, or t
  misc_feature (788)..(792): n is a, c, g, or t
  misc_feature (804)..(806): n is a, c, g, or t
  misc_feature (810)..(810): n is a, c, g, or t
  misc_feature (818)..(818): n is a, c, g, or t
  misc_feature (820)..(823): n is a, c, g, or t
  misc_feature (828)..(828): n is a, c, g, or t
  misc_feature (830)..(832): n is a, c, g, or t
  misc_feature (835)..(835): n is a, c, g, or t
  misc_feature (837)..(838): n is a, c, g, or t
  misc_feature (841)..(841): n is a, c, g, or t
  misc_feature (846)..(847): n is a, c, g, or t
  misc_feature (849)..(851): n is a, c, g, or t
  misc_feature (857)..(857): n is a, c, g, or t
  misc_feature (873)..(873): n is a, c, g, or t
  misc_feature (875)..(875): n is a, c, g, or t
  misc_feature (877)..(883): n is a, c, g, or t
  misc_feature (890)..(890): n is a, c, g, or t
  misc_feature (903)..(903): n is a, c, g, or t
  misc_feature (906)..(906): n is a, c, g, or t
  misc_feature (910)..(910): n is a, c, g, or t
  misc_feature (912)..(913): n is a, c, g, or t
  misc_feature (921)..(921): n is a, c, g, or t
  misc_feature (948)..(948): n is a, c, g, or t
  misc_feature (951)..(951): n is a, c, g, or t
  misc_feature (953)..(954): n is a, c, g, or t
  misc_feature (969)..(970): n is a, c, g, or t
  misc_feature (979)..(979): n is a, c, g, or t
  misc_feature (997)..(997): n is a, c, g, or t
  misc_feature (1014)..(1014): n is a, c, g, or t
  misc_feature (1038)..(1038): n is a, c, g, or t
  misc_feature (1043)..(1043): n is a, c, g, or t
  misc_feature (1046)..(1046): n is a, c, g, or t
  misc_feature (1052)..(1052): n is a, c, g, or t
  misc_feature (1056)..(1056): n is a, c, g, or t
  misc_feature (1058)..(1058): n is a, c, g, or t
  misc_feature (1060)..(1060): n is a, c, g, or t
  misc_feature (1088)..(1088): n is a, c, g, or t
  misc_feature (1091)..(1091): n is a, c, g, or t
  misc_feature (1095)..(1095): n is a, c, g, or t
  misc_feature (1109)..(1109): n is a, c, g, or t
  misc_feature (1113)..(1113): n is a, c, g, or t
  misc_feature (1134)..(1134): n is a, c, g, or t
  misc_feature (1214)..(1214): n is a, c, g, or t
  misc_feature (1322)..(1322): n is a, c, g, or t
  misc_feature (1397)..(1397): n is a, c, g, or t
  misc_feature (1425)..(1425): n is a, c, g, or t
  misc_feature (1427)..(1427): n is a, c, g, or t
  misc_feature (1460)..(1460): n is a, c, g, or t
  misc_feature (1462)..(1462): n is a, c, g, or t
  misc_feature (1498)..(1498): n is a, c, g, or t
  misc_feature (1555)..(1560): n is a, c, g, or t
  misc_feature (1595)..(1613): n is a, c, g, or t
  misc_feature (1618)..(1624): n is a, c, g, or t
  misc_feature (1629)..(1633): n is a, c, g, or t
  Probeset Number=SeqID_15603
gctcacaagtctcgcgtcgtgcgctcggtgctcgctgtatctncatgatgctnagaagtcncgatctctagtaacgtgtcgngagctacatctacatgtatcgngtngctgacgacagcatagtctcttgncatgtgtngtgatgntctantctatgcgcactaanacatactcatgactcnttcttatcttcttatcactctctnnctgcgcgcnctnntntnnnttaganccannnnncagannncatannnggtnncgtgnnnncgannctacttcaccaacactgnncnnncttcncgcnncnnnngncccnngnnncnncnnnngnnggattgnctaaccgtanannngnnnnncgcgnncnnncnnncnctctcctncnnnccccnccacnnnnnncgnncncnggncgnnnggcgggggnngngcngctgnnncccannncgtctnnnncnncnnncnncnnnnnnnaacnnnctaannaaanananctnancgagcnntngctatgtnccccanncacannnnngnnnnaatnannannnnnttnnntngnnnnanncnctgnnnnggaacacaaaantcgncaaggaagtggnnnnnnnaantnnnnncnnncggaagaannnnaaanccccgngnncgcccggtaganntaaaacatcgngtnncnccnncnnggnnngnnngnttttttannanntnnnngcccnnnnnnccanncnnccacacacaatcgagnggggaaganctctncnnnnncccaaacaatncatacacatatnnnnnaaaaatacaaannnaagnggtgcgcncnnnncgcgngnnncancnnagnctctnncnnnccccgncgcgcctcctcccgcncngnnnnnnngcactgncgcccccgctganggnaggncnnacacatanattcccttctctatcttcatctctatnctntnngagaaggagagagannaaatacgtntgccagcgcgagagtagncggagatcacgttgctngcgcgcagcacttctaccacctcncgccnccnggcatnacanananaatctgtgtggcagggcgcgcgctgccnctntagnagagtttctgatanttanaacacctataataagtaacanggcataagtgatagaatacgctcatgtacatgaactattgctgagtgtgctagaggacgcgtcatagctcctcggactgngatgtagatctctgtagctctatcgtgtcgtgactgcaacaactctacctgggagatcccgaggctctggtcaggcagagtgctctatcttagtgaggctatgacganactactacgtcagtctgtgcagtgcacgactatacagagcgagtatatatgtatgctcctcgttgtggtggaatntcagagaaagaaacaaagatatagacangnagggcattctctctcctctcgctcgcgcgcgtngnggtgtctttctctccacttagtctatatatgggagngcgggacgcgcgctcaccccgcggaggtgaggggcgcacccatcgcctattggaaannnnnnccattctgtctatgcggcgccggctcccgttgttnnnnnnnnnnnnnnnnnnnggggnnnnnnnggggnnnnn

SEQ ID NO: 5825 - DNA, 1620 bp, Glycine max
  misc_feature (16)..(16): n is a, c, g, or t
  misc_feature (43)..(43): n is a, c, g, or t
  misc_feature (63)..(63): n is a, c, g, or t
  misc_feature (77)..(77): n is a, c, g, or t
  misc_feature (93)..(93): n is a, c, g, or t
  misc_feature (95)..(95): n is a, c, g, or t
  misc_feature (146)..(146): n is a, c, g, or t
  misc_feature (157)..(157): n is a, c, g, or t
  misc_feature (173)..(173): n is a, c, g, or t
  misc_feature (194)..(194): n is a, c, g, or t
  misc_feature (201)..(201): n is a, c, g, or t
  misc_feature (279)..(279): n is a, c, g, or t
  misc_feature (302)..(302): n is a, c, g, or t
  misc_feature (364)..(364): n is a, c, g, or t
  misc_feature (370)..(370): n is a, c, g, or t
  misc_feature (482)..(482): n is a, c, g, or t
  misc_feature (511)..(511): n is a, c, g, or t
  misc_feature (541)..(541): n is a, c, g, or t
  misc_feature (651)..(651): n is a, c, g, or t
  misc_feature (662)..(662): n is a, c, g, or t
  misc_feature (664)..(664): n is a, c, g, or t
  misc_feature (670)..(670): n is a, c, g, or t
  misc_feature (730)..(730): n is a, c, g, or t
  misc_feature (765)..(765): n is a, c, g, or t
  misc_feature (813)..(813): n is a, c, g, or t
  misc_feature (942)..(942): n is a, c, g, or t
  misc_feature (979)..(979): n is a, c, g, or t
  misc_feature (1256)..(1256): n is a, c, g, or t
  misc_feature (1260)..(1260): n is a, c, g, or t
  misc_feature (1343)..(1343): n is a, c, g, or t
  misc_feature (1385)..(1385): n is a, c, g, or t
  misc_feature (1397)..(1397): n is a, c, g, or t
  misc_feature (1442)..(1442): n is a, c, g, or t
  misc_feature (1451)..(1451): n is a, c, g, or t
  misc_feature (1494)..(1494): n is a, c, g, or t
  misc_feature (1496)..(1496): n is a, c, g, or t
  misc_feature (1502)..(1503): n is a, c, g, or t
  misc_feature (1518)..(1518): n is a, c, g, or t
  misc_feature (1522)..(1526): n is a, c, g, or t
  misc_feature (1529)..(1529): n is a, c, g, or t
  misc_feature (1532)..(1542): n is a, c, g, or t
  misc_feature (1548)..(1548): n is a, c, g, or t
  misc_feature (1580)..(1581): n is a, c, g, or t
  misc_feature (1586)..(1587): n is a, c, g, or t
  misc_feature (1593)..(1593): n is a, c, g, or t
  misc_feature (1596)..(1596): n is a, c, g, or t
  Peptide Sequence Number=SeqID_8581
  Probeset Number=SeqID_15604
caccagtcaagctcancgtatagtataagcacgatagctacangacgaacgagtagcacacanagcacaagcgatgnacgctaagagatgaananacacatgtgagaagagcagcaaggcacgcacagacgataggcgtatgcatnaaactcagcgntactagttccagtgcncactactaccagcgcgagcgngagtcanacagcagtcgcatctatacatcacgagacacgcgcccttaacatacgcgcagcacatacagcagcatgcaccacactncgagcccgaccgtctgagagcgntccccggtgcacgcagaacattgaatatctgcaagacagacgatcgtaggcggggtcgaganagagtnagtcgagcgcagcgcactaagaaatgatacgtcgctaacgacgcggacgcagggcatgcagcgatcacgaacgagtgcactgcacgagtcacggacgaggctcacactgacntggagatacaggtagactgacacgtagangtgacatcacacaccgaagcaattaggagnataggttatcagaatagatatatagaattagagcagtgatatctcagtatactgaagagcgtagagagcgtcagagatatcagcagagcataactgacatcttaccaatntcatgctcgtntncatggnggtgggatgggtgggtcgggtgggtgtccttataataatgagaagtctcgtgttatgttntactgactttattcttatttatatacatgtgtgtnggtatatagatgacgtaacagtaatacatacacaatgaatattccatngagtaagtagcgagtatcgctagtctgcgcagtgagcgtgtgtggttgacctggtgtagtattcattctctttatctctcattgttcatatatttagatcatatccgtatggttgataccatttaattnccccatctctttaaacactgacttcctgttactgggncggtggtgttggtgggccatccgtcgttaactacttataaaatatacctatatctattcgtgtatatatacacagaatgattctccaattagatagaacagtgcacgactatgttagtacacatagtctcaacacgaacgacatacaatgaccatcacccacgctcgaacactatacatctcacctatagcattgataggagagcacacaggacagaacgtacgttcacagccgaacagaataaagtgaacagaagagagcacacacacacgcgagnccgngggctgcgcggtcgcgccatgtcgcacactgggagacagtggctggccattttttggtatgttgtgcggtggaaaagaataanacacatacacactcacactcgtctgctacatcaccagcgagncaagcaaataanaacatacaacaaacacacaccataagcatgacgactaagtagtgntttattcanaacaacgataatacacatcgacgcctccgctggatgggtcggngnacgcgnngagccgcccagattngagnnnnngancannnnnnnnnnngtggcnctctctgcgtgcgcatacaagaggagagagannatgannagcagnggnggggggaggagagcacccaaataa

SEQ ID NO: 5826 - DNA, 331 bp, Glycine max
  misc_feature (274)..(274): n is a, c, g, or t
  Probeset Number=SeqID_15605
ggtcgccaacaagaacaccaataagacccatgagagcttacacctgcttgctcttgccatgaacatcggcagatacacccttggatataagaccgaatctacatctcttaggatctccaaagggagatcgattataattgcttacaactgcccccctttgagagagtcagagattgaatactatgccatgttggcaaaggttggagttcatcattacaatgggaacaatgtggatttgggcactgcctgcggcaaatattacagagtgtgctgncttagcattattgatcctggtgattcggatatcattaagacactggctggtgaacag

SEQ ID NO: 5827 - DNA, 1363 bp, Glycine max
  misc_feature (131)..(131): n is a, c, g, or t
  misc_feature (139)..(139): n is a, c, g, or t
  misc_feature (142)..(142): n is a, c, g, or t
  misc_feature (149)..(149): n is a, c, g, or t
  misc_feature (194)..(194): n is a, c, g, or t
  misc_feature (255)..(255): n is a, c, g, or t
  misc_feature (266)..(266): n is a, c, g, or t
  misc_feature (285)..(285): n is a, c, g, or t
  misc_feature (313)..(313): n is a, c, g, or t
  misc_feature (364)..(364): n is a, c, g, or t
  misc_feature (414)..(414): n is a, c, g, or t
  misc_feature (464)..(464): n is a, c, g, or t
  misc_feature (560)..(560): n is a, c, g, or t
  misc_feature (628)..(628): n is a, c, g, or t
  misc_feature (1303)..(1303): n is a, c, g, or t
  misc_feature (1321)..(1321): n is a, c, g, or t
  misc_feature (1331)..(1331): n is a, c, g, or t
  misc_feature (1333)..(1333): n is a, c, g, or t
  misc_feature (1340)..(1340): n is a, c, g, or t
  Peptide Sequence Number=SeqID_8582
  Probeset Number=SeqID_15606
aaagtcaagtgatctaatacacctatatcgtccatgtccatatgtgtctagcatattatcgtatgtgtgtgcgcggcatatatgttgtcatcccctccactctgctgcgaggcatgtagcgagtgagtgtntcgaccgnttngttagcnctcgcagtcatcccgctgctccttgtcgcgtgtgtatgtgatgcntgatatgtctccaagtattgtattatgtgagacgcgtacagcaacgttattatttttaacncgcagaattgngatatgtagtgcgaccgangatctcacctcgctctcgtatgtgtatnttcgcgcaggagatagcaggcgaccgagcagagtagcagatcgagacgtantattgtgtcgtgtgttgacctcgccatacattatacacagcgatatggtncgtgctagatgtttccgtccagtctatttgttgcttttcggctcgctgtnccactatatatgcagcgagtatctcagcagcatatgctgatatagcattgtccgacaacgctctgcgcgcgtaattctcccgcactgagttacagntgtgtggtggattgtgtgatggtgtatcattccgaggagtcgcagttgttttgtatatgggtggtggnggttggtcgtaatttctcctctctttctcgacctcccttgttcgttagtttgcgcttctgctgtggctggtttgcgtggggattatactaatattccacaccaggttatacaatacgacacgagcatggaatgattatgtaagaacgcagtccaggcgctcgaaattacgacatcgccgggtgtcattattgatgatgtatccacaagttctgcccttttcacccttgtttcttttctccactgatattgtattaggaatactcttcagtcacttaaattaacttttaccaatttctcgtctttcgccacccccattgatctgtagcccccttgctcccagttgtcctttcgctcgctgacccattctaacgatccccctctttctctcttaagttttttttcgcagattaggatatacccgggggcataggtatatatgtctcgccgcacatacccacacacgcgtgggtatggagaagggcccatgccccgagacggtgacaaatagagaattttaatcaatcgattacaattctcacgtttcgggcgcgtccgttttcagtggtgttgcgctcggtttcacccattttaaatttattgtaataaaaaggggggggggcccccccacaatattccccccggggggggcgcccgtagaatatatagggaaaaanaaaaacagtgtcggggtncgctgggttngnttgggtnaaagcaaaaaaagggccccccaa

SEQ ID NO: 5828 - DNA, 625 bp, Glycine max
  misc_feature (617)..(617): n is a, c, g, or t
  misc_feature (622)..(625): n is a, c, g, or t
  Probeset Number=SeqID_15607
tcagctacgtaggccccccccccgaaggagaaggttttggagcaagtcaaggttcaagaacaaaagtcaaagatgaaggctgaattagatagacaaattgccgaaaagaagagagtaaaggaagctgaagaagatgagatgaggagatataacaatttggttcaagatcaactcaagggcatggaaaccaaggaaaagaagaaggagaatgacatgaaaaccaagatcatgcaagaaaagtactccagagataagcaacttcaagatgaaaacatcagaaagaagttggacaagagagccgaaaaagaaatggatgagctcttggtcaacaagatccgtcacgaattagacgaagaagccagagctgctgccaacaggcgtgttgaagataagcaacaactcaagaaggtcctcactgaaaacgaagattacaagaaaaagatggctgatgaagctcgtagagaaaaggaagctgatatcaaggctcaacaagagtacaccagactcattgagaaacaaatggctgatagagaagctgaaatcaaggccagagaagacagagccaagaagttcatgaacatgatggctgataccgttgttaaggatcaaaaggctcngatcnnnn

SEQ ID NO: 5829 - DNA, 521 bp, Glycine max
  misc_feature (269)..(269): n is a, c, g, or t
  misc_feature (277)..(277): n is a, c, g, or t
  misc_feature (315)..(315): n is a, c, g, or t
  misc_feature (335)..(335): n is a, c, g, or t
  misc_feature (344)..(344): n is a, c, g, or t
  misc_feature (346)..(347): n is a, c, g, or t
  misc_feature (397)..(397): n is a, c, g, or t
  misc_feature (399)..(399): n is a, c, g, or t
  misc_feature (406)..(406): n is a, c, g, or t
  misc_feature (408)..(408): n is a, c, g, or t
  misc_feature (411)..(413): n is a, c, g, or t
  misc_feature (425)..(425): n is a, c, g, or t
  misc_feature (447)..(447): n is a, c, g, or t
  misc_feature (450)..(450): n is a, c, g, or t
  misc_feature (460)..(460): n is a, c, g, or t
  misc_feature (471)..(471): n is a, c, g, or t
  misc_feature (482)..(483): n is a, c, g, or t
  misc_feature (488)..(488): n is a, c, g, or t
  misc_feature (492)..(492): n is a, c, g, or t
  misc_feature (497)..(497): n is a, c, g, or t
  misc_feature (506)..(506): n is a, c, g, or t
  misc_feature (508)..(508): n is a, c, g, or t
  misc_feature (513)..(513): n is a, c, g, or t
  misc_feature (521)..(521): n is a, c, g, or t
  Peptide Sequence Number=SeqID_8583
  Probeset Number=SeqID_15608
atgcttcgttgttatattcaacttcttttgacacttaccatgctgtaaggttcattatatcccctgaattaggttaacgaagagattgaacaaaacattacagtgttcgggaatgcaccaagtcaaaccacatcttttgttttggtttggagggaatacgtgcttggttgttatattcaacttcttttgacacttaccatgctgtaaggttcattatatcccctgaattaggttaatgaagagattgaacagaacatacagatgaccanggaaatanaatcatagatagtgcaacattcttgaaaccgaaaagcnctatctcaacaaggagtctnagttgacanannaagtatcagttactgagcttgaactcaatggtcttatccaagtggctggnanaaattcntnaannnaatctatggggnttatagccaatatgctcaaaantcnaatgatgatntaattctcttnctgttgtatanntctcngtangatantgtgcgaantnacagngaaatatn

SEQ ID NO: 5830 - DNA, 1850 bp, Glycine max
  misc_feature (1)..(1): n is a, c, g, or t
  misc_feature (227)..(227): n is a, c, g, or t
  misc_feature (229)..(229): n is a, c, g, or t
  misc_feature (239)..(239): n is a, c, g, or t
  misc_feature (264)..(265): n is a, c, g, or t
  misc_feature (345)..(345): n is a, c, g, or t
  misc_feature (442)..(442): n is a, c, g, or t
  misc_feature (549)..(549): n is a, c, g, or t
  misc_feature (582)..(582): n is a, c, g, or t
  misc_feature (683)..(683): n is a, c, g, or t
  misc_feature (828)..(828): n is a, c, g, or t
  misc_feature (849)..(849): n is a, c, g, or t
  misc_feature (962)..(962): n is a, c, g, or t
  misc_feature (1069)..(1069): n is a, c, g, or t
  misc_feature (1145)..(1145): n is a, c, g, or t
  misc_feature (1178)..(1178): n is a, c, g, or t
  misc_feature (1808)..(1808): n is a, c, g, or t
  Peptide Sequence Number=SeqID_8584
  Probeset Number=SeqID_15609
nattagtagttacgtcgattgatgtaccatcctccgaagagtagagcatacgtcgtagagcgatacgtgtatcttattttatggtagtcacacaccgcagcgaccacgatatctcgactccattcgaaacattcgacactctattctagcggcctctatccaacatcgtgtgccgctactctctcgcgactgtgctactcggcgcgtccctctacgtcccatctgcncngtctccggtngcacctcgtcactccagcgcatcgnnctatcttcatgcctctttctacgtctgtctcttgtcatgtaaatgtttccctgataccgtatgcaccgatctagctctcnccagcgcgctcagaacgtacgctctccaatccgcgtgcatactttcctccggcatgttctatatcatgtcactcatcgtcgtgccttatcatgtganttagtatgactcttctcgcttgctgccgcgtaggactgtgactccgcgcatcatagctcactccactagtctccctccctctcatacactacatatacatacatcgnacacagcacatctcatatttctctaatcatgtnatactcacttctcatgagattaagtatcttatatctttattcttgtcatccgactccgtatatatctcacgttcaccgctctgctggtcttgatgccgtcngcatacatcatacaccaacctcatcatatcggcctcattcattgaccttcgctggcaccatgtcgctgttattctcgccatctgttgctcatctgactgcggctctatcttcctgtctctatcatccggtgtcgtgctgtgtgtnttcacctacatgctctcaganagtcgtgcctctacattcttgctatcctcctcagttcgacctgctggccttcacctattaatttctaacgagtatgtgttctcgcttcatgatcgcactgctcgtctctatgncccgcgcacccgtcctgggctcggcgtatcagcttcctaccacagtttctcatctcgcctccctcacacagcccgggagcgagctggcccaactcttcacatgtcgnatcgtcacctatcctcaatcgcctaagcacggcggtataaggccagctgcgaagcaccacaacacggtcgcctccncagtactgtcttgcatctctatttcgtgctgantggccgtcttgttttgtttgtggcccgagccagcgcctaccctggcacctgctcacaaccctaactactcatccagcacccatctctctgggcgatcctcccacgttgttcttgcatatcccatatgctctactatgaggtttgatcatgtactcacgatgtgtaaacaagattcatgatcttctccggcacgactaacacggatataccaggggatatactccgtgggttgtgttgcgacgctcgtcaataactacggggggggtgttggcacactaagtcgcgtaagagatagaagacaagttacatgctattatgatgtggttttgatatgtgattacgtgtgtgatacagcgcgcgttacacatatacccgaggcctaacgacgtcgcggcccggccggggcgagcacaagatgataaatatgtgcggtgggggtgttggcgtcatcacaccataccgggcacatcggcgggcgtcgggaaaaaaggtacgcccgggcacaacatagtcgcgggccgccggcgcgagccacaccaccacggcgtacaacacgcgcccacataataggtggtataagtagatagggcggcgtggaaggcataccagaatacggtgcttctaataaanctaggggtggataaacagggaaaccggcgggggcgcgggcgg

SEQ ID NO: 5831 - DNA, 784 bp, Glycine max
  misc_feature (9)..(9): n is a, c, g, or t
  misc_feature (15)..(16): n is a, c, g, or t
  misc_feature (20)..(21): n is a, c, g, or t
  misc_feature (39)..(40): n is a, c, g, or t
  misc_feature (42)..(42): n is a, c, g, or t
  misc_feature (62)..(62): n is a, c, g, or t
  misc_feature (276)..(276): n is a, c, g, or t
  misc_feature (464)..(464): n is a, c, g, or t
  misc_feature (504)..(504): n is a, c, g, or t
  misc_feature (517)..(517): n is a, c, g, or t
  misc_feature (531)..(532): n is a, c, g, or t
  misc_feature (536)..(536): n is a, c, g, or t
  misc_feature (546)..(546): n is a, c, g, or t
  misc_feature (548)..(549): n is a, c, g, or t
  misc_feature (555)..(558): n is a, c, g, or t
  misc_feature (562)..(562): n is a, c, g, or t
  misc_feature (566)..(566): n is a, c, g, or t
  misc_feature (568)..(568): n is a, c, g, or t
  misc_feature (578)..(579): n is a, c, g, or t
  misc_feature (592)..(592): n is a, c, g, or t
  misc_feature (596)..(597): n is a, c, g, or t
  misc_feature (605)..(605): n is a, c, g, or t
  misc_feature (607)..(607): n is a, c, g, or t
  misc_feature (610)..(610): n is a, c, g, or t
  misc_feature (612)..(612): n is a, c, g, or t
  misc_feature (619)..(619): n is a, c, g, or t
  misc_feature (621)..(621): n is a, c, g, or t
  misc_feature (624)..(624): n is a, c, g, or t
  misc_feature (629)..(629): n is a, c, g, or t
  misc_feature (632)..(632): n is a, c, g, or t
  misc_feature (637)..(638): n is a, c, g, or t
  misc_feature (641)..(641): n is a, c, g, or t
  misc_feature (648)..(649): n is a, c, g, or t
  misc_feature (654)..(655): n is a, c, g, or t
  misc_feature (671)..(671): n is a, c, g, or t
  misc_feature (673)..(673): n is a, c, g, or t
  misc_feature (681)..(681): n is a, c, g, or t
  misc_feature (689)..(689): n is a, c, g, or t
  misc_feature (692)..(692): n is a, c, g, or t
  misc_feature (695)..(695): n is a, c, g, or t
  misc_feature (698)..(698): n is a, c, g, or t
  misc_feature (701)..(702): n is a, c, g, or t
  misc_feature (706)..(706): n is a, c, g, or t
  misc_feature (710)..(710): n is a, c, g, or t
  misc_feature (721)..(721): n is a, c, g, or t
  misc_feature (725)..(725): n is a, c, g, or t
  misc_feature (734)..(784): n is a, c, g, or t
  Probeset Number=SeqID_15610
gtatctaanggtggnntaanntctggtaccgggcccccnntngagtcagctacgtatgcccncccccaaaatctttcgcaattaaagaccctcaatcttaatttccaagcatgttcatagataacagatttaggattgacaggactagctagtgggcttgagaagttgaaggtccttggaactctgaacattttggttggagaatgctcagaaattagtgataaaggagtcaatattatatctgaaaatttagaaacattgactctgttaaagaanatctacttgaatatttcaaaatgtttaaaggtaacagatagagggatgaatcgacttgcagaaagcatgaaaaagctggacttacaagaaatttgtcttggaattagccagagtggaatcctaagcgtggattaaagaatttaagaaatgaggctttgtcatttcgagttgttgcttacaggataaanatgagaggattttcagaattattagaaagactatactgtntataatcaaaganaaaatattttgcgnntatntttttaagantnnctgatnnnngganactnanttataatttnntatcagatattcntttnngaatttgngnggncnaattctntntcntttanaanctcgnnatntgttttnnacttnnacccaaaaaaaataanantattcttnccctgggnacnctnttntanncgcncccngtggggcccanttgngccttaggnnnnnnnnnnnnnnnnnnnnnnnnnnnnnnnnnnnnnnnnnnnnnnnnnnn

SEQ ID NO: 5832 - DNA, 469 bp, Glycine max
  Peptide Sequence Number=SeqID_8585
  Probeset Number=SeqID_15611
aataaatctcttgctgcatgtcaaaccctctctctctctcactcatgacaccctctagcagatgctgattcctgaagcttctttggaaaccctcaaaaatagttatccttttatagcctttcggtgattagtttcacctgctttcgctctctttcctctgctttccctttacccttcccctaaacacattacacatcatagagaaaaggatctagcgcagtccagccacaatgttaaatttagtctccctcactttgcataattgttccttcagtttcggaagatgcacctagctcatacacaccctacacaaacaaaacacacgaccaaaagctaaagctgcaatttctgacttctcaatcccataattcccacacttctctctctctctcctctctctctctatgtgtctctttcactccctttgactcccaacccatcaccgtttcaaccaaccccctcaccccat

SEQ ID NO: 5833 - DNA, 1851 bp, Glycine max
  misc_feature (23)..(23): n is a, c, g, or t
  misc_feature (475)..(475): n is a, c, g, or t
  misc_feature (1037)..(1038): n is a, c, g, or t
  misc_feature (1047)..(1047): n is a, c, g, or t
  misc_feature (1071)..(1071): n is a, c, g, or t
  misc_feature (1082)..(1082): n is a, c, g, or t
  misc_feature (1158)..(1158): n is a, c, g, or t
  misc_feature (1213)..(1213): n is a, c, g, or t
  misc_feature (1231)..(1231): n is a, c, g, or t
  misc_feature (1244)..(1245): n is a, c, g, or t
  misc_feature (1281)..(1281): n is a, c, g, or t
  misc_feature (1442)..(1442): n is a, c, g, or t
  misc_feature (1464)..(1464): n is a, c, g, or t
  misc_feature (1495)..(1495): n is a, c, g, or t
  misc_feature (1515)..(1515): n is a, c, g, or t
  misc_feature (1522)..(1522): n is a, c, g, or t
  misc_feature (1538)..(1538): n is a, c, g, or t
  misc_feature (1576)..(1576): n is a, c, g, or t
  misc_feature (1608)..(1608): n is a, c, g, or t
  misc_feature (1617)..(1617): n is a, c, g, or t
  misc_feature (1671)..(1671): n is a, c, g, or t
  misc_feature (1707)..(1707): n is a, c, g, or t
  misc_feature (1716)..(1716): n is a, c, g, or t
  misc_feature (1781)..(1781): n is a, c, g, or t
  misc_feature (1785)..(1785): n is a, c, g, or t
  misc_feature (1811)..(1811): n is a, c, g, or t
  Peptide Sequence Number=SeqID_8586
  Probeset Number=SeqID_15612
cacacaacgccccgcgcttaacnttattataagagaaataagataaatagagaccgtgagtggagacgtcttgccgaactttataaagtatgagtaggatcgtatgcgtagatatgtgtagaggcggacctattttctaaataagaagcggatctgtacccggggtgttgtcaaggtatacctcagtactcagtggttctattagatattatttacgggaaattaagaatagatcggaggagagtggtagtgacgataagagttgatgttctgactcacagtatagtatgtgagatgaattctcaacgcaggtctggtctcttgagagaagatatattgaatttagatttatattttattatttagagagagtagagataaaggatatgtataatgctgtgaggacggggcgagagtgatagagagaggatgatatgagaagttgtgagtggattgaggatatatattacacgtngagcatagttcttgtgacgcttgtttatgacatacgtgtgttgtgtgtaagactagccccgcgtatagcgcgatattatcaccaacattaaataaatatgttcgagtgatctaatattgtactccactatattaaatatttatgcgatatcctgtatatataccagctgacgccgaaactatatatattatggttataggtaccattaagtgaagtaagtcgaagcgcacatagaagacttctaatgaataaagaagtatgacatctgactactcagatgatacagcccggcaggccgcccgcgctggataattcgtcatagttttacacactttaatctgatgtatagatagtagtagagcggcgccgccgccattcccaagtctgcgttttctcctatgttatcgcagtacgatgatgaagtgtaagatgtgaatgttcttacataatcatatatgtatagtatgaatatttattgatattggcgtaggatatgagcatcaaatacttactgacgtatgtaaggatatatgtgatcgcttcttatgataaggatatgtgnngtctccgtngtatcgcagatgaatgatgtgtgnatagacttctnctcattatagcttggtcgtacacattattataagacagttattacatgcacttgattttgtatagtctaagaatcncatactatatctatctatatatactcatcggcgtgtatgtgtgatatattgacanctgcgagcacgcgagganatgctaacagcgnnctgctatgtggacgtcgtctgatagggacgatctancagcgcggaatacatagcaaatgcatagtatgatctgcagatcatatatattatctacactatagttgtatgaactactgagatgcatctgatcatgtagagagacgatagctactcgcatcgtataagtacgtatacgaagtaatacgcgatgtcgatcnagttgagatgtagtgtcgagtngtagtgactctattattatatgatcatactnatgagcgtcactcatatatncatacanactctgtatgtgatantatgtacactatatctagtcgacaaaagcagaatcatnttatgttgtcacatgagaaaagtacatcgtgncgacatcgncgaatatacaagtatgattatatggacgtgttgacgacgaatcaattgagaagngcgcggtctgagcgttactgtctagtattatatgancatgtagtnatatgtgatgtatgtactaatgtgtgtgagacgcgagagtcggctttatatacggtgtcaccganattnatgtctacttatatagacgcgcgagngtcatatgcatggtagtcttttactatagagatagatgag

SEQ ID NO: 5834 - DNA, 1381 bp, Glycine max
  misc_feature (54)..(54): n is a, c, g, or t
  misc_feature (96)..(96): n is a, c, g, or t
  misc_feature (131)..(131): n is a, c, g, or t
  misc_feature (149)..(149): n is a, c, g, or t
  misc_feature (176)..(176): n is a, c, g, or t
  misc_feature (329)..(329): n is a, c, g, or t
  misc_feature (505)..(505): n is a, c, g, or t
  misc_feature (926)..(926): n is a, c, g, or t
  misc_feature (1180)..(1181): n is a, c, g, or t
  misc_feature (1261)..(1261): n is a, c, g, or t
  misc_feature (1308)..(1308): n is a, c, g, or t
  Probeset Number=SeqID_15613
ccgccacaccacccgtcccacctacccaccgttgttgtgttgtgtgtttggttntgtgttggtgtggtttgtcccggtggtcctcacctctcacancaccaccccacccaccgcacccccacattttagtntgttgtgtttgtgggacntaatttcccgcttgagcgatgcctttntgcactttattatcttctgctctattccacactactcctttcttgacataatagcttatctactttgtccgctccttccggtcggtgtgttgttctccttgtgctgtttctattgtttgtgcttctctctgcttggccggcgggccggtcccngcgaccggccgcccctctccgccgatgagccgggcatcgcgcctcgattagtatttcctatccacttcctgatcagcacaatatttataatttttttccatttttttaccttttattcttcttctttctttcttgtctcactcctctcctttatcgctttcttggctctgttgctntgctcctcgcgtgtcttctattctacccgcacccccgtagcatctcgtggcgcccagaacgtcacccgctgtagcggtaggggtagaaattctgcattatccgtgtgttatattgtgtgtttcttcgttttgggtgcttgtgtttgtgttattttttgggggaatgatagcgggtgaggaggcgagaagtcaagagcacagagcggagacgcgcgtgtgcctatgtgtatgtgtctatccgttgcacgcgctctcagatacatgcgccgcccgatatagcgacggcagaacacagagcgtacgaccgagcgacgaccgccactcgatatcctccctgcgccgcgacctttctgcgtcggtgttgctgttgcatgtggagtgatctatcacgtgtgagagtgtgtatgatagatgtgcgcanggatactaggagagagacgtgcacggcggaagagcagtgtgagtcatggtcggatttgttcgtcggtcgcgtatgatctagtattatatcgtacgtcgcgcgtgcgccatccgcgtggagaggagtagatgactataccggctatcggagtacagaatacagttagtaagaacccacacagcatgctttgttctatgcgtgtggtgcagtaccgatggctatatcatgatccatacaccctcggcgccacaaannaacccatctaccatcacagtcttcgattcgctcatcttccgccctcactctcctcacgccctcgcatgatggtagcctantggagatgtgtcgaatgtgatgatgtcgaagtgaaatatagaagaanagatatgataattcattctacgataacatgtggtctcactcacatccgaacatcacatccatctgacacaacg

SEQ ID NO: 5835 - DNA, 787 bp, Glycine max
  Peptide Sequence Number=SeqID_8587
  Probeset Number=SeqID_15614
gatcgatagcagagcaattctcttgcaacttgataagatcgagatacttccagacacacgcgcacacatagggccggagatagaagaatagttatggcttcatcggcggtgagccacagccacggcgggcagcaccagcagcacctgccggcggcggcagggagcatgatggcgcgggtggaccggctggacctggtggtggggtacctggaggagatgcgccaccacagcggcggcagcggcaggtcgtccaccaccgcgaccagcacgctgtcatcgtcatccccgaccacgcctaggtcttcccggcctcatgggtgccggccggcggaggagctgctgcgggaggccaaggccaaggggagcctggtggagcgcatagcgttcctggaggaccgggtgctccggatggaggaggagcgcatggatctgtcgtccagcatggatacggcggagcagaccacgccgacctcgtcggggaggaggacgatgaggatgatgatgagcggcagcggcggggccggggatgagcatgggagtggcgggagcgggaagaaagggaagaaggggctcaagagcttggtcaagtcatgcgtccgagcaggcgccaagctcaagaccaaggaatagtctagtctttcttttgtttctttattattagtcgtgtgtgtacgtgcatatgttcacgtgtacgtacaccatgtacagtaaacgtatgtgtaaatgtgaatgtacacgttgtaataacgaaaaagtagtaatacatgcttgctgtattatcttcgcc

SEQ ID NO: 5836 - DNA, 1578 bp, Glycine max
  misc_feature (17)..(18): n is a, c, g, or t
  misc_feature (24)..(26): n is a, c, g, or t
  misc_feature (28)..(28): n is a, c, g, or t
  misc_feature (30)..(31): n is a, c, g, or t
  misc_feature (35)..(48): n is a, c, g, or t
  misc_feature (58)..(58): n is a, c, g, or t
  misc_feature (60)..(60): n is a, c, g, or t
  misc_feature (62)..(66): n is a, c, g, or t
  misc_feature (76)..(76): n is a, c, g, or t
  misc_feature (78)..(79): n is a, c, g, or t
  misc_feature (223)..(226): n is a, c, g, or t
  misc_feature (228)..(228): n is a, c, g, or t
  misc_feature (284)..(290): n is a, c, g, or t
  misc_feature (300)..(300): n is a, c, g, or t
  misc_feature (314)..(314): n is a, c, g, or t
  misc_feature (318)..(318): n is a, c, g, or t
  misc_feature (365)..(365): n is a, c, g, or t
  misc_feature (381)..(381): n is a, c, g, or t
  misc_feature (410)..(410): n is a, c, g, or t
  misc_feature (413)..(413): n is a, c, g, or t
  misc_feature (415)..(415): n is a, c, g, or t
  misc_feature (486)..(486): n is a, c, g, or t
  misc_feature (493)..(497): n is a, c, g, or t
  misc_feature (543)..(544): n is a, c, g, or t
  misc_feature (602)..(602): n is a, c, g, or t
  misc_feature (628)..(630): n is a, c, g, or t
  misc_feature (633)..(633): n is a, c, g, or t
  misc_feature (642)..(642): n is a, c, g, or t
  misc_feature (653)..(653): n is a, c, g, or t
  misc_feature (704)..(705): n is a, c, g, or t
  misc_feature (749)..(749): n is a, c, g, or t
  misc_feature (791)..(791): n is a, c, g, or t
  misc_feature (805)..(805): n is a, c, g, or t
  misc_feature (829)..(829): n is a, c, g, or t
  misc_feature (833)..(833): n is a, c, g, or t
  misc_feature (872)..(872): n is a, c, g, or t
  misc_feature (925)..(925): n is a, c, g, or t
  misc_feature (934)..(934): n is a, c, g, or t
  misc_feature (973)..(973): n is a, c, g, or t
  misc_feature (986)..(986): n is a, c, g, or t
  misc_feature (993)..(993): n is a, c, g, or t
  misc_feature (1087)..(1087): n is a, c, g, or t
  misc_feature (1139)..(1139): n is a, c, g, or t
  misc_feature (1146)..(1146): n is a, c, g, or t
  misc_feature (1251)..(1251): n is a, c, g, or t
  misc_feature (1263)..(1263): n is a, c, g, or t
  misc_feature (1269)..(1270): n is a, c, g, or t
  misc_feature (1312)..(1314): n is a, c, g, or t
  misc_feature (1331)..(1331): n is a, c, g, or t
  misc_feature (1337)..(1337): n is a, c, g, or t
  misc_feature (1452)..(1452): n is a, c, g, or t
  misc_feature (1456)..(1456): n is a, c, g, or t
  misc_feature (1459)..(1459): n is a, c, g, or t
  misc_feature (1550)..(1550): n is a, c, g, or t
  misc_feature (1553)..(1553): n is a, c, g, or t
  misc_feature (1578)..(1578): n is a, c, g, or t
  Peptide Sequence Number=SeqID_8588
  Probeset Number=SeqID_15615
ggaaattttttttcttnncacgannncncnnaagnnnnnnnnnnnnnnccgcgtgcgngntnnnnntgcgcctgtngnntattggtgtgggcgtgttcattcttcttactacactcctcaaccattatgatggcctacatccttctctctcttgttcagggtgattcggccgccctctctctctcccactagggtctcgaacactcgctcgtggcgccgcaannnntngtggtcggtgggtgtctcgtgggggcggttggtcgcgcggtgcgtggggtgtttcnnnnnnnatcgatttcnttgttctatcgcgntttnttgtttcttgtgtggctcctctctctggtcgctttctgtatagcgtntatgctgtgttgttantatttattacactccttgtgaatttatanttntngtggatgcgacctctccttttgttggttgtagtctggacagtggtctgtcttctggtggtgtgtgagtgtnatatatnnnnnaacctgttttcttcggggtccctatgtctctctgtcggcgtgtgtnnaaagtagcgcgcaccataatgacaaaacagaccaacacaacaaccaacaccaccacancacaccccacgaccaccccaagcggnnnatngatagtttngtgtctggtgnactggggtctttccgcgttgggtctagcaacgccctcccatcttttatacnncttccaacaatcacaatcactactgccgccaccgatgcgtcaangacatcccgcggaccaacgcccactcacgagcagttgagaanggacatccatcacnccaacccaccaccaccatacaaanaccncatgacatacgccgtcacagcgctctttttcttctcggngctgtgctgtgtggtcggctatcggggtgatcgtctggtgtacgcgtgttggnggtgtgtgngtgcggctcactcacatcttccacaccgggacggttgtncactggcgtgtgngtgtggngcagatagacgtccgtcgccgctgcccctcacgtaccgatcctctgtcttcgctcgtctgcgcctgcgctcgctctccgatctctcgcgcgctnctctcatcatatatcctatctccccgtacgtcacccatcgcatcccttctantgtatancacgcgacgtttgtcgccgtcttctctccgcgctcctccgccacacgcggctgttggagagtgctcttattatattcaccgcaccacacccctgagaccttactncacacccactanaacggnnaagaacaaataatatttatgtggctggctgctcgtcgccctnnncctcgctctctgctccnccgccncgcctctcacgacgtctctctatgcgacgggtgacgatgcgggtcacatcgtgtagacgtgtgcagcctatctgcgttcgggcgagcgtgtgtggtaccctcgcactctctcgtngcgnggntgtgtgtgcgtaagatgatcgtggcgtacgcactcccgctcacgcgcgttgttcgctgtcgttctctctctcactctacagaatcatcagngcncccacatcgcgcttcctcctctccn

SEQ ID NO: 5837 - DNA, 1937 bp, Glycine max
  misc_feature (21)..(21): n is a, c, g, or t
  misc_feature (24)..(27): n is a, c, g, or t
  misc_feature (29)..(30): n is a, c, g, or t
  misc_feature (32)..(32): n is a, c, g, or t
  misc_feature (44)..(46): n is a, c, g, or t
  misc_feature (50)..(51): n is a, c, g, or t
  misc_feature (55)..(57): n is a, c, g, or t
  misc_feature (105)..(105): n is a, c, g, or t
  misc_feature (130)..(130): n is a, c, g, or t
  misc_feature (136)..(137): n is a, c, g, or t
  misc_feature (151)..(152): n is a, c, g, or t
  misc_feature (154)..(157): n is a, c, g, or t
  misc_feature (159)..(160): n is a, c, g, or t
  misc_feature (177)..(177): n is a, c, g, or t
  misc_feature (191)..(191): n is a, c, g, or t
  misc_feature (254)..(254): n is a, c, g, or t
  misc_feature (279)..(279): n is a, c, g, or t
  misc_feature (281)..(281): n is a, c, g, or t
  misc_feature (283)..(283): n is a, c, g, or t
  misc_feature (285)..(285): n is a, c, g, or t
  misc_feature (287)..(288): n is a, c, g, or t
  misc_feature (298)..(298): n is a, c, g, or t
  misc_feature (377)..(377): n is a, c, g, or t
  misc_feature (408)..(408): n is a, c, g, or t
  misc_feature (471)..(471): n is a, c, g, or t
  misc_feature (477)..(477): n is a, c, g, or t
  misc_feature (479)..(479): n is a, c, g, or t
  misc_feature (502)..(502): n is a, c, g, or t
  misc_feature (516)..(516): n is a, c, g, or t
  misc_feature (566)..(566): n is a, c, g, or t
  misc_feature (571)..(571): n is a, c, g, or t
  misc_feature (593)..(593): n is a, c, g, or t
  misc_feature (612)..(612): n is a, c, g, or t
  misc_feature (638)..(638): n is a, c, g, or t
  misc_feature (640)..(640): n is a, c, g, or t
  misc_feature (656)..(656): n is a, c, g, or t
  misc_feature (665)..(665): n is a, c, g, or t
  misc_feature (694)..(694): n is a, c, g, or t
  misc_feature (700)..(700): n is a, c, g, or t
  misc_feature (715)..(715): n is a, c, g, or t
  misc_feature (734)..(734): n is a, c, g, or t
  misc_feature (739)..(739): n is a, c, g, or t
  misc_feature (800)..(800): n is a, c, g, or t
  misc_feature (815)..(815): n is a, c, g, or t
  misc_feature (852)..(852): n is a, c, g, or t
  misc_feature (862)..(862): n is a, c, g, or t
  misc_feature (875)..(875): n is a, c, g, or t
  misc_feature (891)..(891): n is a, c, g, or t
  misc_feature (902)..(902): n is a, c, g, or t
  misc_feature (936)..(936): n is a, c, g, or t
  misc_feature (1012)..(1012): n is a, c, g, or t
  misc_feature (1014)..(1014): n is a, c, g, or t
  misc_feature (1065)..(1065): n is a, c, g, or t
  misc_feature (1071)..(1071): n is a, c, g, or t
  misc_feature (1147)..(1147): n is a, c, g, or t
  misc_feature (1157)..(1157): n is a, c, g, or t
  misc_feature (1214)..(1214): n is a, c, g, or t
  misc_feature (1277)..(1277): n is a, c, g, or t
  misc_feature (1282)..(1282): n is a, c, g, or t
  misc_feature (1301)..(1301): n is a, c, g, or t
  misc_feature (1343)..(1343): n is a, c, g, or t
  misc_feature (1366)..(1366): n is a, c, g, or t
  misc_feature (1422)..(1422): n is a, c, g, or t
  misc_feature (1444)..(1444): n is a, c, g, or t
  misc_feature (1515)..(1515): n is a, c, g, or t
  misc_feature (1522)..(1522): n is a, c, g, or t
  misc_feature (1548)..(1548): n is a, c, g, or t
  misc_feature (1562)..(1562): n is a, c, g, or t
  misc_feature (1648)..(1648): n is a, c, g, or t
  misc_feature (1654)..(1654): n is a, c, g, or t
  misc_feature (1663)..(1663): n is a, c, g, or t
  misc_feature (1680)..(1680): n is a, c, g, or t
  misc_feature (1708)..(1708): n is a, c, g, or t
  misc_feature (1747)..(1748): n is a, c, g, or t
  misc_feature (1769)..(1769): n is a, c, g, or t
  misc_feature (1773)..(1773): n is a, c, g, or t
  misc_feature (1799)..(1799): n is a, c, g, or t
  misc_feature (1826)..(1826): n is a, c, g, or t
  misc_feature (1829)..(1829): n is a, c, g, or t
  misc_feature (1837)..(1837): n is a, c, g, or t
  misc_feature (1867)..(1867): n is a, c, g, or t
  misc_feature (1926)..(1926): n is a, c, g, or t
  misc_feature (1931)..(1931): n is a, c, g, or t
  misc_feature (1934)..(1934): n is a, c, g, or t
  Probeset Number=SeqID_15616
ttggtttgtgggtggcgcttngcnnnncnntnctctcactttannnatanncttnnncgtttttcctgttaataacataatcatgtttatactttcactaatttngttgtggatgacgtgatgttgtgangagttnngttgtggggggggnncnnnncnngcgactgtctttcgtcntatttgattatgtngtcggctgagattctgctgctggttgggcgtgcgacaccttgcatatcctctatatagtatgnactgtttatgctatcagatagtcgncncncntnncgctcttagngtgagtgtgtgcgagatgatattgtgattgtgatatagtcagaagaccactagtgaataggtagactaatctatactanctcacgtattatgaacacatagtgtgtgacngagtcgccccgaccgcacacacacacaacgaacgtcacgacgtataggcatagcacacgacantgagtnangtatcggctgtgtgtgatccttnatgcgcactctaanacgatatggagtgagagtcgagtagatagcatgatacgatcatatatatntctgncatatatatcacatgaccatcnacttatactatgactcctnctctatcagtccatcattagtagatntngctcgttagaactatncgcgcgtantcattataatgcgatcatgatagattctntctatntctataactagtacnatcctactctcacgaaatnatgancggctgcgcgaagtgtgcgctgtgtcgtcgccgtcgcgtcgtgacgcgtgtgacagctcgnctgcgcgctgccggncttacgacacgtctactcggcgtgacagtgtgagcangatgagtatnactatgtcgagcntacatctgtattcatnatcatgatacncccactctctaatactatctctcatacatcactngtacttgaattacacatatcgtctacagctggtcggaacactcatgatcgagtatatactaggagcatgcgagcancntacgagcagtcgtatactgtgcatgtatatgtatgtagcacatcagacatnagtacnagtgacgccactcgctgtcatgcctagtactgcgtacgtacactgacgtggcgactacgacggctgtatgcggacntactgcatcntgatgtctgacgccagcgtacatcgtcgttgacatatatcacgaagcgagctaacantacgtgcgctactgtctctatgtagttatactactgcgatgcgcgtcacagcaatcgtgcgantacanagagtgcacgacacacccntacgccgatgatcgattactctcatcattatctctagctacnacgctgatatcatagctccgtgnacgccacactgcgctcaactcatctctgtgtattgttatatactgctgcgcacccntcctctcgcagacaacttgtgntcgaagcgcatgctctcactacagtgtgatgcagtcgactacgtgtgcgagacgtgcgacacgtacgctgngtacatnatctcgctcgttgatgagtgatgacncgtatttgcgttgntacgtgcgaaagtacgcgtgtaactcgacgactgctgcgagtactataacgtgatcataatcagactagactagttacgacctacnctacanctcctgcgntacgtcgctacatacantgactatcgagagcgtacacactactcntgagtgatgctgcagatgatcaagtaccagtctgatcannactatgcagcatacgacgcgngttnaaagcacacatgctgacataatccantgacctgactgcatatatactaacaanacnagccggcnacgactgtcgatatctgacgtgcggctctnctgatctatatatatcatacgcgtatatcgtcgctcgtacgatcgaaatactatcctcntacancanctg

SEQ ID NO: 5838 - DNA, 431 bp, Glycine max
  Peptide Sequence Number=SeqID_8589
  Probeset Number=SeqID_15617
ttcacattctcggtctcctcccgttcctttttctccattccttctccgatccatggattcatcccaatttgttgctagatcctgccaagggtggaggacggggtgagaagggggatttgcggcggagtgcggtggctgcaggttctcggcggcggcaggtcctccagcttgaccacacgttcctgctgctcgctgccgccgtccattggatggccatggagctgggcccctttgaacttgaacggtggctctcctctagagagtccacaggaggaggcaggtcgtgggcttcctatttgctactgtggcagcttccacctatgtaatgtgctacaactttgcatcattcctactttctgcacacggctgattcgtcacagaccttgatgattcagtgagaggcagctctgaagatatgtcctgacttcgtc

SEQ ID NO: 5839 - DNA, 490 bp, Glycine max
  misc_feature (98)..(98): n is a, c, g, or t
  misc_feature (130)..(130): n is a, c, g, or t
  misc_feature (168)..(168): n is a, c, g, or t
  misc_feature (224)..(224): n is a, c, g, or t
  Probeset Number=SeqID_15618
agtgctagtgtgagtgtgagtccgtgacacacttatccacctactttcatttgagccactcttctcagtccaaaacagtttctcgttttctcatctgnaaaatgaggagcatctttgtccttctccttgntctggggttgttcaagtatgcatttgctgaaagaaggnttttgctctgctccttcgggatcgaaatcaagcctctttattgggaagtggataanccccactctctcaactattcaactttcaagaattggctggaatcacacgcagtggttataaagaggatcctggcttgggatcacccgaaaaggctgggtatgggccattggccgagatggatcgaacacggccggcgcatatattaatttcccacgaaatggggttcccacttcttggaatggacctaacttaagttgagagagaaattcaaatccggatacccctggctggtgggtgaaggagattttttcttttggttccacag

SEQ ID NO: 5840 - DNA, 1417 bp, Glycine max
  misc_feature (18)..(18): n is a, c, g, or t
  misc_feature (1060)..(1060): n is a, c, g, or t
  misc_feature (1231)..(1231): n is a, c, g, or t
  misc_feature (1310)..(1310): n is a, c, g, or t
  misc_feature (1322)..(1322): n is a, c, g, or t
  misc_feature (1352)..(1352): n is a, c, g, or t
  misc_feature (1417)..(1417): n is a, c, g, or t
  Peptide Sequence Number=SeqID_8590
  Probeset Number=SeqID_15619
tagtgtacggcgagtgtntgcacgcgccgaggtcgatggagagggcataagcgcgaacgacagccagaatcaaatattggggtgctgtggtgcccccctcgtcggaggtgaggtgagcgcgaggggacctccgccccccaccctctctcaacggagtgtgatggttactaagagtgaggcgttgatacacactccggcacatatcgacggggctgtagcgagatctggagcataatatagtactacgcacggagctctaccaccggccgtagccggcatttgctgtagaaacagacacaccggacacgccgacacgtctggaatgatctaatagacattgcacccttatccgcggggatagcaggacctaaatatgattacgatcggcactcggcgtcgccgagaatgtcggcgtgcgaagtggtcacgccttgctgcgacccggacatcatgcgtctgcatacgccaggtcgatcgtgcccccgttctccaccacgcatatcggccacactctagccacctactcgctgttgttcagactaaccgaccaccagcgcgatatcttcctctatctctataccatatcgtcgcgtgatgtaacttggtcggcattatcgtgaccatccagaccaatatggatgtcagtgaacgcctatctctcgacgtagagcagaatggcctgatcagcgtcgacatcgccgtgtagcagtgagtacggcataggagaactcgtaatacttataatgatctgtgaacgtatgatacgcaactctacatatactcactagtctaccccactactagcctataccacgagattcacccgcttacgatctgcagtgacgccgctcgagtagacgccttgcacacaacgatacagcatgtagcttgctcaactatccgcgtcgtctctacagacagcacaacagccgcgatgtatctccgcgtcctatacatcgatgtacttggaccgtaatgtgaatagtgtaccctacgcacaacacctcacttattgcgtccgaccctcccgcgcccgatccctgcgaatgacgtacatacngtatgctagctacgcacgcgattcgatgtatttctgtctgatttacatcggagtaatatatctacatcgatcacccggtgctccgccgccgtcccaatcgtacacgactccacatgccgcacacgcagcagcgagtgtacacggtgagtgatggtctgaatgcgctgctgnaggacacgcctaatgatatagcacactctcttatgctaatggtgagagacgaagccgtactccatagtcggacgtatgngcaatcgatatngcattgtatgattgtgatcatagatctcanactaatacgcctacctatgattactgctaactcgtgacacaccagagcagcgacgacctactacn

SEQ ID NO: 5841 - DNA, 1578 bp, Glycine max
  misc_feature (19)..(19): n is a, c, g, or t
  misc_feature (21)..(21): n is a, c, g, or t
  misc_feature (25)..(25): n is a, c, g, or t
  misc_feature (34)..(36): n is a, c, g, or t
  misc_feature (38)..(42): n is a, c, g, or t
  misc_feature (47)..(50): n is a, c, g, or t
  misc_feature (76)..(76): n is a, c, g, or t
  misc_feature (78)..(80): n is a, c, g, or t
  misc_feature (86)..(92): n is a, c, g, or t
  misc_feature (149)..(149): n is a, c, g, or t
  misc_feature (213)..(213): n is a, c, g, or t
  misc_feature (325)..(325): n is a, c, g, or t
  misc_feature (385)..(385): n is a, c, g, or t
  misc_feature (423)..(423): n is a, c, g, or t
  misc_feature (502)..(502): n is a, c, g, or t
  misc_feature (574)..(575): n is a, c, g, or t
  misc_feature (608)..(608): n is a, c, g, or t
  misc_feature (660)..(660): n is a, c, g, or t
  misc_feature (672)..(672): n is a, c, g, or t
  misc_feature (688)..(689): n is a, c, g, or t
  misc_feature (734)..(734): n is a, c, g, or t
  misc_feature (750)..(750): n is a, c, g, or t
  misc_feature (786)..(786): n is a, c, g, or t
  misc_feature (817)..(817): n is a, c, g, or t
  misc_feature (825)..(826): n is a, c, g, or t
  misc_feature (828)..(828): n is a, c, g, or t
  misc_feature (830)..(830): n is a, c, g, or t
  misc_feature (833)..(833): n is a, c, g, or t
  misc_feature (837)..(837): n is a, c, g, or t
  misc_feature (865)..(865): n is a, c, g, or t
  misc_feature (903)..(905): n is a, c, g, or t
  misc_feature (923)..(923): n is a, c, g, or t
  misc_feature (929)..(930): n is a, c, g, or t
  misc_feature (932)..(932): n is a, c, g, or t
  misc_feature (940)..(940): n is a, c, g, or t
  misc_feature (947)..(947): n is a, c, g, or t
  misc_feature (953)..(953): n is a, c, g, or t
  misc_feature (957)..(957): n is a, c, g, or t
  misc_feature (962)..(962): n is a, c, g, or t
  misc_feature (964)..(964): n is a, c, g, or t
  misc_feature (999)..(999): n is a, c, g, or t
  misc_feature (1001)..(1001): n is a, c, g, or t
  misc_feature (1004)..(1004): n is a, c, g, or t
  misc_feature (1010)..(1010): n is a, c, g, or t
  misc_feature (1015)..(1015): n is a, c, g, or t
  misc_feature (1030)..(1030): n is a, c, g, or t
  misc_feature (1032)..(1032): n is a, c, g, or t
  misc_feature (1070)..(1070): n is a, c, g, or t
  misc_feature (1085)..(1085): n is a, c, g, or t
  misc_feature (1098)..(1098): n is a, c, g, or t
  misc_feature (1136)..(1136): n is a, c, g, or t
  misc_feature (1140)..(1140): n is a, c, g, or t
  misc_feature (1159)..(1159): n is a, c, g, or t
  misc_feature (1165)..(1165): n is a, c, g, or t
  misc_feature (1175)..(1175): n is a, c, g, or t
  misc_feature (1190)..(1190): n is a, c, g, or t
  misc_feature (1208)..(1208): n is a, c, g, or t
  misc_feature (1210)..(1210): n is a, c, g, or t
  misc_feature (1236)..(1236): n is a, c, g, or t
  misc_feature (1261)..(1261): n is a, c, g, or t
  misc_feature (1316)..(1316): n is a, c, g, or t
  misc_feature (1318)..(1318): n is a, c, g, or t
  misc_feature (1320)..(1320): n is a, c, g, or t
  misc_feature (1327)..(1327): n is a, c, g, or t
  misc_feature (1350)..(1350): n is a, c, g, or t
  misc_feature (1352)..(1354): n is a, c, g, or t
  misc_feature (1357)..(1357): n is a, c, g, or t
  misc_feature (1371)..(1371): n is a, c, g, or t
  misc_feature (1375)..(1375): n is a, c, g, or t
  misc_feature (1380)..(1380): n is a, c, g, or t
  misc_feature (1391)..(1391): n is a, c, g, or t
  misc_feature (1477)..(1477): n is a, c, g, or t
  misc_feature (1493)..(1494): n is a, c, g, or t
  misc_feature (1551)..(1551): n is a, c, g, or t
  misc_feature (1559)..(1559): n is a, c, g, or t
  misc_feature (1572)..(1572): n is a, c, g, or t
  Probeset Number=SeqID_15620
ttttggtggtgtgtttgcncncctntcctctctnnnannnnnttaannnnaaacggaacacaaaagaaagagagangnnntcgtgnnnnnnncccacacatacatgtacagtggagggccactacccttctggagatgaggagtctggnctagaagaagaggcgagcgcgaaccacccctcattctaccaaataaaggtatatttattgtgtngaagtgatctctcaacatatcaacatcacctatacataatgtagtatgtaaatcacgcacaaagttatatataggcgcacaaacataacaaacatataagaacagaatatanatattttagattcagtatttgaaatactcacgtccaaagacagacaagaaatatatatantctgatcattctttgttattatgttttagtatcgaagncgtatagagatcgagaagaaatcatgtagtcttctgcgttgctcgtgtctcgagttgtttatgactctctcagatagcntctaattcacatgattctagtgtgagagatacaaacacacacagccgcactgccgcgcgcgggtcgtgagtnnttgtgagtagtgggtgtagattgtagggagtgngaggtgtgataggtgtctgatagtgtatctagtgtggcgtgtgatggtggtngatcactatgantggtgtgaataacatnntcagacatctccactccactcgcagcgcgctccttctctgtgctnttcgtgtctacacttngtggtgcagaggtactatctatctgtacgttgtgtntgtgtattgtaagcgtgtgctgattattgtntgtggganncncnctncacnccatctagcgggtatcctccagggaagngtccgtgtgaggtgttgtgtgtggttttgtgtgttgtnnncccacaccccccccgctncacacnncnacacaccncacatcnccaccnacancagcncngtcgatgactatgtttatttgttgatatgcgcatncnaantgaggncgctncacctccctccattntngtgtctgagctcctgtccgtctgcacgtgcgctggccnctagctgtatcttgntgttagctccttngtactatgagctgagcagctcgttctctcgtcgcgtgnccgncgcgtgctgatggcgtgcngcaatngtctgcttcncaaacatgcacactntcgctgccacgtgttacntnctactgcggttctctgcaccgtgcgntgttgaagaaatctcactacatggntagtcgagaactgtacgccgggagagctgtcatagtatatacatcacatgcgtgncncntatactntctcaacgaaggcgaatcagcancnnnccnagctctacccccancacntctcnaacgtgttatncattactgtagtcaatatatactgtggtgtatgcaagagtagagacacacgatctgactcactcagctagctcgacatgacgacgnacgcatgacgacgcgnngcaagtacgagaaatgactacatgaacactaataatcatagcgatgatgacgtgacntgacgcancgactgcatcgcncaccag

SEQ ID NO: 5842 - DNA, 1518 bp, Glycine max
  misc_feature (76)..(76): n is a, c, g, or t
  misc_feature (106)..(106): n is a, c, g, or t
  misc_feature (184)..(184): n is a, c, g, or t
  misc_feature (199)..(199): n is a, c, g, or t
  misc_feature (201)..(201): n is a, c, g, or t
  misc_feature (396)..(396): n is a, c, g, or t
  misc_feature (445)..(445): n is a, c, g, or t
  misc_feature (450)..(450): n is a, c, g, or t
  misc_feature (726)..(726): n is a, c, g, or t
  misc_feature (739)..(739): n is a, c, g, or t
  misc_feature (780)..(780): n is a, c, g, or t
  misc_feature (782)..(782): n is a, c, g, or t
  misc_feature (910)..(910): n is a, c, g, or t
  misc_feature (989)..(989): n is a, c, g, or t
  misc_feature (1029)..(1029): n is a, c, g, or t
  misc_feature (1031)..(1031): n is a, c, g, or t
  misc_feature (1099)..(1099): n is a, c, g, or t
  misc_feature (1102)..(1102): n is a, c, g, or t
  misc_feature (1136)..(1137): n is a, c, g, or t
  misc_feature (1169)..(1169): n is a, c, g, or t
  misc_feature (1176)..(1176): n is a, c, g, or t
  misc_feature (1213)..(1213): n is a, c, g, or t
  misc_feature (1290)..(1290): n is a, c, g, or t
  misc_feature (1297)..(1297): n is a, c, g, or t
  misc_feature (1342)..(1342): n is a, c, g, or t
  misc_feature (1361)..(1361): n is a, c, g, or t
  misc_feature (1365)..(1365): n is a, c, g, or t
  misc_feature (1414)..(1414): n is a, c, g, or t
  misc_feature (1471)..(1471): n is a, c, g, or t
  misc_feature (1477)..(1477): n is a, c, g, or t
  misc_feature (1488)..(1488): n is a, c, g, or t
  misc_feature (1512)..(1512): n is a, c, g, or t
  Peptide Sequence Number=SeqID_8591
  Probeset Number=SeqID_15621
gggtgggtgggccacgccgcccgccgcggccggcctcaccctatctaatcggctgcgcatcgtacagccgttccgncgtgtctactcccattctatataacataanatgctgacagcctcgccacccgcacgggactgcggcggcgttccgtcttacctaatgaagactacgcgtgcgcatacncaccacgccgtggcntngcgacggcgacatatgctgccaccggagcaactcactatcactctcagtaaagcgatgcgctcagcctcctggacaagagagcactcagccatctctgatagggaggcctgtcaaccatgtagtagagtctagccacggtgtgccccgcacaactgcgagtcatagcacactgcgatgtacgtgcaaactgtctnctggcgtcggcagcattctcgtttgctcgcagctggggaggaggagagntaatngatatcgatgcgtcggactaccaaagctctgatcagcctcacttcgtaaacagtggtaatgttatatgtcgttcatgtggtcacccggcacggaggtgctcgatgcgcgagctgtgggggaggcgaagcgtagtgacgagggtccagaatgatcgtgcaaagacgcgtgcaaaaaagacgaccgcctccggcctggaagcgggcgcaatagaacacgcactggagccgctgcgctcactctcgtgttgtgtatagggcacacgcgcctctgaggtngtgattgtggggngtggtgtaaagcatgtcggagttgttagggcgaaccgaccncngatggtccgagtgtcttgtggcactctagcagttgtatgtggtaaagaaacagcccaacttggactgaataggacactccgctcccgcccttcgcaagcgcgctgtggagagtaggatccacgctgtncggctcacggccgcggattatcttaattgcacgcagggaggggatcctccgcgcgtctcttcggtgcgggcgcggttangcgccaccgcgggatcggtgcgtacataaacaatatcggngnagaggacggcgtgagcctatcgcgcggcgattattggttttacgccgcgcggcgagaggttgaattanaanctctcgccactcactgccgcccgcggcaaggtcnntcatggtgtaagccttggtgtgcgcggcgtantatatcntgaatgtggcgctgcatccctggctattggtcccccngtgaagtaaaatgagtgctcatacgtataagatgcggcgcgcgctaacagaccgctaccgccgtcggcgaagatgcnaacgatngtgcggtcgttggataagaagtgacgcctagagctcggcgtctcnatcagagcgcacaccttcntctnttcttgctcgtctcgagtgcgccagccgagcaggagatacgtagagagnaccagacagcatcgtcgtgcgcgctccagaagcagaccgtagggttccgcacctttnctaccnagtacagattnatagaagagcgcgtcgcagttccngcagcg

SEQ ID NO: 5843 - DNA, 1520 bp, Glycine max
  misc_feature (71)..(71): n is a, c, g, or t
  misc_feature (86)..(86): n is a, c, g, or t
  misc_feature (88)..(88): n is a, c, g, or t
  misc_feature (90)..(90): n is a, c, g, or t
  misc_feature (92)..(92): n is a, c, g, or t
  misc_feature (210)..(210): n is a, c, g, or t
  misc_feature (536)..(536): n is a, c, g, or t
  misc_feature (741)..(742): n is a, c, g, or t
  misc_feature (744)..(745): n is a, c, g, or t
  misc_feature (766)..(766): n is a, c, g, or t
  misc_feature (787)..(787): n is a, c, g, or t
  misc_feature (819)..(819): n is a, c, g, or t
  misc_feature (894)..(894): n is a, c, g, or t
  misc_feature (945)..(945): n is a, c, g, or t
  misc_feature (1010)..(1010): n is a, c, g, or t
  misc_feature (1213)..(1213): n is a, c, g, or t
  misc_feature (1239)..(1239): n is a, c, g, or t
  misc_feature (1275)..(1275): n is a, c, g, or t
  misc_feature (1321)..(1321): n is a, c, g, or t
  misc_feature (1361)..(1361): n is a, c, g, or t
  misc_feature (1364)..(1364): n is a, c, g, or t
  misc_feature (1366)..(1366): n is a, c, g, or t
  misc_feature (1420)..(1420): n is a, c, g, or t
  misc_feature (1478)..(1478): n is a, c, g, or t
  Probeset Number=SeqID_15622
tttatatatttttattacaacacaatcgagcggccgcaacggccctcctccgtcagtgttgctgctcgccntctcgctctcgaatnancnantaccacattactttaaacactaggcagatacccacctgcacgtcacgcaggatgaatgcccatggtaaattaactcctcaatcccaaaccggcaccgcacacttacgtgacttcctcnccttctaccatcttaggtttcgcactcttcttccaccggggggctctactatacacaatataccgacttgtcattttatcattgcttctcgctggtccttctcttccatataaagagaggataactgtcgggcgcatttctcctactctcatgtttctatcacttgttttctctatatagtcgtaccacctgtccgtcgtgttactttgtcgtggctctgatggttctgtactatcgctatcattcaattcaccatctcgacagtgtcaaaatgtctgttcagtatgctccgaacagaaacaaccggggtgtggatgtgtacttancacagtacacacaccgtctggctcattactcagcactatagacggctgagactcactacatgtctgaggcctgactaatgtggattgtatgatgcatcacccccacatcgcggctccctatgtcagacgccggcaactctaggagggtggaccattaggaagtccgttgaggtggggaggttgtaatagggagagccatatgaanntnntagtataaaaataagatgtgnacaaacgtagatacaccaccnctcataccctcaccctgctcgactagtaggtnagaatgatgtgaggtgatcacagacactcataacgttgtaatcccgagaacagcacatactaacatcttgtactnccatcacaccacaccaacgtcccaccccggaagtcattactccatctttcnacacgcctcacaccctcccgccgcacgcgatatacgatagtcatataagtagtgacggtagaacngtactactcctctacctccacacctcttcactgcgcacgtatctcactgactactacctgcgggtcgcgacgacaacggacgagcctcactcactacactcatcactatctatcttacactctatgactattaccacgcatacgtgatgactagcacacactacatcaataatcatgtcacctactgagcgcaccgctctggngccgcggcacgcgatgctgtgagctnaccgtcgatgtgacattctctcatatccacacgcantcgtatgtagcgtcagatgagtatcacatatgtccacttcagtatncgcattgactactcacgtgagtagtagcagtgataacttngcnanctacactatcgatcgacctctcgcagcgtcgaatgatacgctgtcactgcgatngctacgactagtacattatcactcgacattaatgtaagtctcccaacgcgtgaggtgnacttatctactacatctcacgactgtgtacgtgtagtgacaa

SEQ ID NO: 5844 - DNA, 509 bp, Glycine max
  Peptide Sequence Number=SeqID_8592
  Probeset Number=SeqID_15623
ctaccactttgttcacgaatgcatgaggaatcacaagaaggacatcagtggacaccctaaggctcttatgaggttgaggactgcctgtgaaagggcgaataggaccctattatctactgctcaaaccacaattgaaatagattctctttatgatggtgctgacttctacacaacaatcacccccgccacgtttgacgagctcatcatagatctcttctatactcatatgcagcccgttaccaagtgctcagacggatgctaagatggacaagagcactgcccatgacgatgtccttgctagcggatccactagaatgcctaaagtgcagctatagatccctgattccttcactgcacacggacctttgcctgatcattacacccgatgaggccggtgcttatagagcagctgccaggctgctattgagactctcgaccgcaacaagaatgagcacgatttgatggtggtcgatgttacacccctttcccttggttcggaaactgccggc

SEQ ID NO: 5845 - DNA, 1492 bp, Glycine max
  misc_feature (1)..(1): n is a, c, g, or t
  misc_feature (201)..(201): n is a, c, g, or t
  misc_feature (354)..(354): n is a, c, g, or t
  misc_feature (573)..(573): n is a, c, g, or t
  misc_feature (759)..(759): n is a, c, g, or t
  misc_feature (934)..(934): n is a, c, g, or t
  misc_feature (1368)..(1368): n is a, c, g, or t
  misc_feature (1373)..(1373): n is a, c, g, or t
  misc_feature (1473)..(1473): n is a, c, g, or t
  Peptide Sequence Number=SeqID_8600
  Probeset Number=SeqID_15624
ngagtgaatgactcgtaggtagaatgacaggtagacagtggtatcagtgctcgactgtgacacgatattatggaagtgcgtcgcgatttcgtaagcacggatataagcgcgccatatcgctgatattagagaggtgatatggatggatcacgaccatgagagaaggtactacggtgaggactagtgatcgctctgttatcntctggttgtgtgtacgtagtatcgcgtcgaacgtgaagtggagatgtaatatatggaggagataatactgtcttgtctcgtatgcgattatgcgatctgagatcgcggagatggcatataacagcagtatcacatacgcaggcagagatctgntagaacgtcaatgctctgtgagcagacaggcagtttcacacgacacagaggacgtgaggcaaatcgtcttaatgtagtgataagtgccatgatctgatagctatggctgaacacgtctcgatatactgagcgctcgtgatcggaaggtagcataggataatgatgatgaggtcagtcacggtggacggtatgtgctgtctcgctctacttacaagtganacactcatgaatagggatgacgcgtgcctgtgcactacgagatcactagaacagtaatcatgcatacggagatactacaagtctacacagatagaatatagagtgaagaggggagataggactgtgtatagacgtcgtgttagtagtcataagtcgttagattggttggtgttcaccgagggctgnagtagcatgacatgacacatgtgcacacgcaacacgtgaatacgggctgcgagcagcgtgagaaatatatcatatagtaggatggcgtgcagaataaggtatgatgtgattgttaacgacgcgcgagatgcgaggaaacgcaccagtcagacacacgcctaacactcagaactgntcacgctcgggctcggcgtattagagtatgatatttctagtgtagttatagcatatatatagcagctgctcctactatattatgtgtagtatgatatatgcttactatgacgcgtatagatgattgttgttagctcaaactatgatgacataatagacatcaatgagaggatgttgagagcgtcatacagcatcaagatgtactcgcgtgtatgtgtagtctgagatcatgatatagtgcgtgtgtgtgtgtgtccactatcgtgcgagcaatactcggtgctgatgaggctctatgtatggttctagatgaagatagtcatgtactaactcctacagtgtcagagagtacgatagctggagctcataagcaggcacactcactctctcgaagtagacacttcgtttcacgtcgtattgatcgcttgctgttgngctcncgcctgcctatcgagcgagtgcgttggagatattacgtagctgagagtggttgatgtggagtcggcgcggccgttagtagcgggtgatagagtgcgtagngggcgagggggggggggcg

SEQ ID NO: 5846 - DNA, 491 bp, Glycine max
  misc_feature (119)..(119): n is a, c, g, or t
  misc_feature (136)..(137): n is a, c, g, or t
  misc_feature (144)..(145): n is a, c, g, or t
  misc_feature (206)..(206): n is a, c, g, or t
  misc_feature (350)..(350): n is a, c, g, or t
  Probeset Number=SeqID_15625
gccgaaagaaagaaacctaacagcgccatagcgttctctaagctatcgtgcgaggtccctcgacctccgcacaccccagcaccaggggctgtgcctgtcgtcgtcttccacgccatgtncgaacccgacaccaggnngcgccgnncgctccgtttctggctcagcgccgccgcttctggagtcgggtcgccgttctcaagcaaggncgtggtccccggacccctccgggaacaagggtggctcccccgaagggggactggaaaaacccccccataaaacggcaccgaaagggcggggacaagtttaaggcgcgcatcggtaaggttttggatcaatcccccccccggggnagaggttgaaaaagcgcctccgaaaatttaaccggtttggggcttttaaaacgggggaaaaaaaaggtaaaaaagtccccttggaaaaaaaaaaaagggggtccctttccctctcttccccccccccccaagggggggagc

SEQ ID NO: 5847 - DNA, 1339 bp, Glycine max
  misc_feature (1)..(1): n is a, c, g, or t
  misc_feature (224)..(224): n is a, c, g, or t
  misc_feature (524)..(524): n is a, c, g, or t
  misc_feature (587)..(587): n is a, c, g, or t
  misc_feature (678)..(678): n is a, c, g, or t
  misc_feature (714)..(714): n is a, c, g, or t
  misc_feature (803)..(803): n is a, c, g, or t
  misc_feature (834)..(834): n is a, c, g, or t
  misc_feature (915)..(915): n is a, c, g, or t
  misc_feature (979)..(979): n is a, c, g, or t
  misc_feature (993)..(993): n is a, c, g, or t
  misc_feature (1004)..(1004): n is a, c, g, or t
  misc_feature (1063)..(1063): n is a, c, g, or t
  misc_feature (1194)..(1194): n is a, c, g, or t
  misc_feature (1251)..(1251): n is a, c, g, or t
  misc_feature (1288)..(1289): n is a, c, g, or t
  misc_feature (1291)..(1293): n is a, c, g, or t
  misc_feature (1299)..(1299): n is a, c, g, or t
  misc_feature (1304)..(1304): n is a, c, g, or t
  misc_feature (1308)..(1310): n is a, c, g, or t
  misc_feature (1317)..(1318): n is a, c, g, or t
  misc_feature (1339)..(1339): n is a, c, g, or t
  Peptide Sequence Number=SeqID_8601
  Probeset Number=SeqID_15626
ncgaggtaggaggtagcgtgagagtatgagacggataacgcaacctgcgcgtgtatttgcgcgcgcgccgcgccacgcgctagctggtagggtacggtgtggcggttgaatatgattgattatgttcgagcgagtgtgtaaccacggaatgtccacatatctctagtgctcgtatactatcgcgcgtggaagggtcgtgtctgtttatttttcgtctacccgcncacgctcgcatctttatgacgtgccgcgccgcgcagttcgacaagatacatatctatcgcggatgccgtcgcgtgtggatgcgcgcgtgtgggagagcggtgaggtgggtggggacgacactcttagtgtgattctataatctgtgtatacgcgctgctctactcgttgcgcgtcgcgctccgactggaccatgactcatattgtatgtaatagatagtatcagtggagagaagcgatgaattcataacacactaaaagagatggagggagtgtggaggagtgtgtttgtgtgtgggtgngttatgtatgtctttccagctccagcgcgcatatctagtccgagtgctggtctccccacgctntctcgccctgttgcgttcgttctcgtatcgatgttgagatgaattgcatccatggcgttggcgccgtgtctgagattcatatattttgttntttatatctatcctttcttcacactttcctcacatngattatgtaggcagcgagtagagaagagagcggcagacctgatggcgactctcttcctcatcttactatttgtcagctcgtagtggatnaggaattagtactggattctggatttgaatnttaccgcccgcacgctcccctgcaacgactctcggataagtacactagaatagatgacgattgatagttgtgtcgtcctancatcatctcctcactaccctaccacaagctatgaagtaaccaacgacactcgagtcaacatcancaaattttactctnttacctcctcncacgctcgtacttgcagcgccccctatgcgtcgtcgtgattgtgatatagaatatcgcncaccacaccccacacaccctcaacaccctccttgctagagactcacgctggaggaatgagagcaagagagggaggtgttggttaatataaacacatcccaaccaatcaatgctctctcccttctcgctgcngcgagggagaaccatctaaaatgtatataggagaaggcctgtgtcatgtgtgtggtnggttttgcggtgtctccagtgcgggcggcctccttanntnnnttcctntcgtnctcnnnaaaaaannaaaaacaacaaaaaaaaaaan

SEQ ID NO: 5848 - DNA, 1054 bp, Glycine max
  misc_feature (1054)..(1054): n is a, c, g, or t
  Probeset Number=SeqID_15627
gagtcagctacgtaggccccccccccaaaattatataaaacaacattcagataacatgaatcttaaagtattcatccttctcttatgcgtttttgttgtctccatcaaagctaattatacggattatgatgagtttagctgcccagcctgcaaatgtgctaatagtacaaatgattatgcgtttactagaggtgaagtctttgctttatgtgtccactacatagcaagtgatggaggtcttattagcagtcaacgagcagtttaccccataaaagttgatgaatatgctgtagttaagttaattgatgctcaaacaaaatatgctttttctgattatgataacgttaaaattggtcatccaagctcatggatctgtcaaatccttccccatagcttttgttaacaggacaacagagggtatacaatcttatgcaaagaactactccgctgtgatacaaataaacaagggtgtagtacaaaatgttacttgggataataaatgctcgacttgtgactttaataaatgttataaagcttattacaatgggacattgtttgatgctgtgtgcttcgaagatgagtgcataaaaccttctgaagttaagcatgactgtgatcctcagatttatatatcatggattggctcagataaagatgatgagaaaatgactagtgctggaatgagagtcgctagatttaatcaattttcatggaatcagataattaatgatgctcaaatttatatgaacacaaatcaagttcttgctgaaaatgctgagtctcaggatttcctaattgagacaaaatagaaaagagaataaaataaaataacaaacaatatgttcatgagagaatgtaaaggttaacaagaggagatacatcttaatgtatatttttcttgttaagattgagacttttttataaagtagcattcattatttattcaagagatactctgcaatcacaaacttgagaaagtgtgaatatcttcgtttataaaatgtttgatttattaaaatgcagaaaactgttttagaaaaaaaaaaaaaaaaan

SEQ ID NO: 5849 - DNA, 735 bp, Glycine max
  Peptide Sequence Number=SeqID_8602
  Probeset Number=SeqID_15628
atcaaaacgagcgccgccagagtccaaaaatttccccttcttaagccgatctcgccgcaccatcttcgccgcgcacggcgccgtcagccgaccaggtcgccgccgcgtcgtctgctcctccgctgacctcatgcctccagttccttccccgtccccgtcgccccttctctcgagccgccggctggtgctctctgttcccccgggtcgtccactccgcgccgtcgattcgaaccaggagcggcacgggtagaggcgcagggcgaggagcgtccgccggaggtgctcgatgccccccttctacatccattgtaggcgctcctccgtcgctcctccccctccatcgtcaggaggggctcggctgcagttctactccaggctccgcatccaagcagttgccaccgatgggaatacagccagtggacaggttttgcttgtcagcgaccggaacaagaacaagtcaatgcttatctgtacatattcaactttgtggatgattggaggctttgtgttcatagtttatatgggtcatctttatatctgggccgtggtcgctgtattggtctatcattcatctaccggttaattgaccatagataggttatggcattaataggatatattttgcttttttccttcacagaagagattattattaggataacaatggctcgatacattgcttgacagaatgattgagattaactatgagggagtttattcctagcttctagcccc

SEQ ID NO: 5850 - DNA, 1591 bp, Glycine max
  misc_feature (10)..(10): n is a, c, g, or t
  misc_feature (147)..(147): n is a, c, g, or t
  misc_feature (433)..(433): n is a, c, g, or t
  misc_feature (525)..(525): n is a, c, g, or t
  misc_feature (543)..(543): n is a, c, g, or t
  misc_feature (1057)..(1057): n is a, c, g, or t
  misc_feature (1249)..(1249): n is a, c, g, or t
  misc_feature (1448)..(1448): n is a, c, g, or t
  misc_feature (1466)..(1466): n is a, c, g, or t
  misc_feature (1545)..(1545): n is a, c, g, or t
  misc_feature (1591)..(1591): n is a, c, g, or t
  Peptide Sequence Number=SeqID_8603
  Probeset Number=SeqID_15629
gttatataangaggttctgatgagacagactcaatctcacttatgataaaacaaaagaaaaagagaataatatacaacccgtaactggcgacgccgattttatccacgtattaatagacactcattcctatatatgatatattatcncattatacaattgaaataggaggagtagacgtgcgattgcgctatcgctcgtcaacacggatcaggagatcacacgccctcacatccgcggtgcgtcctgctctgtcacgcacctatgtctctctgcggcgtgtcttggcagtatgccgtcgatgagagagatggcgacttacccgtctatagtgagtagtgcgcggactttacacctctataaagatataggcctactcatcaagtgagaaccggacaatagagcgttgaatagaagagtaaacacctagtattntcggtattgatctgtctatgtgtatatactacagataatataacataactgaaagatgtttgcagtataaaatatcatcatataataggcgncagatatatatgataganctgatatacacatcgtcccttgttcatacctatttcattaattctatccacacctcagagtgatgtgtgcagcgtaacgcgcctacgtgttattcaatgagtgcacatcaccctaaaatagacggacagatgctctcctagcactacgccacattaagaaaaatatacctaattcacttcatatctatttactctccactactcgtactcagctctgttgctgaactcctgattctaacacttgagcgaagctactatgtggtataatagtgtacgtactcatcgacgtgactaagcacggtcgtgaaagctactatcgtattttatagcacgctattacgccgtgccacgatcatacgatgacgactatgtgacagtgtataatgataatatctctactataaatagtatcttgtacctgacggagttgtcgtgcgtataatgagcgatctacacatcacacatagcaggcgatcttgttgtcatatacataattgcctattaacgcagcctngtgcgtgtatgtgcagtactgcacatactacacgatgtgtagtgaccagatatgtagacaactatgacggacgtataacatacgattgacacacatctctcgtcgtcttcctcctcagcgcgctgtgctgtctatactcatacatctcgcgtgtgctatgaatgtatgagcctgttgttatgatctaatatntaatatgagtgacgacccgatcgtgatgtacagtgtgatatagtactatgctggcactctcttgtaatgttttgaatctctctctacgacgtcctgattatcggtcgtattcgattctctgcttgtcctcgtacctctgctgtctgtcaccgcggtcgtgagtgagtgtggctatcgcattctcatcgaatcgacgatngattagcatatgtgaatncatatggctcacggacgcgctaattgctgacatctaccttgtgtggtcgtctcttctcgccacgccactttatccaccnctcgcgtctgtcggaatctagtacatgtgtacatacactctcctcn

SEQ ID NO: 5851 - DNA, 740 bp, Glycine max
  misc_feature (11)..(11): n is a, c, g, or t
  misc_feature (60)..(60): n is a, c, g, or t
  misc_feature (601)..(740): n is a, c, g, or t
  Probeset Number=SeqID_15630
ggggggggggngggggggccgcgcacccgcggccccggacccgcgcgccccggggtgggnaaacgatagggtacgggccacccctcgatcagctacgtaggccccccccccccccctgtttttgggtcggccctacttttcagaaccttaggcccactttggcaactacttattctatgctatgctctattattttttttttaatttacgctatatttggctcacttattactctataaaaaatattcgggtactaaaatgttaaatgatacatgacacatagtgagagataaaagaaaaacaatataaatattattagagtatgatgtgattaaaattgaaaaaaaattatcaatgttaattaagataactttcacctaacaactcttgttaaaaataattttatattatttctcagattttcttatgatgtcacatcaagattactgagacggaaaagaatgagagtgagtgtttcgcggttttttttttttacttcacaattgatgcatgaatgatgctcaccaatgatatttttttctttcttttcccccttttgtctgagtcaccatgcaataacggaaaattcagctcgggattnnnnnnnnnnnnnnnnnnnnnnnnnnnnnnnnnnnnnnnnnnnnnnnnnnnnnnnnnnnnnnnnnnnnnnnnnnnnnnnnnnnnnnnnnnnnnnnnnnnnnnnnnnnnnnnnnnnnnnnnnnnnnnnnnnnnnnnnnnnn

SEQ ID NO: 5852 - DNA, 626 bp, Glycine max
  misc_feature (626)..(626): n is a, c, g, or t
  Peptide Sequence Number=SeqID_8604
  Probeset Number=SeqID_15631
aaactcctcctcccgtccgcccgagaaagcccaaccatttctccgcatccgcctcggcacgcggccgccggcacacgctgcgcagggagtgagaaaggccgcgatggaggatgactcgccggcgacgaagacggagacggccgacgtgacggccctggacgcgggcaccctctgcggcaccatcgtccccacctgctacgacatgccccgggtggagcgccacgactcgctcgcgagcctcctccgtacgctcaagatgtgcggtagctacggagtcactttcgccgccgtcttaggactctacatcggcctggagcggattgtgcaaattcagcgcaagaagagcgacttcgacaacggggccatcggtggcttcgtctcctgagcctccgactatggctaccgaggacagagcatcacctctgccctcattggagtatctcgcctgagattcacgtgtgccaccctgtacgtagatgagtatactaccagagagcgcgatgtcaaacggcacatgcatacacccggcaataaaggccgagcctgctcactgaccatgcccgctactagaacacagacatggagaccagctcgggaatttttgagctcgctgaggctgccacgan

SEQ ID NO: 5853 - DNA, 1197 bp, Glycine max
  Peptide Sequence Number=SeqID_8605
  Probeset Number=SeqID_15632
aagcaataaatccgaagccatggttgatgctgctgttttggaaaaattggaagctggtttcaccaagctcgccaactccgactcaaaatcattgttgaagaagcatttgtcacgtgaagtctttgacaagcttaaaaacaagaagacctcctttggatcaactttgttggactgcatccaatcgggtattgaaaacttggactctggatttggtatctatgccccagatgctgaagcctacacagttttcgctgatattttcgatccaatgatcgaagaatatcacggttttgccaaagatgccaaacatccaccacgtgatttcggtgatgtcagctcattcccaaatgtcgatccaactggtgaatacgttgtgtcaactcgtgttcgttgcggtcgctcaatggatggttattcattcaacccatgcttgaccgaagctcaatacaaagaaatggaagagaaagttagctcaacattgagcggtttggaaggtaacttgaaaggcaaatactatccattgactggaatgaccaaggaagttcaacaacaattgatcgacgaccacttcttgttcaaggaaggtgatcgcttcttgcaagccgctaacgcatgccgattctggccaactggtcgtggtatctaccacaatgacgaaaaaacgttcttggtctggtgcaatgaagaagatcatttgcgtatcatttccatgcaaaagggtggtgacttgggtgaagtctaccgtcgcttggtttctgcagttaacgacattgaaaaacgcatcccattctcacatcatgaacgtcttggttttctcaccttctgcccaaccaacttgggcacaaccatccgtgcttcagtgcacattaaagtgccaaaattggccaaggactacgccaagttggaggaagttgccggtaaatacaatttgcaagttcgtggaacatctggtgaacattcagaatcaattggaggaatctacgatatctccaacaagcgtcgtttgggattgactgaatatcaagccgtcaaagaaatgtcagatggtatccttgagctcatcaagattgaagctagcttgtaaatggcttgagacttcccaccaactttgcccaagagttcgattgattcgaatttgtttttattttcacactcaacaatcagcaaattggcaataaatgaattgaaaagaacaac

SEQ ID NO: 5854 - DNA, 1501 bp, Glycine max
  misc_feature (12)..(12): n is a, c, g, or t
  misc_feature (24)..(24): n is a, c, g, or t
  misc_feature (80)..(83): n is a, c, g, or t
  misc_feature (85)..(95): n is a, c, g, or t
  misc_feature (235)..(235): n is a, c, g, or t
  misc_feature (290)..(290): n is a, c, g, or t
  misc_feature (360)..(360): n is a, c, g, or t
  misc_feature (384)..(384): n is a, c, g, or t
  misc_feature (395)..(395): n is a, c, g, or t
  misc_feature (457)..(457): n is a, c, g, or t
  misc_feature (530)..(530): n is a, c, g, or t
  misc_feature (562)..(563): n is a, c, g, or t
  misc_feature (719)..(719): n is a, c, g, or t
  misc_feature (771)..(771): n is a, c, g, or t
  misc_feature (780)..(780): n is a, c, g, or t
  misc_feature (928)..(928): n is a, c, g, or t
  misc_feature (950)..(950): n is a, c, g, or t
  misc_feature (1015)..(1015): n is a, c, g, or t
  misc_feature (1032)..(1032): n is a, c, g, or t
  misc_feature (1146)..(1146): n is a, c, g, or t
  misc_feature (1182)..(1182): n is a, c, g, or t
  misc_feature (1258)..(1258): n is a, c, g, or t
  misc_feature (1269)..(1269): n is a, c, g, or t
  misc_feature (1282)..(1282): n is a, c, g, or t
  misc_feature (1336)..(1336): n is a, c, g, or t
  misc_feature (1347)..(1347): n is a, c, g, or t
  misc_feature (1367)..(1367): n is a, c, g, or t
  misc_feature (1373)..(1373): n is a, c, g, or t
  misc_feature (1377)..(1377): n is a, c, g, or t
  misc_feature (1390)..(1390): n is a, c, g, or t
  misc_feature (1477)..(1477): n is a, c, g, or t
  misc_feature (1501)..(1501): n is a, c, g, or t
  Peptide Sequence Number=SeqID_8606
  Probeset Number=SeqID_15633
ttggtcttcctnctcctccttctnatttctgttatcttcttactctacctgtttgtgttatttaaaaaattattgatatnnnntnnnnnnnnnnncccatatgtgtgggaggacggcagagggccccacccacaccaagatacaagaaacaaagatagaaggcacgcacaccaccccccctatctggtggtagtgtgatggatcgtcaaaaacgtgtttatatacttcgagatanatgtaatgtgtgtacgtagatatatagtcgtgatttgttgacgatgtgagtcaanatagagaaacataacaatctcatctatatcgtcgcgtggcgtgagacatgtcatcgtaagtgagggaacngtcgcgtcatgcgggcctaacaangtgagactgtntgggatatcgtgagatataatcaactccggtagaatagtcgatactcgttgtgtaacactcncaactgtcggaacgcttgctcactaccatatgtgagttaaacgtgctgacataatcgggtggggatatgcccntatagttcgtctcgttatctggcgagtatagnnacacacacaaactacgcgcgccgcactcgcggggcgcactaaataaacaagaagaataagagggcgaacaatgtggttgtgtctagtggtcacacgcgggcagagatcgcgctactagaaggtcggtctctgacatgtacgtggctgtgttactcngcgtgatatggtattgtagatagtggttgtgatatatgaatggggctagtcntgatggtgnaggtgagcgatctataactaggtggagttgtatgatagtgagggtgatatattggtgataaaatagtggggtgtgagtagtgcgcagtacaacccacggcgtgcgggattcatacgagtgatgtattgtggatatgagattagtggancggataccaccaccgcgctcantcgtgatacagatccgtgcgccactccgtacagcataatcgcgccactactcgccgctcacaacnacgcacagataaataanatgagacgatataacatagcaatgcaggtacgagggtgtcacaagcgcattggcaatacacacgcgttatttcgcaagaataacatggtgcaggtcatatcgtggaacaatacngtcgggcaatatataccggttacgtagtaatacgtngctttggacgaattacggtggtcatcctgcgactacaactgccgtgcacactcgacatagatatcgctgctctacnccagcaacatngcgcgataagagngctgcgtaatacagaagtgtgtgtgaatagtgctgtacaataatacgcggaganagagatatctntggcgtagacctattgctantagcgnacanaaaacttaagatntgcggtgtgataatacggcgtggacacgtgtttatatgcgtgtgctgatatcactacatgaggagtgacacatacaatatgtggggnggtagttatctcgatctcactctn

SEQ ID NO: 5855 - DNA, 1570 bp, Glycine max
  misc_feature (30)..(30): n is a, c, g, or t
  misc_feature (728)..(728): n is a, c, g, or t
  misc_feature (797)..(797): n is a, c, g, or t
  misc_feature (1251)..(1251): n is a, c, g, or t
  misc_feature (1334)..(1334): n is a, c, g, or t
  misc_feature (1470)..(1470): n is a, c, g, or t
  misc_feature (1490)..(1490): n is a, c, g, or t
  misc_feature (1570)..(1570): n is a, c, g, or t
  Probeset Number=SeqID_15634
gcgacactaggatttaggatagggcacgtnattaatcacgcacgaaacacatggaacgttgcgaaattggggtagcgggggcccccccctcgcaggtgcttttctccataagaataagctgttatttctttattctttatatttcgcagacaaaacacaaaaaaagacaataattcgatatttcttgtgctatcagctggggccataagcgccttgctttgttctcccccccgcgagagatcgcggcgtcaatacgctcgacgaaacacacaacagctacgttagatcagcaatccggccctcatccatgtccgcccctactcccctacttttcagcccacgaagaggaaacataacattgacggctcgcacctctatactgtcatatccctaatccaaaggtgaaagatgggggcgcacaaacgcagagctacagaggaaagaagcgaccgctacgcgatcgtcccatccgcttcgcgatagttaggaacgtaggcatggatagatgttgattcacagcggtcacagatctcaaaaatcgctatacatcacatatacaccggttgcttaagcggtgagcgaggatctgcctccgcgataatgacccttgcatgtcctcttgttccgcgctcgggcacaacaccgcgtagtaccaccccaacgtaattatactgtactaaatatataagtcgacaatcatcgcctctacgataaggcggctctgagtnaacaaagaaggtactgcccgtacgctacatgaagacaagcatgaagaacaagacaatttccaagtcagnacccttacccacacccacagaagacttgtatggttctactcgtgcaacctagatcaaatctcgtggacagcacacccacgccgcccaccacaagcatccatatagctaccaacggacgacccacctgattctcaaacactcaatacgtgcaggtgatgcgacctttgtctctatgtcaaatcctctggccatagacgacatcatgtttgagaatgctatttacctccctttccccttacgctatacaaacgtcttatgagatgttcaatgcgtggtagtataaacgtacggtgtatcaaaggacgagcgtattctacacttgatatctctacataagattcccgagccgtaaccgcgggagcgagcgcaaccgacctctccagttatcagtaccgccctctatagacgccgagatacctttcacgacacccaacgcgggtatccgcgtctcccngcgaatactagagctgagtgtcctagagacgaaggccgcggaccgaagtcacgcaataatctactcagagctacccctcgtgncgatcagccctctacagagagtctcactcggaacgagctacaatgtgatatgtgtagacgcggcgcaaatacaccaggagattgtgtacgtggctacctaacatagagacactagtgtgacatgtatatcacacancacacgatagtcgatatccncgagttgcgaccctgctctcgtcacactcccgtctggatgcgcgacacggcgctagtatcaggctcacgcataattgcgn

SEQ ID NO: 5856 - DNA, 822 bp, Glycine max
  misc_feature (36)..(40): n is a, c, g, or t
  misc_feature (801)..(801): n is a, c, g, or t
  misc_feature (822)..(822): n is a, c, g, or t
  Peptide Sequence Number=SeqID_8607
  Probeset Number=SeqID_15635
aatttcgtcatttgttggttttgtatcgttaaacgnnnnngccgaattgggtccgggcccccccctcgaggcagctacataaggaccccccccccgcttttgctgaacattgcgactcaaagatgagaaattagaggcatttcggtggcagttgttgagaacagaattagaaatgaaacagatgcgggcacatgtggaggggcaggtaaaggatgtgacacagcttaaacttgaccagatgagactggagaccttactgttggagagagaagattcaactgacttccctgaaagagcaatttggattaaaattgaaggccttaaaaaattacttaaatttgccttcacaatctttagaacttccccaatatgctggctggtccaaaatcaaggggtgcccgagaaaacaaggtgaaaaaaagcttataaaaatggaaacatttggtttaaagaaaaattggaagagcgcagcccgggggttgcccccctggcccagcttagacaggggttatttaaacactcgaccccccacaaaatccaactttacgaaaaaaacgcgtttttctcccgcggtaaattgaccctctcttttgctaactcaaaatgcccccccaaaactacaaattatggttttccgaaacagaaagtccccccccgcccaaaagctctttatataaacaatagccgccccctttagagagaggtattctccaccaagtgcgtaaactctccccctctccccgaggggcggcctccccctcccttctttttgttacagccttcaccaaacgatcgacctcnattttatcacccagacaacan

SEQ ID NO: 5857 - DNA, 346 bp, Glycine max
  Peptide Sequence Number=SeqID_8608
  Probeset Number=SeqID_15636
ttgcgctatggcaaatgggtagtgacatatgtagagtggtcagaagaggattacctattctatgctaatggttgcggttatattttgtcattagatattgtacgctatattgtatctgaattcgatatgcgtaaattaaggttgtttaagatggaagatgtgagtatgggaatgtgggtggagtaatttaatagcttaaaattagtatattacttgtatagcttcaagttctgttagtttggttgtatagaagattattatattgtttattattaattgttcaggtagatgatgtgttcgtgggataaactgtaaaggaatttaaggtcttaatgctgtaatatga

SEQ ID NO: 5858 - DNA, 473 bp, Glycine max
  misc_feature (1)..(1): n is a, c, g, or t
  misc_feature (381)..(381): n is a, c, g, or t
  Peptide Sequence Number=SeqID_8609
  Probeset Number=SeqID_15637
natttcagccggaaggcggcacctctggggatatgggagctacgaggacgaaattgaaggtttcagtgacgaggagccaccacgaggcatgacaccatcagttggtagttgcaggacttctagcaattcaaaattctctcttctgaaccgcagtgtactgatgtctcaatcaacaagcaaagcaaagacaacaaaatctacaccaatgtcaaattctgttgcttcaaaacctctagaagaaagccgcacgaagaagctacttcctaagataacaataagcccactgaggaaaatttattttgttgattcggacactgattcagatgataacaggaaacaaagtaaaccaaagaagcccatgagtcctatcaagaagagacnggaatccatgcacaagtatatgcagaagaagcctatattgcagcaaaacagtaaatctgaagggagcactgttgtccagaagagtgaagata

SEQ ID NO: 5859 - DNA, 547 bp, Glycine max
  misc_feature (12)..(12): n is a, c, g, or t
  misc_feature (110)..(110): n is a, c, g, or t
  misc_feature (301)..(301): n is a, c, g, or t
  misc_feature (409)..(409): n is a, c, g, or t
  misc_feature (509)..(509): n is a, c, g, or t
  misc_feature (542)..(542): n is a, c, g, or t
  Peptide Sequence Number=SeqID_8610
  Probeset Number=SeqID_15638
tttttttttttnttttttatttgaatttaacgaagaatttttattcttctctggagagtctaaaccatatatatatagctaacacttatcaaactcttatataataccgnagtaatagtaatagagtacaacacagagtttctaaaagtaatataacggactgtagataattagtagtaaaagtaaaatagtatatatctgcttaagttcaattacaatatatatattttcaataataagtacttacaagcaacaaagccttttatttttttgccaatatttgtttgtgtaaaatccttanaagccaatcttgtcagtataacatctcaatattttcttgtgaattctgtatctttaattagtaaataatagtttaatgtatctgtatataacgaagacaaagtactgnctataaacacaacggtcacttctaatcaccttctcggtaattattatagaaggaccttttcattgaaaccagcttcctttactgataagggttcttccanccttgttgaggtataaggaagtataataaaaantcaca

SEQ ID NO: 5860 - DNA, 388 bp, Glycine max
  Probeset Number=SeqID_15639
tcgagtgagagacaaagacggtgtaagaaatgctggtcggcaggtgatagagcgtgactactcgcgcatgaccctggacttccacacgaacaagaagcttttggaggaagtggcgataatgccgtcgaagaggctgtagagcaagatcgcgggagtcttgtctcagctgagtaaacgcatgcagaagggccttgtaggcgggatttacctcgagctcgagtaggaggatcgctagcgccgcatggacttggttcccgacgtctccgccgtcaacgccgaccacgtggaggtcgacagagaaaccctcgacatgcgtcactcactctgtatcaactacatgctcgggatcagccaggttgatgctgtccgtgttcagcagagctgcccc

SEQ ID NO: 5861 - DNA, 418 bp, Glycine max
  misc_feature (49)..(49): n is a, c, g, or t
  Peptide Sequence Number=SeqID_8611
  Probeset Number=SeqID_15640
tgctgttaccccagtcaaaaaccaaggagctacttgtaatagctgttgngcattcacagcagttggtgcggtggaatcactagtcaagataaaaacaggtgatctaattttcttatcagaacaagaaggtggtggattggactacatccctctagaagggggtgccggtggagaaatattccacatggctatatcttacttccaaaaaaatggatccatctcgaaaaggaatacccttacccctggtgaccaaggtaaattggacttcataaaaaaaaatgtttttgtacctattgtgggccccggagaggttcctaaccacttttgggaaacctttaaaaaggggatttcaaataaccccttggcggtcccttttcccccgaagactattaaatttccaatttatctcccgggggtt

SEQ ID NO: 5862 - DNA, 2263 bp, Glycine max
  misc_feature (13)..(14): n is a, c, g, or t
  misc_feature (20)..(23): n is a, c, g, or t
  misc_feature (25)..(25): n is a, c, g, or t
  misc_feature (27)..(29): n is a, c, g, or t
  misc_feature (34)..(38): n is a, c, g, or t
  misc_feature (42)..(42): n is a, c, g, or t
  misc_feature (91)..(91): n is a, c, g, or t
  misc_feature (94)..(94): n is a, c, g, or t
  misc_feature (101)..(101): n is a, c, g, or t
  misc_feature (128)..(129): n is a, c, g, or t
  misc_feature (188)..(188): n is a, c, g, or t
  misc_feature (198)..(198): n is a, c, g, or t
  misc_feature (233)..(233): n is a, c, g, or t
  misc_feature (254)..(254): n is a, c, g, or t
  misc_feature (271)..(271): n is a, c, g, or t
  misc_feature (296)..(296): n is a, c, g, or t
  misc_feature (358)..(358): n is a, c, g, or t
  misc_feature (439)..(439): n is a, c, g, or t
  misc_feature (504)..(504): n is a, c, g, or t
  misc_feature (625)..(625): n is a, c, g, or t
  misc_feature (641)..(641): n is a, c, g, or t
  misc_feature (730)..(730): n is a, c, g, or t
  misc_feature (785)..(785): n is a, c, g, or t
  misc_feature (943)..(943): n is a, c, g, or t
  misc_feature (959)..(959): n is a, c, g, or t
  misc_feature (1100)..(1100): n is a, c, g, or t
  misc_feature (1145)..(1145): n is a, c, g, or t
  misc_feature (1169)..(1169): n is a, c, g, or t
  misc_feature (1258)..(1258): n is a, c, g, or t
  misc_feature (1285)..(1285): n is a, c, g, or t
  misc_feature (1356)..(1356): n is a, c, g, or t
  misc_feature (1371)..(1371): n is a, c, g, or t
  misc_feature (1445)..(1445): n is a, c, g, or t
  misc_feature (1502)..(1502): n is a, c, g, or t
  misc_feature (1515)..(1515): n is a, c, g, or t
  misc_feature (1557)..(1557): n is a, c, g, or t
  misc_feature (1581)..(1581): n is a, c, g, or t
  misc_feature (1632)..(1632): n is a, c, g, or t
  misc_feature (1636)..(1636): n is a, c, g, or t
  misc_feature (1764)..(1764): n is a, c, g, or t
  misc_feature (1799)..(1799): n is a, c, g, or t
  misc_feature (1815)..(1815): n is a, c, g, or t
  misc_feature (1819)..(1819): n is a, c, g, or t
  misc_feature (1840)..(1840): n is a, c, g, or t
  misc_feature (1848)..(1848): n is a, c, g, or t
  misc_feature (1858)..(1858): n is a, c, g, or t
  misc_feature (1860)..(1860): n is a, c, g, or t
  misc_feature (1876)..(1876): n is a, c, g, or t
  misc_feature (1883)..(1883): n is a, c, g, or t
  misc_feature (1885)..(1885): n is a, c, g, or t
  misc_feature (1932)..(1932): n is a, c, g, or t
  misc_feature (1945)..(1945): n is a, c, g, or t
  misc_feature (1950)..(1950): n is a, c, g, or t
  misc_feature (1959)..(1959): n is a, c, g, or t
  misc_feature (1965)..(1965): n is a, c, g, or t
  misc_feature (1971)..(1971): n is a, c, g, or t
  misc_feature (1973)..(1973): n is a, c, g, or t
  misc_feature (1990)..(1990): n is a, c, g, or t
  misc_feature (2134)..(2134): n is a, c, g, or t
  misc_feature (2151)..(2151): n is a, c, g, or t
  misc_feature (2161)..(2161): n is a, c, g, or t
  misc_feature (2187)..(2187): n is a, c, g, or t
  misc_feature (2252)..(2252): n is a, c, g, or t
  misc_feature (2263)..(2263): n is a, c, g, or t
  Peptide Sequence Number=SeqID_8612
  Probeset Number=SeqID_15641
tccggtttttttnncttttnnnntngnnntcctnnnnntttntaaatatcatacaagtactagaacatatcatatcatcttatattcactnatnatcgaantttctacaacatagtcggcgcggcccnnctcctcttttacatcacaccatgcgaccacacacacagcacgccggaccagtagatgantgccgctacncatgttcatactatataatataaatcatgactgtnataatcaccaccacacagggnaggacatagcacaagcngcaataatacgaccactcctctaanctctcatactccacctcatctctcacacccacacaacacacaccacattcaactcatcccantcatacactaacacatacgacagctatataatctgtcacatacgtctctttctcccctccacacaatcctacactatcatnccacacatctcacgaactatgtgtacatattctataagagctaattcacacacattatattaatnctaatgttaatactatgacaatacactactcttatcatcctctcacgactcccaccaacacgcgcccaacacacgctacgctcctctcatctcactcgtcacacaccacctcacacgcgcncggccacactcaaccnaccactcatctccacctcacgccaacactccacgcaccgtccctctctccgccgcacccatactccttcaccaacagcctcctacatcncacaaacctcacatcgctctgaaacactcacacagccaccacacacaacacacgnacacctcaacaccatcgtcgatatccactctatgatactaacgacgacgctcaattctgctcctctctacccatctgatcctctctctttattctacacactcatatactattcttcctccccgctcgcactacatacatacaactcacactgatagnaatatcattcacacgnccaatactcaatccacgctaactctcgatcacactctatacactatatactaacaaccgctctactccgcccaccatacctcacaccactacagaattcttcactaccaccgcacatagtacagagcacacactctacgcnactgcactgcacactcgaccatcgtgctcatccaccacatctacntccactatcatatcagctctactncacaccactgcggctcacgctcattccctatcagcgcagacgacctgatctacagacgcactacctcgtcaacgtacgagtcacgatcnatacacctacttatactacatactctnctatctatcatcacactcactcacaccatcaccgtcacactctacaacccacatctcaccgctccatctcncagtgactgacatcntgatctcagtaactataatcacaatacatactcgcgtcacaacacacactcctcgactcgcttatacgactcangtatatatgctatacgaatctactagcatcctaagcagactatccatcgtacatcgntatcctcgctctncacatgacactatcatcaccatacgtactatctctacacaanccgatgctacgcactacatcacantccaatctcaatacacactactacacacgacacacacgcgtcgatgacatnactncactctcacgatcactactcacatcatcgagacgtcactatcgatctactaccatcactatcgcaccgatatctgatatgctaccagatgttctccagtcgactgctacatagcacatctcaagtcantcaacctactacactacatacgatcacatcatcancataaagcgcacatcnatcntgagcagcgtatcatgtgcantcatcatncatgatcacncncaactaactcccttcngcagcancnacatcaacatgtacgactgatcgtactcgctgctacgacgagctgcnacctagcaccatnatagnctgctatangtaccntgatanancattcctaatttaccgntgatattccccctccgtgcgacactaccacctcgtgctgtcgacatgtcatcctacgtcagcgcccgtcgtcactagtacagcaaccatatcttcacagccatcccatagataccactccatcattaatcgtgaatcacctgcnactaatgctatgacatncagcaccacnactcactactatactcacatctcccngttgatacctataatacatgacatgatgaataatacaccatcgctctacgtccctatcactaccnacgctgctccn

SEQ ID NO: 5863 - DNA, 470 bp, Glycine max
  misc_feature (11)..(11): n is a, c, g, or t
  misc_feature (17)..(17): n is a, c, g, or t
  misc_feature (19)..(19): n is a, c, g, or t
  misc_feature (29)..(29): n is a, c, g, or t
  misc_feature (31)..(31): n is a, c, g, or t
  misc_feature (43)..(43): n is a, c, g, or t
  misc_feature (48)..(49): n is a, c, g, or t
  misc_feature (54)..(55): n is a, c, g, or t
  misc_feature (59)..(60): n is a, c, g, or t
  misc_feature (73)..(75): n is a, c, g, or t
  misc_feature (86)..(86): n is a, c, g, or t
  misc_feature (89)..(90): n is a, c, g, or t
  misc_feature (95)..(95): n is a, c, g, or t
  misc_feature (97)..(97): n is a, c, g, or t
  misc_feature (100)..(100): n is a, c, g, or t
  misc_feature (106)..(106): n is a, c, g, or t
  misc_feature (117)..(118): n is a, c, g, or t
  misc_feature (132)..(133): n is a, c, g, or t
  misc_feature (135)..(135): n is a, c, g, or t
  misc_feature (138)..(138): n is a, c, g, or t
  misc_feature (141)..(142): n is a, c, g, or t
  misc_feature (145)..(145): n is a, c, g, or t
  misc_feature (155)..(155): n is a, c, g, or t
  misc_feature (166)..(166): n is a, c, g, or t
  misc_feature (174)..(174): n is a, c, g, or t
  misc_feature (177)..(177): n is a, c, g, or t
  misc_feature (179)..(179): n is a, c, g, or t
  misc_feature (199)..(199): n is a, c, g, or t
  misc_feature (207)..(208): n is a, c, g, or t
  misc_feature (218)..(218): n is a, c, g, or t
  misc_feature (245)..(245): n is a, c, g, or t
  misc_feature (298)..(298): n is a, c, g, or t
  misc_feature (303)..(303): n is a, c, g, or t
  misc_feature (307)..(308): n is a, c, g, or t
  misc_feature (337)..(337): n is a, c, g, or t
  misc_feature (380)..(380): n is a, c, g, or t
  misc_feature (387)..(387): n is a, c, g, or t
  misc_feature (440)..(440): n is a, c, g, or t
  misc_feature (442)..(442): n is a, c, g, or t
  misc_feature (454)..(454): n is a, c, g, or t
  Probeset Number=SeqID_15642
attgtggcgtngtaggntngatcattganangaatgtcgaaancgacnngaacnnatgnncacgtagctattnnntgtctcttctntcnnctaantntgntactcnaactaatctgnnaatcatccacatgnncntanatnnccntgccttcacngttactgattnctgagttntanangactctgcaagattatcacnttccattnnatgtcattcntgcactggagtactgctcttgtgtggnacacggatggaactctgctgatatgccgtccgtattcaagatgatcaatggantatcnatanngtctaccctcctggttcaaagccgtctancctagttcgcacctgaccacgtgtttatctccaatgcgctcanatggaanactgatccacttctgatgactacataccatcactttggggaatggattcgcgncnaagaccccacancacatgagacagcctt

SEQ ID NO: 5864 - DNA, 2021 bp, Glycine max
  misc_feature (1)..(1): n is a, c, g, or t
  misc_feature (83)..(83): n is a, c, g, or t
  misc_feature (124)..(124): n is a, c, g, or t
  misc_feature (148)..(148): n is a, c, g, or t
  misc_feature (161)..(161): n is a, c, g, or t
  misc_feature (198)..(198): n is a, c, g, or t
  misc_feature (231)..(231): n is a, c, g, or t
  misc_feature (304)..(304): n is a, c, g, or t
  misc_feature (531)..(531): n is a, c, g, or t
  misc_feature (642)..(642): n is a, c, g, or t
  misc_feature (720)..(720): n is a, c, g, or t
  misc_feature (783)..(783): n is a, c, g, or t
  misc_feature (813)..(813): n is a, c, g, or t
  misc_feature (997)..(997): n is a, c, g, or t
  misc_feature (1147)..(1147): n is a, c, g, or t
  misc_feature (1200)..(1200): n is a, c, g, or t
  misc_feature (1516)..(1516): n is a, c, g, or t
  misc_feature (1532)..(1532): n is a, c, g, or t
  misc_feature (1567)..(1567): n is a, c, g, or t
  misc_feature (1655)..(1655): n is a, c, g, or t
  misc_feature (1664)..(1664): n is a, c, g, or t
  misc_feature (1690)..(1691): n is a, c, g, or t
  misc_feature (1693)..(1693): n is a, c, g, or t
  misc_feature (1748)..(1748): n is a, c, g, or t
  misc_feature (1759)..(1759): n is a, c, g, or t
  misc_feature (1761)..(1762): n is a, c, g, or t
  misc_feature (1784)..(1784): n is a, c, g, or t
  misc_feature (1804)..(1804): n is a, c, g, or t
  misc_feature (1837)..(1837): n is a, c, g, or t
  misc_feature (1843)..(1843): n is a, c, g, or t
  misc_feature (1900)..(1901): n is a, c, g, or t
  misc_feature (1914)..(1917): n is a, c, g, or t
  misc_feature (1930)..(1931): n is a, c, g, or t
  misc_feature (1934)..(1934): n is a, c, g, or t
  misc_feature (1940)..(1941): n is a, c, g, or t
  misc_feature (1944)..(1948): n is a, c, g, or t
  misc_feature (1950)..(1950): n is a, c, g, or t
  misc_feature (1953)..(1954): n is a, c, g, or t
  misc_feature (1957)..(1957): n is a, c, g, or t
  misc_feature (1959)..(1959): n is a, c, g, or t
  misc_feature (1961)..(1961): n is a, c, g, or t
  misc_feature (1963)..(1963): n is a, c, g, or t
  misc_feature (1978)..(2021): n is a, c, g, or t
  Peptide Sequence Number=SeqID_8613
  Probeset Number=SeqID_15643
ncgtagtgtcgtgtcgtgtcttcgtgggtggagtatgattattgttgttggtcgcctgtcgtgttgtattccggtgatcgtanttttgtttgtgttttgattactagtagtcagttgatatatngtagcataatatacatcctattgntgatgtcgtcatntgattacttcgtctcgctcgtattcttcttactcatnagatcatcttgggtatgactataaatgatgcgnctcttcgtgagtcgaggtatactgcatgtctcacgatcatcatatatctcacggattctgcgtctggcgttgnaggaaacagagtacatacgaatgcgcagagagtagtgtgggtcgatatgagtattttatattgacagcgcagtcgatttccttcgtatgcgtcgtaggtactctcaacatacatggcgtgcgacagagtgacgactcagagcaggggagagactacgacaaatatcagtctagtgtgagcgagcaggcatagggccgcgtgagcgtctgcgattcactatccgcttntatcaagtgcgcagataggtgggaggtgcaaaatgagagaaattagacgacgagagaaggaacgagagatagacagaagccgatgtatgcgaatgaagagatagatgcgcncgaggtgaggagatatatgattcactccactaatgagagaacataaacatcaacatcatatgctttactcgtgtatcnagactccgtcagtgtgaggttatataatactgtgttgtattgatatcaatagattataaatantaacgcatatgataataatatatataatantatgatgagcgtcagcgctgatattgtgtatgtggtgagtattagtcatatatgttcataggtctatacaagacgaagtatacaaagatgataaagacgatatagttatacatgcacagtatacagatatatatagttcagtcgccgtcgatatatgacgttatatctatcctactacattgantaccgcgcgtgtgcatgaatatggaagtgtagagatggtggtgcaagagcatgcggtgtgggtgtgatggctgtttgtggtggtgtgctgacagattagtagagcgtatatagtattagttatgtgcgtatgcatcgctattgttatggnggtatatctatataagtgtggtggtgatattagtctttacaatgcactggagnagctttgtcgcatccttgtcggcagtgggtggtgtgatctgaggttgcgctgtatctcacgtcgtgtatatcgtctgtcgtgcattctgcgctccttactgtttatgtctctaactctagtgtctatattacagatattctttactctatcatcgttcatattatcgcccctacgctagtgactcattgtcatggccgatatatattcttcttgagattcgctgcacatcactgtatattctcattattcttatcatcgatcttatcttacacaattaccttttaattcgtattctgcactatttattgtatcctnttatacacgaagcccncgaacatagagacacacatcacaacataaaaaccntagcacgagtaggtgtgctcgtctgagacagaacgatttattacaatgtctattcatatcatacacgagggcacgccacgcgaacganaacgtggcntcaccggccccgcccatgcaagccgnntnatctcgacctcctatcacagagacatacagcgcaggaaccagccagcgttcactngtgtattatantnnattaaggattgtaatatatgtnttactgaatgtacacatgtngtgcattgaggtaaacacaactggatttaagantacatnctataaaataatatatgtataattattatacattaaacaaaagtatataaatactannttattaatggggnnnnaaagtcaaggtannatnttgaannatnnnnnanaannatntnanantaaataaaaattaannnnnnnnnnnnnnnnnnnnnnnnnnnnnnnnnnnnnnnnnnnn

SEQ ID NO: 5865 - DNA, 508 bp, Glycine max
  Probeset Number=SeqID_15644
ggctcgagaacaaataatcatgaataattgtcttagggaagacctaatgccggatttaaacccttgcaattctttatttccttagctaagccaactcttcccatgcccttatcactttttagaacctaacagtttaaattctgtccaaacatgcacttgttacaactttagaacctccttagtactaatacaatgctcaggaaactaggaaggataagtctgactcctcattgatatgaagatgatcctctcatctataaactataccaactgatgtcatgcctatagagctggtgctcaagggtataatgaaagctgtattaattcaaaattacagtactgccacacattattacattgcacggtaatgattacttcctggataacatgttaatgatagaagtttgtcaaaagttctaataatgttgaagaatcaagtaccctttatgcatagtagttagtcccaaatagtggtgtggagtggctgctccccaaaaacgctatagca

SEQ ID NO: 5866 - DNA, 831 bp, Glycine max
  misc_feature (831)..(831): n is a, c, g, or t
  Peptide Sequence Number=SeqID_8614
  Probeset Number=SeqID_15645
ggcaatggtaccaccaatccaaatcctcgatcctctatacctattctttcaatttgttcatcaatagcttcgttctactacttgataccttcctgttatattgctaattaggctttctctgatcaaaattaattaagaatgagcttgaaagctctttttgttgggtgcataatatggttgggtttggtagaattgtcaatcggaggaatagtgagacactacaagtttgatgtggagtacatgatcagaaaaccagattgcttggaacacgttctgatgggaatcaacggccagtttccaggcccaactattagggctgaagttggtgacattcttgacattgctctcaccaacaagcttttcactgagggaactggttttcactggcatggaatcagacaggttggaactccttgggctgatggaactgctgccatctcacagtgtgctataaacccaggagaggcttttcattacaggtttacagttgacaggcctggtacatatttctatcatggacaccatggtatgcaaagatcagctgggttgtatgggtcattgatagtagatttgccaaagggacaaaacgaaccgtttcattacgatggtgaattcaaccttcttcttagtgatgtgtagcacaccatgtcacatgaacagggaggtggcctctctgtcagaccattcatatggattggtgaacctgatactctactcatgcagtgtagaagacgattgtagttgttcgcttgatctgaagtcatgagcacaccgcttccgcaatgccaactgagagagggtgaagaatgtgcgccttagatactgcatgtn

SEQ ID NO: 5867 - DNA, 1444 bp, Glycine max
  misc_feature (23)..(23): n is a, c, g, or t
  misc_feature (25)..(26): n is a, c, g, or t
  misc_feature (28)..(28): n is a, c, g, or t
  misc_feature (30)..(30): n is a, c, g, or t
  misc_feature (34)..(35): n is a, c, g, or t
  misc_feature (93)..(97): n is a, c, g, or t
  misc_feature (99)..(99): n is a, c, g, or t
  misc_feature (148)..(148): n is a, c, g, or t
  misc_feature (410)..(410): n is a, c, g, or t
  misc_feature (692)..(692): n is a, c, g, or t
  misc_feature (995)..(995): n is a, c, g, or t
  misc_feature (1002)..(1002): n is a, c, g, or t
  misc_feature (1024)..(1024): n is a, c, g, or t
  misc_feature (1045)..(1045): n is a, c, g, or t
  misc_feature (1095)..(1095): n is a, c, g, or t
  misc_feature (1098)..(1098): n is a, c, g, or t
  misc_feature (1130)..(1130): n is a, c, g, or t
  misc_feature (1153)..(1153): n is a, c, g, or t
  misc_feature (1155)..(1155): n is a, c, g, or t
  misc_feature (1226)..(1226): n is a, c, g, or t
  misc_feature (1232)..(1232): n is a, c, g, or t
  misc_feature (1308)..(1308): n is a, c, g, or t
  misc_feature (1327)..(1366): n is a, c, g, or t
  misc_feature (1368)..(1369): n is a, c, g, or t
  misc_feature (1371)..(1375): n is a, c, g, or t
  misc_feature (1377)..(1377): n is a, c, g, or t
  misc_feature (1379)..(1382): n is a, c, g, or t
  misc_feature (1384)..(1386): n is a, c, g, or t
  misc_feature (1389)..(1391): n is a, c, g, or t
  misc_feature (1393)..(1393): n is a, c, g, or t
  misc_feature (1395)..(1396): n is a, c, g, or t
  misc_feature (1398)..(1400): n is a, c, g, or t
  Peptide Sequence Number=SeqID_8615
  Probeset Number=SeqID_15646
agttgttacatcagctgttaatntnntntnaganngttaggtattgatgaattactgtgacgagctcagcgacgcacaccaacatgtctaccnnnnncnacactgcgagaataatggtcgtgaggtgacgctgtgcgctcccccgggntcgctccgtttctgtcgggtggggtgtgcgacagccttgctctcttgtataaacgcctcttctccccctctctgctctccatacacgtgagagagatagctatgatacaccacgcagagcactcccgcgcgctctttccagctgtgtagtacggctacataaaatacgcctattataactcgtcccctctctgtgtgcggcgctgtctccacccggctgaccctgttcgtatttgctgatgtccctcccgactattgtgttnatatagatttatgtaacgcattatctcgcagctgtatgagagtcgagacggttcggggaggtattgttgttctctccgtatacagcgagaagactgagaagtgtgtgtgacagtgagaccacttgcgttcttgcaatccttgaccggggcctgacgaagcgtatgacttaggattctatactagtagtactgagctctcgcactttgtctatcgtgatttctatcaggtcgtcagggtgaggggtagtcctatcctgaaatatcccacagtctatatatacncatcgcttgtaatcacctctagcaatatactttaacaatcagtcacggtatgtactactaacaatcttgagtgttactaatgtgtgtacgtagtcactgtatgctattcttgttggaggtaaggtgtgtgtagataatagagcaaggggaggataagagcaatacgggtacgtgatagagttagtcgatgtatgagagctgggagtaaggagctcgaacgcaaattggagtagctatgtgcgatgaatagtgatggagtcattacacctaactgtggttgtggagctgcgcgagcatcacttntcatctncatagagacgcgccatcgcgcncagcgcctcactccgtgttgngtgacagagattgcgtactatgacagtgtgatgtgagtggacggagaaantgngtagtgatcgaggtgcagtgagagctagatantagtatgtgctggctgtgatatntntgtacggtgagtgtattgtctgtggtagtatttgcctatagatataattgcgaagaagagagaagagccgnccgacnagtatagtacgatgactgacgctacctcggctccctgttcgctgtcgtatgcccagcactgtacacctatacgcgnatgatcacggactgctcannnnnnnnnnnnnnnnnnnnnnnnnnnnnnnnnnnnnnnntnngnnnnngngnnnngnnnggnnntngnntnnnggtgtgtatgtcagtgtatgctctcttgtcttattagcatagta

SEQ ID NO: 5868 - DNA, 1702 bp, Glycine max
  misc_feature (20)..(20): n is a, c, g, or t
  misc_feature (104)..(104): n is a, c, g, or t
  misc_feature (321)..(321): n is a, c, g, or t
  misc_feature (392)..(392): n is a, c, g, or t
  misc_feature (599)..(599): n is a, c, g, or t
  misc_feature (617)..(617): n is a, c, g, or t
  misc_feature (620)..(620): n is a, c, g, or t
  misc_feature (631)..(631): n is a, c, g, or t
  misc_feature (792)..(792): n is a, c, g, or t
  misc_feature (919)..(919): n is a, c, g, or t
  misc_feature (974)..(974): n is a, c, g, or t
  misc_feature (983)..(983): n is a, c, g, or t
  misc_feature (997)..(997): n is a, c, g, or t
  misc_feature (1042)..(1042): n is a, c, g, or t
  misc_feature (1072)..(1072): n is a, c, g, or t
  misc_feature (1287)..(1287): n is a, c, g, or t
  misc_feature (1338)..(1338): n is a, c, g, or t
  misc_feature (1370)..(1370): n is a, c, g, or t
  misc_feature (1433)..(1433): n is a, c, g, or t
  misc_feature (1436)..(1436): n is a, c, g, or t
  misc_feature (1446)..(1446): n is a, c, g, or t
  misc_feature (1487)..(1487): n is a, c, g, or t
  misc_feature (1520)..(1520): n is a, c, g, or t
  misc_feature (1531)..(1531): n is a, c, g, or t
  misc_feature (1545)..(1545): n is a, c, g, or t
  misc_feature (1594)..(1594): n is a, c, g, or t
  misc_feature (1602)..(1602): n is a, c, g, or t
  misc_feature (1621)..(1621): n is a, c, g, or t
  misc_feature (1669)..(1669): n is a, c, g, or t
  Probeset Number=SeqID_15647
tctccgcgctctcactccantactccactcaggaagatcacacaaccaatatacacagatgccatgcatgaaatcgaaagtgaagggtaccgcgcgccgccccncgctgcgcgagcccgcaatagatacagcgccataaagcctatcatctcttctcttatctttatagagtcgagaatggataccacatgaccaaacaagacacaaaaacgcactgcatagcaccaccgagacgaagatacggcacaccgcgcgccgcgctgatgagcgcagtgtgcccgcgatacattagtagtatatgatatatgagtcttaactctnatcacagatcatactatagctactatccttcggctacgcaactagcttacaccgtgcggacagcgcatatnctcgaacgatgaacatgagactcatatagatagtagaaacgtatctacgaaagagaatggatggaagaggcgctagcgcagctgctagttgatacgacgaacatggatctgaacgagcagctacagcactagacctcacaattaccagtaactccgcacaacaagatctatgacctctgatgacgtaagtggagcgcggcgacccgngcgggacgaggtgtggtnggncgtcgcatagnagactgacgactgatagtactgtacttgcatgatacgcctaataatattctacattgatgctgaatatatttcaacgtgccacatcgcgtacatcgtgatggattaaaacatgactcacatatatgtatgtatatgaagagagcgtagaggatagttttgnatatatgtgcaacacagcaacacgctggcgcgcttgtatgctcttatgctccgtatacgcaccggcgactacctaatatgttgacgaagtatctgtcgacgggtcaccactcacccaagacatgtgntgaaggcagtggatatacatacttttgtgtataacatgtgcgctacagagtacgncgcgtaganacgtggcgtacctnatgtgtagatggtaatcatcacagacgtaggcgcagtacggcacnagtgcatactcgatgtcagtataatgatanatgtctgacattctagcgatagcgatatcgaggtgagtggttagagtgacgatgatcgctgcaagtgagatgatataatacgatggtatgagtagacgcggcataatgcaggtcacatgtgtcagcatatacagatacgaatctactacatcccatctgcgtatacgtgatatctaatgttctatcgtatatatgtactgctggatgaatacatnacatcaaacagagataacaggactatgcaagatggcgaagtcactacatcnatacttactacacatctattatggtcaatacnctgcgtgccatctatatgtgtcctcgtatgacatcagctatattacacattctgtgagacatncangctagcaccnctcgtcctcaatgaggacatactagcagatcatatgctgantggtgatagaagtagtgggtcgactcagagagngataaagtagntgagactcactccngaatgcagtggcgtgatgctgatagctgtacatcatggatatgacgagnataatcangacgagtgatgaacgaganaatacgacgtcgatctattcaggtcatgacgcactcgcagattagtanctgttcagctacgtagtaatctcgtagcatgag

SEQ ID NO: 5869 - DNA, 661 bp, Glycine max
  misc_feature (1)..(7): n is a, c, g, or t
  misc_feature (661)..(661): n is a, c, g, or t
  Peptide Sequence Number=SeqID_8616
  Probeset Number=SeqID_15648
nnnnnnncgtaggcccccccccccctttcgttagtcccacaaaacatttttaccagtataactgttccttacaatattgacgatgttgcagaactaaaagctgttattgaagaagttcatggattgtctcctgatgaatatcgacttgtcgcctccggaagagtattagaagaccaaatggccctgaagaatttgaatctttataagaattgtgttgtctacgtgattccaagacctggacctttccaaagtctattctctcatcctatatctcagtttggttatgctgttcgtaatgaatcagtgaagcaaatagctgaggaaggagttgataatcatgccttcacaagtgtaatgaaaacactgtcaaaaactgcttctcgtttgaaacttgaatcggatgtcccactcgaacccttcgatggtacatttgccaccaatgggattcagatttcggcagatcaagtaaagaaacttcggtcctcaaaagaacaacaagtaaaacttgtgtcagcgtacaagttacatgagataattgaaaaaatcaaatcaaaacagaatagtgaagaaattattgaaattctcaaatctgacttgtctttggctgaatctttattaattggaactcatgaccaagatgctttcacatttgttcgaaatn

SEQ ID NO: 5870 - DNA, 1717 bp, Glycine max
  misc_feature (1)..(1): n is a, c, g, or t
  misc_feature (14)..(14): n is a, c, g, or t
  misc_feature (24)..(24): n is a, c, g, or t
  misc_feature (40)..(40): n is a, c, g, or t
  misc_feature (47)..(47): n is a, c, g, or t
  misc_feature (57)..(57): n is a, c, g, or t
  misc_feature (62)..(62): n is a, c, g, or t
  misc_feature (72)..(72): n is a, c, g, or t
  misc_feature (86)..(86): n is a, c, g, or t
  misc_feature (92)..(92): n is a, c, g, or t
  misc_feature (94)..(94): n is a, c, g, or t
  misc_feature (108)..(108): n is a, c, g, or t
  misc_feature (159)..(159): n is a, c, g, or t
  misc_feature (174)..(174): n is a, c, g, or t
  misc_feature (189)..(189): n is a, c, g, or t
  misc_feature (193)..(196): n is a, c, g, or t
  misc_feature (206)..(206): n is a, c, g, or t
  misc_feature (216)..(216): n is a, c, g, or t
  misc_feature (221)..(221): n is a, c, g, or t
  misc_feature (227)..(227): n is a, c, g, or t
  misc_feature (241)..(242): n is a, c, g, or t
  misc_feature (247)..(247): n is a, c, g, or t
  misc_feature (272)..(272): n is a, c, g, or t
  misc_feature (353)..(353): n is a, c, g, or t
  misc_feature (373)..(373): n is a, c, g, or t
  misc_feature (405)..(405): n is a, c, g, or t
  misc_feature (475)..(475): n is a, c, g, or t
  misc_feature (596)..(596): n is a, c, g, or t
  misc_feature (647)..(647): n is a, c, g, or t
  misc_feature (900)..(900): n is a, c, g, or t
  misc_feature (1005)..(1005): n is a, c, g, or t
  misc_feature (1016)..(1016): n is a, c, g, or t
  misc_feature (1024)..(1024): n is a, c, g, or t
  misc_feature (1101)..(1101): n is a, c, g, or t
  misc_feature (1135)..(1135): n is a, c, g, or t
  misc_feature (1190)..(1190): n is a, c, g, or t
  misc_feature (1240)..(1240): n is a, c, g, or t
  misc_feature (1270)..(1270): n is a, c, g, or t
  misc_feature (1305)..(1305): n is a, c, g, or t
  misc_feature (1321)..(1321): n is a, c, g, or t
  misc_feature (1335)..(1335): n is a, c, g, or t
  misc_feature (1353)..(1353): n is a, c, g, or t
  misc_feature (1355)..(1355): n is a, c, g, or t
  misc_feature (1517)..(1517): n is a, c, g, or t
  misc_feature (1537)..(1537): n is a, c, g, or t
  misc_feature (1616)..(1616): n is a, c, g, or t
  misc_feature (1619)..(1619): n is a, c, g, or t
  misc_feature (1681)..(1681): n is a, c, g, or t
  misc_feature (1703)..(1703): n is a, c, g, or t
  misc_feature (1717)..(1717): n is a, c, g, or t
  Probeset Number=SeqID_15649
ngtttgttgttgtntgtgtgttgntgtgttggtagtgttngacgganagagataagnggtgnagcgagaganatgcgtcagactcnatcccncnattggacgggagtntgtcttcagagggattgtgttgagtgctgcagagcgagtggcagagagcanagaatataaaggtgnaggagagcgcaaccncgcnnnncacggaggangtgatatgtngtgtntagcgngtgttattatattnntatanaataagttgtatctgatacacgtgnattattctactacagtattatcgatgatgacgtcacatatctctgcatacgcacgcttcatactcatattatcattattantgtcatatatatataataanacatagatagaccacacactcattctctacanatactaatacctctcacaatacttaccatatacacatgcatgtattacacgacaccccacaaaacactancgaggcgaagacatagacgaacgagagagtaggatcgataacaggagacgaagtgatgaggtatctgatcagtcgctgacgcgcaccacacacacgaccaatcgatgacttatggatagangtatagtaagtagatacgtattaagaagaacaatgtaattgatatacgcangccgtagcgttgtggatatgcgcatgtggtaagatataacgtgtatagctaaatactatacttatactaattgtgcgctatctgtcagctaacggatcagcatgcagctacgtgagcatgtcgagacctacgttattgtatactatagtaacggcatacgtttatgtgcggatatgattgcgagcgggctgcgtcgtatgttatatgtcatgaatatcgcgtgatttatggtatgatcgtttcgtgtgcagcnaccgagcgacatgcgcactactgaaatgtatatgtatgacgtagtggacatagagattgttcgtctacacatctctactaatgcgaaacgcgacagacgatcaanacgatgtgcancgtccgancacgcaacatggtgactatgtcgaaagcattttactgtcgacacactgagctgatcgtctcgatcagactctattcnacaccaattattatcttcatcactggagctatgntagtatgagagatttagtgacgtgagggatgtagcgacgatgcgattattcgtgnaatagatgcgcgacctgcacgccatatagactaaataatgtagaacttanggatgagtaattctgtcgattaatagaggntctcataccacgaaatacagcgagtgctgagttgntataacgcaccgcatnattccactcgcatngccattctctatgtgtantntgatgtacttacgtaacacgctgctataatactggagtatgtatgaaggcgggtgttagtctatactagtgctgatactactatgatataactcctgactaactcgtctatgctataatgtgtggtggcggtctcgccactctctatgatagcagcgagcangctgagactggatgcggttnatgtagcgatgctcgagcgcacatatgactgagcacagcagtagactcgactatatgtggtgtcgtcgttgcaatggtntcnagtatgacatcaaactatatactatgtacgttcactcctctcgatcacgcgagtaacactancacgtcagaatcatcgcgatgnatacagcacgccgn

SEQ ID NO: 5871 - DNA, 1509 bp, Glycine max
  misc_feature (141)..(141): n is a, c, g, or t
  misc_feature (765)..(765): n is a, c, g, or t
  misc_feature (799)..(799): n is a, c, g, or t
  misc_feature (1250)..(1250): n is a, c, g, or t
  misc_feature (1406)..(1406): n is a, c, g, or t
  misc_feature (1421)..(1421): n is a, c, g, or t
  Peptide Sequence Number=SeqID_8617
  Probeset Number=SeqID_15650
attatacctatataccttctcacacaccgatataacactttatcgccatcacccctccttcctcctctactattaataaaatgtgtttttgtatttttttcgtaaacctataccagcaatttctcctgatactatatgatntatttgtgtctcatctaccaaacactctatcaaagcttctggcataacattgtattttaaagatactcaaactattaatataatatacggcatcatgcgttatcatcactctcttcttgtatttgcatgttctcattatacgctctcaccattctgtatttcgccacctgatggcatcacatgtacttatagatcacagttcccttatacgcatgtttgctagtgaagatatcctccctagcttctaccttagaattctctgtacccactctatactagcatagcgcctcacactctgccacaacattttccatcactccgtttacacatctttttgcatagagcactcacttggcaaatatccaacacttcactataatctcttcgcatccgaccaggtctcaaaccgcccgaccaagtagctgcttacccgtagcaaatcccgccgcctcccttcctacgatatctactcctcccacttagtgcatctcattagatccaactagtcgcatctatgccactacaccaccatcctcatgtacggtatctactctcctaattatgacaacgtttctccatagccctcctatctagaatagtttctaggcagcaccaatataatanaagcagtggcacactctagaccacacaagatgtntacctcgttttcaccctatgtcaaaggtgctatttagaccgtatacctctatacttaaatcgactatttcatatcgtgtttcataagacaaccaacgctgcttcacctctcttcaccactcatcttcgatatatatcatccatccgacatctggtccttttattatattaaacgcgtgccacatatatacacctcgcaactgtatatgcactatatacacctatttaacatcagcgtatttaatgacaccaggggacacattggggagcgcctagtgtatacacacacaaccttctccaccgacgtatacacccatctttcgtgcctcgcacacgtgtactatagatatattccatctatcacttccttcacaccgtcgatgtcgctatgatcagataactctcaaacacacgcgactcccactttactcttatatctcgctgtctttgtnaagtagattcgtgtataacgccgcacatctcccagcattaatacaatagttgtttatatacactactctctaacttaccctatccagcgtcccacacttcgcatttaacttatcatatcttgcgacaccacagacatatttacctttcaacgtccnacattttaacgtcgnctattctaactctcctctcgatactacatctatactatactcgtgcggtacttctaatcttatcttgtaacctatctagtctacttgt

SEQ ID NO: 5872 - DNA, 1013 bp, Glycine max
  misc_feature (1013)..(1013): n is a, c, g, or t
  Probeset Number=SeqID_15651
tcttccacctcgactcagaagaggagccccgcgcccgtttccccagcgccgccggcgacaaccaagcctcccctcccggcgcacctcttctccttcctccacctagtacatgcggaaccccgcgcccctggcatccccatgctcgttgcctccccttcgctcaagccctgcatccctgccgaggcgagcgccgagttccatcgcaagccgccgcccggaccaggccggagcccgtcggcctcctcgccgccgtcgcgcccacaaggccactagcatgacctgcgcctcctccatggcctccctccttgctgccatggacgcgagggtcgagctcgccaccccgccgcgtcgccaaggccgccgggcactgcagcctgccggcctaccccctgcttcgtcatctatagccacctggccgtggcctctccgagctctacccgcgtcgacgcctcaggcctccatcgatccacccgtccatccatgcccggagcagcgccgccctcgccggagcaagcaccaaggttggctccgccgaccggtccgcctcagcgcctcctcccgctcgcgcctcctcctgcctcgtcctcgttcccgcgccgctggtcgccggaaaccagcaggagaagccccgcctccgctcaaggacccgtgccattcactgctgcctgctccgttttccctgcgcacctcccggtcccgtgctgcacagccaagttgtcatcggtggcctcgtcaatcaccacccaggctgctatcttgaacagctcctccacggcttctagtctgtacgtggagttccatcagttgctagagcaccacggatccacaagtagctctacgcacggatacaccaagacctggaccggctagtaccacgacgtccgtcgatcgtcaagtaccatttggatgcaccaagttccacgacgatgtataagtttcttctgaacatgtacgactacaatgtgaacgagttccacgacggcccaagtaccgcgagaacgtttgtgcccctn

SEQ ID NO: 5873 - DNA, 358 bp, Glycine max
  Peptide Sequence Number=SeqID_8618
  Probeset Number=SeqID_15652
agtgtttcttgtgcttgatttggctattgcgaacaaagtgcatgggcaagggacgcgtgtctggttctattcgactacatgcccacccgctgagtacattgtaaagtacacagatacaacccatgttaattctgatagtactttggctgctgggttgcttcggatgcacttccatgattgctatgtgcaatgccgtgacacttctgttctcattgtcagttatggcactgacagaacatcgttgacgaccctagctttacgatgatgagcggttactgatgatgcaacgaaccgacttctggctagatgccacgcagtcctggcatgcgctgatatgatccgtcttactgtatgcgat

SEQ ID NO: 5874 - DNA, 426 bp, Glycine max
  misc_feature (66)..(66): n is a, c, g, or t
  misc_feature (79)..(79): n is a, c, g, or t
  misc_feature (106)..(106): n is a, c, g, or t
  misc_feature (137)..(137): n is a, c, g, or t
  misc_feature (165)..(166): n is a, c, g, or t
  misc_feature (190)..(191): n is a, c, g, or t
  misc_feature (235)..(235): n is a, c, g, or t
  misc_feature (285)..(285): n is a, c, g, or t
  misc_feature (423)..(423): n is a, c, g, or t
  Peptide Sequence Number=SeqID_8619
  Probeset Number=SeqID_15653
agagagtattattcttcatggagacgcaagggaaatgatttgtgaagccgcagagcaaatgcaaanttaatctcctagntcttgggtgagccgtggcccttggcancgctcaaaaggacactttcttggaagtgtanagcgactatttgcgcacatctatgcaannaaacaccgactcctctattgtgannaaccaccatctagagcattatgcaaaatgccacgtagcctcagntttttctggcttattgtgtttaagtacgccattcatctatttaataaagntggcttggatttatgtaggtttaaaccgtctttttaatctcttaagggaaagactttttttttaggaagcctcaaacaggaagattttagtttggaatgcgttatttttgcaactctttttgttgaatgaatccaatntat

SEQ ID NO: 5875 - DNA, 643 bp, Glycine max
  misc_feature (7)..(7): n is a, c, g, or t
  misc_feature (103)..(103): n is a, c, g, or t
  misc_feature (120)..(120): n is a, c, g, or t
  misc_feature (122)..(122): n is a, c, g, or t
  misc_feature (194)..(194): n is a, c, g, or t
  misc_feature (196)..(197): n is a, c, g, or t
  misc_feature (215)..(215): n is a, c, g, or t
  misc_feature (243)..(243): n is a, c, g, or t
  misc_feature (259)..(259): n is a, c, g, or t
  misc_feature (265)..(266): n is a, c, g, or t
  misc_feature (269)..(270): n is a, c, g, or t
  misc_feature (273)..(273): n is a, c, g, or t
  misc_feature (288)..(288): n is a, c, g, or t
  misc_feature (295)..(295): n is a, c, g, or t
  misc_feature (298)..(298): n is a, c, g, or t
  misc_feature (300)..(300): n is a, c, g, or t
  misc_feature (304)..(304): n is a, c, g, or t
  misc_feature (315)..(315): n is a, c, g, or t
  misc_feature (323)..(323): n is a, c, g, or t
  misc_feature (329)..(330): n is a, c, g, or t
  misc_feature (332)..(332): n is a, c, g, or t
  misc_feature (334)..(335): n is a, c, g, or t
  misc_feature (337)..(337): n is a, c, g, or t
  misc_feature (340)..(340): n is a, c, g, or t
  misc_feature (344)..(344): n is a, c, g, or t
  misc_feature (346)..(346): n is a, c, g, or t
  misc_feature (357)..(357): n is a, c, g, or t
  misc_feature (359)..(359): n is a, c, g, or t
  misc_feature (361)..(361): n is a, c, g, or t
  misc_feature (363)..(363): n is a, c, g, or t
  misc_feature (366)..(366): n is a, c, g, or t
  misc_feature (375)..(375): n is a, c, g, or t
  misc_feature (381)..(381): n is a, c, g, or t
  misc_feature (384)..(384): n is a, c, g, or t
  misc_feature (397)..(399): n is a, c, g, or t
  misc_feature (408)..(408): n is a, c, g, or t
  misc_feature (417)..(417): n is a, c, g, or t
  misc_feature (420)..(421): n is a, c, g, or t
  misc_feature (424)..(424): n is a, c, g, or t
  misc_feature (437)..(437): n is a, c, g, or t
  misc_feature (445)..(446): n is a, c, g, or t
  misc_feature (458)..(458): n is a, c, g, or t
  misc_feature (465)..(465): n is a, c, g, or t
  misc_feature (470)..(470): n is a, c, g, or t
  misc_feature (475)..(475): n is a, c, g, or t
  misc_feature (479)..(480): n is a, c, g, or t
  misc_feature (485)..(485): n is a, c, g, or t
  misc_feature (488)..(488): n is a, c, g, or t
  misc_feature (490)..(490): n is a, c, g, or t
  misc_feature (493)..(493): n is a, c, g, or t
  misc_feature (498)..(498): n is a, c, g, or t
  misc_feature (501)..(501): n is a, c, g, or t
  misc_feature (507)..(509): n is a, c, g, or t
  misc_feature (515)..(515): n is a, c, g, or t
  misc_feature (518)..(518): n is a, c, g, or t
  misc_feature (522)..(522): n is a, c, g, or t
  misc_feature (524)..(524): n is a, c, g, or t
  misc_feature (527)..(527): n is a, c, g, or t
  misc_feature (529)..(529): n is a, c, g, or t
  misc_feature (531)..(531): n is a, c, g, or t
  misc_feature (538)..(538): n is a, c, g, or t
  misc_feature (540)..(541): n is a, c, g, or t
  misc_feature (546)..(546): n is a, c, g, or t
  misc_feature (549)..(549): n is a, c, g, or t
  misc_feature (552)..(552): n is a, c, g, or t
  misc_feature (558)..(558): n is a, c, g, or t
  misc_feature (568)..(569): n is a, c, g, or t
  misc_feature (572)..(573): n is a, c, g, or t
  misc_feature (577)..(577): n is a, c, g, or t
  misc_feature (585)..(585): n is a, c, g, or t
  misc_feature (590)..(590): n is a, c, g, or t
  misc_feature (601)..(643): n is a, c, g, or t
  Probeset Number=SeqID_15654
accaagncactttactacctagaatttgttacactcatcatggcaggagctttgagagtccctaatggttatgccctaagctgaatatctttttctctcatcnctggctcaaaaaggggnancttgaatcctaatggatctttaacccagcaaacaaacttccataccccccaaaaagggtcctccagtttttncnnaggggctttggaacccgncccccaacctattcttccaatttcaaangccttaccctttgaanaagaanntcnnttnaaagttaatggcccncacctgncancncccnaatccgctggntttcctantttggnntncnnanaantggntnttaatcctttngnancncgncttccccantccaanaangggcaaacccccnnnctttgggcncccacaccnaannttnccctctctccaanggggggcnncccgggggtttncctcccnccaanccaanccgnnttttnggncncgngcatnggncaaaannntttcancgnggancngcncntnggtactncnnacaanaangcnggcctntaccaaatgnnccnngagngtttgggnccggnatactactccnnnnnnnnnnnnnnnnnnnnnnnnnnnnnnnnnnnnnnnnnnn

SEQ ID NO: 5876 - DNA, 515 bp, Glycine max
  Peptide Sequence Number=SeqID_8620
  Probeset Number=SeqID_15655
cttaccaatcttagttgctttggtcggaaaaaaacaaaagtttcgatcaaacaattcagatggtttcgcagatgatctcgtgtttatctaaatcttcgtctcttttctgcatctccggttcccggagtttaatcccgccgaagacttacaaccgcggcggtttgtgccggttttctccgggatttgcaagccgccggttatctacggtttaccgtagaaaatggagatcagcgtgcatttccaactctgggaaagaaactgaaggagagggaaagttacaaggaggtgggtcagagtggcggatacttgagagatgggaagtgccatgggaatggcagacagtttcgttaacttcgcttgcttgtggtttaaggcagttttgttttgacagggttaactgagatggtagccttaccatatctagggatcgacgttcagaagctgagcttggacgacaaggcggagatcttattcctggatcaaggtttaacaactctagcagtacttgctgttat

SEQ ID NO: 5877 - DNA, 460 bp, Glycine max
  misc_feature (1)..(5): n is a, c, g, or t
  misc_feature (23)..(49): n is a, c, g, or t
  misc_feature (81)..(132): n is a, c, g, or t
  misc_feature (210)..(214): n is a, c, g, or t
  Peptide Sequence Number=SeqID_8621
  Probeset Number=SeqID_15656
nnnnnacatggaaaatgcaagcnnnnnnnnnnnnnnnnnnnnnnnnnnncatacaaatgttatatctcttagacttttgcnnnnnnnnnnnnnnnnnnnnnnnnnnnnnnnnnnnnnnnnnnnnnnnnnnnnctatgccttgtcattgcttttattaacccatgtgtttccctaatcaatgcagtttaaactggcaacaccagctttgcnnnnnccctaggccaaatccggatataaagactttattcactgaccacacatgtacacctcctaatggtcctctagcacctacacctgtcaatcttcctgttgctgcggttgcaaagcctgctgcttatacttcaattggttctcatggtgtatgataccttgcaccctttccgcctgccgcggcaactgctaacactaatgctttggctggttggatggccaatgcctcagcttcatcatctgtccaagc

SEQ ID NO: 5878 - DNA, 525 bp, Glycine max
  misc_feature (243)..(243): n is a, c, g, or t
  misc_feature (259)..(259): n is a, c, g, or t
  misc_feature (313)..(313): n is a, c, g, or t
  misc_feature (468)..(468): n is a, c, g, or t
  misc_feature (484)..(484): n is a, c, g, or t
  misc_feature (498)..(498): n is a, c, g, or t
  Peptide Sequence Number=SeqID_8622
  Probeset Number=SeqID_15657
ttttttttttttttttttgttgagttaaagatgtaaaacttggattttaattatatctatgaacaaatttaatttttgttatgtgtatgacgtgtaccgagttactgatctatataattatgcatattcacttaagtaatgatgtgttgttggatgaatgtatgttgtgacaaaattacttctattttcataagaaaacttaaaggagttcattttataaaaattaaaattatcgcatattanagtgttgatatcgtancggcgaggcgggtcgttacatttagtgatatcagagcccggttgaacctttcanccagtgagttgtgagtctactatgtttttctgtgcattctctggttgttttgttgaatgctttgtgttggttgtttgctgttgtttgctgatgtttgatgctcgttctttgctattagcacgtattcactagttgtgttttaatgagctataganatttaattgttgtagncatattgaatttgntttcctgatgtctgctataccatgaat

SEQ ID NO: 5879 - DNA, 1369 bp, Glycine max
  misc_feature (138)..(138): n is a, c, g, or t
  misc_feature (239)..(239): n is a, c, g, or t
  misc_feature (1305)..(1305): n is a, c, g, or t
  misc_feature (1315)..(1315): n is a, c, g, or t
  Probeset Number=SeqID_15658
ctatgagagcgtcgttcggcgccgccaacagcaccacgaaggcggcgcgacgcatgtaacgagcgaataatggtagggtataggtggaaagagaagcacgaaagcaaggctgcggctgcaggaaggcgagaagacaangcaaaaagaaagaatgagacgaccacaaccgcggcacgcatgcgacgaaagcggggtctgatacatcgcggcgaggcaaataagaaggagagtgcatcgcncgcacgcgtacacaaaacgattacagcgtcaggcgcgcacaggcgtgcgacaacataaaagtagcgagtcagcagcgcagagaagtgaggcagcgtcacttcaactaaacacgtgaatatagatgtgcaaggctcagcgaaccacataggacgttatagtagtagcggactacgtatatattaccgcggcagagcgaggaccgagacgacgtgacacgagaacacaacaaaacacacgatcgggaaaacaaccggtgacggagaggagagaggcgaacagggggaggcacggagccgggacagacggcgaaataacagggcggagagagcgcgtggatgggacgaatagctgcgcggcgccggcgagaggagataataaaaaaagagcggcggaagacagcacgcgatgccgcaacacgaaggtagacgtgcgagaaaataatgaggtgggttaggatcaagtaagtataaagcggacgtggtgcgcgcgccgtctactcgtgagacatacaacacgtctgaacgaaataacgattacgcggggacgcgagggagggagagaaacgaagaaagaaatataagagggagaagagtaccccagccgccgaccacgctaccaaatatataaataaagcgggacgaacgccgcgtataatgggtggcacatcacccaggcgcgctcccggcacagtcgcgtagcaaaaaaacgatagaggggagaggggggcgcggcggggagagataaagcagagagagaggaaaggcgcggacgctagcgaaaatcacaaaagaaagagggcgggcagaggcagcgacgtcaacgacgcgtactgcaaacggcgagctacgcactaaccacctaaaaagcagagagacgtgtacatcacgcgacgggcgcggctacataatatgagtggagcatagggtgacagcagcaggggtaaggagagaacgcatgaaaacaaggccgaggaaacggcgaggggtagaggaggagggaggcgattatagaggagaaaaaacaaaaagggagaggcgcccccgcaccgcgcatgtggggcgcagntcggcgatanagataggataaagcatcgggcgcgtacacgcgcgacaggagggggcgaccatca

SEQ ID NO: 5880 - DNA, 964 bp, Glycine max
  misc_feature (1)..(17): n is a, c, g, or t
  misc_feature (750)..(964): n is a, c, g, or t
  Peptide Sequence Number=SeqID_8623
  Probeset Number=SeqID_15659
nnnnnnnnnnnnnnnnnccatggggctttcagattggtggaccttgttgggcttggtgtggcgattgctactggcatgcaatttattcagaattttcctgagcgaacatataaatcaatgcttattccccttctgcaagaagataagagagctggcgaaacaactcgcaaagggttttatttgtatgatgataaacgcaaggctagtcctgatcctgaattgaaaaactatatccagaaggctaggagctttactggtttctccgttgatcctaagcttgtcaagttacaagaaaaggacatcattgaaatgatattctttcctgtggtgaatgaggcttgttgagtccttgatgaaggtattgcagtcaaagcatctgatcttgatatttctgctgtcttgggcatgggttttcccccttccagggagggtttcttattttgggctgcctttttgggttccaggtccataattttcaaatttgaagaaatgggtcagagttgtatggagaatttttcaagccttgtgcctacttggctgcaagagctgccaaaggaattccactggtcagtagcctacgctcatttatttccatgtcatttatgcaaactatttgtcatgttattcacacttattcttggattgtttagtaacttaaggtaattttgagatctaaagggcacttcattgacacactgcatctgtagccagaaaatcaacatcgtctaatggactttgtcgattacaacnnnnnnnnnnnnnnnnnnnnnnnnnnnnnnnnnnnnnnnnnnnnnnnnnnnnnnnnnnnnnnnnnnnnnnnnnnnnnnnnnnnnnnnnnnnnnnnnnnnnnnnnnnnnnnnnnnnnnnnnnnnnnnnnnnnnnnnnnnnnnnnnnnnnnnnnnnnnnnnnnnnnnnnnnnnnnnnnnnnnnnnnnnnnnnnnnnnnnnnnnnnnnnnnnnnnnnn

SEQ ID NO: 5881 - DNA, 408 bp, Glycine max
  Peptide Sequence Number=SeqID_8624
  Probeset Number=SeqID_15660
gcttgacagctagaacgtctgatccgagggaagacatgttcccacaaaccctaatattgtctagcactcataatcctttccatggagatctcgtcttaagcacaacagcaccagatgatatccacgatgttctcctagacggttcccaaagggtcttcttccacaacgcggctcctacacccttcccccgacgatggcttttaccgtccactcgatgccccctgtacgtccactggacgaccaattatctactaccacagccaatagtggcactctcacctacgtccgctcgcacgtgtcgggattcagccagaactcttcttgctcctgtccggattaagtcacagattcggctgtaagtcttgtggacttgcccaacctcccgcacgattcagatggcctggtgct

SEQ ID NO: 5882 - DNA, 525 bp, Glycine max
  misc_feature (479)..(479): n is a, c, g, or t
  Probeset Number=SeqID_15661
aggagaagctggtgacatcaatatccggagttgcagcgaacgcttatcaggccatattgccttatgtcagagagggatatcgttggcatactacattatgatgtgattagatggagcttaatacaatatgagaagatgtttcccagacgaatatccaatggctgcttcaaaggttatggtttctagacataaatatatcatccgaacattgataagcttggctggatatgtcttgacattctgaaagataacaggagtcctacccttgggattctcactgtactttagagtattcaagctattctaagtgcacgtaacccagatgatccactttctgagaacattgtctagcattgcaaatctaatgacgtcaatgctgctgaaacaggcaaggaatggacccgaatatatgctactggcgctcgatgctatgggggaaacttatgtcttcggacatctataacggacgtgtatgctgnttaactggcaaattgaaatggatgtttggatgaattgtctaaacta

SEQ ID NO: 5883 - DNA, 936 bp, Glycine max
  misc_feature (1)..(1): n is a, c, g, or t
  misc_feature (890)..(890): n is a, c, g, or t
  misc_feature (893)..(893): n is a, c, g, or t
  Peptide Sequence Number=SeqID_8625
  Probeset Number=SeqID_15662
nattagtgaggaatggcagaggaaaacatttggatctactgataaaggacttgattacagacaaggtgagcataggagtggtcgtgattacgagcaaacagggaatgatgggtcgcgggtaacgcccgtgctcagaattgggaatcggaggcaaaaagcgacctgttcctgtttgatagccacggtgtttgagtaacggacaatgggatgggtagctcggacaacgatctttgagggtcgaggagaggtctgttttaaagatggatcgggaatgacccgtgatcttcatttccttcctgcgtgatcagagtgacaagcatagggtaatcttagtaatagtctcaatgatacctcgatgaactgtggagccggtcatgaccgatatcgacaaggaagccctgtcgacagacacgttggttcctgtcgcagtacacgatccaattgttctaccggctggtcgccgtgttactgatctgcgccgttctggcggtgctcaacgattccttcctcagcctcggcaatatcctcaacgtgatgcgccaggcgaacctcacgttgttcataaaaaccggcctgacgctggtggtgctcaccgccggcctcgatctgtcggtcggcgccaatgtcgcgctgtcggcgtgcgtcgccggcaccgtgatccacaccacgggatcggcaacgcttggaatcctgaccgggcttgcctgtggcggcatcgttggcctcctgaacggcatcatggtgacggcgctgcgcatcccctcgttcattaccacctacggcatgctctgggtgctgaacgggctcccttactggtacatgggggaaatgcagcccgggggatccttattgctagggcggccgcctccgcggggagtaccactgtgagnggnggggaggagggagtggaagagagtgaagagagtgtgggaattg

SEQ ID NO: 5884 - DNA, 455 bp, Glycine max
  Peptide Sequence Number=SeqID_8626
  Probeset Number=SeqID_15663
atctccccctcctcactcgaccacaccactctctctctcttatctaatcttcgccatgtctagactccctcctcctcctctactctcagtcaacctccctctcatagagaaaacaaccgactccgagttaaccccgactcgactcagtttccccaacgagttcccctacgagttcgactctccagcgttctcccctggcttcacctccccagggaactccaccgagacggaagacgagagcagcgacgacgaagaagacttcctcgccgggctgactcgccgactcgctccctccactcaccgcctccctcctccctccttcaagtccgaggagaaacgtcaggtggcagcaacttcgccacttctcccaccgtcgcatgcgcatacgacgtcgtttcggagagacaatgcgtgggaggtgatatccgctgctgctggagaagtcgctaggctca

SEQ ID NO: 5885 - DNA, 601 bp, Glycine max
  Peptide Sequence Number=SeqID_8627
  Probeset Number=SeqID_15664
aagtgtcccctgcttggagctaaacgggcatcgataagcgatttaagtgtgtttccggttgtcaagcttctccctcaggtttacgtaattttgagcatccgcacttttcagttggcggggtggtttcatcatatgcgtcacacatgtagccgctgaaagtatttacatatagttgcgcgatagctcagtcagtatataagcagtcaagtcgcaacctttgccttagagtaaagatctgcctcacgttaatccaggatttacacatgaagtagtttacctttgacgctgatcagattttttcatcaggggagtcagcataagaaattgaaatcagttcagacctaagcttgtcatcttgatcacggttttgcatcgcaacaccatctgatttcttgctctccaagccagactgtgattccagagttttatcatgtaaagagttagagatagcgataatcgactcacgtgtctactcctgggactccttgcttggtgacttgttatccatatacataaatcccttttcttttcaccttggagattgagagttttacgagaaattcgaagaagaagccttccaagtaggaaagaataagaccct

SEQ ID NO: 5886 - DNA, 730 bp, Glycine max
  misc_feature (80)..(80): n is a, c, g, or t
  misc_feature (289)..(289): n is a, c, g, or t
  misc_feature (291)..(291): n is a, c, g, or t
  misc_feature (304)..(304): n is a, c, g, or t
  misc_feature (316)..(316): n is a, c, g, or t
  misc_feature (330)..(330): n is a, c, g, or t
  misc_feature (335)..(335): n is a, c, g, or t
  misc_feature (345)..(345): n is a, c, g, or t
  misc_feature (347)..(347): n is a, c, g, or t
  misc_feature (369)..(370): n is a, c, g, or t
  misc_feature (377)..(377): n is a, c, g, or t
  misc_feature (380)..(380): n is a, c, g, or t
  misc_feature (385)..(385): n is a, c, g, or t
  misc_feature (408)..(408): n is a, c, g, or t
  misc_feature (420)..(420): n is a, c, g, or t
  misc_feature (422)..(422): n is a, c, g, or t
  misc_feature (429)..(429): n is a, c, g, or t
  misc_feature (432)..(432): n is a, c, g, or t
  misc_feature (434)..(434): n is a, c, g, or t
  misc_feature (437)..(437): n is a, c, g, or t
  misc_feature (442)..(442): n is a, c, g, or t
  misc_feature (447)..(448): n is a, c, g, or t
  misc_feature (450)..(451): n is a, c, g, or t
  misc_feature (454)..(454): n is a, c, g, or t
  misc_feature (456)..(457): n is a, c, g, or t
  misc_feature (462)..(462): n is a, c, g, or t
  misc_feature (466)..(466): n is a, c, g, or t
  misc_feature (473)..(473): n is a, c, g, or t
  misc_feature (481)..(481): n is a, c, g, or t
  misc_feature (483)..(484): n is a, c, g, or t
  misc_feature (488)..(488): n is a, c, g, or t
  misc_feature (491)..(491): n is a, c, g, or t
  misc_feature (496)..(496): n is a, c, g, or t
  misc_feature (505)..(505): n is a, c, g, or t
  misc_feature (511)..(512): n is a, c, g, or t
  misc_feature (514)..(514): n is a, c, g, or t
  misc_feature (516)..(517): n is a, c, g, or t
  misc_feature (519)..(520): n is a, c, g, or t
  misc_feature (523)..(523): n is a, c, g, or t
  misc_feature (527)..(529): n is a, c, g, or t
  misc_feature (531)..(531): n is a, c, g, or t
  misc_feature (534)..(535): n is a, c, g, or t
  misc_feature (540)..(540): n is a, c, g, or t
  misc_feature (542)..(542): n is a, c, g, or t
  misc_feature (553)..(553): n is a, c, g, or t
  misc_feature (570)..(570): n is a, c, g, or t
  misc_feature (573)..(574): n is a, c, g, or t
  misc_feature (576)..(576): n is a, c, g, or t
  misc_feature (580)..(581): n is a, c, g, or t
  misc_feature (588)..(588): n is a, c, g, or t
  misc_feature (596)..(596): n is a, c, g, or t
  misc_feature (601)..(730): n is a, c, g, or t
  Probeset Number=SeqID_15665
tgctggaaccatcttgaatttcttgtacggaaaattaaactctcccgtcactgctaacgctagcaatattgtcccattanatcaaacgtcatttattcccgaaggggcaagtgccacgtcactcggtcctaatgcctatctctacgtacctaatggatgtcaaaataaaaatggatgtcaagttcatgcagtatttcatggatgtgaacaaactctctctgatattaatatgacttatattacaaatactggatataagggctgggccgaggctaacaacatcgcggtngnatatcccaaactncgagatttgaangtaacccatgaacnccganggttgctggnantggtggggatatactgcattannaatcccnacncaatnaggaccttacatggccctgcccnatctcttcttgntnatgtctntcnanatnattancagtnntnntangnntaatnttanttatganattctgangnnccgnttnctagncgcggtttnatctgnngntnnannatnaatnnntngtnntcttngntcttttttatnccccccgccttcccttnggnntncttnncctcttntctttttntattnnnnnnnnnnnnnnnnnnnnnnnnnnnnnnnnnnnnnnnnnnnnnnnnnnnnnnnnnnnnnnnnnnnnnnnnnnnnnnnnnnnnnnnnnnnnnnnnnnnnnnnnnnnnnnnnnnnnnnnnnnnnnnnnnn

SEQ ID NO: 5887 - DNA, 601 bp, Glycine max
  misc_feature (600)..(600): n is a, c, g, or t
  Peptide Sequence Number=SeqID_8628
  Probeset Number=SeqID_15666
ctcctcagcgtcttattttcctcccccccgccgccgccgccgcccccgccagacgagctagccagccgccagcacccggatcaaggagcacgagctaaggggggaggacgaagaagatgggcaggccgagctcacggacctaaagccggagggggccctcctccctcccccccggctcaccggccgccggcgccaccagcaatccgagatcaaggaggtgggtgcctcactcgcgagggtggtcgctgtgatctcgcagacgcagaaagcggcgggtgagggaggaggacaacaacaagcatctcccgccccacgtgcgccccccgaagaaagacgccctccgccggcggctgaccaagcaccaaccatctttgctgacggagagggaggaggaagaagagaagtaagtactcctgcggcaggatgctatcaagtcctaggttaggaggacagggtataatttgccgcggccggctttgacgtagcatgaatttgattttttttgtggacgcggctgctatcctagtccaattcatatgttttcgttatcctgcatgaaattcgacctttgcctgtctgacaaaaaaaaaagaaaaaaanc

SEQ ID NO: 5888 - DNA, 1484 bp, Glycine max
  misc_feature (28)..(28): n is a, c, g, or t
  misc_feature (35)..(35): n is a, c, g, or t
  misc_feature (72)..(72): n is a, c, g, or t
  misc_feature (529)..(529): n is a, c, g, or t
  misc_feature (579)..(579): n is a, c, g, or t
  misc_feature (817)..(817): n is a, c, g, or t
  misc_feature (877)..(877): n is a, c, g, or t
  misc_feature (1056)..(1056): n is a, c, g, or t
  misc_feature (1253)..(1253): n is a, c, g, or t
  misc_feature (1268)..(1268): n is a, c, g, or t
  misc_feature (1356)..(1356): n is a, c, g, or t
  misc_feature (1408)..(1408): n is a, c, g, or t
  misc_feature (1427)..(1427): n is a, c, g, or t
  Peptide Sequence Number=SeqID_8629
  Probeset Number=SeqID_15667
cacacacccccactcaccccccttcccnctcactncaaccctcatagagtagagggtgcatatctcagaccnccccgcttataggtggaagtggggtatttacgcgcagcggggggtacgtaggtgttgggcatcaagtatacgcgcttgcctatctttagctggagggcgcgtcgtcatgcacgcgaccgcaccacctgccgaccacatctctcgctctcatagggataccgcaactggtagagtgtgtgcgtgacggcggcagcgcagtctcgcgtttgctcacttgctgagcagcgagacggagaaaatctaatctatatatcagtacatagagcgacaggcgcgcgagtggatagcaaacagtcaacagtacctatcgctgatatcacgacagccgaggcgctacatcgccggccgctatgtgcgatagtggcgtgtgagctggagcacgttatatactagatattagtgtgaggtgttggacggagcgcgggtatatattgatactgacggcgcgctttcctgncgccgtctgataaatatacaaaacagtcggcgcacgcgtgattaccgcgngaaaaggtgtcgacgcgaagagtcatacgacctaggcgaccggcgcgacggacaaagcgcatatacgagcctcggtcacgtcgagaatgatcacctgatctgtagtgtgatgtttcgctcgatgtgagcgagacacaactccacgcggtcaggagatggtgtagagtgtcacgcagacgtgatgtggcaaggtgctcgatggacgcctcacagatgattgccagccgatcactccgcnactaacgacgtatctgtattgaggaattggtgctcgagtggtgcttgtccagctcggcgncccgacggatatacgcctctcagcctagtgttgtcggattctacgatctccactagccgcgcaccatggtaatatagttgtgtcatccgcgctaactggcgatgtattggacgaccgctgcccgcacctgctgatgactggatgctcgtagaggaggcggccgcaatagcaggctgagnttcgtatataatacgatttcgcgtatcatgccgtcgcagacgcgactgccctcacgtcgcacctcacgtctcacgatgtgcagtaatgtattgtgatcgagcatgtgtgagcgtatgtccgtgcggcaatctacacattgcgctcatgctgcactcgtagcctacacgcttctgtgatatgatatattgacgtggantgcgtgcgcagtatngcatgcatgtgtcagcgacagtactgactcgtatacacctcagaggactgacgtgtttactcggatgtatggcaccctgtgatagagntgaatacacattgtagtcttgacgtacagctatcaagagctctcccgtccgntgacactctcttgttctgntcatacagcttccatactggagttgtatccgtggtcgacgcctgatgtgatgtgcgg

SEQ ID NO: 5889 - DNA, 1382 bp, Glycine max
  misc_feature (22)..(22): n is a, c, g, or t
  misc_feature (26)..(26): n is a, c, g, or t
  misc_feature (30)..(30): n is a, c, g, or t
  misc_feature (37)..(37): n is a, c, g, or t
  misc_feature (39)..(39): n is a, c, g, or t
  misc_feature (42)..(42): n is a, c, g, or t
  misc_feature (44)..(44): n is a, c, g, or t
  misc_feature (450)..(450): n is a, c, g, or t
  misc_feature (452)..(452): n is a, c, g, or t
  misc_feature (487)..(488): n is a, c, g, or t
  misc_feature (668)..(668): n is a, c, g, or t
  misc_feature (849)..(849): n is a, c, g, or t
  misc_feature (1043)..(1043): n is a, c, g, or t
  misc_feature (1136)..(1136): n is a, c, g, or t
  misc_feature (1382)..(1382): n is a, c, g, or t
  Probeset Number=SeqID_15668
ttgtccttccctctcctttttntttnatcnacaccananacnanacaaccctccaatcccacacaaggcaccatgcacccccgtcgagtctcctcactcttaccaataatataattaaactactattaattgtcagctcattaaatatattagagtgggcgcctgtaggcggatacacatcttctactacctcaatacaagtaatactctttctccttacgcgtattaagtcgctgtctttaatgtctaatgtgccactccaatgcagaactaccatgtcaacgctgcctgtaaaaacatgatatactatattgttatcaactcaataacagaccaaccagacggtgtcatcagtgacagatacctctaaactcacaatcatctatcactttcctaccactcttactctcgtctatgtattactcatcttctaacagatagtatataatnantctacttctgcgctcctgcttctctctgtcgctcnnctctctcttatttatatctttatactttttttttctctctatcgctttcgcgcctcccgcctatcatcactgaactctatatatgttatacctgatagagtctactgagcgatgtgagttttgatattatctagtcatgctgtatatcttatctcgtgtgagtatctccacttcgaatgngatgacgtatacctcgatgttagctcaatactatgaacgaagactgtcctgctcgcgctcatattgcccgtctgttctgcgtagtgccgcaccaccccctctactgtcttcatcattgtaacgactgtcgtcgttttattcgtatgacgatcgcatgtgtctattatgtctcgagtctcgnattctttatcttcgctcgtcctgctactctcaccttatcatccacgctctccgcgattacactctcgctcgcgtgctactcacaagactgcgatggatcatacgagctatacactactagcgcgacgatcgtacacacacactcaagactaatcttcgatacatatctctccgcactatacagctctctgcatncttcatgagtcgtgatgtagtatattgtatatctatatctgtatcgtgcacgtccgcgtgctgccagctcggaatatcgctgtttgacacatntacatcactctcactacacgccacacatatacatatataatataacacatatatcacatactgaatgagcgagctcactgtgactcatatactctattatgtatatatctgtctacatctccctctgcatatccatctcctttctcctctctctctactccctacgctgtgtcctctttgcgctctctgcgtctgctctaatattccacgagtattctctggtgtgtccaagtaataatatgcatn

SEQ ID NO: 5890 - DNA, 751 bp, Glycine max
  Peptide Sequence Number=SeqID_8630
  Probeset Number=SeqID_15669
aaagaaaattaacctgaaaattcggcgataaagtatgtcgcaaagttcttccttgaaatctgatgcagcctctgcatttaccattcttccagagttcgcagcggccaaggcggcgaccatggagttaaaccagagctttaagacaaaacttgtgtcttttagatcattcatacgtaaaaccaccacctccaaagatgaggtgagagcttccataaggtgcattgtcagatgcattgacaatatggagatcagtttgaacgattacgaagtgattgtggaggataaggtggatcgacccgaggttagctcctctgaagatttgagccacgaccaactgaggtcaaatgccacgctactcttgaagtatttcaggaaccgcactctcgagtacttttttgccgctttcttccctcctgatattacacatgttgacgatgctatggcccagtttggtctcatcaggtctcatctcgaaaattgtgagtctctcatttacaaggttatgatggaagcttatgactgcatagcaagttctgaagatgaagactctgggtatatatttttctagcttacctcatgttggatggatgtgcttacctaagtgatggatccgatcgattagcttattttattttaactttgatgtggatttgtgttagtttgacactcctaatgatgtgccacgtttttatgttactatgtctcactctcaaactaatggatctatgttatttttaatgtcttatgtgtt

SEQ ID NO: 5891 - DNA, 1404 bp, Glycine max
  misc_feature (58)..(58): n is a, c, g, or t
  misc_feature (269)..(269): n is a, c, g, or t
  misc_feature (743)..(743): n is a, c, g, or t
  misc_feature (782)..(782): n is a, c, g, or t
  misc_feature (943)..(943): n is a, c, g, or t
  misc_feature (1128)..(1128): n is a, c, g, or t
  misc_feature (1256)..(1256): n is a, c, g, or t
  misc_feature (1258)..(1258): n is a, c, g, or t
  misc_feature (1263)..(1263): n is a, c, g, or t
  misc_feature (1288)..(1288): n is a, c, g, or t
  misc_feature (1311)..(1311): n is a, c, g, or t
  misc_feature (1316)..(1316): n is a, c, g, or t
  misc_feature (1325)..(1325): n is a, c, g, or t
  misc_feature (1332)..(1332): n is a, c, g, or t
  misc_feature (1335)..(1335): n is a, c, g, or t
  misc_feature (1344)..(1346): n is a, c, g, or t
  misc_feature (1349)..(1349): n is a, c, g, or t
  misc_feature (1355)..(1357): n is a, c, g, or t
  misc_feature (1359)..(1359): n is a, c, g, or t
  misc_feature (1371)..(1371): n is a, c, g, or t
  misc_feature (1376)..(1382): n is a, c, g, or t
  misc_feature (1390)..(1404): n is a, c, g, or t
  Peptide Sequence Number=SeqID_8631
  Probeset Number=SeqID_15670
ataacttattgtttgtagcctcaactaccttctttgtgtctaccctctgattatatanatatctctcccatcactcacctgtctcgactgtattgtgttatgtctccacccaccacagtatgatcacgttgttgagcgccccgcgagtagagatgatcgtgagtacagacccgcatcgtgttagtgtatattctgagcacgcgtgagatatgtattatacgttctgaccacactcgatcggacggcagtcgccaccaaccatacccatngtaataatatatagtctcgcaccacctgttttgatagcaccaccacccgcgctccgaacatttatctattttctcgcctccacgttaatacagatatggatgcgcgcaccgcgagatctagactatgaccaccacccatatctatcatgtcctctcgctcccgccctatgtttctttcctgctctccagtcattgttgcatgtacgtcagagtatagagagagaatgtcggatgtatgagacacagaagaatcgatatatatgatggcatacgcaacaatgtcagcagacgacctcgaataccgagaagaggatagtaagacaaaccgtgagtataaactcatggccagcgtgtgtgcgaggcagaccgagagacaaggagggagacagagagatagatatagaggtatatagtatcactttgagagagaatgtgtgtagaggagagaggacggccttggttagatttacacancataataatacaccataattcgtacttatttatatactntaagtcgaccatcatctatatactacctcacagttctcgttatcttatttaccactataacacatattcctctaatagtacgtctctctctttttagtgtatatatgtggtgttttgtcctcgtcgtcagtagtagagactataatacattgaatacgaancacataacacacaggatagatagtcccgtgttgtctatcgcgtcgtgctgggggtgtgagcgcggtggggggctgcgctgcaatcagcctgtgcgtggtgggtgtggatgtgtgtctgatgcagcggtgcgtagatcttcgcctcccacccacatcactctctctcactgataatatcaccatantacttaaaagacatgcagagtggagagtaaagggagaggtggacgtagatgttcactcgtgtgtgtcagttgttaaaccatcgccgtcagtgtcttcgatgttgggagaatgagaggtgagcatacantnaacgnagaccccgcactcacatcgggtggnggagcactcggaggctcgagcangagtngttcgtagntgtcgcncgngtgcggccnnncgngtgtgnnntncggtcggcgggnggttnnnnnnncccccccnnnnnnnnnnnnnnn

SEQ ID NO: 5892 - DNA, 1489 bp, Glycine max
  misc_feature (1)..(7): n is a, c, g, or t
  misc_feature (29)..(29): n is a, c, g, or t
  misc_feature (33)..(33): n is a, c, g, or t
  misc_feature (52)..(52): n is a, c, g, or t
  misc_feature (77)..(78): n is a, c, g, or t
  misc_feature (84)..(85): n is a, c, g, or t
  misc_feature (179)..(179): n is a, c, g, or t
  misc_feature (203)..(203): n is a, c, g, or t
  misc_feature (206)..(206): n is a, c, g, or t
  misc_feature (284)..(284): n is a, c, g, or t
  misc_feature (329)..(329): n is a, c, g, or t
  misc_feature (334)..(334): n is a, c, g, or t
  misc_feature (475)..(475): n is a, c, g, or t
  misc_feature (623)..(623): n is a, c, g, or t
  misc_feature (682)..(682): n is a, c, g, or t
  misc_feature (694)..(694): n is a, c, g, or t
  misc_feature (699)..(699): n is a, c, g, or t
  misc_feature (705)..(705): n is a, c, g, or t
  misc_feature (707)..(707): n is a, c, g, or t
  misc_feature (773)..(773): n is a, c, g, or t
  misc_feature (778)..(778): n is a, c, g, or t
  misc_feature (895)..(895): n is a, c, g, or t
  misc_feature (904)..(904): n is a, c, g, or t
  misc_feature (932)..(932): n is a, c, g, or t
  misc_feature (1023)..(1023): n is a, c, g, or t
  misc_feature (1040)..(1040): n is a, c, g, or t
  misc_feature (1115)..(1115): n is a, c, g, or t
  misc_feature (1130)..(1130): n is a, c, g, or t
  misc_feature (1139)..(1139): n is a, c, g, or t
  misc_feature (1141)..(1141): n is a, c, g, or t
  misc_feature (1145)..(1145): n is a, c, g, or t
  misc_feature (1149)..(1149): n is a, c, g, or t
  misc_feature (1194)..(1194): n is a, c, g, or t
  misc_feature (1211)..(1211): n is a, c, g, or t
  misc_feature (1234)..(1234): n is a, c, g, or t
  misc_feature (1242)..(1242): n is a, c, g, or t
  misc_feature (1256)..(1257): n is a, c, g, or t
  misc_feature (1271)..(1271): n is a, c, g, or t
  misc_feature (1282)..(1282): n is a, c, g, or t
  misc_feature (1285)..(1285): n is a, c, g, or t
  misc_feature (1291)..(1293): n is a, c, g, or t
  misc_feature (1306)..(1306): n is a, c, g, or t
  misc_feature (1317)..(1317): n is a, c, g, or t
  misc_feature (1329)..(1329): n is a, c, g, or t
  misc_feature (1334)..(1334): n is a, c, g, or t
  misc_feature (1351)..(1351): n is a, c, g, or t
  misc_feature (1369)..(1369): n is a, c, g, or t
  misc_feature (1384)..(1384): n is a, c, g, or t
  misc_feature (1419)..(1419): n is a, c, g, or t
  misc_feature (1423)..(1424): n is a, c, g, or t
  misc_feature (1430)..(1430): n is a, c, g, or t
  misc_feature (1434)..(1435): n is a, c, g, or t
  misc_feature (1464)..(1464): n is a, c, g, or t
  misc_feature (1468)..(1468): n is a, c, g, or t
  misc_feature (1488)..(1489): n is a, c, g, or t
  Probeset Number=SeqID_15671
nnnnnnnggggggccccccccccccgccncagnatgcggcgaggcggcgacncacacggccgacaaacaatcgaccnnccgccnncccccaaacaaaagctgggcgggtgtcggcgatctaagggtagggggtgcgacgttgtgcatatatataataatatagagaatcgctcgcgcgncgagactagagaaagatatatatnctntatatctttcttctattattctttacaatcaacgactcaggcaagataaacacggggcgagtggcatatagtctgttngtcatccgctccccgagtggtactttgtatgtggtattgtgtgcntgatntcatcttccaaacacatgtctagggtatattgtggcgggtgggattagtaggcggggcgccgggcaacacacacaggcgcagagcatggaatatattggtttggtagaaaagcgagcgaggggaggtcacaaaggattacncgcccggacgatcatacaaattggtattgggtgtagtatagcggggtatgcagacacgagggagagaaataaaaggtgtgcggggggtggggtggtatgcgtgtgtatgaaagtgggtgagagatgcagagatgagtgagagggaatnctgtgctcgtgtgcaggtctaggtgatgtgtggtggggcagtgtgtggctgcatgtganatgtatggacgnagganaagagngntgagggtgtctgtgtattggagtgagtatgctcggctctgcgtttgttgtctgtgcatcgtatgcngagantgtagtgatagactctgcgctttgtcttgtctggcggctgaggtgcgcgctggtcgctgagtggagtggggtgttggtggagatgatgtgctgtgtggtggatggatagttgatggnccagcggcnctcgcgcgaccctgcagcccggcacagntgtactccgctctgtcacgatagcgcgaaacgtgggcggctcagtctgaaatcatgtatctcatgaacatcacgccgcgcgtatgatgcgncctacctcgcgacacanacaggccgctagtctcatcgatctgtacacatatatgttggtgcttgtatgagcgactatgcgcagcagcagcgntgagtgctgagtganacgacaatntntctntgcncaacagaggacggatctccgaaatctcatgtatcgcagcaacgangcctcgtgaaagcgagnactgagtagatgagcggtgaganctatgatnagctcgtgccgtgnngcataggttctagnatcgtgtgatncgngcagcnnncgtagataacgcntatcgatgttnctgtacgcatgncgctntctcatgatcatcatanctgtcttacgtaacaaangtagtctatggtctnactagtgtaagtgatcatacacgagacagagcagngatnnatatantgcnnatagataacgcgctgctagcgtgagtgcncttnttgagtctccatactatctnn

SEQ ID NO: 5893 - DNA, 1340 bp, Glycine max
  misc_feature (36)..(36): n is a, c, g, or t
  misc_feature (274)..(274): n is a, c, g, or t
  misc_feature (287)..(287): n is a, c, g, or t
  misc_feature (1185)..(1185): n is a, c, g, or t
  misc_feature (1302)..(1303): n is a, c, g, or t
  misc_feature (1309)..(1309): n is a, c, g, or t
  misc_feature (1315)..(1315): n is a, c, g, or t
  misc_feature (1333)..(1333): n is a, c, g, or t
  Peptide Sequence Number=SeqID_8640
  Probeset Number=SeqID_15672
caaaacacagaggacaagagcgtgtcgtatgatacnctcacgcagacccaccccccagcgcggggtgtgtgatgagggcacagatcggagacgaacaacaaacagacaatacgagataatgggttaggaggggagcagacaacacaggtgaggcggcgggggagcggaagcgcacacaacacctctatttgtattgggcacagcgagatgagtaagtggaggggatagttcatataaccaaaatgggagcggacaagtggagtatatagggagngcggtgtggggtngggggtgggtgtgggagaacgtgcataacgtgtagtattgatcactccacacagaggcagacacaacatgatagcacaagcagtgtgcgaagacattcatgacaatagcagcagcagcgggaggtatatataacagcattggtgtgttaggagagggcgcaagtgaggaggtatagtgtcttcccaggcgcacaacagacagtagatgataattcccaccaacaccccaccagagagaatacacgagacgggggagttggtggaggcagcgggggggcgcagatggtgcgcacgcgcgagcttgtttcgtattatggtggaggggggcggggagtgattgggtatatgtagttgtagaaacgggagcacagcaaagagacaacaacaagtgatttacagcccaccgcaccgcgcataatttgtgtcgccaagcggattgtaatatttgacacacaccaggaggtagggtgagagataccgcgccacaccgcttttgcccccacgggctgtgggttttcacacgcagtttattaaatgaccaggacgccacgagtgttatgtggtctcgtaccccgcccgggatatggattacgccgcccgacacacggcggagggtgttggtcggcgcggcactaatttagggggggtgcgggaacacaagaattaggacatgagggaaggggggtggggggtgggatgccccattccgcccgcgtgtgtggtgtttgttccgcgagatattatgttgaacctgtgttgcaacgaatatatcacacatattatgaatatgttatggtggagtgaggaataagctacccaaacacaccccacccaatttgacccgcggcggtattttcgccccagcgtagcgaagacagattaaataaccactgtattntcttctctccctttttattgactctctcccccacaccgtttcaataagttctctcctcccccgcgttttttttaccaacagacgaacaccatttcgtcggccgcgctgttgctcccnntaaacnttaaangaagagagggaagataanttttcca

SEQ ID NO: 5894 - DNA, 1452 bp, Glycine max
  misc_feature (10)..(10): n is a, c, g, or t
  misc_feature (13)..(15): n is a, c, g, or t
  misc_feature (20)..(21): n is a, c, g, or t
  misc_feature (55)..(55): n is a, c, g, or t
  misc_feature (357)..(357): n is a, c, g, or t
  misc_feature (871)..(871): n is a, c, g, or t
  misc_feature (931)..(931): n is a, c, g, or t
  misc_feature (1301)..(1301): n is a, c, g, or t
  Probeset Number=SeqID_15673
ttttaattcnttnnntcctnntattttcacctgggtgctccgtcttgtcttaatntatttatccctttctccatattacaaacctcaaaggctaacctgccgcggcggacaggccggcctcctagaaactaggtagggatccctctgggggccttgcaaggtagggtcctatatattaattatatttactattcagtatattggtgtgcgccgggcgcctcgccattgctggtggtcgtttgtgtggctcccacgaacagtgagagtgattcgctaattgtcaatggaacttaaacatatcctatcactaacgttgtggtctcctgacatatagtcgcagcgggcgcaggcgccggngcccgggccgtgtcgggccttgccgcccccgcccgcgccggcactggcccctgcgaaacacccccgctcaccggccgccgcggccgcacgatcgcgccctgcggcgcacgcacggaaccgggcacaacaacgccataggcgtcgggaaagccatcatcgtgcgctcgcctgtggctgaactcgaatagcttccacataatgtcttaatgcacgctgggcacgcgcctgatgcgagctcacagctccgttccatagtaagtaattacattaacaccagctattcaccgagggagaacttatcgcctccgccaatctcgcgcaacctagctaagagcctcgatcactggcacactgcgacgagaacacgggtggctgtgtaacgagacttccggcgaaattcaatcgcgtgcgcgtctcgttagagggatgaaaacattcggccagcacacaaagatagtaccgcggccaacagaaacccgactataccacctcgcgacgcatcgattacataganagaaatgcatatgcggtactctagacagccgtgccctcacgcatcgcttgtcccataccncatcgcgctgctactcagcggcgaatgctggcccccgcgtaccagcgtcggtgcagtcggcacaccaccacgcccgtgatgctgatcacgcacacatgtgagctcactgagagagcgcaaactcacgctcctctcgcgacatcgcacagcaacagcctgagcgcgcgacaagtgatacgagatgaagccgtagtgctatagtgcgctctgtgcatcagcgacctgtctattcggcggcatgacgatcatggcccatggctagacgaacgcttactaactgcctaccagtcgctaaccctcgcctcttcaactagactcgacttctctgacgtacaccgcgctaccagctgaccgcccccggtacatcaantttagcttatctatactgagcacgagagacgcgactaacagccgaatcatgacctcggagaacgctactactccgcgagactgccaaacaagttaccgctatatgcacacatcggacccaaacggaaagaggatatatcgctacgccatca

SEQ ID NO: 5895 - DNA, 1692 bp, Glycine max
  misc_feature (176)..(176): n is a, c, g, or t
  misc_feature (239)..(239): n is a, c, g, or t
  misc_feature (335)..(335): n is a, c, g, or t
  misc_feature (450)..(450): n is a, c, g, or t
  misc_feature (509)..(509): n is a, c, g, or t
  misc_feature (631)..(631): n is a, c, g, or t
  misc_feature (700)..(700): n is a, c, g, or t
  misc_feature (746)..(746): n is a, c, g, or t
  misc_feature (755)..(756): n is a, c, g, or t
  misc_feature (769)..(770): n is a, c, g, or t
  misc_feature (772)..(772): n is a, c, g, or t
  misc_feature (777)..(777): n is a, c, g, or t
  misc_feature (1016)..(1016): n is a, c, g, or t
  misc_feature (1081)..(1081): n is a, c, g, or t
  misc_feature (1284)..(1284): n is a, c, g, or t
  misc_feature (1353)..(1353): n is a, c, g, or t
  misc_feature (1364)..(1364): n is a, c, g, or t
  misc_feature (1403)..(1403): n is a, c, g, or t
  misc_feature (1408)..(1408): n is a, c, g, or t
  misc_feature (1411)..(1411): n is a, c, g, or t
  misc_feature (1426)..(1427): n is a, c, g, or t
  misc_feature (1431)..(1431): n is a, c, g, or t
  misc_feature (1436)..(1436): n is a, c, g, or t
  misc_feature (1481)..(1482): n is a, c, g, or t
  misc_feature (1524)..(1524): n is a, c, g, or t
  misc_feature (1530)..(1530): n is a, c, g, or t
  misc_feature (1532)..(1532): n is a, c, g, or t
  misc_feature (1572)..(1572): n is a, c, g, or t
  misc_feature (1582)..(1582): n is a, c, g, or t
  misc_feature (1598)..(1599): n is a, c, g, or t
  misc_feature (1649)..(1649): n is a, c, g, or t
  misc_feature (1652)..(1653): n is a, c, g, or t
  misc_feature (1661)..(1661): n is a, c, g, or t
  misc_feature (1663)..(1665): n is a, c, g, or t
  misc_feature (1673)..(1674): n is a, c, g, or t
  misc_feature (1683)..(1683): n is a, c, g, or t
  Peptide Sequence Number=SeqID_8641
  Probeset Number=SeqID_15674
cacgggggacacgtggtacggagagtgtctaagaggagcagtccgccagagtagcgagctatgccaagaggggtgcgatagagtttcgaagtcgagagacggaacgcgggcgtaatagcgtcagcacgtgcaaggtcgccggtcagatcatcgcgatgctcgaggagccgtggganattacaggatctcggtgtcgtgagatgagacaatgtagtgtagcggtcagtgctcacagttanacctagccatatagctgtgagcaacgctgcatatcagatgatgtggtgagcagtcagtcgagcacggtgtcactgcgctcgcaaggttcgggacanacgtgatcagagtccacagtcgtataatatctagcttcgtgtcctatcctagcggtatcaagactatatacacatggtatggtatagtgcgaagtgatagtgctaacatgtcctngcacgagtgcggtgaacaagtcaagacgcgatggagtcatgtaccgtgtgcacgagggntgcatggtaacagtgcgttgattatggaatgagtgtgtgtagacgtaccaggatacagcaacggacagcgtcaccggaattataccattgttggttcgcaaggataatggcggagtattatnctgcgggaggtggctactcacatcctctcgtcagaggccacacgcagcgtgtggtgtgtggtatttgtnttctcttattttattatatatgtttgtgcagcgttgttgttatgtngttgttttnntttatttttgttnntncattnggtgtttaccattaatatgagcgcaaacaagtcgtctacgctcgagcgattctgggcgcggtgatgcagtgtaccgatgcctctagggcggggtagtggctggtgtagaagagatagagtgaggctagggtgtgtttaatattttactagtgcgtatatataggagctcaccaataatatgtatacgacgagaaaactacagatgatcgttcttcgtctcatacacagcttctcctttntggttgttagcctataactcttcagcgcagttacgcgcagtacgagatagacttcctcttaacanactcacggctcccgccaagtaaaaactcatcatgtgaggttatagtatctgactattagggcgcaaggatcagttgaactacggttgattgttttagatattgtactgatagccctcataactattatcataagtggaagtgtttatattgtatatcgtggtggagccgcgtgtatatctcctctctcattccttatatattnatctgtattttggtagggtggggtgtctgcgtgtatcgataacgcagattattgagaaagcgatggtgnacgccgctgtngtggagaggtatgatggggaggataggctatacattatntcaanagncgtgttgtgtgttannctgngagtncttccttctatcttgtctattgttttctcttcctctgtctttggnntgagaggagagaggagagagagaggtgcacgctcctatctgntctttncnatggacgcttgatatgttttgtttcatctatgccttattntttgtttttnattttacaccttattnnttttgcgcgcgggggggggttgtgtgtgggaggtggtggtggaagcgccntgnnaaaaaaanannngggggggnncccacaacncacaacacc

SEQ ID NO: 5896 - DNA, 487 bp, Glycine max
  misc_feature (35)..(35): n is a, c, g, or t
  misc_feature (52)..(52): n is a, c, g, or t
  misc_feature (65)..(66): n is a, c, g, or t
  misc_feature (69)..(71): n is a, c, g, or t
  misc_feature (75)..(75): n is a, c, g, or t
  misc_feature (78)..(78): n is a, c, g, or t
  misc_feature (85)..(85): n is a, c, g, or t
  Probeset Number=SeqID_15675
ggctacggcctggcgcctgaaaactaccccagttncgagcgtttgaccagtnagcctttttacgnnccnnncttncgnaccctgntcgccgaagcacaggccgggggggaccggccttcgaggcgacgcgggagatccgcgccatgccgctgaacatcgtcttcgccgacgcccagcatatcggctggcaggtcaccgggcgctacccgaatcgccgcgaaggtcgtggcctgctgccctcccctggctgggacgagcgctacgcctgggacggcttcactgacccgatgctgcacccttacgatcaggacccaccgcaaggctggctgggcaccgccaacgaacgcagcgtgccgcccggttacggcatgcaactgtccagctcctgggactacccggaacgcgccgaacgcatcgccgagctggccggcaatggccgtcacgatggccgcagcatgatcgccatgcagtacgaccagacctcacc

SEQ ID NO: 5897 - DNA, 1980 bp, Glycine max
  misc_feature (1)..(1): n is a, c, g, or t
  misc_feature (10)..(10): n is a, c, g, or t
  misc_feature (16)..(16): n is a, c, g, or t
  misc_feature (19)..(19): n is a, c, g, or t
  misc_feature (23)..(23): n is a, c, g, or t
  misc_feature (71)..(71): n is a, c, g, or t
  misc_feature (92)..(92): n is a, c, g, or t
  misc_feature (113)..(113): n is a, c, g, or t
  misc_feature (119)..(119): n is a, c, g, or t
  misc_feature (150)..(150): n is a, c, g, or t
  misc_feature (152)..(152): n is a, c, g, or t
  misc_feature (178)..(178): n is a, c, g, or t
  misc_feature (186)..(186): n is a, c, g, or t
  misc_feature (190)..(190): n is a, c, g, or t
  misc_feature (200)..(200): n is a, c, g, or t
  misc_feature (202)..(202): n is a, c, g, or t
  misc_feature (217)..(217): n is a, c, g, or t
  misc_feature (238)..(238): n is a, c, g, or t
  misc_feature (242)..(242): n is a, c, g, or t
  misc_feature (246)..(246): n is a, c, g, or t
  misc_feature (272)..(272): n is a, c, g, or t
  misc_feature (276)..(276): n is a, c, g, or t
  misc_feature (278)..(278): n is a, c, g, or t
  misc_feature (286)..(286): n is a, c, g, or t
  misc_feature (343)..(343): n is a, c, g, or t
  misc_feature (361)..(361): n is a, c, g, or t
  misc_feature (379)..(379): n is a, c, g, or t
  misc_feature (394)..(394): n is a, c, g, or t
  misc_feature (412)..(412): n is a, c, g, or t
  misc_feature (473)..(473): n is a, c, g, or t
  misc_feature (485)..(485): n is a, c, g, or t
  misc_feature (492)..(492): n is a, c, g, or t
  misc_feature (505)..(505): n is a, c, g, or t
  misc_feature (517)..(517): n is a, c, g, or t
  misc_feature (581)..(581): n is a, c, g, or t
  misc_feature (597)..(597): n is a, c, g, or t
  misc_feature (625)..(625): n is a, c, g, or t
  misc_feature (663)..(663): n is a, c, g, or t
  misc_feature (681)..(681): n is a, c, g, or t
  misc_feature (692)..(692): n is a, c, g, or t
  misc_feature (727)..(727): n is a, c, g, or t
  misc_feature (751)..(751): n is a, c, g, or t
  misc_feature (758)..(758): n is a, c, g, or t
  misc_feature (780)..(780): n is a, c, g, or t
  misc_feature (824)..(824): n is a, c, g, or t
  misc_feature (878)..(878): n is a, c, g, or t
  misc_feature (903)..(903): n is a, c, g, or t
  misc_feature (923)..(923): n is a, c, g, or t
  misc_feature (978)..(978): n is a, c, g, or t
  misc_feature (991)..(991): n is a, c, g, or t
  misc_feature (1022)..(1022): n is a, c, g, or t
  misc_feature (1027)..(1027): n is a, c, g, or t
  misc_feature (1049)..(1049): n is a, c, g, or t
  misc_feature (1105)..(1105): n is a, c, g, or t
  misc_feature (1138)..(1138): n is a, c, g, or t
  misc_feature (1145)..(1145): n is a, c, g, or t
  misc_feature (1190)..(1190): n is a, c, g, or t
  misc_feature (1217)..(1217): n is a, c, g, or t
  misc_feature (1219)..(1219): n is a, c, g, or t
  misc_feature (1229)..(1229): n is a, c, g, or t
  misc_feature (1237)..(1237): n is a, c, g, or t
  misc_feature (1284)..(1284): n is a, c, g, or t
  misc_feature (1286)..(1286): n is a, c, g, or t
  misc_feature (1417)..(1417): n is a, c, g, or t
  misc_feature (1648)..(1648): n is a, c, g, or t
  misc_feature (1661)..(1661): n is a, c, g, or t
  misc_feature (1762)..(1762): n is a, c, g, or t
  misc_feature (1790)..(1790): n is a, c, g, or t
  misc_feature (1808)..(1808): n is a, c, g, or t
  misc_feature (1873)..(1873): n is a, c, g, or t
  misc_feature (1922)..(1922): n is a, c, g, or t
  misc_feature (1937)..(1937): n is a, c, g, or t
  misc_feature (1946)..(1946): n is a, c, g, or t
  misc_feature (1948)..(1949): n is a, c, g, or t
  misc_feature (1952)..(1953): n is a, c, g, or t
  misc_feature (1956)..(1956): n is a, c, g, or t
  Peptide Sequence Number=SeqID_8642
  Probeset Number=SeqID_15676
ngacgacgangtacgncgngcgncgcgcatatcaactcgacatagtagatagacgtactacatcctactgnctattcgggacgatgagtacntttgattgtatcgtctggctncgatcngcgtatcgtatagcatctctgcgtgctgacntnttctatgcttacgactcagtgtcgcnacacttgnagtnctcgacacgncntcagtcgtaccagtntcatacatgtcgacggcgtgntcantcantcatcaacgtatgcatacgatctcgnttcnanataaatgnacgctggtcgatgactacgatcatgtacgcgtagcagtcgacgtgatctttcacganttactatcatacggtacnatcggtatcatcgtcgtncgatacgtcgatcgncgtgagcgtacgtcgcgncgatgccgtcttacgtactacgtcgagtcgtgtcacgtacgtcgctatgtgcgtgagtcgnagctattgtcgncactcgnacggcgatgactncttcagaagtcnatactatcactatacgcgcgtccgctccgtcgctcgcgcttcctgtctaccatcgtctacgacntgacgatcgatcaatngttccgacgcatatccagtatgagcgtntcataagtcagacgacgagtacgtgattcgtgcgctgntgttcgacgacgacgacncgtaggacgtncgtacactctctcgttcgactcagccacttatacngcgtacgttcgcgataatcgtcgnatatatncgtgctcacgtctgcgctggtncgttagctgtgacgctaactacggtcgatacgcgcgtcaaagtncatacactgtatggcgtcgtcgcgactcagtgcgtgtgcatgcacgtcctgatngtcgctacgacgagagtcgcgtgancgtacatccgcgcgctgcgncgctgcatgcatctatatacatagcgcagtacgttcctccgagtcatgtcatatnatcatgctcgcgnatgtgactgagcgtcatatgactgaactganattanattgcgcgctgcttgcgctagnagcgcgtattaactctagttaagaagtcgcgtgctcgagccgctcctcgtcgtacnccgctatacgcgctgtgacagtctcccctagtntatcgtncgacgttcgcgtgccgccgatgcatgcgggcctccgagacgtggntatgctctgacgcggcgctcgcacatncntatctctacncgctctcntcctgtcctctccgatgctctacctgacctgccgcgtacgctactgngnctgtgactacttaccctcgctcgacgtgagtgttcgtcgcgcgtgcgcggcggcgcagcaccggcaacagcacgactactgccgtgccattgagtcgctcgcgtagtgcgtgcgtcgcgtgcgcgtacgcnctgcactactgcatcacgactcatcgagctactcggcattcgttcgttcactatatcacgtgcagacgcgcgctagcacgtcgtaaatatggacagacgcggatagagcagcgcggtacgagtcgagataactgtcctcagcaataataccgtatacgtgtcatatctctatgtatgtatagtacgtagtgagacattcagctctagtagactacactcacagtacgacgntatatacaacganaactcagagtagcgagaaagtgtgtacgttataatgtgactctctatgcgcttatatgtcatagagacaactatagcatcgcgtcgctagcgtagtgtctncacacgaagtaagtatagtaggagctgnagaacgatgagagcatanaaatgctatcgtatgacagcgcgtcacaacactatacataagtaatcacatacagaagtgatcgnaatagacacaagttcagaatagatatatagtctgcgagcagtctcggangtctgagagatggangagggacgnannaannaanaagagagaggtggcgcagagcgcg

SEQ ID NO: 5898 - DNA, 451 bp, Glycine max
  misc_feature (435)..(435): n is a, c, g, or t
  Probeset Number=SeqID_15677
tttcctttccaactagtggtgccatctgctgacccggcgatggttgctcctgcttctgcccggtctggacggggtcgtcctcctgggattcgggcgcgccggcatgcgtcttcctcttacggattctccgtcggtgatggcagacgctgctgtgcgtggtcagttgcctggggttcattcagggcggcgttccgctccgcggctcgccggccgcttcgttccggcgtgctgtctacatcgacggaagacggcagtgcaggcgatctctccgtccactccggtgatccactgaacagcgactacatcgacagacgacagcccttgaagttctacgacggcgaagaaaccatagcggacggtcacgacagccacccgtcattggcaatatcatggccgtcgcacgagaatgtgtccatgcagggtttcccacgcgangcgtcaaagtacatgg

SEQ ID NO: 5899 - DNA, 1389 bp, Glycine max
  misc_feature (1)..(1): n is a, c, g, or t
  misc_feature (39)..(39): n is a, c, g, or t
  misc_feature (44)..(44): n is a, c, g, or t
  misc_feature (83)..(83): n is a, c, g, or t
  misc_feature (141)..(141): n is a, c, g, or t
  misc_feature (337)..(337): n is a, c, g, or t
  Peptide Sequence Number=SeqID_8643
  Probeset Number=SeqID_15678
ngcacgcatcgtggcgagtgcgcatcacactgcgcgcgngcgcncgcggtgcgatcataccgtcatcgtcacgcgcgcgtcgngctcgcttcctcgttcttacgctgttcgctgtctgcccttctgtttatcgacggtctncctgctggcgtgcgtcgctcatgtacctctccatgtcacagcgacatcttcatctctgcgtccctcagcatcgctatctcagtccggacgctgcctgcttgcttctagtggtttctccacgcgtgtgcgcgaccgttcattcacctcgctggctcttgtccgtggccctccgctcgctggccgatgatcgtacatncgctgagagcatccatgacgcgagtgtcctcgtcgtagccgtgtcgtcacctcagacgctgcgtctactccgctgtgcgcgtcgtgcgtcgtcggccatcactcactcgctcgcgtctctcggtctagcgctcccttcgtggctgccgcattcatgacacctgtcggtgagtctcggcgtgcgctacccagccctatataagttctgttgtcgttctcacgctcctctcttgtacaccgccgcctccgccggggcgctgcgtgccacagcgtggttacgtaccgtcctatctacgattgtcgtgtgtcaaccgtacagacacgttcgcggctgtacagacgctgaaagtgtaactcctgtcctcgcgcggtcgctccgtgtcacggggcggcctgctgctcgcgcgctccgcaccgcgctttgtaagtgttcacgggtgtccatcgccgtcatatttgcttcggcgttctggttgcggcgcgtgcattacagacctgcccccccgcgcgcactccccctcttcggtgtgcttcatgcgcgcgggggggtaggtttcacggtccgtcgtcctccttttgcattgtgtatctgggctgatccccgtggccgtggccgcgtggactatccctgccgcggcgctaatcctcgtcgcccgcggcctcgggcgttggtgtattgggcaggcggctctcctagaccatgtgttcttcgtttttaggtcttcctactaacgtctcttccccgcgcggcaactcgcgcccgtccccccgcgccgcctttcactgcggccccagacaccggggcggtctcctaatactcgctgtctggggactgtgttcgctcatggtcctcattgtggcggtgtaaggaggctcacgctcggttctacgttgtggcttgtctagcttcccaatcatcattctcctctctcttccataactgcgatgataacactccgcccacatctcgcggtgtggtgcgcgttttgtggggtggtgctttgccgtggccggcctggtctttctcgccctctctcttctcccggccccccc

SEQ ID NO: 5900 - DNA, 1508 bp, Glycine max
  misc_feature (1)..(1): n is a, c, g, or t
  misc_feature (249)..(249): n is a, c, g, or t
  misc_feature (269)..(269): n is a, c, g, or t
  misc_feature (541)..(541): n is a, c, g, or t
  misc_feature (714)..(714): n is a, c, g, or t
  misc_feature (719)..(719): n is a, c, g, or t
  misc_feature (830)..(830): n is a, c, g, or t
  misc_feature (923)..(923): n is a, c, g, or t
  misc_feature (957)..(957): n is a, c, g, or t
  misc_feature (961)..(961): n is a, c, g, or t
  misc_feature (1298)..(1298): n is a, c, g, or t
  misc_feature (1357)..(1357): n is a, c, g, or t
  misc_feature (1361)..(1361): n is a, c, g, or t
  misc_feature (1366)..(1366): n is a, c, g, or t
  misc_feature (1370)..(1372): n is a, c, g, or t
  misc_feature (1427)..(1427): n is a, c, g, or t
  misc_feature (1429)..(1431): n is a, c, g, or t
  misc_feature (1461)..(1463): n is a, c, g, or t
  misc_feature (1468)..(1469): n is a, c, g, or t
  misc_feature (1471)..(1471): n is a, c, g, or t
  misc_feature (1482)..(1483): n is a, c, g, or t
  misc_feature (1497)..(1497): n is a, c, g, or t
  Probeset Number=SeqID_15679
ngagagacgcagtacgtgcgaggacaataagtaagaatcaagcgcagatacacattgctactcgataggggtccgtagtcgcactgaccacgccctcgagctctgatagatcgccagccagcactcgtcagctgtgtcttgtttgatggtactgtcattggttctggtatagtgtgcgcgtgcactctgtaccgtcataagtccagtcatacagacaagaaaactagatgattacgaggaagctcaganatagagcccagacaggtgantgtgatcaggagcagtcatatctacactgttacatagtatgaaagacgagaggtaatactctagcacagtgacttaggagtcgtgccacggtacatgcacataacataagacaaggagacgggcacaacagtccgtaagcacctcacctcaccctgcacggcagcaagcgacagacggtgaggagagaggaagatgtcgcgcacgcaagagaacaagctcgcgacacggatcgtgtacttatactgatatgagcaggggcctattcagagtnaataatgtgtcggaggcggtagacaagtcggtgcgtgggcccaccacacctaaaattcactgactacacatctcagactctcagcgacagataacactaagtagcgagggttggggtgggggtgtgtctccacacctcgggttatacattcacagacatgtctacacgatacnctccngaatcatccatctccactcaaatcaacatcctcacctcatctcctcaactcccgtaggttgtgctagaacctaattagagacatgaaggggtgtgtactatcagtcgcagnctgtatttatatattcttatcactacggtaagaaatcaatactcagccaaagcaggctagccatcccacacctcgccgacacgagacagcagngcccgcgtgaccacacattccaggccacatttanttanatgtggaggagaaacacagaacacacaattgaataaaccgcaccgacggagccacttgaggtatcatcacaagctctgtgagcgtcaatagtgtataaatagcagtactatttacttagataactaccgtctcccgccgcgcgttaccggacctcaaagcgatgaggcgcgcgtgctaagcgtagtagagaaacagaaacctagtgagcatctagtatatataaccttgttatttatttattataacggggtgggtggtcggatcctataatagtaggtgactttctcctgagggaggtggtgagagtgagagagcggtggggctcaacccaccacnctctcactctctcatgatagtgatgatgttgtgttgtgtatatagtaaacgaaggaagncgtnttatntttnnnactttagatttacagttattagtttatattagatagtggtccccctctcggcgtncnnntcaaaacaaataagtaggtggggagggggnnnggggnngnggcgggggggnnggccccgcgcaccnccacacaaaac

SEQ ID NO: 5901 - DNA, 472 bp, Glycine max
  misc_feature (25)..(25): n is a, c, g, or t
  misc_feature (232)..(232): n is a, c, g, or t
  misc_feature (421)..(421): n is a, c, g, or t
  Peptide Sequence Number=SeqID_8644
  Probeset Number=SeqID_15680
gattggtcccaacgagccatctaanctgtctatccatgagaacgcctatggcttggctaaatacactgtcatataccaagagaatggcctggttcccattgttaaccctaagatccttattaatagacctcataacattcacaagtataccaccgtcaccaaccatatccttacagcatgctacaaggctttaaatgatcaccatgtccttcttgaaggtaccctattaaanccaaacatagtcacccctggatcccaatctactaaagtttcccctcaagtagttgccgagcacactatcaaaacccttcagagaaccatacctactgcaggtgctactatcgtggtcttatctggtgaccagagtaaagaagaggcatgcagcgacctcaacaccattaagccaatcgagtgaaagaanccataggcactctctgtctgctttagaaagacacttcaacagagcaccctt

SEQ ID NO: 5902 - DNA, 1667 bp, Glycine max
  misc_feature (70)..(70): n is a, c, g, or t
  misc_feature (117)..(117): n is a, c, g, or t
  misc_feature (195)..(195): n is a, c, g, or t
  misc_feature (215)..(215): n is a, c, g, or t
  misc_feature (238)..(238): n is a, c, g, or t
  misc_feature (451)..(451): n is a, c, g, or t
  misc_feature (517)..(517): n is a, c, g, or t
  misc_feature (965)..(965): n is a, c, g, or t
  misc_feature (1092)..(1092): n is a, c, g, or t
  misc_feature (1511)..(1511): n is a, c, g, or t
  misc_feature (1634)..(1634): n is a, c, g, or t
  misc_feature (1641)..(1641): n is a, c, g, or t
  Peptide Sequence Number=SeqID_8645
  Probeset Number=SeqID_15681
cgcgacttacgcgcgcagacgtgcacatgctagatcatagacagataagcgagagtatatatgtcatagnacgatagtagagatagatacgtagacagatacagagcataccgcgancgctgtggagagacagaagagtaataggtgtgcggaggtgtcataagctgtcactctctatagagtgtgagaggtcangagaatgaagtatcaagcancgattagcgtacgacagcgcgcnttagactgtgtgtacggtgagagcgtgtgattcggagtagagacagtgatgtgacgtgtcagtgaggtgcgtagatgtgtgcgcacagttagagtatatgtcgtcacaagaagatgtaagagtagaagtagacgtgtgtcatagagtagttgttacgagtagtagtacttacagatcgatgtcgactgttggtagtgttatcgtgtcataggnatgataaagtgcgcgctacggaggatcagatgaggtagcgtatacatgagtatgcggagtgtcgtntgtgaaagcagcacgatgaggcaatcagatcgtataatatataatgaggtcgtatgtagtaagtcgaatataaagtaatagcatgtgagagtacgggcatagggacacgatgcacagcggtaaagcatatccataggatgttaagaggtgtggatatgtcaatcactactcacgttgcacgacgaacaaagaagagtagaagaagaataatacagtcgtaacacatataactaatgtcgattgcagagtcagttagtagaacatcagtttaagtgatagttagtgtggagtgagaagatgctgctttggttgtggggtactattacgtgtctgtgatagcgcatgcgtattcggatagagtatgatgcagaagagacgtcatgtgtagcaggtggtggtgtgtttgtgatagtgtgacgtacatgagatgatcagcagatgaaggcgnaagtgatctggcattatatcgatagtagtgttaagagagtgtgagttactacgataagcacaggcatatagacgacgagagtcgagcaacagagtagataggtaggttgtacgcaggtggcggaacnaggtcatcgatatcaagcgtctcgtggtacggatgccttatcatagagcgtcgcaggctaagggaagatgcgaatggatgtgtgggatgcgcggaggcgatgaggacgtaagtagggggagagagggatgttgtgtggttgcttagggtggatgtagagaaagattcgagagtatgggcggacagtgagaaggagaacatagtaagagttgttgagagttcagagatagaatatactaataagtagcgggagatggagagaatgaggattatgacgtgtagagacagcaagcgaggcgaacacaaggagagtcggaatatgtgggagcgaagtcgaaaagaatgatgaaactctatacgagagaagcggcgaggagagggaggagagcgcagcgagggataaacatcaaacagatgtgnattagtaagactgttaaggataaagtgatgtgataccgatcatacaagataagcaagcgtatgtgttagatataggggaatttgtgtatttgttttgttgtgacgaggtgtgagtaggtgggnaagaggngagtagcactgagggagggagacaac

SEQ ID NO: 5903 - DNA, 2268 bp, Glycine max
  misc_feature (1)..(1): n is a, c, g, or t
  misc_feature (53)..(53): n is a, c, g, or t
  misc_feature (59)..(59): n is a, c, g, or t
  misc_feature (77)..(77): n is a, c, g, or t
  misc_feature (94)..(94): n is a, c, g, or t
  misc_feature (102)..(102): n is a, c, g, or t
  misc_feature (112)..(112): n is a, c, g, or t
  misc_feature (127)..(127): n is a, c, g, or t
  misc_feature (135)..(135): n is a, c, g, or t
  misc_feature (137)..(137): n is a, c, g, or t
  misc_feature (150)..(150): n is a, c, g, or t
  misc_feature (162)..(162): n is a, c, g, or t
  misc_feature (168)..(168): n is a, c, g, or t
  misc_feature (176)..(176): n is a, c, g, or t
  misc_feature (180)..(180): n is a, c, g, or t
  misc_feature (206)..(206): n is a, c, g, or t
  misc_feature (209)..(209): n is a, c, g, or t
  misc_feature (223)..(223): n is a, c, g, or t
  misc_feature (227)..(227): n is a, c, g, or t
  misc_feature (239)..(239): n is a, c, g, or t
  misc_feature (249)..(249): n is a, c, g, or t
  misc_feature (261)..(261): n is a, c, g, or t
  misc_feature (284)..(284): n is a, c, g, or t
  misc_feature (293)..(294): n is a, c, g, or t
  misc_feature (296)..(296): n is a, c, g, or t
  misc_feature (317)..(317): n is a, c, g, or t
  misc_feature (322)..(322): n is a, c, g, or t
  misc_feature (325)..(325): n is a, c, g, or t
  misc_feature (334)..(334): n is a, c, g, or t
  misc_feature (340)..(340): n is a, c, g, or t
  misc_feature (371)..(371): n is a, c, g, or t
  misc_feature (377)..(377): n is a, c, g, or t
  misc_feature (393)..(393): n is a, c, g, or t
  misc_feature (398)..(398): n is a, c, g, or t
  misc_feature (402)..(402): n is a, c, g, or t
  misc_feature (454)..(454): n is a, c, g, or t
  misc_feature (465)..(465): n is a, c, g, or t
  misc_feature (482)..(482): n is a, c, g, or t
  misc_feature (484)..(484): n is a, c, g, or t
  misc_feature (512)..(512): n is a, c, g, or t
  misc_feature (535)..(535): n is a, c, g, or t
  misc_feature (561)..(561): n is a, c, g, or t
  misc_feature (563)..(563): n is a, c, g, or t
  misc_feature (575)..(575): n is a, c, g, or t
  misc_feature (587)..(587): n is a, c, g, or t
  misc_feature (589)..(589): n is a, c, g, or t
  misc_feature (598)..(598): n is a, c, g, or t
  misc_feature (616)..(616): n is a, c, g, or t
  misc_feature (653)..(653): n is a, c, g, or t
  misc_feature (656)..(656): n is a, c, g, or t
  misc_feature (658)..(658): n is a, c, g, or t
  misc_feature (676)..(676): n is a, c, g, or t
  misc_feature (705)..(705): n is a, c, g, or t
  misc_feature (726)..(726): n is a, c, g, or t
  misc_feature (731)..(731): n is a, c, g, or t
  misc_feature (733)..(733): n is a, c, g, or t
  misc_feature (765)..(765): n is a, c, g, or t
  misc_feature (773)..(773): n is a, c, g, or t
  misc_feature (790)..(790): n is a, c, g, or t
  misc_feature (792)..(792): n is a, c, g, or t
  misc_feature (796)..(796): n is a, c, g, or t
  misc_feature (798)..(799): n is a, c, g, or t
  misc_feature (815)..(815): n is a, c, g, or t
  misc_feature (820)..(820): n is a, c, g, or t
  misc_feature (823)..(823): n is a, c, g, or t
  misc_feature (833)..(833): n is a, c, g, or t
  misc_feature (853)..(853): n is a, c, g, or t
  misc_feature (904)..(904): n is a, c, g, or t
  misc_feature (918)..(919): n is a, c, g, or t
  misc_feature (940)..(940): n is a, c, g, or t
  misc_feature (956)..(956): n is a, c, g, or t
  misc_feature (977)..(977): n is a, c, g, or t
  misc_feature (986)..(986): n is a, c, g, or t
  misc_feature (992)..(992): n is a, c, g, or t
  misc_feature (1006)..(1006): n is a, c, g, or t
  misc_feature (1024)..(1024): n is a, c, g, or t
  misc_feature (1029)..(1029): n is a, c, g, or t
  misc_feature (1031)..(1031): n is a, c, g, or t
  misc_feature (1042)..(1042): n is a, c, g, or t
  misc_feature (1044)..(1044): n is a, c, g, or t
  misc_feature (1046)..(1052): n is a, c, g, or t
  misc_feature (1090)..(1090): n is a, c, g, or t
  misc_feature (1111)..(1111): n is a, c, g, or t
  misc_feature (1113)..(1113): n is a, c, g, or t
  misc_feature (1119)..(1119): n is a, c, g, or t
  misc_feature (1170)..(1170): n is a, c, g, or t
  misc_feature (1221)..(1221): n is a, c, g, or t
  misc_feature (1246)..(1246): n is a, c, g, or t
  misc_feature (1250)..(1250): n is a, c, g, or t
  misc_feature (1263)..(1263): n is a, c, g, or t
  misc_feature (1293)..(1293): n is a, c, g, or t
  misc_feature (1309)..(1309): n is a, c, g, or t
  misc_feature (1319)..(1319): n is a, c, g, or t
  misc_feature (1364)..(1364): n is a, c, g, or t
  misc_feature (1375)..(1375): n is a, c, g, or t
  misc_feature (1377)..(1377): n is a, c, g, or t
  misc_feature (1406)..(1406): n is a, c, g, or t
  misc_feature (1447)..(1447): n is a, c, g, or t
  misc_feature (1453)..(1453): n is a, c, g, or t
  misc_feature (1478)..(1478): n is a, c, g, or t
  misc_feature (1518)..(1518): n is a, c, g, or t
  misc_feature (1582)..(1582): n is a, c, g, or t
  misc_feature (1584)..(1584): n is a, c, g, or t
  misc_feature (1648)..(1649): n is a, c, g, or t
  misc_feature (1659)..(1659): n is a, c, g, or t
  misc_feature (1696)..(1696): n is a, c, g, or t
  misc_feature (1773)..(1773): n is a, c, g, or t
  misc_feature (1784)..(1784): n is a, c, g, or t
  misc_feature (1839)..(1839): n is a, c, g, or t
  misc_feature (1871)..(1871): n is a, c, g, or t
  misc_feature (1887)..(1887): n is a, c, g, or t
  misc_feature (1902)..(1902): n is a, c, g, or t
  misc_feature (1923)..(1923): n is a, c, g, or t
  misc_feature (1925)..(1925): n is a, c, g, or t
  misc_feature (1959)..(1960): n is a, c, g, or t
  misc_feature (1965)..(1965): n is a, c, g, or t
  misc_feature (1967)..(1967): n is a, c, g, or t
  misc_feature (2022)..(2022): n is a, c, g, or t
  misc_feature (2042)..(2042): n is a, c, g, or t
  misc_feature (2062)..(2062): n is a, c, g, or t
  misc_feature (2069)..(2069): n is a, c, g, or t
  misc_feature (2136)..(2136): n is a, c, g, or t
  misc_feature (2140)..(2140): n is a, c, g, or t
  misc_feature (2224)..(2224): n is a, c, g, or t
  misc_feature (2231)..(2231): n is a, c, g, or t
  misc_feature (2238)..(2238): n is a, c, g, or t
  misc_feature (2240)..(2240): n is a, c, g, or t
  misc_feature (2245)..(2245): n is a, c, g, or t
  Probeset Number=SeqID_15682
nctgcgcaggactactgagtgatgcagtcagtacaggctggtcatgctacatnataatncgactcatggtacagtcnacgacagatccctcggntctaggcnacaagtatgncgtggtagtacagtnagagtatngntgatcttatagtncactcagacgtngtgcgntctcagangcangtccatgacatgtctgcagtactatngtnctagacggactacnactnatgataattcangtagctagtncggtcgtactgnagtagttaatacacattagagtnacatgcatnnancgatgacatcggatcagacgntgcantanaagtctagncagcangatgcggacagcaagagctagcactgatcanctacancaagtacgcacgcagncaagnccangactactatgatacgtattactgcatgcgcatggtcagtaccctactagtangtagaaactantatcagcagcgactgtngngagcgatgcgacaagtcacagtactgangtgcggcatagattcagagaggnacgagacgatcgatgacgcatcgagntnagagcactgatnacatacatcgancntatgaacangctgacacacatcctacnagacgcatgtggatgtacgatcaccatgacatggtgncangnaaactagatactataaantcacaacatcatgcacgactgagtgcgangtcagattacgatctgactgntgatngntgaaataaactaattacatagtctagacacancagctatnccgagtcatatctgtantntagnanntcaagtgatacattanatttncangtcatcatgntcatactacactactagtanccatcatactctatatattcctactatcatagtgatgcaagatgaagggtntggaggaggtggtnnggtgatgtgggtgtgcttcgntcactcttgagtgtcnagtcgcatctacgaatggagnaccagttgntatgtngcagagtataatcntagtcagtaccatgctangctantncaccaaatttntntnnnnnnnatacatactaccaacaaaccacactacacatgtcacanactcatcatgagagacacgcncngtcatncgtcgagcgagtcatacacacgagtgtagcacacagtaagcatatactcantctactcgtcgtccaaacactcacacatacccgtctccctgcactgcttcnctcgatcctttttctgtagtcgctnactntcaatactcgatnatccgtcgagactacagagacgacgcagcncaggcaggcgcagcgngcagcagcgngcacgagcaaagcgcacgaacacgacagacgaccgacacggacgngcggcgactgncngtcgctacagtgtgcgtcagtgagatgtnacggagtcagcgcgacgcgagcgctatcagataaatcgtcnatcatnacgactatgctagtagtgtaatggncggatatagtacgatactagcacatcgtacactagtacantattcgccagtatcagtatgagacgtaatgtcaacagacatcgagacagtgacgagcgagtcangnacagtcgcgacgcgtgactcgatagcgccgatcagcgatctagaccagcctccgtcagcgctcnncacagatatncaaacacgcgtcttcctacgtaatgctacagatatanagcacagcactgcgacgatgcaaccatatggcatcgacgctcgtgtgcaaatcgattcgaatatgatctactacttngctcatctatnctcagtcgtgagcgatcgagacgtgcgatgtagtcgacgatgagagtgagtctgncgcgtgtcgttacatcgtatacagacgattantcgcatacgcactcgntgcatagtctagacntctatgatgctccagtgcgtngncgcgatgtagtgagagcgtacgtgacgaagcgannacagngncgtcctgtagttgagtaacggtagtcgcgtgtggtggtggtgttgggtgtagagntgtgtcctgattgtgtgctncgatgcgaagtatgtgcatngtgacgnagacgcagacagcagatgcagtacagcgatagcgagcgcgacacactacgctgcgtctgcgtcagtngagngcgcgtagcagagagagcgcatgcgctgtagtatgtacctgcgtcgtgatagtgtaatgagaagtatgtgatactgttagagtncgatcgntgtgtcncntcgtntaatctagataaattatataatg

SEQ ID NO: 5904 - DNA, 1526 bp, Glycine max
  misc_feature (24)..(26): n is a, c, g, or t
  misc_feature (41)..(41): n is a, c, g, or t
  misc_feature (51)..(51): n is a, c, g, or t
  misc_feature (98)..(98): n is a, c, g, or t
  misc_feature (558)..(558): n is a, c, g, or t
  misc_feature (616)..(616): n is a, c, g, or t
  misc_feature (625)..(625): n is a, c, g, or t
  misc_feature (648)..(648): n is a, c, g, or t
  misc_feature (733)..(733): n is a, c, g, or t
  misc_feature (859)..(859): n is a, c, g, or t
  misc_feature (864)..(864): n is a, c, g, or t
  misc_feature (918)..(918): n is a, c, g, or t
  misc_feature (929)..(929): n is a, c, g, or t
  misc_feature (976)..(976): n is a, c, g, or t
  misc_feature (1028)..(1028): n is a, c, g, or t
  misc_feature (1119)..(1119): n is a, c, g, or t
  misc_feature (1123)..(1123): n is a, c, g, or t
  misc_feature (1133)..(1133): n is a, c, g, or t
  misc_feature (1198)..(1198): n is a, c, g, or t
  misc_feature (1286)..(1286): n is a, c, g, or t
  misc_feature (1316)..(1316): n is a, c, g, or t
  misc_feature (1327)..(1327): n is a, c, g, or t
  misc_feature (1485)..(1485): n is a, c, g, or t
  misc_feature (1526)..(1526): n is a, c, g, or t
  Peptide Sequence Number=SeqID_8646
  Probeset Number=SeqID_15683
ttttggtgtggggttgtggggggnnngcgctgtgtgttgtngtatcatagngttgtaggttctgtattgctgtcggcgatagtgtactgtactggtgntgtcgtctacgcccagatacactcatacttctcgactctcagcatactacaataactacagacacccaagtatagatgagagtgagcaatgaagagcacgatagtgtgacacagggcagcgcacgcgacgatggctcatatgtactgtagctcggtcagtcgtgtatatgttctgtagactcctaggatatctatatacttgcacctatatgcctcttacgaccataatatataaaataatatccatgcgcgctagtacctgcgcacgagcgaagtaataccagacataccactacaaataactaatactcatatcgctcagcattacttatgcttgcatctacaatctatatatgtacttgattacctatatatatgcaggggccattatatatgcgcgtagttgtactatgagatgcgtgacgtgtcggacgtgtgattgctgcgctgattgatttgncacttgtcggtagtccgtcatgtacggtagcgggcgggcgcgtcgtgagacatcactnatctgcgcngcacagtacatatgcgggcgtgntgcgtctctcctcgccgtggcgccatctgctccgctcctcgctactactctctccatgtccgccgccacgatagtcatcatcatngtcgcgacatgtgagccacgccaagtcgtgaatctcgtggctgcacacgcgagcgtgtgtcgagatagtcatgctgacgagcatatcttcacgtcggcacactacgattgctacagtcatacaggntaatncaagatcgagaggcagtctcggtcacgccgtgcgagtcatagcgatacatatcnaggagttccgnagatctgacgaggcatgcgtacgttgtgttgttgacgcggcggtatngtgttagcactgctacacacactctgcacacggtacgacgctgcctctccangcgagcagtctgctgttgtctcgcgacagctcacgcatgtgctgatcacgcaggcgtgtgttgtgctgagcacttacgctacgcggagacntcangtgcagagcnctaccctccgctccacagctctgtgtcgcgacatagtgctcgcgccttgtactcgcatgagctantgagactgtaggatgactatctggcacgtgagaacgatagaatcttgcgcgtataggcgtgtggcgatcaacactagtctgacgtttntgggactggtgtgatgtacgtgggcgcgcntgatcatatgnagctgagactgcgtcatgctcttagactacgagcctgatgtcgtgaatgagtgtgtggtgatcaatgatgcatgagcacgatcgtgtcgtcatctagatatgcgtaggtggcgtatgcagatactggcgctcagagtcggcgaggtgctgatggctgngcacgcagaggtgagataaacgtgtcgtgcgtccgtcgcgn

SEQ ID NO: 5905 - DNA, 446 bp, Glycine max
  misc_feature (97)..(97): n is a, c, g, or t
  Peptide Sequence Number=SeqID_8647
  Probeset Number=SeqID_15684
atccattcgtctccatcgctggcttatccattcgcccccaccaagatgcatctgcatccatctctcctattctctcgctccatctctcatcttctcnaatctctctgtgggcggagcaaagtgagagccaagccagccgagccgacccctctcctcttccccttcctcgcagcggttcgcgatttgccccttctcgctccatctctctttctcatcccgtgcttccaccgatatgcgcagccaacgggatttagcgctatgagacaactgctcggcgaagttcgttcccatgttgccggcgtgtttaatcgggtgactgcatgcagggccggatgtgaagcctccaaaatcgttggtgccccccgttccacctgagcggatgtgaagccaagtcgctggcaccccgttctagaacaccagatccggagtgcgccgcaggttcctgt

SEQ ID NO: 5906 - DNA, 574 bp, Glycine max
  misc_feature (566)..(566): n is a, c, g, or t
  Probeset Number=SeqID_15685
aattatgtaggtagacagtcagaaatcagttagttcttgtcatatattttgtaattaactcatagtcataatattttgtttttgcttttttacatttttctccatacttcaaagatatacataagcagttgtatcattattctttgaaacatcaatttcagtcttaatttatgatacttttatattaataagatggggagcagaaagcgcaaatggacaccaacccgcataaaatatttcagcaatctgtcacaatgacagcaaaaatgtggcctcagaacaaccatacagtgacagaaggcaactgggagtggggatggcgagttcccccccaccactggcccctactggttgccatgttctgtggtggcgccctggtgctgctgctcgtggtaactacaatcctttggcactgctgcgtcgctcctcatcgtaacaaagattacagagttaagatggacggagaaacactcccacagagaggtgtagttcctgtacttccaagtcactcagctgtgtttggttgagcctaagtatccagaatggaactacagcagccggttggncgcacctc

SEQ ID NO: 5907 - DNA, 635 bp, Glycine max
  misc_feature (15)..(15): n is a, c, g, or t
  misc_feature (635)..(635): n is a, c, g, or t
  Peptide Sequence Number=SeqID_8648
  Probeset Number=SeqID_15686
tcgagtcagctacgntaggcccccccccctacgatgacttggccaacaccgaggctgtcgaatacctgaacaagttggcggtcgttaagcttaacggtggtctcggtacctccatgggttgcgttggccccaagtccgtcatcgaggtccgtgacggtatgtccttcttggacttgtcagtgcgccaaatcgagtacctgaaccgcacatacgacgtcaacgtcccattcgtgctgatgaactcgttcaacaccgacaccgacaccgccagcatcatcaagaagtacgagggacataacattgacatcctcaccttcaaccagtcgagatacccccgtatcctcaaggactcgctcctgcctgctcctaaggagaacaagtcagacatcgccaactggtacccccctggccacggtgacgttttcgagtctctctacaacactggcatgatcgacaagctcatggaccgcggtattgagtacattttcctctccaacgccgacaacctgggtgctgttgtcgacctccgcatcctccagcacatggttgattcccaggcggagtacatcatggagttgaccgacaagaccaaggctgatgtcaagggtggtaccatcattgactacgagggctcn

SEQ ID NO: 5908 - DNA, 547 bp, Glycine max
  misc_feature (506)..(506): n is a, c, g, or t
  misc_feature (514)..(514): n is a, c, g, or t
  misc_feature (533)..(533): n is a, c, g, or t
  Peptide Sequence Number=SeqID_8649
  Probeset Number=SeqID_15687
cttttttttttttttttttaattgcaacatgtattttataatgtgttatctatcgggtatacgttttcttgcgccttgctgagtatgcaacatcgtctaatctcccccttggcccagcatattcagctgtttcaacacgctcaccatggccttcgccttacgatcgccacgagcggccacatgcacctgcttggcatgcgcgatcacgtcacctctccagcgccaaaaaagattctcaatctgctttgctacactcacgccttcgaccctagcaaccaactgacatacccagatcaatctcctcgcgctaatgaacctatgctccatcataggtcgaatgatggcggctcggactacggctttggtaaacagaggaccgattggcagagagtacgacttgaggtagttgtaaagagtgtatatggaacgccaagccgcccgctgcgatcgagtggcatcgagggagtagtggtgagctaattggtgtataaggactgtacgttganagggtgcnatgttgttggtaaggttcncataaatttgtggc

SEQ ID NO: 5909 - DNA, 458 bp, Glycine max
  Peptide Sequence Number=SeqID_8650
  Probeset Number=SeqID_15688
gagaaaaaagtgataatctttatgcaaaaaacaatatcttcagtagtaacgatgagctaaagaacagaagtgtactgcagatcaagaattcacatgaatttcagttcaccagaagatgcaaaaaataataagttcggtgcaccccagcaggtcagcatacaacttgaatcactccctgaaatactccactgtgatagtcagcttcaaacccagcagcaatgcacgagtttctattcatggaaggctgaaatggcctcattactgctatttagaaacccttccatgaaagaatggtgagcaagattcccaccttctaaaccaaccaagagccctaccctccatagccaccatcacagctggcaccttttcccctcaattctccctctccttcacctaggtattcaagagacccagttctatccgttccaatttacttctcaacaacttccccctcgtgc

SEQ ID NO: 5910 - DNA, 1586 bp, Glycine max
  misc_feature (18)..(18): n is a, c, g, or t
  misc_feature (137)..(137): n is a, c, g, or t
  misc_feature (161)..(161): n is a, c, g, or t
  misc_feature (227)..(227): n is a, c, g, or t
  misc_feature (440)..(440): n is a, c, g, or t
  misc_feature (635)..(635): n is a, c, g, or t
  Probeset Number=SeqID_15689
gcgcgcgctcgtttctcnactctatcatcgtcgcgtcctgtacacatattacgaagtacctttactgctgcggcggtcgtccatcattcacactgtatatctatttcgtggcgggtgcggacctgctacctcatcanattaatatatcactcctcgtccgnccggagcactatatagtcgtgctgcacatcatatatagcatcacttttattatagctctgtgtgcncctcttatttacgctcgtatcgtcgccacgtcgcctccggctgctgtcgctatctacgctatctctcttctttcgtctgcgcgttcgttcttccgctctcataatacacgtcgcctgcgtgattatgtgcgcgcgtcgtgcgccggttgtatataatatcgagaatatagccacctctatccgtaggtcattctatttagcatcgtcatgacnttctcatcattgtctatctgtctccttccgtgggtattatctgtggcgcggtcacattaatatatccttatacatgctcgcacgcgcgcccccaacataatccatcgagcgtgcgccggtcgagtgcacgcttaataatatcattctattctcgcatatgtcctcttcctttctctcgctttctcctgctcttantcgtcttatactttatactccatcatcagttcgcgctggtgggcgggttgtctttattcgtgtctctcttcgtactgttcgctgcgctctatcagatcacacaaatgccgcccgtaccgttcatctcacttcctcatctgcttccgtgctattctctccgttcgcattttcttttctttttgaattattcatccggcgggtgtattctaggtcccgcctgctctctgcgtgcccccttcttccttttacttatttcctgggccaataagctcgcacgcgcgctccttcctcagtctcctgtctgtcccccttttaccttcatataacataattcttattttcgcgggcgggggtatactatatatactcctcccttcgcgactacccctggccctctctcattggtgttttttcgtcgtcgatagacactcctccgatcactgtcctagtctctctcatatcctcgtctccttgtccctactacgatttcaaatcccctcgcgttatttaggtgtgtaatttgccccattctggccctgtcgttaattgactcgtctgctccttcttcctgcgtgtttgcgtcctaccccatctcacattatatcgttggtgtccgcgatactttcgcccgctccgttttatataaatttgcgttcccctcgtggcgtgcgtctcaccgcgcaaacacattcatatattgcctatttacccctcgttgcgtgggcactgcagcccgtattattcccacccgcggggcttcgccctgtcattcatacatattctatggtgcgtttgtagacaacagcttcctagtgctcgcgcctccccacttttggaaaaacccctcccccccgggctccctcctcttccactctctttttcttccttatctttctgttgttttttctcttattcttattagaaataattggtcgtttgtctggcgctgtc

SEQ ID NO: 5911 - DNA, 242 bp, Glycine max
  Peptide Sequence Number=SeqID_8651
  Probeset Number=SeqID_15690
acctgcagtctctctttctagttatgaattacagtttgtaaatatattatggtctattgaccgttgctacaataaaaatgtatgtgttcttccaagtggttctgattgcaaactcacttcctgccttaaatgatgtcactgcaatggagcttcctgatattgtagctgaggctgccaaggtttgtgtatttttgtactatgaactctaatttgggtcattcatgctaaatgccattttccca

SEQ ID NO: 5912 - DNA, 1576 bp, Glycine max
  misc_feature (14)..(14): n is a, c, g, or t
  misc_feature (27)..(27): n is a, c, g, or t
  misc_feature (65)..(65): n is a, c, g, or t
  misc_feature (106)..(106): n is a, c, g, or t
  misc_feature (130)..(130): n is a, c, g, or t
  misc_feature (165)..(165): n is a, c, g, or t
  misc_feature (171)..(171): n is a, c, g, or t
  misc_feature (188)..(188): n is a, c, g, or t
  misc_feature (217)..(217): n is a, c, g, or t
  misc_feature (227)..(227): n is a, c, g, or t
  misc_feature (259)..(259): n is a, c, g, or t
  misc_feature (312)..(312): n is a, c, g, or t
  misc_feature (352)..(352): n is a, c, g, or t
  misc_feature (364)..(364): n is a, c, g, or t
  misc_feature (505)..(505): n is a, c, g, or t
  misc_feature (509)..(510): n is a, c, g, or t
  misc_feature (523)..(523): n is a, c, g, or t
  misc_feature (525)..(525): n is a, c, g, or t
  misc_feature (589)..(589): n is a, c, g, or t
  misc_feature (617)..(617): n is a, c, g, or t
  misc_feature (644)..(644): n is a, c, g, or t
  misc_feature (703)..(703): n is a, c, g, or t
  misc_feature (745)..(745): n is a, c, g, or t
  misc_feature (800)..(800): n is a, c, g, or t
  misc_feature (872)..(872): n is a, c, g, or t
  misc_feature (1002)..(1002): n is a, c, g, or t
  misc_feature (1038)..(1038): n is a, c, g, or t
  misc_feature (1050)..(1050): n is a, c, g, or t
  misc_feature (1093)..(1093): n is a, c, g, or t
  misc_feature (1480)..(1480): n is a, c, g, or t
  misc_feature (1518)..(1519): n is a, c, g, or t
  misc_feature (1524)..(1524): n is a, c, g, or t
  misc_feature (1526)..(1527): n is a, c, g, or t
  misc_feature (1563)..(1563): n is a, c, g, or t
  misc_feature (1565)..(1565): n is a, c, g, or t
  Peptide Sequence Number=SeqID_8652
  Probeset Number=SeqID_15691
catgtgtcatctgngatgtagctgacnattgggctgttgtgcagtgcatgtcctactacgatctnctagtatcagctctgttcgtctgctttgagctcctgagagnatgatatcagagtgcctcgacacnccgtcataagatatggtgtcgcgcactacgctgcnatccangctctacgacatacatnctcagggtctcgtctatctcgccgctcgntctatcagtntcacgcacatcgcagctacgcttatgcctagngcgtactagtgaccggatatcgtgctgctaaggctatgggcagtatgtgcagngtcgacatcgtggatcgtattgcgtacacgtgtgatatgngcgaagccgtgncagcactgatgagcatccgaacgagtcagtgatgatgtaagagaggggtggagtaggtgctactatatcaactaacatagtgcgtgcacgcgagacgcgtagcaggtgtggtgggctgggtgtagttatatctatatatgngtgnntagtgtgttgtantnatattacgtctctcatttataagtgcagtcctactgttctcttctatgatatctgctgacatcntgctcgtcctttctcgttcgtcctcgtnaactcacagtctcagcagctctatcgnggacgtatacgaaccgcacgcaccacgcacaagcactcgcgccagcgacagaccagaangacacatgatgagacagagtgtgagacatgtcagaggatgcngtgctgctctagcgcgctggcggatgtatacagtacgtatatcaatgactaactnatttattatcaactcaacatataatcagtattcgtctatctgtgcctgtccatattgtgtctccagacttcnactcgtcatcatgttcttgcctgtactctacgcatagaggcgagtacgacaggagtgcgtgcgagatcatagtgatatatatcagatgacgttagtgtaagcgggaggctgtgtagagtgatgcataagntgaagttaatatatgttgcgcagatatctatggganccatgcgcgccntgctattgtactatctattatgtctctagtatatgctttcgcncctcaatgtattattcgctcgcatgcgctggcacggccggcggcgtgtcatcttcctcggttctcgtatattttcatatttaacatctttattcattaatctctggtggtcgtatagcgatcgcaccgccgtgtctggcggacacttcgccgcggcaagcgtctccgctgtgagaatcgtgtagatctagactaacgcagacatagccatcaacatctcatcctatcatgttgacacatactacatatgtctcatagtatctcgtgacaagcgcttatatatcaatgtcttttcattatattactgccgttctacgtcacgtgtgtgctcacatatacagctccgagcgagacaacacgagcttcgtattcggctgtgtatgtgtantacattttcgacgtatcttctgtgtgatggttcccgtnngcgcncnngatgagaaggggggagacgagcagccacacaacacncnccaaaacacca

SEQ ID NO: 5913 - DNA, 795 bp, Glycine max
  Probeset Number=SeqID_15692
gactttagtttttttcacagttgagaaatctcgccgccgtttgaagaaagaagaagagatgggagttttctcattcgtgcgcaaaagcaaaggcggagaatggaccgcaaagcaacacgaaggagatcttgaagcttcagcttcttccacctacgatctccagcgcaagcttgttcagactgctctctccgccgattcatctggcggcggtcagtcttctttctctcttgtctctcctacctccgccgtcttcgtggtggccattggtggtggtggcggtggaggatttgctgccggaggaggtgcagctgctggacgtggtggtggcgatgaggctgccgcagccccaaaggaggaacagaacgaagaatgaagaatctgaagaggaagagggagactttgcgatttgatctccttctggtaagagacctaaaacaaatttgctagtgttctgagggttttctatcccaattttctttttggtttctgagattttcgagaactatcatggaatgtcagaactaatacggttagtgtcggggttcagcttttcttctgcaaaaaactgatagtttaaatcccataatttttttgccacctcttgggtctcatcgaaaataaaacaagctttttcgatccccggcggaccctcaaaagatgtggtcccggcaccccacatttcgcccccatccttgcgagccgtatttacgccgggtcttccatagagccggctcgcttttaacaccagactgcttgacctggcgtacacaaccatcggcggcctctccccataat

SEQ ID NO: 5914 - DNA, 1751 bp, Glycine max
  misc_feature (11)..(11): n is a, c, g, or t
  misc_feature (38)..(38): n is a, c, g, or t
  misc_feature (240)..(240): n is a, c, g, or t
  misc_feature (361)..(361): n is a, c, g, or t
  misc_feature (373)..(373): n is a, c, g, or t
  misc_feature (445)..(445): n is a, c, g, or t
  misc_feature (456)..(456): n is a, c, g, or t
  misc_feature (511)..(511): n is a, c, g, or t
  misc_feature (519)..(519): n is a, c, g, or t
  misc_feature (589)..(589): n is a, c, g, or t
  misc_feature (621)..(621): n is a, c, g, or t
  misc_feature (685)..(685): n is a, c, g, or t
  misc_feature (708)..(708): n is a, c, g, or t
  misc_feature (721)..(721): n is a, c, g, or t
  misc_feature (725)..(725): n is a, c, g, or t
  misc_feature (727)..(727): n is a, c, g, or t
  misc_feature (793)..(793): n is a, c, g, or t
  misc_feature (797)..(797): n is a, c, g, or t
  misc_feature (926)..(926): n is a, c, g, or t
  misc_feature (968)..(968): n is a, c, g, or t
  misc_feature (1041)..(1042): n is a, c, g, or t
  misc_feature (1044)..(1047): n is a, c, g, or t
  misc_feature (1219)..(1219): n is a, c, g, or t
  misc_feature (1221)..(1221): n is a, c, g, or t
  misc_feature (1291)..(1291): n is a, c, g, or t
  misc_feature (1345)..(1345): n is a, c, g, or t
  misc_feature (1374)..(1374): n is a, c, g, or t
  misc_feature (1417)..(1417): n is a, c, g, or t
  misc_feature (1481)..(1481): n is a, c, g, or t
  misc_feature (1489)..(1491): n is a, c, g, or t
  misc_feature (1557)..(1557): n is a, c, g, or t
  misc_feature (1678)..(1678): n is a, c, g, or t
  misc_feature (1680)..(1680): n is a, c, g, or t
  misc_feature (1746)..(1746): n is a, c, g, or t
  misc_feature (1751)..(1751): n is a, c, g, or t
  Peptide Sequence Number=SeqID_8653
  Probeset Number=SeqID_15693
ttttatatacntactacatctattctatacactatctntttactcttctaacgacacaaacccactacacgatacacaaaagacttagacgacttctcgtaccgccccagtaggtcagaggcgcggcctgctaatctacactaagctcgtgtataccaatcccgcgcgctctagtacactgacaatgtacatatatctttactatctaatcattcattcgacccaccgctacagtatgtnataaatatactacgcacaatatggctcatccatacaacgacatctaaacacataatctctccatccatctgcatttatagcacagcgatttatctcacactaggtcttagaccgtaagttnccatacaatctncatcgtaataacacaagcgatcacgcagtagtctcgctataggaaggaatatatatgctaatcagagccccnactataattcntcatatctctacatgtcgtcactatgctcatgtcgtagtctctcagcgacgtctnacatatgnatcgccggtgaatcctacataaccgtaatcactcaatttctctcatacgacaccctggtcgatctcactncccgcgcgcgcaagcagatcattatatcattntccactcaccatagatcatcgttactacatctctctccatatttctatcctcacaccgattctnctgacgagcgccacccatggtcnctgatactaaatngtangnaataatatgtgacttatgagatacgagcgtaggagcgactgatgtagtaggcactataatgtatcntcgngaaatatataacatatgtatgaagtagatatagctcgctcacctacatgcttacacaatcaatacacgaccgcagtatgtgactcaatatcgacgcacagctactgctgagagacaactcatgctctcntccttgctactctacatgccttctctcattaaacaattatanacacatctacgagactctctcactacacagcacttatttactgcactctaatatcacgatagcacgtcaccanngnnnnctcctctctattgtcacgcatcaccgccactctatgactcacgcgcgcgtgatatactccacgattcatacaagacctactatacatgtgtatagtatctcttctacccgctgtgcgtctcttcgtgatcgctctacaagtacaccacggcgtacctcactactctacgtantngtcatacacgtacatattgtgtctcatcttatacacctcatcagactcacacgcactatactccaatctntctgcgctctcgtcactccctgtctacatcatagatacatatgatacacgcaancatatacaagtactgagcggcacaacacncaatagtatagttatcactaactgacatgctcactatccgagnatttccatatatatattatacacacacgtctactcacagacgtacacacgatttcgtacttgcntatttacnnnacctactctccactcatcacaactcctactacgacacacacacactattgagggcgttactcgctncgctctcgaccatacatagtcggtcgtgcagtcactacacactataggcgcacaacactatacgtatatctatcacactcatagtaacaccacagcttacacatcacttcatcacactgtncncgatatacagcgtatagttgtcgtctatccctatatcgctctcagcacccaactactaccacaacngcctn

SEQ ID NO: 5915 - DNA, 1643 bp, Glycine max
  misc_feature (96)..(96): n is a, c, g, or t
  misc_feature (170)..(170): n is a, c, g, or t
  misc_feature (815)..(815): n is a, c, g, or t
  misc_feature (1027)..(1027): n is a, c, g, or t
  misc_feature (1267)..(1267): n is a, c, g, or t
  misc_feature (1293)..(1293): n is a, c, g, or t
  misc_feature (1341)..(1341): n is a, c, g, or t
  misc_feature (1454)..(1454): n is a, c, g, or t
  misc_feature (1541)..(1541): n is a, c, g, or t
  misc_feature (1615)..(1615): n is a, c, g, or t
  Probeset Number=SeqID_15694
ggcccgcccaccgcaccacgacgacttgagatagtcgtaaacagcggacacgtacggcccaagggtgtcgacacctcgcggcagaggacggacatnaggcgccacgcaggatttctcaattaactctatacaggagtttaatgagtatatggagcgacgccgacaagacngacagacgcggaggacgacgatcagggtgtgcggacgagacgtacgtgatgaggtacatgaagctgcgagcgtacgtaaaggttgtcttatctaatactccgaaccctttgctatatcatgacgtgcacgcgctctacgcgcggcaccgccgtcgcgcctcttcgcaccatcgaggtgacacgaatctttagtgtgtgaggtgatgtctgtagatctcgctatctcgtcttcctatcatctattacgtctagcgcatctgctatctcgtacctctacccgcaccacctccgcgcgtcgtcgagccgtcaccacgtttctatagacagaagacggaggcatgtgggagccgagggggaatggagagagggagaggaagatgaagggaagtgaaagcgcgctgagagaacgtcaacgaaatagctgggtttagcatgtcagctccacacgtgccacaccgaatgtagctacatcatctagaaacgtaacgaggacaacgacaacacctacgtgggaacgcgcaacacggaaggatagacacgcgacagactggtgcgcggcagagcgtcggccgacaggagctaccgagtgagcgtcgacatcaggctcacgcgaagaccaggaacgaccatcacactagtatcaancaatacgagcaccgacacggacggcagctatggtgacacgccaatatgatctcgtctttctacattgtatcgatagccaggcgagagcacgcgatatcgcgatatgtatgctgttgtgtgagcacgtcgcagtgctgatgaggtacggtcggagtgccgtgcggagtatgaggcgagtgtgtagtgatcgactatcgaactgataacgaggnacgagtgcggagagtgcacagaagttactgcgtgttacgcagagtgtcatgagtggctgagtgccgtggtcagtatgcgagacagacagcgacacatcactatatggatatagatacgatgagagagatgcgtgtcgatgtgggcgacgcaagcgtacgctagcacctgtgatgtaggtcacgacagcagcggcgtgagtctagtgaccacggccgacacgtacagcatagctaccccantcgcacaattcgcgtttgctggcagntcgtgctgtgccgacatcaccacgacagtactacagcttctgcgacantacgcaggtcggagtgtacacgtgacgtatgactatcacgactctatgagtcagatagataccctatactacgaggacatgtcagctgcatatgattcgtcttacgtctgganacgtgcagtgagagtgtacagatatcgtatcacggcgctgctgtatctaatcagatcagaggagagagacaagtgtgtagagtctgnagtgtagatgtgatcgtcggacgcgggtggacgatagtcgatatagagcgctcatacatggataccatgtgccnagcggctacggcgaagcggcgcgcgtcc

SEQ ID NO: 5916 - DNA, 556 bp, Glycine max
  Peptide Sequence Number=SeqID_8654
  Probeset Number=SeqID_15695
ctctagctacttctctttcttttcaccaccaccacacctgccgacaggccactactactcccttctgccaccaagtgttacgaaaatctctctctctctctctcacacacacacacaaagtacgcaagcaatggcaaacaaaaactttctatgcattatagaagaaatggataggctttggtttcaccaagctattcttttctcagaaccaacagcatcagttatttcattaccatctccaccagatgaaaaaaaacctgttcctacatcagaatccgtgtcttgctcatcatccattctttcttcaccacctccaccagatgaagaaacttcaacggatgaatcaccctcttcagagcaacaactctcatcagaatcaatgtcagtgcctcttcaggatggttcaatcaacaatgaagaggaaaggaaggacgggttgactagaatgaaccttttggataacagaactcgttcacattcatcctcaccatcaactcaaaaccgtcacagaaaattgaggaaaccagctactacttgtgcaaggaaactacagaag

SEQ ID NO: 5917 - DNA, 194 bp, Glycine max
  Peptide Sequence Number=SeqID_8655
  Probeset Number=SeqID_15696
cggacgcgtggcgcttggctctaatgcccttcatcttaaatgaacacacacgctggaccgatgtcaaaatctaagactgcaatttcgtcaatgtctcttatcttcatttaatagacaatcaaatgaaaatccttccttatgattgagagaaagaacttctgattaaaatttgtcacaaatagcataaataaaaa

SEQ ID NO: 5918 - DNA, 1348 bp, Glycine max
  misc_feature (84)..(84): n is a, c, g, or t
  misc_feature (424)..(424): n is a, c, g, or t
  misc_feature (745)..(745): n is a, c, g, or t
  Probeset Number=SeqID_15697
tataggatgtggtagcgatgtgcgagatgatagttatgctatgtggcggtgactggatagcatatggtgcggacgcatcgtatnatactcgcacacgcgatccacacgtcgggtggccaattatcgacggattcactatatattcatgcacacaaaacactagagacaagtgaatgtgtcaaacgtatatattctcgtagtgtcgagggtgtgagttgtcgacatcgagcggatgcgaggagcatgactgaggttcgcgagattacggtgatctatctcatgcattcgtcgcgatatcgggagtgtgtgaagatatgttagtacagattagagtacctgttggtaggtttattggtaggagatagtataagtaattggggtggcggtgagaatcatatactgagtcatacagcataggtcgcgnagtgatgtggggaatggatgtgtaagctaagaggagggctcggaatgataatgcgctgctggtacagtagagaggagtgaagcgacgaataagaggtagcgaagacagacagactaagtggcgatcggtacgtcctgacgggcttattgttcgttgggtggctaaaagcggagttgtggtgggtggggctacaaaagagaagtgagagagcagagtcgagtcgagcaatatcactcataatttctgaaaggatgggtagtgagtacaaatcagtgtcatcatatgtttggttgtattatagggtagatgggggcgcgtcgnggagacaggcggagggtccagacagcagggaactgggagtgtacgcgaccgggcgacgcgcatgataccccgcgccgggaacgcaagaccgcctctcggccgaattggctatcttcgtctgctgacgacgacttggctaatctacatctactacgagtgagactgtctgtagtagggtggtggtctgtggtgctgaatattactctcctacatgtacagagagtgcgaagaggagggcgcgagcgcaagaacaaaagatgactaatatatagagagtttaaacgagagtatatatctgagataaaacgcctagatgccgcaattgagcgtcgagaggggggagataacgacatcatacaacatttcctaccactgaggttagagcgtgggtcaaatagttgttttttggggcatctattaacatcaaattttcttgtagaatacatgtgaataagtggttaagtgaataatagaactccaatagagaaagaaaagaggttgatctgaaacacttcgaacttgtagtaacataggaccaaagtgctatgtatggagggtgagggggtcactttaattgaatcttatttataccacactataacg

SEQ ID NO: 5919 - DNA, 630 bp, Glycine max
  misc_feature (167)..(167): n is a, c, g, or t
  misc_feature (240)..(240): n is a, c, g, or t
  misc_feature (503)..(503): n is a, c, g, or t
  misc_feature (601)..(630): n is a, c, g, or t
  Peptide Sequence Number=SeqID_8656
  Probeset Number=SeqID_15698
aaaaaaaacaaatctccttcttgaactcaaggagatggctctgggaagaggcagcgcagtggttctactactttgcttcttgctgcttcactctcatatggctcgtgctgccacctacacagttggagattctgggggttggacctttaacactgttgcctggcccnaaggaaagctctttcggactggtgacacacttgctttcaattatagccctgtgactcacaatgtggcgaccgngaacaaggctggatatgatagctgcaagactccatgaggagcccgagtgtataagccagggactgatccgaccagacttgccaggggagaaaactactccctcctgcattatgttgggccctggcaggctggaatgaaaattgccatcaacggtggccgggcctaatattaggggtaaccttccccaccatattggatggaaaggccaattgctccccttaagggggaaattagccccctttaatttaaggttaaaaaaaaanaaaagccaagcgggggccctttctaataagggcccccttatctaataaaaaataaattggcccgcggcgcgaaaacaaataatataaaacaaggtttnnnnnnnnnnnnnnnnnnnnnnnnnnnnnn

SEQ ID NO: 5920 - DNA, 774 bp, Glycine max
  misc_feature (43)..(45): n is a, c, g, or t
  misc_feature (68)..(70): n is a, c, g, or t
  misc_feature (79)..(79): n is a, c, g, or t
  Peptide Sequence Number=SeqID_8657
  Probeset Number=SeqID_15699
atatatttgcaaatgatgaccttgaataccagactaaatttcnnnctgaacgtcttggaatgggagcnnnccggatgcntttagaatccatcttcaataggatccaccctcaatccttggagtataccagttttggcaaaccacatccatctgtattcaagaatgcagaaattctgttagagaaacttgtggcgtcactttatgatgatttctatgatataaatcatgataacacttcatattttaaaacactttacatgattggagataatcctgcagttgatatcaaaggtggacgaccgactggggcaccccggattcctctgcacaccagaacgggggaattgagggggagggacaagcggggccactttacggcggatccggtggtagacaccgtggaagcggcagaggactacaaaacgacacaggaatggggatcatcgggccggcgccgtcagcggtgcgcggcagagggggcgaccctggaaggcaagggtccccagaagaggggatttgcaggggaagggagatcatggcgaacactcagcagatgtggtggttgacactggcgaagacgcgggggacaacagaagggcaaacgagtgcgccacgaaggccagggtcaggttgacgtggcaaaggctcgggttcgatagggcgagggagcgccaaaggggggaagctatggccaagcattgggatagctacgcagcgaagagcaggtagatcatgacacgctggggccggttgattcatttatcaatggcgggt

SEQ ID NO: 5921 - DNA, 477 bp, Glycine max
  Peptide Sequence Number=SeqID_8658
  Probeset Number=SeqID_15700
caacaacaacaactgaagatgaataagcatcaagcgtcagagaagaagaacgataacatggagaagccactaactccattgatgcctcctcctcctcccacacttgaaaggacaacttccattgatgatgagcctaaaactttgcttgaggaggagatgaaagttgcaagggtttgatatacccattttttctctttatatacggtttccagctttaattattttctcttgtttttgtttttgtttaaaaattcttaattaaaattctttgtgcaggaggcagctctcaaaatcatcaattctcactcaaaagaagatgccctgaaaatattcctggcggtaattgaaatgttttttttttcttttttgcgattccgtaataattgttcacttttattcagcagatttatcagaactttttttgttgtggggtatacacgggatcctgatgctgttgctttcaaaagtttttttttt

SEQ ID NO: 5922 - DNA, 1359 bp, Glycine max
  misc_feature (41)..(41): n is a, c, g, or t
  misc_feature (87)..(88): n is a, c, g, or t
  misc_feature (92)..(94): n is a, c, g, or t
  misc_feature (186)..(186): n is a, c, g, or t
  misc_feature (284)..(284): n is a, c, g, or t
  misc_feature (324)..(324): n is a, c, g, or t
  misc_feature (328)..(328): n is a, c, g, or t
  misc_feature (876)..(876): n is a, c, g, or t
  misc_feature (918)..(918): n is a, c, g, or t
  misc_feature (1091)..(1091): n is a, c, g, or t
  Probeset Number=SeqID_15701
gttttgtttgtgtgtggtgtgttggttgtgttgtgtgcccncttggcaaggcggtgggtaggaccatgagaagcccccacacccccnncccnnnccccgaacaaaaaaaacgcttgaatggattacaatatggagttgtgtgtgggtggtgcgggaaatataaccaacctaagaccacacaggtanaaaatcgagaaagagaaaaaagaaaaaatgagaaaatgaagggtagagtgcgtttacttatacaaatataaaatataaatgatattgtatggatatanttttgtttctttttagtgttcgttaggggcggggtagttngggnttgaggttgtgctggggtgctgagtgggggggtgtttatgtggtgtgtgcgttgggtgtgtgacggttctgacaggagtgcacggggggagaagcagacaaaaaaaggagaaaaaagagagacgggagaagacagaaaaacaataaacaagacaacaaacaaaatattaaattggtgtggatgatgtatagtgggggagataggtatgggagaggattgagtgagagggagctgtgtagcagatgtattaatattagtcttcttaataatgtgtgtgtggggatgttgtgccaggataatgtagataggaggatgtgtgaggtggagtgaaggtgattgggatcagtgtgatggttgtgggttgtgatgaggggagtgtttgctaaggtaatagtgttgtggtagatgtatgggttgatattattgagaggtaacaaagtaaaccgatatgaagccaaaggggcataaaggagagatagagagacaccgccggcgcacgcaataaattgttaagtgaaaaaatagtgggaagagatagacactaaaanatatatagatgatgcgagacggaaatcgaagatacgaggaanagtataaagatatgagtgagagtagtgtatagtgttatatgatgagattagtggaatcatatgataaaagtgaatgggctcacatgatgcagagagtgatgtcggacggagtgtgtggtttaggggtgttcgtgccggtgaggtggcatgtgaggccgctaactactagggancggctctcgtcgtacgtatataaatacgtacgaatgcttcggcgcgtgtatcgtagggaagagacgtagatcagatgacacaaattatgacttatctagggtgtgttgtggagtgacggataaagtgctcgtggtgtgtaggtatattgatagacatcgagtcgaatctttgttggagcattaacgatttgtcactacacctcatagtaacaggtagtgtatagcgcagaggagtgagataaaagatgggacaggacgggcggcggcc

SEQ ID NO: 5923 - DNA, 326 bp, Glycine max
  misc_feature (186)..(186): n is a, c, g, or t
  misc_feature (194)..(194): n is a, c, g, or t
  Peptide Sequence Number=SeqID_8659
  Probeset Number=SeqID_15702
gtgcccgcaacttgctgcccatgaaggccagggaagggaggactaccgatgcctactgcgtggccaagtatggcaacaaatgggttcgaaccagaactctgcttgacactctctcccctcgatggaacgagcaatatacctgggaggttcatgatccatgcactgtcatcacggttggggtatttnactaccancacatcaatgggaacagggctgccagatatcagatatttgtaaaggtgacaaacacgcgtgcaattctcgaaactgatcgtgagtatcaacagttctatcgtgtgaggattctacaccctagcgctctgaga

SEQ ID NO: 5924 - DNA, 485 bp, Glycine max
  Peptide Sequence Number=SeqID_8660
  Probeset Number=SeqID_15703
ccctgttaatccttcggtcgctcggtcgcagtcgcaccgccgtcaacgacaacgaccaccgcgcgaggatcacgcccgtccccccttcctccgatccgatctcaccagagcgagatgggtggacgcggaggtcgcggaggtcccgggggccggggcggcggccgggcggcaggggcaacgccgctggccagggagggccagtggcagctcccgtcatctactggttctgcgagcactgcggggatctgcgccatgacaatcaagcacgtcacctcgtgaaccacatctacatggaacaccaggaaacccagcagcgcctccgccagctgcaggcgcgtgaggcgtatcagcgagcccatggtggctcgaagaagaggggcaaccgccgccgccactgaatgaaggtagaagactaagtaacactactgaagtcacctgcgcaaatcttccagcattatcaatcttatttccgcattttctttctg

SEQ ID NO: 5925 - DNA, 713 bp, Glycine max
  Probeset Number=SeqID_15704
cggtccggattcccgggtcgacccacgcgtccggtgataaacaaggtactccatacaggaagggtcagatgaggcttactctgtgaagaacaccatcagtgagtgtgaagtgcctggctttaagggagaggaaaagcgttgcaggacttccttgagtccagggttgcttgcgcctctaccaagctcgggagcaacgatgttgatgctgtgtccacagaagtggcaaaaaaagataatgagttcctacagtatacaatggcaccatgggtttagaggttatctgaggacaatgctagtgttgtgtgtcacatggagagttacacttatgcagtgatttattgccacctatcagagaccacaatagcgtattctgtcccattggcgggtgctgatcgaagcagggtcaaaacagtttcattgtgacatactgtcccatcaaagtggaatactaagcatttggcgtttcaagtgcttaaggactatccaggaactgttactatgtgccactacctgactcaagagcatgttgtgtttggtcccaagtataaaagtgtgttccttcccaaaataatgtgttatagtctatgcttcataccgttgatcttgtggtcacactttatatatgtcaacttagttgaatctaacgacaatatttaaagttgttaacattgtaaatctaagttgcatgttgccatgatgcattagcaccatgc

SEQ ID NO: 5926 - DNA, 1481 bp, Glycine max
  misc_feature (5)..(11): n is a, c, g, or t
  misc_feature (16)..(17): n is a, c, g, or t
  misc_feature (24)..(28): n is a, c, g, or t
  misc_feature (30)..(30): n is a, c, g, or t
  misc_feature (32)..(36): n is a, c, g, or t
  misc_feature (42)..(43): n is a, c, g, or t
  misc_feature (48)..(48): n is a, c, g, or t
  misc_feature (71)..(72): n is a, c, g, or t
  misc_feature (115)..(115): n is a, c, g, or t
  misc_feature (139)..(139): n is a, c, g, or t
  misc_feature (141)..(141): n is a, c, g, or t
  misc_feature (268)..(268): n is a, c, g, or t
  misc_feature (282)..(282): n is a, c, g, or t
  misc_feature (313)..(313): n is a, c, g, or t
  misc_feature (323)..(324): n is a, c, g, or t
  misc_feature (400)..(400): n is a, c, g, or t
  misc_feature (438)..(438): n is a, c, g, or t
  misc_feature (502)..(502): n is a, c, g, or t
  misc_feature (550)..(550): n is a, c, g, or t
  misc_feature (737)..(737): n is a, c, g, or t
  misc_feature (745)..(745): n is a, c, g, or t
  misc_feature (758)..(758): n is a, c, g, or t
  misc_feature (823)..(823): n is a, c, g, or t
  misc_feature (885)..(885): n is a, c, g, or t
  misc_feature (892)..(892): n is a, c, g, or t
  misc_feature (928)..(928): n is a, c, g, or t
  misc_feature (982)..(982): n is a, c, g, or t
  misc_feature (1067)..(1067): n is a, c, g, or t
  misc_feature (1102)..(1102): n is a, c, g, or t
  misc_feature (1205)..(1205): n is a, c, g, or t
  misc_feature (1214)..(1214): n is a, c, g, or t
  misc_feature (1234)..(1234): n is a, c, g, or t
  misc_feature (1260)..(1260): n is a, c, g, or t
  misc_feature (1328)..(1328): n is a, c, g, or t
  misc_feature (1378)..(1378): n is a, c, g, or t
  misc_feature (1440)..(1440): n is a, c, g, or t
  misc_feature (1469)..(1469): n is a, c, g, or t
  misc_feature (1481)..(1481): n is a, c, g, or t
  Peptide Sequence Number=SeqID_8661
  Probeset Number=SeqID_15705
ggggnnnnnnnttttnnccccccnnnnncncnnnnnttaaannttacnccggcccctctccgcttctcccnncccccctcctctcactctttatcaatttatatactatagcatntgtgatatgtatatataatatctncntattatattatgtaggtgtgtaatgtcgctagagagatggtgggaggagtctcattttattatgttcgttttgccacgtgcgaatacaaactgtccaacatacaccgctcgcacgcgcgctgtccgntgacatcacctcantgcgcgtaggaggccgcgccacacgcagacnatcacgaatnnggagctcagcacacccagtgaatcgaacggaggagagaagaaagtgcaatgcggacggactaaaagaagaaagagncagagagcgagacacagagtacatatatatttttcttngctgtattgtgtgatcttatcgtctgcctctttgttcttgtactataaatgtgcgctctctctngtctaatactacaactggtcatccactctttagtatctaaaccctctntatttactttactgtcctatctcactctcactctactatgttaattgtcgtcaatgcgctgttatatgtgctctgccgctgtctgtctcaccttcttctctatcagctagtcgttcgactcactgtcgcgtcgtcgtaggtctcacgtcgagcatgttaatgtcggacagttgcgttttatcatgtntgtgaatncaatatactcgcnatggcatatatatttacgcgacccgaccacggcaccagccacactacactaccgcgcacgccgcnagcgaacactcagtcatatagtattaatgtagatagagtactggactctcacgacatcctgnacatgcnatattatcacaccttagtcgctgccctctgccctcnctccctcgccgactaggagtcgctcatgcgacacttcgcagatatctcactcgngaggacgggaggcccgtgaccctccactcacttgcccttgtcctcatccagcgacacgacgtcacgtaacactaagaggagtgancaccacaaatgttggtggcaccggcgcgagagtgncagatagacttgccctactctctcctctcaccaagtcaatcagcgtaggtgtgatcggcgaaatacaagagcgagttgctctgcgcgtatcgtcatgcttagncggaaggcngcaataataacgtagatatnagatctcatagacgcgtctctgcacntaatcccgaaatatatacatgcacttatcacctgtctctcgcacacttagcgctcgctcacctgctcnatgcgagccgcgtgacgcaccgcttcgccacagatacagcacctatcttnacgcacgagttcatgtgcacgctcgctcgtgcactactactcttcagtgcgtgtcgcagacncgcgcgctgccgctcacacagagagagtncgtgagcgacgn

SEQ ID NO: 5927 - DNA, 1455 bp, Glycine max
  misc_feature (20)..(20): n is a, c, g, or t
  misc_feature (25)..(25): n is a, c, g, or t
  misc_feature (27)..(28): n is a, c, g, or t
  misc_feature (31)..(32): n is a, c, g, or t
  misc_feature (36)..(39): n is a, c, g, or t
  misc_feature (42)..(42): n is a, c, g, or t
  misc_feature (45)..(45): n is a, c, g, or t
  misc_feature (50)..(50): n is a, c, g, or t
  misc_feature (69)..(69): n is a, c, g, or t
  misc_feature (82)..(82): n is a, c, g, or t
  misc_feature (146)..(147): n is a, c, g, or t
  misc_feature (190)..(191): n is a, c, g, or t
  misc_feature (197)..(197): n is a, c, g, or t
  misc_feature (227)..(227): n is a, c, g, or t
  misc_feature (229)..(232): n is a, c, g, or t
  misc_feature (236)..(237): n is a, c, g, or t
  misc_feature (369)..(369): n is a, c, g, or t
  misc_feature (375)..(378): n is a, c, g, or t
  misc_feature (419)..(419): n is a, c, g, or t
  misc_feature (442)..(442): n is a, c, g, or t
  misc_feature (458)..(458): n is a, c, g, or t
  misc_feature (514)..(514): n is a, c, g, or t
  misc_feature (518)..(518): n is a, c, g, or t
  misc_feature (549)..(549): n is a, c, g, or t
  misc_feature (567)..(567): n is a, c, g, or t
  misc_feature (573)..(573): n is a, c, g, or t
  misc_feature (623)..(623): n is a, c, g, or t
  misc_feature (666)..(666): n is a, c, g, or t
  misc_feature (704)..(704): n is a, c, g, or t
  misc_feature (706)..(706): n is a, c, g, or t
  misc_feature (814)..(814): n is a, c, g, or t
  misc_feature (971)..(971): n is a, c, g, or t
  misc_feature (987)..(987): n is a, c, g, or t
  misc_feature (1101)..(1103): n is a, c, g, or t
  misc_feature (1108)..(1108): n is a, c, g, or t
  misc_feature (1115)..(1115): n is a, c, g, or t
  misc_feature (1324)..(1324): n is a, c, g, or t
  misc_feature (1451)..(1451): n is a, c, g, or t
  misc_feature (1455)..(1455): n is a, c, g, or t
  Probeset Number=SeqID_15706
tgtgatgtgggtggcccccnccccncnnctnncttnnnnttnttntcatnttcaacataactttttatnttatttatccaanttactctttttatcaaaactcacaagacagcacacacacataatcccaacacaaccacacacannatatatatagatagaaaaagaaatcaaacacattatcaaaaannagaaancggcgaggcgcgcgcggtgatgggggaggngnnnnaagnnaggaggaatagaggagagtttgatgtgtatcccatactgtcggcactctcacccccaactctggtagtgtcggcgagcacgcaacaagaacgtctatatatctgatttgtcatgtgtgctgtgtagtgatanaagaannnntaacaacagcggctgtcctgatgactctaacagatgtgatntatgtcgcagtctggatggaggnacgtgatatggatcantatcatcgtggcgaatgctgtatactgtggattgtgtagcgtgtgtatcgtctgcnatgntgtgacagaataactagaaagagatatatanaaaatatataaagaaatnaaaaanaagatagatagtattaatactgacatatagtaattaatcataatgctgtnagaggcgaggctagatgtgctctggatggtgtagaagagattngattagatgacgaacaaagacaggaaggagtgaaaatncnacacatatcaaaatagatagagcagtcatacatcggctccacagtctatgagagaatatataatattaaatatcatacactagctgacctctcgctatgtacgtaagntgtgtgtacaatcacccacgccttacacaggcgtcgctagacgtagtatggcgtgatatgagtgacgtcgatgatgcgacggggtcaggagtgtgcacacactcaccgaatcaagctcagtgataggcacgcagcacagctgatactctgcattagngacgcatcgtacgttnatgtgcgctaggaccgctctagctgtgtattttatctagtaattcaagtactgttgttatacaggagagatgacagagtcaagtgaatgcgagcgtgatatggaggaggagcannncccanacctacnacctccacagtgtgacacttgcatatcaagtagcgaagagagtgaagatcagcgagacgtggtgaggtgctcgccgaagtgaatgtgagagagtgtcagatagcagagtcgcgcacggacactgtgcacgtaccaatacaagagataagacacagagcaatatacatgctatacggcgtcatgcgcgacacgtgctagccgcgcgcgcntacgcgacggcatgaggatgagcggagcgcagtgtcagatgctccacactacacactgtaacgaatgcagagatgtgagagaagtcgccagggcagtcgcgatatgcgagagcacacagctctctcnacgn

SEQ ID NO: 5928 - DNA, 618 bp, Glycine max
  misc_feature (618)..(618): n is a, c, g, or t
  Peptide Sequence Number=SeqID_8662
  Probeset Number=SeqID_15707
agctactagccccccccccatacatcattactttttgcgttaggtttcgtatttatgtttactatgggggattatcaggtgtggttcttgctaacgcatcacttgatattgctttccacgatacttactacgtagttgctcatttccactacgtgttaagtatgggtgccgtatttgccttatttagtggatgatacttctgaatccctaaaatattagggttagattataacttactatattctaaagctcacttctgagttctatttactggagttaatttaactttcttccctcaacacttcttaggattacaaggtatgccacgtagaattagtgattaccctgacgcctttacaggttgaaacttcattagtagtattggttcacttatctctgttgctgctactgtgttattcttacacatagtatacttacaacttgttaaagggaaagctatatttggttacccttgagcagttcctcaactatttagtgattacttaagaatacttaaagataaatgtgctccagggttagagtgagcattaagtaatccacctaaacctcacgcattactagcttaccattacaaagtagtacaatcttatcttctan

SEQ ID NO: 5929 - DNA, 1479 bp, Glycine max
  misc_feature (8)..(8): n is a, c, g, or t
  misc_feature (95)..(95): n is a, c, g, or t
  misc_feature (114)..(114): n is a, c, g, or t
  misc_feature (159)..(159): n is a, c, g, or t
  misc_feature (170)..(170): n is a, c, g, or t
  misc_feature (189)..(189): n is a, c, g, or t
  misc_feature (237)..(237): n is a, c, g, or t
  misc_feature (265)..(265): n is a, c, g, or t
  misc_feature (280)..(280): n is a, c, g, or t
  misc_feature (294)..(294): n is a, c, g, or t
  misc_feature (309)..(309): n is a, c, g, or t
  misc_feature (347)..(347): n is a, c, g, or t
  misc_feature (493)..(493): n is a, c, g, or t
  misc_feature (600)..(600): n is a, c, g, or t
  misc_feature (602)..(602): n is a, c, g, or t
  misc_feature (624)..(624): n is a, c, g, or t
  misc_feature (824)..(824): n is a, c, g, or t
  misc_feature (1025)..(1025): n is a, c, g, or t
  misc_feature (1224)..(1224): n is a, c, g, or t
  misc_feature (1361)..(1361): n is a, c, g, or t
  misc_feature (1389)..(1389): n is a, c, g, or t
  misc_feature (1395)..(1403): n is a, c, g, or t
  misc_feature (1407)..(1414): n is a, c, g, or t
  misc_feature (1416)..(1418): n is a, c, g, or t
  misc_feature (1427)..(1429): n is a, c, g, or t
  misc_feature (1431)..(1431): n is a, c, g, or t
  misc_feature (1439)..(1442): n is a, c, g, or t
  misc_feature (1454)..(1455): n is a, c, g, or t
  misc_feature (1458)..(1458): n is a, c, g, or t
  misc_feature (1461)..(1461): n is a, c, g, or t
  Peptide Sequence Number=SeqID_8663
  Probeset Number=SeqID_15708
catagatnctatgtcattattacgtagccgtgcgcgacaggcgttcacagttggcgtcgttgtcgttgcgtccgtctctaggaatgtacatatantatgcacacatactcatcnagatcatcatagagcggtcgtcgtgtcgctacagctcgctgcganctctgtcgtcnggtctcgcgtcgtgtggtntcatgtgtcatacatctccgtgtcagtctctctgtctctgtcatcgcnatgcgattttagccattctgtcctcagntgtgactagttaccnactcagcgtgctcncgtcgcgtcacctgncttatttgttcatgcgtgatagtagttgtgtgagagangagtgatgtgtagtgtctagatagtagatagctggtgagtatgctgtgagatttgtatattatgtgagttgcatacgtgtgtctgatcgtgctgtgtgtatgtactagtcgcttcgatatgctatgtcacgacatatgcagcacangtgtgttgcacgacagcgcgcgtgcgtgacgcgactgtgcatacgacgagagcatgagctatgatgtatgttggcacgtcgtcggagactagatgcgcatctatgtnangtcatatcgctccacacatatnacataatctagcacaccaggcaggtgtccagatcgcttctctgtagtcatcacatatgtcactctatgcatatgtgtcttgtgttgtcttcgatgtgttacgtgtcgtctcttttgtatcgtgttgttgtgtgtactcttcggtagtagttgcgagcgtgtcatgatctctcattctctcacgtctacttataccaccantgtttatgtgtatcgtgatcacacacccatatacatactatccactctactcacaccacaactagcgtcatctcatcgttcggctcctgtcagaccagaatcgtgtgtcttttgtcgtgtgttgttatcgtgcagttgttgtactctctgccttgtatctatcgagcttcgcgattcttttcctgtttgttttgctatttnccatatgtgattatatactcttatatatctctcctattcattgcagtcgagtattacgatgaattcaatgcacaaccaaccatcagacacatacaacacacacacaacacaccaccctcacacactcaactacataatatatcctcatatatactatatatattttcgcatatactattcacataggcatgtgattgcntattctagtgttgttgtcagatcgtgttttgttggcagacagcgattaggaggagaggtggagcatgctgtccctcgcgcacagctccgcgcccgagcggttaaattattgtgtaaggcaggagagcgctcatacanatatcaaactgatttatcagattctctntttatnnnnnnnnngttnnnnnnnntnnncccaccccnnnantccctccnnnncctcccgccccnnccnccnaaaaaaaaaaaaacaaca

SEQ ID NO: 5930 - DNA, 518 bp, Glycine max
  Probeset Number=SeqID_15709
agttataacctaatatcatctccctccctcaaagttcgtcgcccagtttcttcatcaactcagcggctcgtgtcttctttcttctctgctaaagaaaactatggcgtacgcaccaccgatgaagcaaggaaagacaggattagaggagcctcaagagcagattcacaagattagaatcactctctcctccaagaacgtcaaaaaccttgagaaggtgtgcactgacttggtccgtggagccaaagacaagagattgagagttaaaggaccagtgaggatgccaactaaagttcttaagattaccacaagaaaggctccttgtggtgaaggaaccaacacatgggacagatttgagctccgtgtacacaagcgtgtgatcgatctcttcagctccccagatgtggtgaagcagatcacttccatcaccattgagcctggtgttgaggttgaggtcaccattgctgattcttagatgcatctactttaatttgcaagttgtctttgaattgcgacggttt

SEQ ID NO: 5931 - DNA, 1651 bp, Glycine max
  misc_feature (1)..(1): n is a, c, g, or t
  misc_feature (12)..(12): n is a, c, g, or t
  misc_feature (17)..(20): n is a, c, g, or t
  misc_feature (23)..(24): n is a, c, g, or t
  misc_feature (30)..(32): n is a, c, g, or t
  misc_feature (39)..(39): n is a, c, g, or t
  misc_feature (52)..(53): n is a, c, g, or t
  misc_feature (123)..(123): n is a, c, g, or t
  misc_feature (371)..(371): n is a, c, g, or t
  misc_feature (507)..(507): n is a, c, g, or t
  misc_feature (544)..(544): n is a, c, g, or t
  misc_feature (871)..(871): n is a, c, g, or t
  misc_feature (1176)..(1176): n is a, c, g, or t
  misc_feature (1292)..(1292): n is a, c, g, or t
  misc_feature (1307)..(1307): n is a, c, g, or t
  misc_feature (1329)..(1329): n is a, c, g, or t
  misc_feature (1362)..(1362): n is a, c, g, or t
  misc_feature (1433)..(1433): n is a, c, g, or t
  misc_feature (1474)..(1474): n is a, c, g, or t
  misc_feature (1476)..(1476): n is a, c, g, or t
  misc_feature (1592)..(1592): n is a, c, g, or t
  misc_feature (1651)..(1651): n is a, c, g, or t
  Peptide Sequence Number=SeqID_8664
  Probeset Number=SeqID_15710
ntgtgcatttgnggtannnnggnnccctgnnnagggccncgcctgccgacgnntacgagtagcgcgcagagaggcattatatggtaatatagtttgtggagtgttccgtttcgtctgttttgnggagagctccgtcctgcttatgtattgttagttgtggattgtattctagtgtgtagtggttagggtattctccttccatctcagctcctattttttctcttacttactaactaccgctgcgcgcaggataaagcaacttcccacgccagagacagcgcagatagacgacacatctctccacagagacaacttagcggttccacctgcctttccttctggcgtgagtatatttatagagagacactgcntatccaaaagatgcgacgacgcgatggacaagcacacgcccgcgagtgggcaggataggcaccccctcctcctcgctcattgttgcatgtattatttctgcgtctggtaatacgcccctatacgtattctgatcgnagagcattcgactctagctcttttcgcgtagatgcantggtatatcgttatggatcttcattctagtccatctgcagacacaaaagacacgctcgaggtgatcgttgactttagatagtgtatagctacatgatcgtacttgtatcttattagattaagtacgccattcagcgcacgctagcttagttgtttcggccctgctccactctctcatgatccctcctttgagatgcatatgtatatacccagtagaactatctgattgctctgaggtaatcctccctgcgcgatatcccacgagcctcacgttacggtttactcatattaggccccatcttaccttagaggtttcatccacgctcancgcattcgactttcatatgtagtataccgcccctgtgtagataccctcttttacctttttggtacctagagtcatgccaacgcggcgtgagaatctgtatctgattttcatcaacgtttagtatactgagttcatatgcagtatagtagtcatctcattataagaactagaggttataggcacatatagcgcgttgctggatatgatagccgtatccggcacgagacacgagcggtgacgtcaggactcgcagatagtctcggatcttctttgtttacccgtctgtaattattaatgattagcgntctctagtatcttcataatttccgcacacacattatatataatatagtatctctatagtgttctcgccctgtctgtgtgtcctctttactacgaggtacattgcgtactgagcatncactcctccgcctcnccactagcgtatgagcctcacntcagagaagtgcgagcgtgtgtgtatacaaganccaattctcactagaaactatgtaacctcgttgtttctatctacgctatgcgacaatatagcgtctctctntcttcgatcaggtgatatcttatgtaagagatcgaatattnanacgtctctctgaggagaatgagtcatgtcgaaccagcccgaatcgttagtgtgtcgttgaggcggagtaacacggataagatgcgcgccgcgagtatggccatcatcctcacgtangtgagatacacacatgaccgcactcttcctgctctgattctatctgagagaacatagtn

SEQ ID NO: 5932 - DNA, 460 bp, Glycine max
  Probeset Number=SeqID_15711
ggtacgccttgcacgtaccgggccggaattcccgggtcgacccacgcgtccgggagcagcagcattaacccaggaggactgttttgtcaaattatgaagcataaaggttccaaacaaaatagcaatttttgtttggagacttattagggatagacttccgacaagacacaagttacagcgaaggcaagtgcaggttgctgacatgtcatgcccattctgcagagtcaaagaggagaacgcaggacatctatttttccattgtacaaaaattcagcctctatggtgggaagctatgtcatggataaatctaaaaggagctgctcccctcaccccaaaaatgaatttcaatcaacatatgggactccaagctgatggtgttaggaccaacaggcggcagtgctggtggatggccctaacctggcccatttggaacactacgaatagcatagtgttctctaat

SEQ ID NO: 5933 - DNA, 1492 bp, Glycine max
  misc_feature (1)..(1): n is a, c, g, or t
  misc_feature (78)..(78): n is a, c, g, or t
  misc_feature (207)..(207): n is a, c, g, or t
  misc_feature (249)..(249): n is a, c, g, or t
  misc_feature (400)..(400): n is a, c, g, or t
  misc_feature (620)..(620): n is a, c, g, or t
  misc_feature (920)..(920): n is a, c, g, or t
  misc_feature (955)..(955): n is a, c, g, or t
  misc_feature (1472)..(1473): n is a, c, g, or t
  Peptide Sequence Number=SeqID_8665
  Probeset Number=SeqID_15712
ngtcgcgagtgacatcgaacagtacttcattcaatatactacattcatagtatgcatatggtatgacaacgatgtctnatcaaattgacacagagtaataaaagcatgccgctgccgacaacgcatcatgcacgacaagcggtctacactgcaacgctggtcgactccggacgtggaggcgcgaagactgagctgccgcacagatgngacgtcagtctatatatacatatcatctgtgctcattcggtnaactgatgtaactggtgttatttactatcgtgcccttctatacatatgtattatctgtgttgcttcatctgcgatgtaatgtcgtatatacgaccccctgcttccgcgtacgtatcagcccactgtcgacgttcacgtccctgtcataatntagtgactgaccatcgaagtgttgacgataattcgctgtcgtcgtctacggtagttagaaagtagatacatgatgtatcgattactggatctacgtgtttgacggaaatagaaccgaggtcactgtactaatcacgaacaggcacacatataactgtcgcgcgcgcgagaagcacggtctgcaccacatcatctcggttacaagatatacgataagggtncgagcggggtggtggtgggacaataacacgcctatatacatatgcgacgtgtcgtctcgacgcgctcactatatactgtatcgattcaacgtgctcagcacataaatatatacttgcttcagactagatggatagagagcgacactgcgacagaagcgcgcagtgagaaccgaacaacatagcagagatcgctgcgatcgtgatgtgcccgactccgcagctacccttgtgaatcgcacacggtcctgtggcgctcgtgcgtcacctgttacagcagggcagtgtcatatagtgtaatantgtgtcgtcgatgcggtggtgtataatcattacantgtatatcaagaataagatatacatacatagagagatagagagaagacggtgtatgaatcctgacatagtgacgcgaagatatagtacacattatacatgaacattacactacgtgtgacagtctagtgtgtattggagtgagtaataggcatatattagttacgtgccacaatgcgtataccccttatactagcagatttcctagctactcataaccgtaatcttgtacatgagtggatgagagagagagttaggagctgtgagattagagttagagacctaatatggaagagatcagtggcgcaatgttaatgagatataatataggtatttatgtgagagaaacactcacgttatattacgttgtagtctctctctagatcgctattattgcggacaccacattcatctatgtagttacgcctctctgctagtacgtcgtcgtgtcacccgagtgacagagactcaagtcgacgacagatgattaaacacgcagtgggcggaagggagtgtggnnatagagagagaaagataag

SEQ ID NO: 5934 - DNA, 859 bp, Glycine max
  misc_feature (1)..(45): n is a, c, g, or t
  misc_feature (623)..(623): n is a, c, g, or t
  misc_feature (665)..(859): n is a, c, g, or t
  Probeset Number=SeqID_15713
nnnnnnnnnnnnnnnnnnnnnnnnnnnnnnnnnnnnnnnnnnnnngatacattaaatttatgttccacatccttttggttttatgcttgctctagtgctgtataaggcggacttgcataattgttgatgttgctgtctttggatttgtatcattcataaatatacttttttatgttcaagtaaatacatgtctgcttgcacattttagcatatctaaatgctacacaagttgcacattaatgcttcaagttaaccaaacaaatattttcagtatgtgtatgatcaacattaaagggacactctactgtaaagtggtctagaatgtgaatcttttctacatacctaatgccatctaaataatgttatccttgataaactaactgcttctattaatttagctcaatttcatacagttgcacgttgggatgatatagaattaccttcatctcagcatttggagtcaaagaatgacaaacttgtcagcattggatatgtcggggatgaatgggatgaagaatatgataaagggaagaggaagaagataaggggcttcaagcatacttggtggcctaatcttttcaaaaattgcagtcgagaaatcgaagttaaaaggcaagttgccntctgtcaggaccctcattagattgcgccaaactttcctcatnnnnnnnnnnnnnnnnnnnnnnnnnnnnnnnnnnnnnnnnnnnnnnnnnnnnnnnnnnnnnnnnnnnnnnnnnnnnnnnnnnnnnnnnnnnnnnnnnnnnnnnnnnnnnnnnnnnnnnnnnnnnnnnnnnnnnnnnnnnnnnnnnnnnnnnnnnnnnnnnnnnnnnnnnnnnnnnnnnnnnnnnnnnnnnnnnnn

SEQ ID NO: 5935 - DNA, 697 bp, Glycine max
  misc_feature (190)..(190): n is a, c, g, or t
  misc_feature (198)..(198): n is a, c, g, or t
  misc_feature (217)..(217): n is a, c, g, or t
  Peptide Sequence Number=SeqID_8666
  Probeset Number=SeqID_15714
aactcactcactcattcaagtcgctaatcctagttccttcaactcctcgctggcaacaacagcagtactaccattagccgcgtttttcaaagtgattttcgagaattagcgatgggaatgaaaagagagctttcagggattcaggagcgcctggagcgtgccgcccaagcgtgcgattcctgcagctggnctcggcgngcttttctgccgcccgatncgcgtttctctgatcgctgcgattccacattactgctcgaacaactccgtccgccaccaggcgtgtgatgtttaagggtccaacaggacccgctgtgcacgggaaaggccaaccccccccctttgggacagggggatcccaaatccatccggaaaccctcgggaaggccaaaaggggccccgggaaactttttttatcccttgagccaaaggggaaccttggtgccccccctcgggttatttgccctccaaaaagggggggcccccaagtttccccccaaagattcaagcccccggggggtccaccccaacccaattttggggcaaaagttgggggccccccccaaaagggcgggggaattttttttcctaaagggccccccccccccgtttttttaaaaaaaccccctcaaaaaaaaaaaagggcggaaaaaaaaaggggttttctcataaaaaaacccctcccccccgcccccaaaaa

SEQ ID NO: 5936 - DNA, 460 bp, Glycine max
  Probeset Number=SeqID_15715
ggaaggctttctagaaacaaccaaaagagtctatcagctcgacaaaaacatgggaagggaaagagacctcggtaagggtgggaaccgcttttggaaatccattgggctaggatttaagactcccagggaagccattgaaggaacctacattgacaagaagagccccttcactggcaatgttatccatacgcggccgatacttggttggacatgtcacacggctaagatgaacaggactattattgttagcaggaattatcttcattttatcaagaagtaccagaggtaccagacaaggcacttcaacactcctgctcatatatcacctgcttttcgcgtgaaggaaggagatcacgatattaatgcgcaatgcaagccactttctaagactgagacgctcaatgtgttgaaagagatcccagctggatcatatagccgagcacagaaagcatctactgga

SEQ ID NO: 5937 - DNA, 462 bp, Glycine max
  Peptide Sequence Number=SeqID_8667
  Probeset Number=SeqID_15716
aatcgctctccgaaggcggaaaacgcctcctctctctcctcctcttcggttctcctccgcgacctctctctccatggccgccacgaggaagctcggcaggtcggcggcggcgtaggcgaaggaagacgaaccggaggtgctcctctcctcgcgctccttcgccgacctcggcctccaccccgcccccaccctctgcgcccgcccacctccaaggaggctcctcatctgatctgagcaagtagcaaaagtagggaattacacaccttggttattgagcagcagcagcatcagatcgtgtgctttgagagaagagtagtgaggatgaggctgtggtgttgatgtaaactaaattttttgttcctcttcttgttgctttgttcccaacgtgtgattctgacagagaatggtccagataacaaccaattgtcctgtcgattagttctaggcccggctgcgcatcag

SEQ ID NO: 5938 - DNA, 1438 bp, Glycine max
  misc_feature (22)..(22): n is a, c, g, or t
  misc_feature (74)..(74): n is a, c, g, or t
  misc_feature (798)..(798): n is a, c, g, or t
  misc_feature (932)..(932): n is a, c, g, or t
  misc_feature (961)..(961): n is a, c, g, or t
  misc_feature (983)..(983): n is a, c, g, or t
  misc_feature (991)..(991): n is a, c, g, or t
  misc_feature (1093)..(1093): n is a, c, g, or t
  misc_feature (1214)..(1214): n is a, c, g, or t
  misc_feature (1438)..(1438): n is a, c, g, or t
  Probeset Number=SeqID_15717
ggggcgccccccccccagtacnacggcgctaatactttctacactaacgcaatcatcgcgctccggctcagttncgtcaattatataggaagtctctcaccgccctccagcgctcgagacgacctactactgacttaggaaggagatcacgcgcgcgtgcctgccagggaacatgtctgggaaggtttgtatgtgtatattcgtatataaaacaagaaagacataacccagatagcatgtcgacaattagtgaccacatataagagccgtcagaggtgcgtataccccgcgcaccacgcttggccgttgtgacggagtcttattttcttcatatattggaccaccttagcataagctgatacctcagtctatttcacacagggagcggataggcacgagagatggtgaacgtattattcgcgaaactacatggtgtcacgcatgcgagatagcgaacactccgtcgaccaaggtccgagttgtgagtttgattgatgcaaggacatgtctccgctacctttagctgcggacctcgttggcaagagcaacagaatgtgcgaagccgcctctaattgtcttactttattagaagtggtggatatggggcacgagaaatgagcaggcattataataaacgcccggcgccgggactcctcgccgcacagatcgtattgactagattaagcgtaacatccctaaatgtgtggacgatatctctgttcttgtccatgttgtgagagccgagcttaacataactctattcaaaagatacgccaggattaatcgcgagtcgtacgngcaccatacacacacccacccacacgcgctgtgcggatggaggtgtgtagtgtgagtgtgcaacttcgtgctacgcctaacaccgcgggtttcatttattgtctagtaatcgtgcgcattgtatatctcgctcncatcgctggtttagagcgctgacgcaganttcgatgtaatacaccgtcatngtgtagangccctcaatacaatcttccacaatgtaagaccgcgtatatataatattcatatttctgtgtactgcacgcgctctctcgacacgaacggaatagacgctctnaggcgaatctagtagatcagtcgatgtgtcgttccacgggcgccctagtgtcgaaatagtatatacatacatatctgtgattcgccgacacagtcacaatacgcaaccagcgcgggtgggnaacatatagtaaccgtcggagttgacatatgacccatcagctgtaggtttagtatcacgcgctgccgcgagttacactctttcgagctgaacgtaacgcggtgcaacttgttattgatatatgcgcgtggatattatcgttatattccacatggctgagcgcgcgatcagcgcgcattctctctcattactgttcatgtatctatcgcctcgtgccgcctgctn

SEQ ID NO: 5939 - DNA, 447 bp, Glycine max
  Peptide Sequence Number=SeqID_8668
  Probeset Number=SeqID_15718
aagctcggaattcggctcgagccttcatatgtttgtttggagttcaagtgcttcaccagtctctgacgtgtttggtgcccatgaatattgaagtcatgatcagaaaaaaatcaaattggatggtatctcaggaaagtggaaaatcataaggacacttcagaagactacctaaaaaaagaataattcaacttttggaaataaagaaatggatgggggaatgaatcagctttgaagtgagaaggttggagatgggaagccaaaaaccatgcctccagcaagtgtgatgacaaggcttatattgattatggtgtggagaaaactcatcagaaaccccacacctactctagcctaattgcctcacttggtctttgttcattcaagggatgggagatcctgcataatgcaagttatctcatatgtagatcaggcttgcatggcatgttcatc

SEQ ID NO: 5940 - DNA, 643 bp, Glycine max
  Peptide Sequence Number=SeqID_8669
  Probeset Number=SeqID_15719
tggtgggtttcgcggcgattcggtacgtaaccatcactcgcggatttgggggtgggtcgcgggcgtggtaccggtctgtccgcgccatgttccccttttaaaaaatgcccgtgaggcgtgttatctgcttgttgaatcgccaactgtggtgtgggttaggattttgccccccctgacctctttcccccggtctcatggtatttatacgccttcgccttgggggcttgtccaggtcttgttgtcaaagtgcggggcgaccgacttcatcttcttgcgccgcgccccccatgtgctctgtcttcttctttgccctcttgtgagccaccaccggtccgtcctctgcattcagcacgcagcagcatctcagacagatcatcatcagtaggctgcccccgtcctacagcgcctgatgagtccccagcacagacggcatgtaagacgtctacccgctcgcaccaacgtacctgcggccagcagcagcagcatggcgaggaggacggccgtgaagagcttgcgagagagctccatttcttcctaggatctcagcggcgacgggcgacgctgtgcgacagagtgggaatacaagctgaaaccagccccgtctggtttttcgattaggatgttctaggtaatggtctcgtgc

SEQ ID NO: 5941 - DNA, 502 bp, Glycine max
  Peptide Sequence Number=SeqID_8670
  Probeset Number=SeqID_15720
ggagggggatggagagggaaagaagggaagaagaagggggaatagggggaggagaggggggggggggggggggggagagaagagagaagaaagtagagggggcggggaaggataaagaaggaaaaggagagaaaaaaaaggggggaaaaagaaatcaggtggaaggagcggagagaggagcagcgttgtattcagtagaaatcaggaagaaggaataagggcaacagagaagtgtgaaaacatcaaaaaggagggaccagggccagtgacaagaagggtgtcgtatttgcaagcatgagcaattgtaaaagcggcggggacaaagtaagtttaacgcaaaacttggatgtctgtatcatctttcggagcttcctcttcagcctcgtcatacgcttcttcttgcgcttggccctcatcgcgaaaagaaaacagaacccttcttcgtttcctaaccctagccgaggcggctgagaaacaacaactgaaaaagaaaaactcgaac

SEQ ID NO: 5942 - DNA, 490 bp, Glycine max
  misc_feature (472)..(472): n is a, c, g, or t
  Probeset Number=SeqID_15721
caacctatttcgagttagccctaacaaggaccttgtcacattcactgccatgataggaggctatgcaatgcatggaatggcagaagaggcagtagagctgttttctgaaatgcttacacttgacattaagccagaccatgtagctctaactgctctgctgtcagcttgcagtcatgctgggcttgttgatgcaggaatcaaggttttcaagttcgccagagatatttacagagttgtaccgacagcagagcactatacatgcatggttgaccttcttgcccgcggcgggcgtctccaagacgcatacaattttgcgttggatatgccccctcacatggccaatgcaaatgtatggggctctctgctaggagcatgcaaagtccacggagaggtcagaatcggccagctcgcagctgatcacttgttctccatggaggttggggacattgggaactatatcatcgtgtcaaanatctatgcagctgatgag

SEQ ID NO: 5943 - DNA, 515 bp, Glycine max
  misc_feature (268)..(268): n is a, c, g, or t
  misc_feature (273)..(273): n is a, c, g, or t
  misc_feature (315)..(315): n is a, c, g, or t
  misc_feature (361)..(361): n is a, c, g, or t
  misc_feature (374)..(374): n is a, c, g, or t
  misc_feature (403)..(403): n is a, c, g, or t
  misc_feature (413)..(413): n is a, c, g, or t
  misc_feature (450)..(450): n is a, c, g, or t
  misc_feature (466)..(466): n is a, c, g, or t
  misc_feature (472)..(472): n is a, c, g, or t
  misc_feature (489)..(489): n is a, c, g, or t
  Peptide Sequence Number=SeqID_8671
  Probeset Number=SeqID_15722
gagaaaaaaattgggtgtggtggaaacgtgatggctgcctcccatatgaaaaacaacgtatagagaagaaagcagtaccagatgggcccaagaaacgtaggccaagatggagattgggtaataaagaactgtctcagttgtggaaatgggcagatcaaaatccggtatgtcactctttacagaagctgtgactagtttccaacatgcaatgcctttctgtacatgttgctgattgtggatgctgaacactagggtcatgaatgattanatatngtcctgacattctgtactttaccttcgaagctctcgtatgtntgttccgaattgaatgctttaactgatccctcaacgtgttcaaacnccttctttcatgngtgccccggaaaccctcggcttgaatatntggctccctnctgctggattacatgcctgtgttcatccactcgattnacggggtaattttggncgaaangtcttttgctgtcgccncgacatgtctgggagggattttttat

SEQ ID NO: 5944 - DNA, 2371 bp, Glycine max
  misc_feature (1)..(90): n is a, c, g, or t
  misc_feature (99)..(100): n is a, c, g, or t
  misc_feature (105)..(107): n is a, c, g, or t
  misc_feature (112)..(112): n is a, c, g, or t
  misc_feature (118)..(121): n is a, c, g, or t
  misc_feature (127)..(127): n is a, c, g, or t
  misc_feature (130)..(130): n is a, c, g, or t
  misc_feature (132)..(132): n is a, c, g, or t
  misc_feature (134)..(136): n is a, c, g, or t
  misc_feature (139)..(142): n is a, c, g, or t
  misc_feature (146)..(147): n is a, c, g, or t
  misc_feature (150)..(150): n is a, c, g, or t
  misc_feature (154)..(154): n is a, c, g, or t
  misc_feature (156)..(161): n is a, c, g, or t
  misc_feature (163)..(164): n is a, c, g, or t
  misc_feature (166)..(166): n is a, c, g, or t
  misc_feature (169)..(173): n is a, c, g, or t
  misc_feature (178)..(178): n is a, c, g, or t
  misc_feature (181)..(181): n is a, c, g, or t
  misc_feature (185)..(185): n is a, c, g, or t
  misc_feature (187)..(188): n is a, c, g, or t
  misc_feature (190)..(190): n is a, c, g, or t
  misc_feature (194)..(194): n is a, c, g, or t
  misc_feature (196)..(196): n is a, c, g, or t
  misc_feature (201)..(201): n is a, c, g, or t
  misc_feature (208)..(208): n is a, c, g, or t
  misc_feature (216)..(216): n is a, c, g, or t
  misc_feature (219)..(221): n is a, c, g, or t
  misc_feature (228)..(228): n is a, c, g, or t
  misc_feature (231)..(232): n is a, c, g, or t
  misc_feature (238)..(238): n is a, c, g, or t
  misc_feature (241)..(241): n is a, c, g, or t
  misc_feature (245)..(245): n is a, c, g, or t
  misc_feature (247)..(250): n is a, c, g, or t
  misc_feature (252)..(253): n is a, c, g, or t
  misc_feature (261)..(261): n is a, c, g, or t
  misc_feature (264)..(264): n is a, c, g, or t
  misc_feature (271)..(271): n is a, c, g, or t
  misc_feature (274)..(274): n is a, c, g, or t
  misc_feature (289)..(289): n is a, c, g, or t
  misc_feature (294)..(294): n is a, c, g, or t
  misc_feature (303)..(303): n is a, c, g, or t
  misc_feature (305)..(305): n is a, c, g, or t
  misc_feature (312)..(312): n is a, c, g, or t
  misc_feature (317)..(317): n is a, c, g, or t
  misc_feature (321)..(322): n is a, c, g, or t
  misc_feature (329)..(329): n is a, c, g, or t
  misc_feature (340)..(340): n is a, c, g, or t
  misc_feature (345)..(345): n is a, c, g, or t
  misc_feature (351)..(351): n is a, c, g, or t
  misc_feature (363)..(363): n is a, c, g, or t
  misc_feature (368)..(368): n is a, c, g, or t
  misc_feature (371)..(371): n is a, c, g, or t
  misc_feature (374)..(374): n is a, c, g, or t
  misc_feature (440)..(440): n is a, c, g, or t
  misc_feature (442)..(442): n is a, c, g, or t
  misc_feature (460)..(460): n is a, c, g, or t
  misc_feature (463)..(463): n is a, c, g, or t
  misc_feature (497)..(497): n is a, c, g, or t
  misc_feature (512)..(512): n is a, c, g, or t
  misc_feature (524)..(524): n is a, c, g, or t
  misc_feature (547)..(547): n is a, c, g, or t
  misc_feature (551)..(551): n is a, c, g, or t
  misc_feature (565)..(565): n is a, c, g, or t
  misc_feature (573)..(574): n is a, c, g, or t
  misc_feature (578)..(578): n is a, c, g, or t
  misc_feature (597)..(597): n is a, c, g, or t
  misc_feature (632)..(632): n is a, c, g, or t
  misc_feature (638)..(639): n is a, c, g, or t
  misc_feature (642)..(642): n is a, c, g, or t
  misc_feature (649)..(649): n is a, c, g, or t
  misc_feature (657)..(657): n is a, c, g, or t
  misc_feature (659)..(660): n is a, c, g, or t
  misc_feature (662)..(662): n is a, c, g, or t
  misc_feature (669)..(669): n is a, c, g, or t
  misc_feature (673)..(673): n is a, c, g, or t
  misc_feature (681)..(681): n is a, c, g, or t
  misc_feature (692)..(692): n is a, c, g, or t
  misc_feature (696)..(696): n is a, c, g, or t
  misc_feature (703)..(704): n is a, c, g, or t
  misc_feature (756)..(756): n is a, c, g, or t
  misc_feature (758)..(758): n is a, c, g, or t
  misc_feature (897)..(897): n is a, c, g, or t
  misc_feature (927)..(927): n is a, c, g, or t
  misc_feature (942)..(942): n is a, c, g, or t
  misc_feature (968)..(968): n is a, c, g, or t
  misc_feature (970)..(970): n is a, c, g, or t
  misc_feature (1014)..(1014): n is a, c, g, or t
  misc_feature (1066)..(1066): n is a, c, g, or t
  misc_feature (1068)..(1068): n is a, c, g, or t
  misc_feature (1081)..(1081): n is a, c, g, or t
  misc_feature (1088)..(1088): n is a, c, g, or t
  misc_feature (1226)..(1226): n is a, c, g, or t
  misc_feature (1267)..(1267): n is a, c, g, or t
  misc_feature (1314)..(1314): n is a, c, g, or t
  misc_feature (1328)..(1328): n is a, c, g, or t
  misc_feature (1369)..(1369): n is a, c, g, or t
  misc_feature (1379)..(1379): n is a, c, g, or t
  misc_feature (1396)..(1396): n is a, c, g, or t
  misc_feature (1398)..(1398): n is a, c, g, or t
  misc_feature (1405)..(1405): n is a, c, g, or t
  misc_feature (1461)..(1461): n is a, c, g, or t
  misc_feature (1586)..(1586): n is a, c, g, or t
  misc_feature (1588)..(1588): n is a, c, g, or t
  misc_feature (1732)..(1732): n is a, c, g, or t
  misc_feature (1861)..(1861): n is a, c, g, or t
  misc_feature (1863)..(1863): n is a, c, g, or t
  misc_feature (1867)..(1867): n is a, c, g, or t
  misc_feature (1875)..(1875): n is a, c, g, or t
  misc_feature (1891)..(1891): n is a, c, g, or t
  misc_feature (1913)..(1913): n is a, c, g, or t
  misc_feature (1917)..(1917): n is a, c, g, or t
  misc_feature (1953)..(1953): n is a, c, g, or t
  misc_feature (1980)..(1980): n is a, c, g, or t
  misc_feature (1995)..(1995): n is a, c, g, or t
  misc_feature (1998)..(1998): n is a, c, g, or t
  misc_feature (2001)..(2001): n is a, c, g, or t
  misc_feature (2021)..(2021): n is a, c, g, or t
  misc_feature (2024)..(2024): n is a, c, g, or t
  misc_feature (2079)..(2079): n is a, c, g, or t
  misc_feature (2081)..(2081): n is a, c, g, or t
  misc_feature (2084)..(2084): n is a, c, g, or t
  misc_feature (2089)..(2089): n is a, c, g, or t
  misc_feature (2108)..(2108): n is a, c, g, or t
  misc_feature (2179)..(2179): n is a, c, g, or t
  misc_feature (2210)..(2210): n is a, c, g, or t
  misc_feature (2243)..(2243): n is a, c, g, or t
  misc_feature (2253)..(2253): n is a, c, g, or t
  misc_feature (2298)..(2298): n is a, c, g, or t
  misc_feature (2309)..(2309): n is a, c, g, or t
  misc_feature (2314)..(2314): n is a, c, g, or t
  misc_feature (2327)..(2327): n is a, c, g, or t
  misc_feature (2368)..(2368): n is a, c, g, or t
  misc_feature (2371)..(2371): n is a, c, g, or t
  Peptide Sequence Number=SeqID_8672
  Probeset Number=SeqID_15723
nnnnnnnnnnnnnnnnnnnnnnnnnnnnnnnnnnnnnnnnnnnnnnnnnnnnnnnnnnnnnnnnnnnnnnnnnnnnnnnnnnnnnnnnnnccccccccnnaaaannnggggnccgggnnnngggggnccngnannnggnnnnaacnncanggcnannnnnnannantannnnnagatnacncgcncnnanaaanancggancggcgcnagcgacgngannngacaaancanngcgagncgncgangnnnnanngcacgcanganggcaccncgnacaaacagcaaccgnacaancataacgancngcgaacnaacangcgnnagcacanacgggagccgncgaanacaagnaccaacgagaancgcgnggnganaagacagggacgaacagacggaccgcgagaggcagagcgagagagcggcggactacactctaatanantaccatctgatgagatanagnatctaagatacaatatccagatcagcacatactnttgcccatacaaacnacttaatatctnaactcatctacgagacgctgcgnctangaccgatagaaganctactcanncgcntaatccggagacaatatcnctcgtgtgatggttgtcttgggtcgtcaatctctnccctcnnaanctgtagntgcgcgcncnnangaccccnatcnctattgtngtcgtcattcnctcnctccttnntgttggtgctgggtggcggctgtgccacgatatttctatagtgtgtgctgtntncaagtgtgcacgcgtgttccatgttgtctatctacgtgcgcgtgtctactgtgagcctaattgtcactgatctcgacgagtgcgtgttgctcagttgatgtgtttgtgtgagatcgtgctgatgcgcagctatcatccnttctgcgcgactcacgatgctgatatatancgatatcaagcagtngcataatcacagtatatatatgcaancngtctcatattgtgcaacacctgactatatcacgctagccactanaatagtaatatctttattatggatcatacatacgtaagttgtaaagatgacnanacacttagataanaaacacnagtgtgacaagagacgatcaggatatcgacgctcaattgatatatctgctgcgtagatgtgttacgatgatgttgttctagatggtgtcgtaatgtcagtgcgagcgcgatgcaagcacacgtataaatcatagcagnccgcatgactagaagtcatgagctcgtcgagctgcgctctntgaatggtgatgttgtgcgagatgagtatatcacatgcgtgaatgtnacacatgtgggtanatgtgatgagtatcgaaacgatatatgagccgtacgttgangcgcggactntggtgagtgtgatctcntncgtcatnacgcgactgtgtactctatcacgacggtcatcgcatacgatgctggttatacgacnatgtgcgtggatcgcacgtagtacgtcgagacactagacaagactgaaactagagtcgtactaaagacacgagtacaaaaccaagattgatatgatatgcatagatagcatagacgacatattgnantgatatgacgtacatgattcatgtgagtcactagaaatgagtcagtagtatatgtgatggtgagatgcactgagctggacgcttgatgtggtatagtacgtactgaaatctacgtgtcgtgtatatcgattaaagaggactganatgatgatcatgatgacatctacgagtgctgcctccgcgacacgctacctcgatctcgtatgatcgtgcatactcgacagtctgtcgctgcagccctcgagcgacgtcgtatgtctgatcaacgttacngnctgncgactgangatagaatgatgtatngtcgtgacgtaattcagttcgncgancgagcagtcgactctagaacacgtctcagtactgcntagttgatgctagcacagagacgaganatgatgcgtagtagnatngtncggatcattgatcgtctgcngtngctgagatgatgctgacgtagtatgcagacgatcgcaacagtgacgcacataagntncgncgcantgaactacgatgtgtttangatggatcgtatgagcgacatcatgagatgagtatgcgtatcatagtatgaaaacgcacgttatattacanagaacatgctacgtaatatatagtgacactngttcatggacatcgaagtctggctgactcatcntcgatgactngctgtgctgactgcgtatactgtgtcgcgtgtgagtacgcactantcatcgtcagnatacntagcagtgcgtgngcatcatatgaatgaaattgaatcattactgtgaaatggantgn

SEQ ID NO: 5945 - DNA, 713 bp, Glycine max
  misc_feature (2)..(11): n is a, c, g, or t
  misc_feature (14)..(21): n is a, c, g, or t
  misc_feature (26)..(27): n is a, c, g, or t
  misc_feature (30)..(33): n is a, c, g, or t
  misc_feature (38)..(41): n is a, c, g, or t
  misc_feature (51)..(53): n is a, c, g, or t
  misc_feature (58)..(64): n is a, c, g, or t
  misc_feature (68)..(83): n is a, c, g, or t
  misc_feature (90)..(92): n is a, c, g, or t
  misc_feature (96)..(98): n is a, c, g, or t
  misc_feature (103)..(110): n is a, c, g, or t
  misc_feature (114)..(117): n is a, c, g, or t
  misc_feature (119)..(119): n is a, c, g, or t
  misc_feature (130)..(132): n is a, c, g, or t
  misc_feature (135)..(139): n is a, c, g, or t
  misc_feature (141)..(141): n is a, c, g, or t
  misc_feature (143)..(145): n is a, c, g, or t
  misc_feature (158)..(160): n is a, c, g, or t
  misc_feature (164)..(166): n is a, c, g, or t
  misc_feature (179)..(185): n is a, c, g, or t
  misc_feature (191)..(193): n is a, c, g, or t
  misc_feature (195)..(206): n is a, c, g, or t
  misc_feature (209)..(211): n is a, c, g, or t
  misc_feature (213)..(213): n is a, c, g, or t
  misc_feature (219)..(221): n is a, c, g, or t
  misc_feature (228)..(229): n is a, c, g, or t
  misc_feature (250)..(250): n is a, c, g, or t
  misc_feature (252)..(254): n is a, c, g, or t
  misc_feature (276)..(280): n is a, c, g, or t
  misc_feature (340)..(340): n is a, c, g, or t
  misc_feature (492)..(492): n is a, c, g, or t
  misc_feature (524)..(524): n is a, c, g, or t
  misc_feature (627)..(627): n is a, c, g, or t
  misc_feature (640)..(640): n is a, c, g, or t
  misc_feature (657)..(658): n is a, c, g, or t
  misc_feature (700)..(700): n is a, c, g, or t
  Probeset Number=SeqID_15724
annnnnnnnnngtnnnnnnnnaaaannaannnncattnnnngagtttgtgnnntgtcnnnnnnngctnnnnnnnnnnnnnnnnggccaannncacnnnctttnnnnnnnntttnnnntntgctttggacnnntcnnnnncngnnnctcagtttgattnnntaannngagatgaactacnnnnnnnctgatnnntnnnnnnnnnnnnctnnnantggccnnncttctanncaaagtgatattgaaatgggncnnnttcctagaaacaactccgatannnnnatggattcttttaataaacatattgaaatgggtacagggcaaatagaagcaattccgatnttactttggaagcttttactaaacagatccatgaggctgataaacacaacggtaactttcacgggctacttcaaaagctaaagggaagctaatgaggaatccaaagctgtcacaaaagcatcttccatgaaagctatcaagaagaggatggngaaagatatttgatgaagttggaaagattgcncatggggtcaaaacaaaaatagaggctataagcagagataacctatccaatagacaaaagcctggatgtgagaagggaacaggtgttgacagagcaagaatgnatatgacaaatgncttgactaaaaaattcnnggatctcatgacagagttccagactcttagacaaagaatacnagatgaatatcgt

SEQ ID NO: 5946 - DNA, 695 bp, Glycine max
  Peptide Sequence Number=SeqID_8673
  Probeset Number=SeqID_15725
agccctgccagcccttttctttggccataggcgcggggatgtctggtcgttcgcttcctgcgctgcaggggtggggggccgcttttgaacattttcctcggaacgcccggagggattgcacgggcaattccaaattccactgggcccggtccaggtttctggcattggccccaaggacccgccaaatatccggtccttgccggccaggattccaaggtgtccaaagtggggggctgccaagccatttttgccagatattcctcggggaacatttcgtccagttcttaacaactgcccgtttcgggggaaattatcttagtctagccatccgggccttcggggtgggctgaagaggatgctgcttccggacccagagagatgcaacgctgggccgcggccacccttcataaaggagtgtcagaggggtcccttgagtaaggaggcggtccatttaaaaatgtttgaatcatcgcgagctagctgaatatcaagatcagcagccttgttccgctgcacctctttgtgctcccttgaacagccttacccgcgatgcctgcatactggatatgcgcaaccgtgtcgcaactctttggatatcacgagatgaaaggaaggaagcattggtgtatcgcgtcgggacaattatggatcggaaatgaacagtaaaatggaactgtgcaagccctagaacagtt

SEQ ID NO: 5947 - DNA, 1767 bp, Glycine max
  misc_feature (339)..(339): n is a, c, g, or t
  misc_feature (410)..(410): n is a, c, g, or t
  misc_feature (551)..(551): n is a, c, g, or t
  misc_feature (1005)..(1005): n is a, c, g, or t
  misc_feature (1115)..(1115): n is a, c, g, or t
  misc_feature (1124)..(1124): n is a, c, g, or t
  misc_feature (1168)..(1168): n is a, c, g, or t
  misc_feature (1203)..(1203): n is a, c, g, or t
  misc_feature (1235)..(1235): n is a, c, g, or t
  misc_feature (1279)..(1279): n is a, c, g, or t
  misc_feature (1294)..(1294): n is a, c, g, or t
  misc_feature (1443)..(1443): n is a, c, g, or t
  misc_feature (1474)..(1474): n is a, c, g, or t
  misc_feature (1515)..(1515): n is a, c, g, or t
  misc_feature (1628)..(1628): n is a, c, g, or t
  misc_feature (1765)..(1765): n is a, c, g, or t
  misc_feature (1767)..(1767): n is a, c, g, or t
  Probeset Number=SeqID_15726
cactcacccaccaaccctacactctacaccgccaccccccaccaccccagcttccgccgctttccttccccgcccaaaaaagttggggagcctccacccgccggggtgcggcgtgaccgtcatcttatgcaactatgatgaggatcccccctcgcgcgacgtgtcagtgctaacttctgtcacgccagtatccaatctatcactgaggaaactatgctctcatattcgtcaaatagacaccgccatcagcgctaggacctcttatcaggcctgctgcgcagcgtcgcagtgcagatctacgcaacgaccgcctagctcccgtgcgacgctgccatgtgncagtacatcacagcagtacccaagtccctcacgtagcatgcgcccggctcagctgcgtcgaatacacaccnggacgccctgcacatcccatacattcgccccgcatcgtgcactcgacagcttcagcgcctttactagtgcgctgacgacgaaataacataccgacgcgcacgtccccgtgctcagtacgcgtagtcagcggcgcagtgcantacgacactatccagatccacccttcactccgctctactcagcctgatacacgatcatactctctttctacgctcccacgcccgagggcccgtctagaagatcaagatctacaatagccatcagctaggcggcgagacagtagatagactcctgtaccgtaacaacatctcgtaatagaacgatacatcgccacgaaataccgtgctgataccgtcgatcgcaggctacacatgtcattagcactgtagatgactcgtcgaggagcgtctcgtgtcactagctcattagtatgcgctcctgccgctgcgtcacatcgtccttctcgtaaggggtcttacattatgaaacttccgcgccgcacaaatacaatatgtcttacgacaccttctcatactagactctgtcactgccatcagcactatattattacctaacgcacaatcttctccgcgncgtatctgctactctgtctactcatcgattacgcgcacatacacactacatctgctcatgcacctctcaagtatattcgccctgcgaccgcccaggacgtgtgtcgtcanccttatatnaattgctcacctcggtaacgcctagtcagaagcgtacgtggcantgaatactctgctcgcgcaaggtgcgactgctaantgagatgtactcgtgcacagatcgctaacacntcatctgacctccactgagtgctcatcatcttccgccgcacgtnccatacacactcggngcatccacttgtctgctacaggacacctctcctccgtccgagctcgactgtgtgcatcgcctctcgatggcagtcttatatctgcgagtcatatgatcgttgatcattgcgcgactatacgcacgcgggcgtcgctctctgatcacgantcattgaatcgatgttataagtacactatcncatcgcgtcacactcgagaattatctgtagggacgcacgtncgaagctctatgaggacatatatagcgatatgtctcggagagatctgcgtctacgacgcaactgcggacgcgcagtgctgtgactgacgacgtatacggtcgatacacgtctntatggccatgtcgctactctctctatttgcatctatcacgcgcaccagtctataccctgcactatacctgcacctctcactcaagcgctagtactctactctttcgtacgaacacacctgcctctgtgacacccgtncn

SEQ ID NO: 5948 - DNA, 607 bp, Glycine max
  Peptide Sequence Number=SeqID_8674
  Probeset Number=SeqID_15727
tcactaatagcactaataagaaacacaagctggaaaaaaattggtatattttgaataaatttcaatccaacaaaacaccggatgtcccgcccaattatctcaatggtatttttacaactacaccggagcatcaccccatggataaaggagagggctcacggagacaggaaagccacaagcgaaccgcgcagacaaaacgctgggaacggatattgaaaaacaaggttccgacggcgaaccgcaagcgattaaaaaacaaggaagaggtcacgaccaccaaacatggaggcaaaggacggggaaacaggacagacggaacatagccagggggacagcgatattgacggaggaagcagtaaggacccccaagcagacaaggaagcgaaaaaaaaaaccaatgtgaggcaatgagaaagcaagcaaaggtaatgctaactgcgcccccttatgcggggcaacagcagcaagccagcaccaaaacaatcattttttccaaaaatggatgaagctgtaagccaattacattggagcatatctccatggataaaggagagggctcaagcagaaaggtttttcacgtgctatccgcacagataaaatccctcgt

SEQ ID NO: 5949 - DNA, 1527 bp, Glycine max
  misc_feature (17)..(18): n is a, c, g, or t
  misc_feature (20)..(20): n is a, c, g, or t
  misc_feature (24)..(26): n is a, c, g, or t
  misc_feature (28)..(30): n is a, c, g, or t
  misc_feature (38)..(38): n is a, c, g, or t
  misc_feature (74)..(74): n is a, c, g, or t
  misc_feature (160)..(161): n is a, c, g, or t
  misc_feature (164)..(164): n is a, c, g, or t
  misc_feature (293)..(295): n is a, c, g, or t
  misc_feature (722)..(722): n is a, c, g, or t
  misc_feature (853)..(853): n is a, c, g, or t
  misc_feature (967)..(967): n is a, c, g, or t
  misc_feature (979)..(979): n is a, c, g, or t
  misc_feature (1015)..(1015): n is a, c, g, or t
  misc_feature (1301)..(1301): n is a, c, g, or t
  misc_feature (1311)..(1311): n is a, c, g, or t
  misc_feature (1352)..(1352): n is a, c, g, or t
  misc_feature (1478)..(1478): n is a, c, g, or t
  misc_feature (1500)..(1500): n is a, c, g, or t
  Probeset Number=SeqID_15728
gaaagggaggagaggannanagannnannnagaagtgnaaaatgttgggaagaaatataaatagagaaatattntttattaatggattgattgagataggggttagtggtaaaatagtatgggggggtgcgcgcggtcactccacctcccgctctttttnnagngagatcggaacggcgacgggcgacacgtgctcaccgccctccctctaacactccacctcatcgcgtccgcttgcgctattacatcatgttggcgctcctcactctctctcttcctctgtcttcccatannnccagccacgccacccctcccccgtgcgcctgctagcacccgccacacccccaccgcaccatcagcggcctacatccacctatactggcgggtcattatcaataattcgtggctgacatcacgaggagcattagtacacttacatcacatctaaagaacatcaccggcgcgtttgcgagcaacaaacagcgcacagatcactcacacccaccccagccggcggcgggcggggcgcgccgcgcccaacccgcgcggcgtccgggtgagtcgaaaaaggctaccctcccaccttctcgatcatccccagtcgcgcgtgtcgggggtgggcggagtactgtgtgcgcgcgtgcgcctcctaggtgcgtttctgtctcctgagtgctggatggagactttataatatattatcgctaaatacaacgatacancactaccgacacaaacatacactctatatctccacggtcttactcctctcacccacttacacacactatctcccccgctcgcacccctcgccttgtctttcatattttatatctctcgtcgcatcccttcnccactcatcacacaactatcgcgtgtacgtgtgttggtctgcgactcaccccctacgcacactgagtgtggtgtgtgtctgtgtgacacgcgcatatgtgctcataacacaccncactcggtgcanctcctactagccactcagtgtgtacttcgtatcagntcatagacctctgccgcgcgtcacgcgcaccgtcgcacacgcgtctacaaacaaccaaagactacgatgaatgcggcgactagtcgtcacagtcaaactaacgtacgactcactgcagatctctgcacatcgctcatatacaacgctctgggcgcgggtgagcccatgctaacaagacaacagcgtacacgcgtatatccatagtagacgtcgcacgccgcgctagcgtattaacctactatatacatactatcgcgtgtgagcgcgcaatgacatcacatatagncgctgacggncgtgaccgccacgacacacatacgagataaaccacgaggcngtgcatgctgccatcaactctagcgtgactagatgtgttgctgaggtgtgcgcacgtgtactgacgcagccgacgcgtctacgccatctgcgccagctacatcgtgtgcgaggctgagctcactanactacatctatcatgactctancacaatgaataacaaagcggtgcgagg

SEQ ID NO: 5950 - DNA, 549 bp, Glycine max
  misc_feature (23)..(23): n is a, c, g, or t
  misc_feature (87)..(87): n is a, c, g, or t
  misc_feature (331)..(331): n is a, c, g, or t
  misc_feature (422)..(422): n is a, c, g, or t
  misc_feature (435)..(435): n is a, c, g, or t
  misc_feature (438)..(438): n is a, c, g, or t
  Peptide Sequence Number=SeqID_8675
  Probeset Number=SeqID_15729
ttttttttttttttttttctaanaaggaattgcgttccaattcttcgtcttctaagtcttccaattgctctttcaaaaatttacggngaagttctccttttggatgtttgatagaaattccttcaagaattacttcgagattttcaatttgtctgccattgaggtcagaatctgatgtatcgagttttctttgggcgttgctcaatgcatttaaaattaatcgttcaatcacggaatccatgttacatatattttcaaagatggtagctttttctgttcgaattgattccaatttttggttgatatctgcaatcttatttctgcattttgngatttctgctgtccatttgaatttgcgagcctttgacaattttttttcacattttgcaatctttttctcaagttcttgagtttgatattgncttccataatcgnganaataaagaagttcataatgatttcgaacaatttcattcaaatccaataatgttgcactttttgctttcaaacacatttctttatctttttctataaagcgattgatagcag

SEQ ID NO: 5951 - DNA, 1842 bp, Glycine max
  misc_feature (1)..(1): n is a, c, g, or t
  misc_feature (49)..(49): n is a, c, g, or t
  misc_feature (109)..(109): n is a, c, g, or t
  misc_feature (200)..(200): n is a, c, g, or t
  misc_feature (225)..(225): n is a, c, g, or t
  misc_feature (227)..(227): n is a, c, g, or t
  misc_feature (233)..(233): n is a, c, g, or t
  misc_feature (281)..(281): n is a, c, g, or t
  misc_feature (312)..(312): n is a, c, g, or t
  misc_feature (347)..(347): n is a, c, g, or t
  misc_feature (350)..(350): n is a, c, g, or t
  misc_feature (354)..(354): n is a, c, g, or t
  misc_feature (376)..(376): n is a, c, g, or t
  misc_feature (434)..(434): n is a, c, g, or t
  misc_feature (508)..(509): n is a, c, g, or t
  misc_feature (517)..(517): n is a, c, g, or t
  misc_feature (575)..(575): n is a, c, g, or t
  misc_feature (692)..(692): n is a, c, g, or t
  misc_feature (756)..(756): n is a, c, g, or t
  misc_feature (781)..(781): n is a, c, g, or t
  misc_feature (788)..(788): n is a, c, g, or t
  misc_feature (909)..(909): n is a, c, g, or t
  misc_feature (1245)..(1245): n is a, c, g, or t
  misc_feature (1283)..(1283): n is a, c, g, or t
  misc_feature (1638)..(1638): n is a, c, g, or t
  misc_feature (1664)..(1664): n is a, c, g, or t
  misc_feature (1667)..(1668): n is a, c, g, or t
  misc_feature (1677)..(1682): n is a, c, g, or t
  misc_feature (1685)..(1685): n is a, c, g, or t
  misc_feature (1689)..(1689): n is a, c, g, or t
  misc_feature (1708)..(1708): n is a, c, g, or t
  misc_feature (1727)..(1727): n is a, c, g, or t
  misc_feature (1742)..(1742): n is a, c, g, or t
  misc_feature (1744)..(1745): n is a, c, g, or t
  misc_feature (1748)..(1749): n is a, c, g, or t
  misc_feature (1755)..(1755): n is a, c, g, or t
  misc_feature (1759)..(1760): n is a, c, g, or t
  misc_feature (1763)..(1763): n is a, c, g, or t
  misc_feature (1772)..(1772): n is a, c, g, or t
  misc_feature (1775)..(1775): n is a, c, g, or t
  misc_feature (1793)..(1793): n is a, c, g, or t
  misc_feature (1795)..(1795): n is a, c, g, or t
  misc_feature (1797)..(1797): n is a, c, g, or t
  misc_feature (1799)..(1799): n is a, c, g, or t
  misc_feature (1801)..(1801): n is a, c, g, or t
  misc_feature (1803)..(1803): n is a, c, g, or t
  misc_feature (1823)..(1826): n is a, c, g, or t
  misc_feature (1830)..(1830): n is a, c, g, or t
  Probeset Number=SeqID_15730
ntcatgcggcggaacgtcgacatgcttctacctctagtcaatctcgctngtgtatcccgcgatacgtaatcacttctgtcgtacaagagcagtagctgtgtggagcaancgagatgaatcagacagagcgagtaaagatagtggcagcggcgtcgctgctctcgaggcagaacattgccagccgcattcgtatgatctcntgaaaaaacggcgtccagcagctcncntatatnaactctatatgaggtcagtgagcgcgagacatccaactaaatcatacngtgcgcgaaaacgacgcgaggagacaggggntgagatgtgtataatgcagtggtcgggtataatancanagancacatcagacacagcggagacncatgacgtgacctatatggtggagacgcagaacatgcagcgcggcgcacacgctatgngatgaatagttgcatatatgagtagtctaaagataatcagaggaggttgtctgcacgcgacgtcagtatattgnnggggatcnattgaatctcactggagtcagatacaagagatgttgcgctcctcgctcaaaactcganggggatgacgacttgtgtgtgtgtgcgtatgtgcgtaggactagcacgcgacagtacacactcacatataaatcagcacacgtagctaagcgcgtcaagacagcagtctctaatctntaaatcataatagcagtgcattatagtatgtaacactatcaatatgacatattgtatgtgtatngtgtgataaataatagatagtagtngtagatnatctcaattattgaaacgatctatgtctgatcgatcaagcaagtgcatgtgagtaggattatatatgatatacatggcattgtgaatctgtgtcacataactaatgcgtgatgatgtaatnatgatacagaagttggtaagagagagcggcagcagggccatgaatgtgagtgaagggatagatacgccgcgttatcatacagtccattagtatatcaacctagtatggtacttcatgtcataagcactttgatatcgatgagtgataaatatcgcacaacaatgcttgattagtatgtggtagggagtgatatagagtatgtacacgcagatgaccgatgagtcagacaacattatacgagtctgtgatgtctctgatctgggcttgcgtcactagatatatagataatggtgtctactacgatatgatatgatattacccatcgtgatgtgatgngcctcatagagatgcgtcatctctcgcgttagatctcnctctcataattgattctgtctttatcatattaggtattgtattaattagtggagattaagtagatatacatcaacatataatgacatatacgatggcataagtttgtttgttgtattatatgtgatctgagtatttcttatacctcattgtgacactcagttgtgtagtgggcaggcggtgtgtagagtagtcctagttggaagtagcgcgtgtagagacgtgttaatttactatctcacagaatatagtatattaggtgataggcggcaggtggcgagagcgagcgcccgtctgattcaaagatagtacacaatacggtggcgaaggcgcggcgcacgcgcgtcctctcgtctncgtgtttgttgtcttttgtgggtggntgnngagagagannnnnnagnggtnacacacaaccaacccccgntctacgacgtggaggcagngaggggccgaggatnanntannagtggngtgnngtnagggctctntgnatgtagaatgatagagananantnananaaacataataaaacaacaannnnatancaccaacatacc

SEQ ID NO: 5952 - DNA, 575 bp, Glycine max
  Peptide Sequence Number=SeqID_8676
  Probeset Number=SeqID_15731
ggagatgatgaatcaattcatatgagcaaaaagtaaacagaactgaacaactagtaatgggagatccttgcttctttgaggacttatcgtccttgctgctcctcatagatagtacacaaacaagctcaggtcaccttactcgaggcttctatctatacacatgccccaatgagtaacagtaggctcgttcagctgtggagcagaagtaccaacatacctttgtgactgcccctgccactcttagactttacttccatgatcgctttgtgaggggttgagatgcttccattttgcttgcatctaccaacaacatggcacgagaaagaccatcctgatgatatttcactcgctgagtatggctttgacacacttgctagagccaaggcatctgttgatagtgaccctcaatgcataaacaaaggcgcttgcgctgatatacttgctctggctactagagatggataaatttggctgatcaaccattttatgaatttgaactgaatatacgtgacagcatcatatctactaattgcagagctgcacgtcagatacctcatgctgatatcatttaaata

SEQ ID NO: 5953 - DNA, 758 bp, Glycine max
  Peptide Sequence Number=SeqID_8677
  Probeset Number=SeqID_15732
aactcctttcacccctccagttcccattctattgtgtttaaacaacaattacctgctccatcgagatttatctacttgcttgcacagagacaccggaatagatggtaaattacagttcctgcattgaatgccaacagagaaaattggaataggagctgctgaaggcatagctgacctacatgagtgcagccctccccttgcccacagcagatatccatactagccagctatactactcgatcgatcaatttgaatcgcgacttgtaagcttgagtgacggtactgctcaaagacatcttctacaatgaggcatctcaagggtttgcatcaagccaccatcttccaatcaaacatattcaggtagatcatcaacgacatgtgcctatgatatctactgctttggcaagaccttacttgatctcattaccggtcacattgaaggcactcagtgtacatgatggctctaccaatgagcgctaacagcaaaccttgccttacatcactatgtactatgacgaacgcgtgactaagattattgacccatcattgatcgcggatgatgacctgttgtaataggtatgagctatggcaactgtgggccatgcatgcttgaatcccaagccttccaaacgaactcctatcagggatgtcctgaaagcattggacaatccattgaagattgtgatagaacaacatactaactcagcaaggttgagatcaaactcttctaagaaatattgtagcactgcattctttgg

SEQ ID NO: 5954 - DNA, 576 bp, Glycine max
  Peptide Sequence Number=SeqID_8678
  Probeset Number=SeqID_15733
cttcctcactgctgtgtggctagaggtctccccttcagaccctttcgccttctttccctttcttccctccttcttctcgaatatgcggtacacagccacagaagacaccatggaaggaagtgatttcgacacaaggcgaaattcatgcatcagccaattagatttggcaaaaccattgcccttggcctcccagaaagccaaaacgttcctttttgccacaacctgatcgttagagagctcaacatcttgagcttcctctattgttctccattgaccgttcccggcttctctcttgttaaggttatcgaacctttgtaggagatgtggtgaagaggattttggacacaagaatttcgtcacagtggttacgattaggtctttaggcataaaatcattgttatgtgtccaaagacaccttttttgttagttcagaaagacaaggaacatttcatttacttgtttatacataccatatgaatatgattcactacatctgaacagaaaggctgttgcttctaacattttatttgtttaattgatacagaaactggtgaacaatataaaaaaaaaaaaaaa

SEQ ID NO: 5955 - DNA, 590 bp, Glycine max
  Probeset Number=SeqID_15734
attttcgtcactttcacatcagatcggagccacacaccacagcgatcgatgccgtcgacgcagcccttaaccgtcgcagcgaggtccctacgaagccggatcctctccagatccggatccacatccgccggcgcgagccgatgggcaacgccgggccacgaggagcgtcccaagggcttcttcatgaaccgcactcctccgccgccggggcaatcgcggaaatgggaggattgggagcttccctgctacgtcacgagcttcctcacgatcgtcatcctcggcgtggggctcaacgcgaagcctgatctctcgatcgagacttgggctcatcagaaggccctggagcggctcgaggcggagaggctcgccggagattcttccgattgagaggatcagatgtttgatgctttggaactttgaagcagtgtcttttggttttgttgataatggtggaataaagtgttctttgacgaacttatgattacaagtttaaaactttgtcacttttgatttgctagttgttgatcaacatctgaaattcgattgcttttttcaaacgaatattgtttgtttcagtattggcctttgtt

SEQ ID NO: 5956 - DNA, 1978 bp, Glycine max
  misc_feature (48)..(48): n is a, c, g, or t
  misc_feature (64)..(64): n is a, c, g, or t
  misc_feature (68)..(68): n is a, c, g, or t
  misc_feature (71)..(71): n is a, c, g, or t
  misc_feature (73)..(73): n is a, c, g, or t
  misc_feature (82)..(82): n is a, c, g, or t
  misc_feature (106)..(106): n is a, c, g, or t
  misc_feature (119)..(119): n is a, c, g, or t
  misc_feature (126)..(126): n is a, c, g, or t
  misc_feature (247)..(247): n is a, c, g, or t
  misc_feature (254)..(254): n is a, c, g, or t
  misc_feature (302)..(302): n is a, c, g, or t
  misc_feature (314)..(314): n is a, c, g, or t
  misc_feature (337)..(337): n is a, c, g, or t
  misc_feature (388)..(388): n is a, c, g, or t
  misc_feature (400)..(400): n is a, c, g, or t
  misc_feature (409)..(409): n is a, c, g, or t
  misc_feature (411)..(411): n is a, c, g, or t
  misc_feature (456)..(456): n is a, c, g, or t
  misc_feature (489)..(489): n is a, c, g, or t
  misc_feature (563)..(563): n is a, c, g, or t
  misc_feature (670)..(670): n is a, c, g, or t
  misc_feature (851)..(851): n is a, c, g, or t
  misc_feature (877)..(877): n is a, c, g, or t
  misc_feature (953)..(953): n is a, c, g, or t
  misc_feature (973)..(973): n is a, c, g, or t
  misc_feature (1031)..(1031): n is a, c, g, or t
  misc_feature (1190)..(1190): n is a, c, g, or t
  misc_feature (1207)..(1207): n is a, c, g, or t
  misc_feature (1342)..(1342): n is a, c, g, or t
  misc_feature (1516)..(1516): n is a, c, g, or t
  misc_feature (1532)..(1532): n is a, c, g, or t
  misc_feature (1563)..(1563): n is a, c, g, or t
  misc_feature (1606)..(1606): n is a, c, g, or t
  misc_feature (1662)..(1662): n is a, c, g, or t
  misc_feature (1689)..(1689): n is a, c, g, or t
  misc_feature (1692)..(1692): n is a, c, g, or t
  misc_feature (1709)..(1709): n is a, c, g, or t
  misc_feature (1779)..(1779): n is a, c, g, or t
  misc_feature (1781)..(1781): n is a, c, g, or t
  misc_feature (1796)..(1796): n is a, c, g, or t
  misc_feature (1813)..(1815): n is a, c, g, or t
  misc_feature (1817)..(1819): n is a, c, g, or t
  misc_feature (1821)..(1822): n is a, c, g, or t
  misc_feature (1824)..(1825): n is a, c, g, or t
  misc_feature (1827)..(1827): n is a, c, g, or t
  misc_feature (1872)..(1872): n is a, c, g, or t
  misc_feature (1904)..(1906): n is a, c, g, or t
  misc_feature (1914)..(1914): n is a, c, g, or t
  misc_feature (1917)..(1917): n is a, c, g, or t
  misc_feature (1921)..(1921): n is a, c, g, or t
  misc_feature (1956)..(1960): n is a, c, g, or t
  misc_feature (1964)..(1967): n is a, c, g, or t
  Peptide Sequence Number=SeqID_8679
  Probeset Number=SeqID_15735
ctgttgttgtgttgtggtgatgagagacgttccatacgagtactagtngcagtacgatgctggncaangantncagcatctntgttgcacatgtcatcatcatcantactactttactnatcgcantctgttgcgcatagagtttagtatcttgcgcatgctgttcacaggtcgtcacgtagtactccacctggtcctccatcgtatgctgacagctatcatcagagcacactgcgtcacagacagngtcagantatgcgactagacggagtcgcgcgtgctgtgaagatagatcgtcatgnactatgtaatcnatacgaatacatacacttgcgcngatagcgcagcatcacgatcaatgtcagacgtacgctgcatcagtcatcantagactcgtctngacacactnanatcagtcatacatatgaacacgtctcagctgagctacgcgcgctnggcgcgttgatcgtaccacgcgcatatctcganatgatgactgagtaatcgcatgtctatacgtctggcatcgtagacgcgacgggtcgagaagtgagagcgacgcntctccatcacatgcgtatcatccagctcaatcaatatcgacgcaggcatacagaagcacgacgaaactgtgtacgtcgctggcgctcatgccactctagtcaccgantcatatgcgatgctagtgatggtgtagtgctgagcacagtcgcatcatcatcgcacgctcgtcgtgtgttcacgatcgagacagacgcatgacgcgcaacgtacgatagcacagaccctctcacatagatcttgttatatgtcttaagataagaatgaatacacactctagtaggcgatanagatttgagtgtgtcttgctgtgacnataatatcgtcacagcatgagacagtcagtgcgcggacgctcacttctatcatacccgcggctccgatcgagtgcnagcatacgctctccagcacncagcagagtgagtgattaaccgcaagcgatgcaggcagtatatataatgtatgtgcanagaatgggtattggtgcaatacgtttacggacctgatactactgtggaagtgtaggtgatgagtggccgtagctccacgcgtgatataatatatacaactgtctacgcgatatatatacacagggcgagtgcggtggcacgacacacgatgtatgctgntcgtggtgtgtgatatncgcgaatatatgtctgctgtcataaatgtttacatttcgattcagagcagactgtaactacacacgaggaacttcacactctaacattacaatatatacacagagcgcggaccacacaccgcacgacgcaatcangaccgcagaagagaatcaccagaacatcacgatcaacgaatgaagcagacatacagcgatgatatagatgtattgtagaatatatcatacacattcacaacgtatctctaccctattctccgtgctcactcgtgctacatttgatataaagcggagtagataaaatcatcacanaatggcagcgggatanatgtggcgaagtgtatggcagcgcgtggcanaaacgaacgctcaggtgctcaccactatacaccgcattatgtnaggacagcctcattgtgaatcgaccctagcgcccatagattactattattagtctnttgcgggattgccggtagtagactaantanctaccaacacctctctncaccgcttatcttgtgtcgtcgccatacgtggactaatatggtgagggcgcggctccgcgtcggtgatgngntgaggagtgatgtgnggaggagagggaatatnnntnnntnntnnanttgagtgtgagtagtcacaccagagatattatatcaaatacgctntctgattgactacacggcgcttggttgtggtnnnttgtttgnttngcanttgacaccacaacaaacacgccacatccacctcannnnntcannnnaacaaaaatca

SEQ ID NO: 5957 - DNA, 679 bp, Glycine max
  Probeset Number=SeqID_15736
aattttgatcaaactgtgtggagaaacatttcggacagcctctcgcccccgcgtcgcgggcggccaaccctagctgccgccggccgcttccccttccctgcctctcctcctcgtcgccaccagaggggccgccggtgcgccgcgcggctgccaaggatggtggcggcgaggatctagtagcctcggtctcgctcgaggtgccctgcatccatgttggtggccatggctggtgggtcggcgtctgcttcagcgtgcggcggctggcggtgctggccgtcctcctcgcccgtggaggcggcgagtgagtggcaggtggtggcggtggtgcggggcccttcgatggtggccgttttcgatctgatggcctcttcctcgacatccgcggcgttctcctgccagatctagcttatggtggtctccggctgccggtgttgttcgtgcttggaggttggagatggggatggacaccggagaaatccgaggctggctagtccgaccatgacggtgacgacgtccttggacactgttcccttcctgttggcgccgtcaaggttgttcctttcccctcctcttcaccctacttgtataccgggtgaaaacctagatcctggtggggctagggacttttctgaggtatatttgacccaaagaaattatgataattatctagaaattttcc

SEQ ID NO: 5958 - DNA, 2987 bp, Glycine max
  misc_feature (1)..(132): n is a, c, g, or t
  misc_feature (2803)..(2987): n is a, c, g, or t
  Peptide Sequence Number=SeqID_8680
  Probeset Number=SeqID_15737
nnnnnnnnnnnnnnnnnnnnnnnnnnnnnnnnnnnnnnnnnnnnnnnnnnnnnnnnnnnnnnnnnnnnnnnnnnnnnnnnnnnnnnnnnnnnnnnnnnnnnnnnnnnnnnnnnnnnnnnnnnnnnnnnnnnngagaaaatgagacgtgttgccccattgggatgacctaatttgggagagagaaatttttggtggcccttttttttttatttttcacccaaatgttaaaaagagggagggtttacaggggggggggggataagggtccctttttcccccttttttcccactaagggggagtttgattaaaacactttaaacgggggaattccccgattggttcccatcccccggcgggatatggggggttaggcggggcccccggctccccccctcggttataaggggggtcggggcccccggccccccgtagagtcagctacgtaggcccccccccccgaactcaccaagcactatgcaacaagccaaacaaacttggttttaattggtataggcttgccaaggtcttgttgattgagcgttaagtgctttaactaatcaatcccaagaccttggtttaccttgccacacaaaaaaatatataaaaaggcaaaataataataaaaaaaagagaaggcttggagccaagaaaataaacacaaagcacaagtcatggaaagaataatggttggaagtgcaacaaaggttgctttcaacctcttggtcactttcgccattgtcattccatgccttgaggctggcattgctgagtttgatgactttctcaaagcccaagctgatgaagcacaaaaaattgctcttgaggcctatgtcccagtgccagaagatgtcaccgacgaactcaatttccatgttcatttgtcattagaaaactccacaaggagggaactaaggcaaaggaagggtagatcaggaaaaaaatgtgttgccagcaaccctattgacacttgctggagatgcaacaaaaactgggccaatgaccggtacaggttagccaagtgcggcaaagggttcggaagacgggccaccggtggtctcggtggccccatctatgtcgtcaccgataattccgatgacgacatggtgaaccctaagccaggaaccatccgtcacgccgtgacccaacggggccccttgtggatcatcttccaacgcagcatgatgatcaaattgaatcaagagctgatgatttcctccgacaagaccatcgacggtcgcggcgccaacgtggtgtttagggacggcgctggcctcaccattcagttcgtgaacaacgttatcatccacggagttcgcatcaagaacatcgtacctaaggagggtggcatgattagagactcttacaaccatgttggcctgagaacaaagagtgatggtgatgccatctccattcggagccagcaacgtttggatcgatcatgtttccctctctaactgtgctgatggtcttatcgacgtcatccagggctccactgccatcaccatctcaaattgccacatgaccaaacataacgatgtcatgctgtttggtgctagtgactcatacagcggagacaagataatgcagataacagtggcattcaaccacttcgggcaaggactggttcagaggatgccaaggtgcagatggggtttcgtgcatgtcctcaacaatgactacacccactggatgatgtacgcaattggtggaagctcagggccaacaattctgagccaaggaaaccgtttcatagctccgaacaacaacgccgcgaagctgatcacacacagggactatgctgaattccaagtgtggaagaattggcagtgacaatcagaaatggacttgttcataaacggtgcacagttcatcccttcaggctcacccatcaagacgacctacaaaaagggtctcctcatgaagccaagagatggaactcatgctagtagattgacacgaaattccggtgccctaaactgcatagttggtaggccttgttagacaaattagttaacattaattgttgttgctgttggttttttttttcttcctccatttttttaaaatgttagaaagcatgcacccatgcatgcatgcacagaagattcatgtcagctaggatgaatttgtttcttctgcaaaactagcattgttggccttgtaagagcgagaaaaagagagaatttgttgcttgggttcaattgagaagaaataaagttccaacttatttgtaaaaaaaaaaaaaaaaagaattcctgcagcccggggggatccctaattctaataccgaccccccccggagggcccctccagctttttgtccctttaagggaggggtaatttccagcctgggggaaacatgggccacacctgtttcctgggggaaaattgttttgcttccccccttccccccccctaaacaacccgaaaaccgtaaggggaaatgggtgggggggcctaagggggcttacccccccttaatttggggtggggcccctgggccccttttgggaaggtgttgcccaccaaaccctaattggacaccttggctgggagaatgccaccaaaaaacctggggcccaattgaaccggcgtaaacgggtttaaccccaaagtggccgctcaaaagggggtttccggaaaaagaaacggggcccacaccgcgcgggggtccctccggggggcgccccccaaattctaatgtggccctcaccacccgcaaaaattttccccccactcaacccccccattgtggtcgaacgccccttaagccctcaggaaaaccctctttccgtagaaaannnnnnnnnnnnnnnnnnnnnnnnnnnnnnnnnnnnnnnnnnnnnnnnnnnnnnnnnnnnnnnnnnnnnnnnnnnnnnnnnnnnnnnnnnnnnnnnnnnnnnnnnnnnnnnnnnnnnnnnnnnnnnnnnnnnnnnnnnnnnnnnnnnnnnnnnnnnnnnnnnnnnnnnnnnnnnnnnnnnnnnnn

SEQ ID NO: 5959 - DNA, 561 bp, Glycine max
  Peptide Sequence Number=SeqID_8681
  Probeset Number=SeqID_15738
cattccagaatcctttccccctctcgccccctccaacaaccaagaacagcaggaactcgacctcggaccacccactcgcccgccgccccacccaagaacagcaacacctcggcatcggatcgccggcgaatccgccgcccggcagaaggcatccgaatctcccatgattggtaagtacatcgtggtcgtccgcggcagctcctctgtgacctcgtccgactgcgagtgcatgatttcgaaggagaagaggttccggggcagcatcccagggactgggcccgaggtcgagtggttgccggtcaccgagcagagcttcaacgcctagcacctcatcgccggcgccccgatccccttaggctccagctcccgccggaacttcaccgtcaaggccctcaaccctggtggccctacctcttgatgtttgcggtcggttggaacctttaccctgatggcgatgcctgttgctaaatctacctatatgtgctggctgtactctcgaggctattttgtctgtctcaataattaaaacaacactattgtgtagggcaccgtggctatatt

SEQ ID NO: 5960 - DNA, 1448 bp, Glycine max
  misc_feature (186)..(186): n is a, c, g, or t
  misc_feature (204)..(204): n is a, c, g, or t
  misc_feature (208)..(208): n is a, c, g, or t
  misc_feature (254)..(254): n is a, c, g, or t
  misc_feature (995)..(995): n is a, c, g, or t
  misc_feature (1013)..(1013): n is a, c, g, or t
  misc_feature (1087)..(1087): n is a, c, g, or t
  misc_feature (1230)..(1230): n is a, c, g, or t
  misc_feature (1295)..(1295): n is a, c, g, or t
  misc_feature (1397)..(1397): n is a, c, g, or t
  misc_feature (1400)..(1400): n is a, c, g, or t
  misc_feature (1448)..(1448): n is a, c, g, or t
  Probeset Number=SeqID_15739
ggtggtgcgtgtgcattctctatcgttcctctctgatttctgttgtgactggttggagtttttgttttcttttcgattgtacacacgtggctggtcgggccgattcgctgcgtcctcgatgttattcctctctatcgtctgtgtaatgtgtgtctgatatagtattgcgtgttggtctcgtgtacnacacgttggtggtgttgngagngcgctgctgcgtgcgcggtcggttttaatgtcgggcgcgcgcgcgngccttcactccttctttcttcttctcattctatattttatctccatcgcgccgctctgactcctcgcgcgccgtttacttttgtagtatgtttctctcccccgactcgcgcgcggcggcctcacgtcgcgtatgcggtgttgtttgcgttttttgtgtgatttctcgcgtggcccccggctgtttgtttcgttagtgtggtgcggagcgctgaatgctgattgcgcgtgtggtggcggcgacattcgccccggcccgctctgatgttggtgtttagagtgtgtttatgtttcggcgtgatgtgcgcgcctgtgctgatggtgtgtccgcatcgttgcggacccgtcttgtgtgtttttttatcggcggcgtgtgggtgcgtgggagtgtctgtgttctgctgttggcgcacgccgctggatggtgtgtgtcgctgccggtctgtattttggcttcggtcgtgttgcgcgcgtctcgcctcgttgtcttccggtgtgtgctgatgatgtcgcgttcctcgcttttgtcgcgctcgccgtgtgttgtctgtctctgtgttgatggcgcgcggtgtggtgctgtcgcccgtccacctccacttcagtagcagatggttggttcgtgatgtaggcgtttcctgtgtcggcagagagcggctggtgctcgaccgctgtagtcgcgccggtgtcggtgtgtgaacgccgcctgattgcggggagtcctgtttgggtgccgtcgtagncgctttgcgttgcgcgtntgtgtggagggggcgcggagtacgtgtgtgtaacgtctcgtggccggcggcgggtgctgacctcgtatcactcnatgatattctctattcgcacatgcatatgatcaatttccggcgcgacgggacatagtgtgacgcggcgcgcgtcttgagtactacgtctctctgtgttgtggacgtgaggcgcgcgcgcgcgctcactgtgtgcgtgcgtttncgtgcgctgcgctatacggcgcgtcactctgtgactgtatcggtgatagatctgtgggcgtgggngcgcgcgtgtggaggtgcgtgatttggtggatgtgatacttctcgatgctgtcgtgtacacgtgaccgcggaccacacgatgtgatggttgatgctcggggngtnttacgttgtgtgcgccgctcgttattgcgcgaatgccgcgcgacggan

SEQ ID NO: 5961 - DNA, 560 bp, Glycine max
  misc_feature (7)..(8): n is a, c, g, or t
  misc_feature (13)..(15): n is a, c, g, or t
  misc_feature (17)..(17): n is a, c, g, or t
  misc_feature (19)..(19): n is a, c, g, or t
  misc_feature (21)..(21): n is a, c, g, or t
  misc_feature (26)..(26): n is a, c, g, or t
  misc_feature (66)..(66): n is a, c, g, or t
  Peptide Sequence Number=SeqID_8682
  Probeset Number=SeqID_15740
cttctcnnacacnnnanananaaaantccattgattttgattttgaggggatagaaaaatcaatgntaggatcaggatccggtgtggttacagcgtacggcaacggtgcaatcaccgagaccaagaagtcccccttctccgtgaaagtgggcctggcccagatgctccgcggcggcgtcatcatggacgtcggcaacgcggaacaggcccgcatcgcggaggaggccggtgcctgcgcgggcatggcccttgagcgtgtccccgccgacatacgtgccgagggaggcgaggcccgcatgagcgacccgcaactcatcaaggacatcaagcgggccggcaccatccccgtgatggacaaggcccgcagcggccacttccgcgaggaccagaaccgcgaaggcaccggcatcggataaggcgacgagagggaggtcgtaaccctcgcggacgaaggcggccacataaagaaacaccagctggcggaataccccttggcggggggaaggcgcaacctccggaaggacccacggcgaaattgggagggggacgacaagaatcgg

SEQ ID NO: 5962 - DNA, 1377 bp, Glycine max
  misc_feature (573)..(582): n is a, c, g, or t
  misc_feature (1305)..(1309): n is a, c, g, or t
  Peptide Sequence Number=SeqID_8683
  Probeset Number=SeqID_15741
attcaaaatctgagtcccacacattcaacaaacaaacatttccgttggcgttggctcctaaaaagcgcacagttcaattcagtaatacacaaaacttgagactccgacgctgcagcataggaaggaagcaaagccgagaacgatgtcgtttcggtcggagaacgtgaaccctaaccctagtcccactcctccattgaagaagcggtggtcagacatatggacgaaatcgaaacccctaaaccaaatggtaatggcgatgaagctccactccctctcttcttctcctcgcatcagcaccaccgacaaaaccaaccctattctctccccattccccatcaccgatcgaacccttctcttatccgacgcacttctcctcaaaatcattgcactagtctccgattcctccactcagcgaaactcaaactctctggtctgcaagcggtggctcaacctccaaggccgcctcgtccgctccctcagaatctccgactggaacttcctactctccggcagactcatgcaccgcttccccaatctcaaccacgtcgatttgctctccgacgccttaatctnnnnnnnnnnttcgggcattctcttaagcaaccgcgtcatttccatgcacctcgattcaaactcttcccctaattggtgcttcttcgaggacaacatgctccccgtcgaagtcatcgacaacggcctcacctccctcgccagcggctgccctaatttgcgccgcctccacgtcatcggcaccaccgagatcggcctgctcaccctcgccgaggagtgctccactctgcaggaaactcgaaattgcagcggctgcagcgaccaatgtttctgcgcggggatcgcccgcgtgtggaattctgcagattcttgaacctcgttggggcccggtgatggggttcttcgatttcggtgtggtctgattatggggtggactattctgctcaaggggtgtaggagattggtgaaattggagcttgtggggtgcgaagggagtttcgacggggtgaaggcgattgggcagtgctgtgtgatgttggaggagttggtgattgtggaccacaggatggatgatgggtggctggccggggtttcgttttgcgagaatttgaagactctgagggttcagtcgtgtaaggtgatcgatgggagccccgggttggaggagcatttgggttgctgcgaggcgcttgagagggtgcatttgcagaaattccagatgagggatcggaacggcgtgggagcgctgttttcggtgtgtaggaatgcaagggagattgttcttcaggattgctnnnnnctggatgatggcaccctgagtttggctgttgtttgcagacacccagaacacttaaaactggataatac

SEQ ID NO: 5963 - DNA, 981 bp, Glycine max
  Peptide Sequence Number=SeqID_8684
  Probeset Number=SeqID_15742
aaaaaatcaaaaatctcagccatggcgattgcttcaacctccactcttatcttctcctgcgccaaacccgatctccggccatttccgtcccattttcgttcttcttctccgtctccctctcctcttgtgagtcagctccgtatccctagcctaacccatgacccgatttctctgtcgggtcttatcggaaccggtttggtggctgcgacgttcatggcggcaggaccaggtagtactgctatggcggcggttgattctcttcagctaagcgaaccggcgaatgcgttgtctttacccacttgggctgttcatgtttccagcgttgtcgaatggattacggcgatggtgttggtatggaaatatggagaaagagagggttacgagtcatggaaaggtctctcatggggaatggtgcctttgcttggtggagctctttgcgcatgcacatggcatttcttttacaatgctgaatctcttgaggtgttggtagcgcttcagggagcactaactgtgattggtaatattactctgtgcattgctgcctttcgaatcaacaagtctgcatccaaaatggaaacctctgaagagccgtgagggctaaatacacatctatgtgtttaaaataaaggtcaaaggaatgatttgttttcagtaatttctacaggcaggaatctgaggtgtagcctttttggagagtggtgatggttagagaagcaactggatctttggatgtggtattagcggaaagatctttttgctttatatctctagtgattgcactaaacatgtttcttgagcgtgtgtgtgtatatacttttatattgtagtgtattgtattgtattatcctgattatattcctggtgagtgaggccagtgcttcatgttcataacctattatgtaaacattcttcttctgcaatcgttgtagtcctgacttcattattttcggtcttaggcttggatgatcacagagttcatgc

SEQ ID NO: 5964 - DNA, 1432 bp, Glycine max
  misc_feature (16)..(16): n is a, c, g, or t
  misc_feature (21)..(21): n is a, c, g, or t
  misc_feature (46)..(46): n is a, c, g, or t
  misc_feature (56)..(56): n is a, c, g, or t
  misc_feature (70)..(71): n is a, c, g, or t
  misc_feature (74)..(74): n is a, c, g, or t
  misc_feature (76)..(76): n is a, c, g, or t
  misc_feature (79)..(79): n is a, c, g, or t
  misc_feature (119)..(119): n is a, c, g, or t
  misc_feature (133)..(135): n is a, c, g, or t
  misc_feature (157)..(157): n is a, c, g, or t
  misc_feature (174)..(174): n is a, c, g, or t
  misc_feature (341)..(341): n is a, c, g, or t
  misc_feature (392)..(392): n is a, c, g, or t
  misc_feature (581)..(581): n is a, c, g, or t
  misc_feature (606)..(606): n is a, c, g, or t
  misc_feature (631)..(631): n is a, c, g, or t
  misc_feature (638)..(638): n is a, c, g, or t
  misc_feature (646)..(646): n is a, c, g, or t
  misc_feature (648)..(650): n is a, c, g, or t
  misc_feature (657)..(659): n is a, c, g, or t
  misc_feature (675)..(675): n is a, c, g, or t
  misc_feature (677)..(677): n is a, c, g, or t
  misc_feature (906)..(906): n is a, c, g, or t
  misc_feature (1289)..(1289): n is a, c, g, or t
  misc_feature (1399)..(1399): n is a, c, g, or t
  misc_feature (1401)..(1401): n is a, c, g, or t
  misc_feature (1404)..(1404): n is a, c, g, or t
  misc_feature (1408)..(1408): n is a, c, g, or t
  misc_feature (1432)..(1432): n is a, c, g, or t
  Peptide Sequence Number=SeqID_8685
  Probeset Number=SeqID_15743
tgtttgggtggtgggntgggngggggtggtgtgagagatattgttnttatatacantgtggtggtataannggngnagnggggggaggaaagaataatatgaaagatgcggaatgggangtgaccgtgcgcgnnnggcgcttggtagtgtggtgcgngtggtgtgtgcacgaantgcgatagtgattagtctggtacgtcgccactattctcagcatcatccaacgatcatactacctcgtctcgctctcggtacgccgcctgctggcgtcgactcgtgatgctgcgcgtactctctcgccgcagcctcgtgtaatactcgctgtaggtcacagtatcttnatgtatatgttacatatatattttagattatgttgtcgttgtggtggtatngatgtgtcgcactgttggtcgtctcacattatgtagatcgtctgacgcgacatcaacactcacatctcgacagtgtcacacacgacatcatggtattatgtatgagatgatcgtgagaacacactggcgtcactcactgatacgtacacaactgccgatgacaacaacatatatatagtgcgctgttantactcgcgtcctgactgtcgactancaccaaacatacagcaatagactanacagacnaagagggnannngaaaaannnaaaagggtggggaganangaacatgatatatgatagagctgtaatgtatcatctatgtgtgtctattgcatccatactacatcgtgctcacgtgctctcgctgtctcgactggcctacactacggtctacatagaaagtggtactgtgaactcgcgaccatacgatatgtggctgttagtcaacatgacgagattaacatatgttgattatatactctccccgcgcccacactcaactgcacatctntgtgcttacctgcgttgtctcggcgtgtccactattacacctgctcacatcttgtattagtcactgctcctcatcaccacctcctctatcattgctgttactctgacaatgtcacatatgcactgctaccatgaatcttgagactatgcagacgtctacacgtgatactctcactgtctgtgtgcgagtgctacgtgatgtattcattctactgtctgtgctgtactctcgctatgatcctatacatatcttcactgtaggcgacgtgtacgcatgacgttgaccggcatgtatcatatagcgcgatggacgcgtacagcgccccgcggcgcgggctcacatcaattacttcgtggcacactctatactcaactctcacagcngactctactgtcacgctacatcaatagtatcactacaatatcatataatgtaaatatatcagtacatatcattgaaactgtgatagaacgtgatgtctattgtcacatcnangcnatantatctacttatgtgtatactgtcn

SEQ ID NO: 5965 - DNA, 632 bp, Glycine max
  misc_feature (5)..(5): n is a, c, g, or t
  misc_feature (10)..(10): n is a, c, g, or t
  misc_feature (24)..(24): n is a, c, g, or t
  misc_feature (63)..(63): n is a, c, g, or t
  misc_feature (79)..(79): n is a, c, g, or t
  misc_feature (112)..(112): n is a, c, g, or t
  misc_feature (117)..(117): n is a, c, g, or t
  misc_feature (119)..(119): n is a, c, g, or t
  misc_feature (632)..(632): n is a, c, g, or t
  Peptide Sequence Number=SeqID_8693
  Probeset Number=SeqID_15744
cagancaacncagtgaaacgtganaagctgcagcttgcccactcccggcgttggcagcctgtntgctgatcgtcacaanccgccgataacgcttgcagtggccgacctccgntgcgntntggtaagctgacgatcaagcgcacgcccccaagcggagttcttgtgaccacaggggcccggaaggacagcccatgaacctcaaagccgtcgtcttcgacgcctacgggacgctctacgacatccagtcggtcgcggagatcaccgaagatgcgtttccgggctatggcgagatcatcacgcaggtctggcggatcaagcaactcgaatacacctggttgcgctcgctgatgcggcgttaccaggattttgccgcggtcacccgcgactcgctgggctatacgctgcgcgtgctcgggctcgactatgagaaggacgcgtttgagcgcgtcatcgagaaatacctgcatctcgatctctatccggacgcgacggccgcgctttcggcgctcaagccgcgaaagctcgctatcctttccaatggcagcccggacatgctgaatgcgctggtgcgcaactccggcctcgaccgcctgctcgatgccaccatcagcgtcgatgccaggaagaccttn

SEQ ID NO: 5966 - DNA, 641 bp, Glycine max
  misc_feature (1)..(18): n is a, c, g, or t
  misc_feature (261)..(261): n is a, c, g, or t
  Peptide Sequence Number=SeqID_8694
  Probeset Number=SeqID_15745
nnnnnnnnnnnnnnnnnnccatctaccacttggctttcacgtttaccttcgcagcgctctttctctctgaaccctaatttacacacactccctttattcgatccctctctccaccatggcgatcaactcttccaagaatccagatggttctgtccaaaatggcatgccttcgtatttttatctccacactagatgtttctgctgcatttccaccagcacaccagcatcaacgtttcctcttgggcttcagattattttcantggaacacttattgacggcaaaggaccaagcattaggaaaaaagtaaaaaagggttggaaaagaaattgcccaaaaatgactggagactgggaaaagccaatttccctttcgtggtttccaaaatttggggatttgccatggttggggcaaaaacaagagtaaggggcgcccgggctttttccccccgggaaggtatatatgggggaaaaattccaaaagttgggaccgggtgcccctttttttgtggccccctttccccgggggaggccctctttttgtttgtgggggaacaaaccccaaaaaaaaaaattttctccttttttagaaaaaaaaaaaaaaggagaagtgggtgttttaccacaaccaccaaaaaaagaaa

SEQ ID NO: 5967 - DNA, 353 bp, Glycine max
  misc_feature (123)..(127): n is a, c, g, or t
  misc_feature (214)..(218): n is a, c, g, or t
  Peptide Sequence Number=SeqID_8695
  Probeset Number=SeqID_15746
acagcttgtcatcacaatgaactgtcaggctaatacttggtggttactattcagtgtaaggataggccaaagcttctcgatctcatacatagtttgtactttgacagacatgaagtatgtggnnnnncatgcaaacattgatgctgaggggccagaagcatatcaggaatactacatcaagcatatagatgggtcccctgtgaaatcagatgcnnnnngacaaagagtgatacaatgtcttgcagctacaattaagagaagagtttctgagctgagtgacttattaactttatcgggatttgcaattcttttgatatatttgcatatacaaatgatgccgtcatgtctgtgta

SEQ ID NO: 5968 - DNA, 1487 bp, Glycine max
  misc_feature (54)..(54): n is a, c, g, or t
  misc_feature (65)..(65): n is a, c, g, or t
  misc_feature (70)..(70): n is a, c, g, or t
  misc_feature (221)..(221): n is a, c, g, or t
  misc_feature (261)..(261): n is a, c, g, or t
  misc_feature (267)..(267): n is a, c, g, or t
  misc_feature (448)..(448): n is a, c, g, or t
  misc_feature (458)..(458): n is a, c, g, or t
  Peptide Sequence Number=SeqID_8696
  Probeset Number=SeqID_15747
ccggagctatacgtgcgcgcgtatcatatctcattagcactagaatatatatcncaccgccgccnggccnagatcgcctgctgcgcataaagctgcctgagccgacgttaatatcagctgtgcggcggcgaggcgcgactcagaaccacgcagatatattaataatgtagagacggcgtgcgcggtctgtcgtcacatacataaacagcgagcggcacagntatcacacgaggcgtggtgaggtcgagcgcgatcatatgntagttnctagcagtgtgcagtatctatctacgcgtcgctctagacggagttattgccgttgtcgcttcgaatatatatactacgtatatcctatctcgtctgcgattgtacatcatatagacagataatcatgaatgctcggcgtcgtgtgcagcgcgtgtgtataataaaactgatggcgcgggcncggaatatantatattagtcgggcgcggcgctggtgagtatatatatttactcgacttaatgcgatccggggtcgcggtcgtcaaaagaatcgggcacgtaattctaataatcctaattacatacggtaacgccgggcggccgcgtgccgataacaccccgcactaccattccgcggtgcgggcggatcatagatacttaatattatacgtggctgtcttggttcatggcagcggcggttcgcatacatctgttgggagggtagtatctcgtgtagcgtgcgacattatggcgccgataataaactggaaggggagaaaataagcgcgcgcggcggtgttatacgtcaatctgggcgcgaaacaaacacggggggactagccttgctaattggtacatcttcctgatctataaattgcatataataaggggccggggcggctggaaggacatatatcatatcgcggatatcaggcggtagaataataacacgcattcgaggttaatcttcttggcggcgacacaaacggagaaatactatgttgtgggggcgcgtaaagaactacaaaaaaaaaaagggcggacaataaaacgggggagtgggacatacgggataaagctttattgcgcctccgatcccgattccaagcacccctcgcttgaaaaataataaaaaataaatggttggagggtaaacggcaagacgacataaatacacagcgggagcaaaagggcggggggaaaaaagggaaatattatggaaaattgggtactaaacacaccgccggcaatgtgtgtgtcgcaacaggttccttttcggtaaacgcggggtgctgcacaaatggaaacaaaaaggcgcggagaaaaaacaaaggattattgggggggcgcggggggcgacaatagaataaaatcttatttgtgattttgggggcccccccgatcccacacaattgagtaataaagaaaaagcgtggcgatcctacatacccaaccatggtatagatggagtcatacataactgtgcgtcctctgtttct

SEQ ID NO: 5969 - DNA, 1333 bp, Glycine max
  misc_feature (151)..(151): n is a, c, g, or t
  misc_feature (189)..(189): n is a, c, g, or t
  misc_feature (197)..(197): n is a, c, g, or t
  misc_feature (415)..(415): n is a, c, g, or t
  misc_feature (532)..(532): n is a, c, g, or t
  misc_feature (738)..(738): n is a, c, g, or t
  misc_feature (1198)..(1198): n is a, c, g, or t
  misc_feature (1209)..(1209): n is a, c, g, or t
  misc_feature (1302)..(1302): n is a, c, g, or t
  misc_feature (1305)..(1305): n is a, c, g, or t
  misc_feature (1309)..(1309): n is a, c, g, or t
  misc_feature (1313)..(1313): n is a, c, g, or t
  misc_feature (1315)..(1316): n is a, c, g, or t
  Probeset Number=SeqID_15748
cggtgtgtgtcaggaagtaactaatttcgtagagagaggagcaagggcggcgcggggcgttgggtagtgttatcgctgtgtcatgatattggtattatgtgtatgtttattgtggtatgtctctgatgaaatgtatatgatatttgatctntgtggagttgtgtaggaggagtgtggtatcttctgtgntccgaggnggagagaagtggacgtgtatatttattcttgagaggtagaggatgattgcgaagtgactcctctgtatgtgatggtattgtgtatggtttatgacggttattgaagaacgatataagccggaggcgcgtcgagatacatcgatagtggtggtagtgagagaattgtggggtcggtcttctttctgttggtaacggtaggtgacgagtatatatagacntagacagtatctatgttagtcttatatcctacattgtgttgaaggtgtgtgtgggtctgtgtacattgttgagagcttcttctttcacgatcttcgcgtgctcaaatcaacgcaaanaatatagatggaacgcctgggataatttggtgtgagtactgatgtgttttctcaagttaggcagaggcatgtatcgtggagttatgtggttgcagtcaagagtgatatacatatagtctgagcgtgtgaactactaggactaatattataaattagatttatagtttcaataatcaagattggaagtattggcttctttgatgttntttgatgataattttcttctaaagatagggataagttattaattttgttttttagatttgcattcattgttatcaatcagagagtcgcatgtataggattgtgtcaaagtggagctatatgtattgcgccgtgagacgtaggtgtgagacagtagcggaggcgccagcacacaagtataccattcgtcttattgtctcgttcaatcagtaattgagagtgacaagtggaggtaaatgatattgtgtgttatgttaggagatgtgggttgatgagctgttgtctgatgcgctaagtggtgagtgtataggtacttcaaagcatgagatgtgctctaactactggttatcctaataggacaatgtatgtatagaggcataactcttgtggctgcgggtgcgtggggccgtttgtattatacaaaactcacattatttggtgttttatttataatatgtgggngtgtttattangagagtggggggagggggggggaggacacaacaactatatagtgattacacatattgttttctttgtcagtattgtgtatttatgtatgtttnatntatntaantnnactccacaatttcatat

SEQ ID NO: 5970 - DNA, 310 bp, Glycine max
  Peptide Sequence Number=SeqID_8697
  Probeset Number=SeqID_15749
tgcttccgttgtttttttttgaaggtctatatttttttttgtttttttttttatcctttttattcgtacgtgcacttttccttcgaaagaaatcgtcatgaatacaacaccacgtgccgcacgaagattgaacggaaaagacactgtgttactcaacctaaatcctaaccacacaggcacgaaggaaataagtttcgcccaccacgtatggtcagcttgcaagtcgaaagttaatgcatcattttcttactacagtattctcaggttctgccatcgacatcgaagcctgccccagtccagccaggagttg

SEQ ID NO: 5971 - DNA, 1972 bp, Glycine max
  misc_feature (87)..(87): n is a, c, g, or t
  misc_feature (139)..(139): n is a, c, g, or t
  misc_feature (273)..(273): n is a, c, g, or t
  misc_feature (340)..(340): n is a, c, g, or t
  misc_feature (446)..(446): n is a, c, g, or t
  misc_feature (452)..(452): n is a, c, g, or t
  misc_feature (517)..(517): n is a, c, g, or t
  misc_feature (608)..(608): n is a, c, g, or t
  misc_feature (1673)..(1673): n is a, c, g, or t
  misc_feature (1861)..(1861): n is a, c, g, or t
  Probeset Number=SeqID_15750
ccaaacgacgtcgggccacgaagaagtccgccgtgtctagatagggcagttcgacacaacggagacgcacaaggacatgcgtgacgngcagcgtagaccacgagtcgcagctggcgagcgcaaccacaaacgatcatcntatgtgcacagtagtacgatggtcgtgacgtgacgacagctgctagcgcgtagtatgcagaatcgggctatgaaaatacgtattagttactgtatcagacaatgtatggctgattacacgtagtcttgcgtgcntgcgatgacaattcagcggcagacatgactgcagtcagagcgcagctcttgagcaggtccgagagcntaccgcgagatgagataaccgtcgactcgatagccgcgtcgctggcgcacgcaggacatgacagtaggagaggcatacagctgccaatatattcaacgctgcgagngcgcgncacgacgtatcacatgtgcgcagcattctcagattcagtgatgatcacatacacatcatcccccncgttaccgtgtggacgtagacatgtagcgctcatctggtcatcgcgagcaagcggctcgtgatgtgcaatagtacagagacagtgatacanaagagcatgatagaataatgcgtagagaacgaatgtaacagcacgaatgtcatggcgaactcagcaaaccaatagaatcgtgcgccgagcaagacatcagcatacgcgagaaatcacgaacgagagtgtgcgtcggaacgaagttctactacacagacataacgtactgtcacgcgagtgacacgagacgtacgttgcggcacacgatcacatatatctcagttgcgtataatgcggtttaggtatgtagcagacacagcgtcacacagattcagcgcccggtacagagtcgaggagcagcactgatagagtagtgagatgacagggtcgagggagcggagcaacacacgctctgagacacgggagactacacgtatggtatatggctaggcgatacggtgccgcagaagtacgctgtcgctgagagcgacatcagcatctcgagtacatactgtcagtcagagtacgtgtggtgagcactcgttagcaaggacggtgagcgtgagagctcatcacatagacgacatatggcgcttcgacgcgggaggagcagcgtctatgagaatagatgcgtagtacgtagtaagaactgttattaggtatcagtggcgccgattctgagatacgagacttcctgagagtgtcagagcgggagtcgtgggggcgacgcgcttcatgtcagcgtgacgttgacgcgcgtgtgcagtcggcactgtgtcacatgtcctatagtggctgctccgctccacatcaccctggcacctgtcaagtcgacgcacacgctacgtatgcacgaacggagcaccgcgaagatacgacccgagtggacagaggagaaacagctgcgcgaggagcccgccgcagggcgccgtcgcggcgcgccatcaggggcgaagagagagaatgtgtgggggcgtggtgcacaatcacatgtaatctcattccggctcaacacattgtactagatatagcgatctgaccagcgcacacacaccatcgggcccaccaacgccacgcgaggcgcgcgtcgtcatcgagcgcgcgtgtctccccacacaatcaacnagacaactctaacatggcagatctacgagagagggatccgtagcaaggcgcgcgcccgagatggctatagcagcatatacccgtaatagagttattgaatgtggagcgtgtagaagatacggttgccgatgagagagaggcagaccaggagagcgggagctgcgccataaacgcggacgccatcactnatcacggataataaaaggggggtcgctgctaactgtcgattggtggggttagaacaatatcgcggcgtgtgggcgagcagccggggggcgttgggggggagtacgtagtgt

SEQ ID NO: 5972 - DNA, 1466 bp, Glycine max
  misc_feature (24)..(24): n is a, c, g, or t
  misc_feature (26)..(29): n is a, c, g, or t
  misc_feature (32)..(34): n is a, c, g, or t
  misc_feature (37)..(49): n is a, c, g, or t
  misc_feature (51)..(54): n is a, c, g, or t
  misc_feature (61)..(61): n is a, c, g, or t
  misc_feature (63)..(63): n is a, c, g, or t
  misc_feature (69)..(70): n is a, c, g, or t
  misc_feature (80)..(81): n is a, c, g, or t
  misc_feature (166)..(166): n is a, c, g, or t
  misc_feature (245)..(245): n is a, c, g, or t
  misc_feature (317)..(317): n is a, c, g, or t
  misc_feature (345)..(345): n is a, c, g, or t
  misc_feature (347)..(347): n is a, c, g, or t
  misc_feature (349)..(349): n is a, c, g, or t
  misc_feature (358)..(358): n is a, c, g, or t
  misc_feature (365)..(365): n is a, c, g, or t
  misc_feature (367)..(367): n is a, c, g, or t
  misc_feature (542)..(542): n is a, c, g, or t
  misc_feature (579)..(579): n is a, c, g, or t
  misc_feature (770)..(770): n is a, c, g, or t
  misc_feature (782)..(782): n is a, c, g, or t
  misc_feature (793)..(793): n is a, c, g, or t
  misc_feature (865)..(867): n is a, c, g, or t
  misc_feature (910)..(910): n is a, c, g, or t
  misc_feature (960)..(960): n is a, c, g, or t
  misc_feature (1184)..(1184): n is a, c, g, or t
  misc_feature (1211)..(1211): n is a, c, g, or t
  misc_feature (1218)..(1218): n is a, c, g, or t
  misc_feature (1391)..(1391): n is a, c, g, or t
  Peptide Sequence Number=SeqID_8698
  Probeset Number=SeqID_15751
ggttgtgttttttgtgcccgccgncnnnnttnnnttnnnnnnnnnnnnncnnnntcccctntntttttnntttttgtgtnnagaggggacacaaaaaaagatgacagcgcagtgggcgccgcacgacgagagtgtactattgtctgccgtggggtcgtcccccccncaccacccaataatatataagggaacgcactacctccttgtgaattcccttacttatgtggtttgagcgcgacaggtantagagaggactctcatcgagacactctatgtcgaaagcgaggatctctatctcaaatacattagatccctcnccacgtactcccactataaacaactcantntntatacgcanatcctcngncaagaccgcgacaccgtacgcgtgagttcctcgagagtaatcgtgccgacgaatatatataaaacgccccggagcgcgtgaatggctctcggtattgaactggagctgtaggcgttaatcatgatgtcggactacaattagaactaatagacgcatatcagtatggagacactcnatatagagagcgccatagactacagagatataagganagacagacgcctgagcctgagagtgaggtatgttgatttgggtatgtaaagcacgactctcgtgatgtgccagtctcaaaataaccacgtcatagaacgcagactagaaggagtgttagggcgtcgtgtgaagttaagcccagtcgggagcacatccgtctctgatgcacgtcggtgggggtgtggtggtncgtgtggtttanacacatataangaacaactatgaacaagactattcactcgagttatatgagtgatgtttttacgaaacatcacatgaatggannnaacaacctccgcaacgactcgctgtagtagggtggtgtaaagnccgcgcccgctccatgcaccgataccaatcatgtgcgctctcaagcgccnctcccaccagagtttggagtagatgtggccgcacatctccacgggcgtgttaagagtgtgctgtcaatttctgtgtcgatgtaatgtggttcgctctcacactgctgcgcgccgcttaattgggtggtatgagtatcatgaacgtgttcagagtccggtgttggacgtgggtgcgagaggagagatctgctcactggcccaagcggaccattacaggataccgngtatctgggctcgcggccatctgcggngcatccncgccccgctttcctactactgcatcacggatgacgtggctagtatgtacatgctacactgcacgacttacctgcacccggcgcgacctcggtggacggggggagaaggacgactgccatctcccatgttcccgacctacagattctacagaatatgtaccatagatcactgcngctagtcgactctgctcacaatatctactttgcttatggtagtgttacacgtcaccactatcactcgtatcacgc

SEQ ID NO: 5973 - DNA, 347 bp, Glycine max
  misc_feature (122)..(122): n is a, c, g, or t
  misc_feature (183)..(183): n is a, c, g, or t
  misc_feature (337)..(337): n is a, c, g, or t
  Probeset Number=SeqID_15752
ataatttcgtacgcttccctcttttggcatttaaaattttcattacttcgtctctctaggaatggccggccgtggaaaaactatcggatctggagtcgccaagaaggcgacgtcgaggagcngcaaagccggtctccagttccccgttggtcgtatcgcaagatttctcaagaacggcaaatncgccgagcgtgttggtgccggagctccggtttacttagccgccgttctcgaatacctcgccgcagaggttcttgaactggctggaaacgcagcgagggacaacaagaagacaagaatcgtgccgcgtcacattcaattggcggtgaggaatgangaggagctga

SEQ ID NO: 5974 - DNA, 1450 bp, Glycine max
  misc_feature (176)..(176): n is a, c, g, or t
  misc_feature (221)..(221): n is a, c, g, or t
  misc_feature (246)..(246): n is a, c, g, or t
  misc_feature (1406)..(1406): n is a, c, g, or t
  misc_feature (1429)..(1429): n is a, c, g, or t
  Peptide Sequence Number=SeqID_8699
  Probeset Number=SeqID_15753
aagatgtgacacacatcaatatctgtgttcctcgctatatgtgatcagtagcgcatagtataatatagttcgacgctacagagcgtctaacagagtctcgctgtaaaaggcacggtgtgagacacaacagcgagataggtttactgtctgtgtgagtagtgtacaatgatacatanctagtggtctgtgagcagtgctagataggaatgtcatatcgtagngatgcgacatagatgagatgcagangcacgagcacgtcaatccatgctataccacgattagagtgtcatcgagccctctcgcacagatacatgaacgtgcattcttgctactctctctctggatgcagtactatgcaatcacaatgtacaggcagatgcagtatgtgatcaccaaaactataatcttgtctctatgcatgatctagagtcgaggtcgtacactagcaagcctattatgctgaatctagaagcggggtaacatatctgcgggacaccacagaggggtgggtgacgtagacagaaccggatcagttaactatgatattactcgtgcggtccacgcttggatgtcatcagaggcagaactagaggtgaagaatgtctattgagctcgttcgtgatacgacacgtcgatagcgggcgatgagcagcgcgtctcgtacaaggtcatatagaggcgcgtgtaccatctccttataatgctgttgtaaacaacatgtcaagagtgagtataactatccatatccacgacagtagtagaaataatagaattaggaacgcggagagtagggagtgaagggagtaattggagaaataattcactagtaccgatgaggagcggagagatgttaatagttagtatagttacgccgaagaaataagtacacatacttccgttggagtggtgtcgtagttgttctttagaggagtgcgtgatgggtgaggggagagcatatcaagatcaacacgcgtattatattaatacctacggtctctgctatgtatgagggggcagagtcagaatcacagcgacgataagagaacgatgaaggacggtcgagattgagagtcgggcgttatcgagaaagactgcactgggcgcagactccgcgacgcagcgaaactggtaaccactcgaactacacacaagagtcaatgccaaccgggcggtggatgagccgagtccaccgaaactacagagaactgaggagagaatagggggagggagcacagcgcagcgtaagataactatcgtttaatgtaagtatagaacttgctacagaggacaattacatacaaacccatccctataaaagagaatacaacatatcatcccacatccacacgccgcggccacacgaggggggagccctccgcagcccgccatagaggcaagagtgtgtnttataaatgacgttgggccgcgnggaaggagtgttcatgggaac

SEQ ID NO: 5975 - DNA, 479 bp, Glycine max
  Probeset Number=SeqID_15754
ttttgtttgtggatgcacatatgccgttcagagggagctctctctctttcccatctccaattcctccttgtgcaacaccccccaactgccacaaatctcacaaaaatgagtctccgtcatgcagttcttcgatttgattttgttattgttttttgtatccaattcggttcaatgtttatgtgcgttcacatttgatttttttggcaggagagaaccgcagaaaggaatggctccgcccttgggttcacaatctctccagtgggtctccgtcgagcaatatgcagctttatatagtacattccttcccagcttccctcgacaagcaggccggggcggcacgccacggataggctgacggcggcatctcgcaagtcagggccgacctcacaccccgcgtcccctggctgccttgcctgctgtccatctaccacagcggtggagtccgcaaacctcggccatgtagtttggagcgagtgtgc

SEQ ID NO: 5976 - DNA, 2489 bp, Glycine max
  Peptide Sequence Number=SeqID_8700
  Probeset Number=SeqID_15755
aataaaatatactacatgaaaaataaaattatatatacatcatttataataaaatatagaaaatataatagctatataaaatacagttaattacagggataaacaaaaatagatacattcaaattaatttcttcaataaaatagctatttatcataataaaataaaaataggatagacaaaaataagttttttttttgagtaaaataaattatcgtaaaacaaacaatacctattataataataaaattattataacatacatagacgaaataaaaatattataacggacaacaaataataattacactagactaaaaatatgtaaagtagattttatttagttaagtgattactatgggggttacaacaaaaataattataataatggatataatacatttctattgmttatagatagaaatataatttattaaaaattggatttctatatcctaatactacagagtaaaaaaaaaattaattttaatagttcaaatttttgtcagatcgtttgatatttagttaatttaggtaaaaaattgaccttacaagagttaaccattacttaatttttaggtaaactaagtgaatataaaaagttaaaatcttcttataaatattaataagaattatcaatgtaaagagctctaataaaaatattatagaatgtcagaattattaaatatagtaaaccaagtagagggtattttacccaaattgcagattttataagtcaatttaatagtacaatattagaaaataatattaatataattactgatacagcttctaatatgttcatggatattcttaataatgttcctgaagcaaaagcggaacattaaaaaaaagttagaagtgttagatcgtttgattaatacaagaacatatgaaatagaagaactttttaaaaaaggatctaatttataatcaacattaaaaaaaaggtaatcctgaatttaaatgtataattttagataaattaagtggatataagaagttaaaatcttcttataaacactaataagaattattaatttaagtggtaaagagctcttttttaagattatattgaatgagatttaatataactttaatttctattttagaaaatgttattcttatattacctgcattattaggtgttgcatttgtaacagtagccgaaagaaaaactatggcaagtatgcaaagaagattaggtccaaatgctgtaggttattatggattattacaagcttttgctgatgctcttaaattaatattaaaagaatatgtagctcctactcaggctaatttaatattattttttttaggtcctataattacattaatgtttgctttattaggttttgcagttattccttatggacctggattatctataagtgatatggaattaggtatattctttatgttagctgtgtcttctttagctacttatggtatattattagcaggatgaagtgctaatagtaaatatgctttcttaggttctttaagaagtactgcacaacttataagctatgaattagtattaagttctgttttattaattgtaataatgataactaacagtttaaatttaaatataaatgtacaatttcaaaaaataacatgattagctttacctttattatgtatattaataatattttttataggttctgtagcagaaactaatagagctccctttgatttagctgaagctgaatctgaattagttagtggatttatgactgagcatgctgctgttatttttgtattctttttcttagctgagtattctagtatcgtaataatgtgtatatttacaagtattttattctttggaggatatttagtagattttgatctaatattattatttgataaaatcaattatatttatgcttatatttttgatattgactgaataacatccttagattattttaatattcgtaatatattaattaatccttctatagatggtcttttttctggtataagtctaggtattaaaagtggaataatggtttttgtatttatatgagttagagcttcattccctagaatacgttttgatcaattaatgtctttctgttgaactgtattattacctatactatttggatttatattcttagtaccatgtatattatacgcatttggagtattcttcataaatattagtttattttaattaaattcttattatagaatataatagacttaattattaaaaatttttatttatattaaacaaatattaaattttttaccagttacggttaaacgtattcattaaattttataaacagaataaatatgcctcaattagttccattttattatatgaatgaaattgtttttgctttttcattaatagtatttatactatatatattatctaaatatatcttacctagaatagttcgtttattcgtatctcgtatgtttatagataaaatataatagttaatttatattatagatttattttagc

SEQ ID NO: 5977 - DNA, 1577 bp, Glycine max
  misc_feature (1)..(1): n is a, c, g, or t
  misc_feature (74)..(74): n is a, c, g, or t
  misc_feature (78)..(78): n is a, c, g, or t
  misc_feature (183)..(184): n is a, c, g, or t
  misc_feature (215)..(215): n is a, c, g, or t
  misc_feature (254)..(254): n is a, c, g, or t
  misc_feature (262)..(263): n is a, c, g, or t
  misc_feature (309)..(311): n is a, c, g, or t
  misc_feature (314)..(314): n is a, c, g, or t
  misc_feature (322)..(322): n is a, c, g, or t
  misc_feature (328)..(328): n is a, c, g, or t
  misc_feature (343)..(343): n is a, c, g, or t
  misc_feature (358)..(358): n is a, c, g, or t
  misc_feature (378)..(378): n is a, c, g, or t
  misc_feature (380)..(380): n is a, c, g, or t
  misc_feature (383)..(383): n is a, c, g, or t
  misc_feature (418)..(418): n is a, c, g, or t
  misc_feature (422)..(424): n is a, c, g, or t
  misc_feature (427)..(428): n is a, c, g, or t
  misc_feature (519)..(519): n is a, c, g, or t
  misc_feature (545)..(545): n is a, c, g, or t
  misc_feature (571)..(571): n is a, c, g, or t
  misc_feature (579)..(579): n is a, c, g, or t
  misc_feature (582)..(583): n is a, c, g, or t
  misc_feature (591)..(591): n is a, c, g, or t
  misc_feature (631)..(631): n is a, c, g, or t
  misc_feature (635)..(635): n is a, c, g, or t
  misc_feature (646)..(646): n is a, c, g, or t
  misc_feature (654)..(654): n is a, c, g, or t
  misc_feature (658)..(658): n is a, c, g, or t
  misc_feature (720)..(720): n is a, c, g, or t
  misc_feature (941)..(941): n is a, c, g, or t
  misc_feature (999)..(999): n is a, c, g, or t
  misc_feature (1241)..(1241): n is a, c, g, or t
  misc_feature (1310)..(1310): n is a, c, g, or t
  misc_feature (1458)..(1458): n is a, c, g, or t
  Peptide Sequence Number=SeqID_8701
  Probeset Number=SeqID_15756
ntactatgatgtcaagacgcgcagtgatgctgcgtgtgatcgcatagcggcgcgttatcaagtaattataagtnaatntaacgtgctgcgtaaatccactacggtcgagtgcgcagagtatgagtatatgtacagtgatcatatattagcgactgactcgcgtcgcaggcggcgagacacagnntcacgcatcacatttcggtcggcgtgtgtgngatttttcatgtgcggacgcgtgtgggcccgctgcgcangacataanncatactccgtagcggtcgcagacgagcgatacagctatcgtagacnnnatntattagtnattganatgtgaaaacggganaataagtctgcgcgnctctccgtggcggcggagtncnatnatatagatcttacggaggcggcacacagtggaganatgnnnganntcacgccggtggcgcgcgacatcgcagcactacttatcctcggcagcccgcatttcagctcgggtgtgttgtagtttcgatagtacgtagnctatagagccacaacagcagagttcnatatattagaatttagggcggggganccaagcgnggnntaatagtnagacgtcaagcgcttactaatactagtttgtggtaggttntttngatggcgccgngcgcgtgngcgngtcgaagtcgtgacgctaccggcccacaacgcaatattacatcagcttattcatcgcttcgntaaggatgcttatgcgcacgagcggcggccaggcgatacagagattcgcatagtcgatgagccgaacctgcgattcgaggcgcccgcgagtagcgcgcgcgtgcggagttgtagcatatcgcgtgacgtatacatacgcgcgagatacatatcgcagtacgtagctctgcgcgtatgaccgcggcgcgagtcgcgcgaaacaaaccgacgtacaactccgnggcgctccgtgggtgccggccgtcggacgtcggagcagcacgaaccacacgagacacngttctaagatatataggtcgtgctgccgacgtgtgtcactatcacacccagtattgcatttcgcgcgcgctttaattatcatacctgtcgtatgacaacgggcgagggtccatccttctcgcgtcgtatacgtacttcagctactaggtcaattgagatagaatgtaaagcggtcagtcaaagagtataatctacatcggtctacgctcgagaattggtgaatcttcacaaagacgaagagnatagacgatcgtcaccgtatgttcgtgataaggtcactgcatacgacgcgcgcttattaatcgatttcngatcatatgctatacgatacatattctaaagggcgcagtatgacatagatacgagatgaggtaggaattaacacaaatctctctacgctttgcttgaggctgggaaatgggatgagtgtacaggacagggacaacggcagaatatagntaaaataggccaccctccgccccgccacgccgcgccaggatatctgtgcgacgcgcggaagcatacacgtctacattgctcagtgcgtgcgagaaatatattggaggggacactcacca

SEQ ID NO: 5978 - DNA, 546 bp, Glycine max
  misc_feature (46)..(46): n is a, c, g, or t
  misc_feature (49)..(49): n is a, c, g, or t
  misc_feature (127)..(127): n is a, c, g, or t
  misc_feature (155)..(155): n is a, c, g, or t
  misc_feature (412)..(413): n is a, c, g, or t
  misc_feature (424)..(424): n is a, c, g, or t
  Probeset Number=SeqID_15757
aaaaaaaaatctcctttggaaacttcctccccctcccccttttggnaanggggtttttggggaatctacaaacgctagcttaaaaggggggttgtgaaaatttttttttcgggcccgcccgcggggncccattgttgtccccccctttgggaggnaaagccctttgacccaataattccgggggccccaatctggggacctccatttttttttttggggtttcaaaaactcgggtaggaaggccgaaaggaaagggccaggaagaatttcgccggcccccagggcctggtaaagtttttggcgaccggaaacccttgggtccgttgaacattagttttttcgagattcctgggaaagaaatatccggggatttgttatgggaattgaaaggggctacaagctgctcccaccnntgtgtaaaagnctaccctttgttgtctccttttctcttcccatctctctctttctcaacgcaaaccctacttagcctcccaaacccaacaaaaactcttcccttcggcctcgtatggaatgctgcgaaaaaac

SEQ ID NO: 5979 - DNA, 878 bp, Glycine max
  misc_feature (878)..(878): n is a, c, g, or t
  Peptide Sequence Number=SeqID_8702
  Probeset Number=SeqID_15758
aattatttctcaaaaacaacaacaatcaccatctctctctactacaacctatttcttctaatatgaagtttattactttcctgttcgctcttctcctcctgagcttcgtcttcagtcagcagactgacactcagactgacgacctcacagtgcgcactgcagatgacaatgacctatctgatactgaaccaactcgtgtaaaaggcttcctccctgacctcacagatcaatctgatgacaacaccaatgatcaagatgactctgacactgagcaaaccggtactagacgtgctcttgctgatctaactgaccagtccgatgacaacaccgagaccaataccgagaccaacaccaatggtaacaccagtgatcaagatgactccgacactgagcaaaccggtactggacgtgctcttgctgatctaactgaccagtcagatgacaatactgagaccaacactaacgacaacaccaatgatcaagatgactccgacactgagcaaaccggtaccctacgtgctcttgctgacctaactgaccagtccgacgataacmccgagaccaacactaatgacaacaccaatgatcaagatcaatctgactcagataactaagctgagaaagatatactgctactgacacaattatataagcccaagggctttaactaaattcaaaaaaaaagtattaataatcatattcatttacttgcaaggtytaagtttattttaggtaaaactatgtttaatatttgttttaagtcagtagtaagtattacatattatattatctgtttattgtctttatacttgaaaatattataagatatcttacgtattacattacaggtataaatatcatatactcaataaaatctn

SEQ ID NO: 5980 - DNA, 2071 bp, Glycine max
  misc_feature (114)..(114): n is a, c, g, or t
  misc_feature (204)..(204): n is a, c, g, or t
  misc_feature (340)..(340): n is a, c, g, or t
  misc_feature (492)..(492): n is a, c, g, or t
  misc_feature (502)..(502): n is a, c, g, or t
  misc_feature (626)..(626): n is a, c, g, or t
  misc_feature (733)..(733): n is a, c, g, or t
  misc_feature (742)..(742): n is a, c, g, or t
  misc_feature (869)..(869): n is a, c, g, or t
  misc_feature (900)..(900): n is a, c, g, or t
  misc_feature (919)..(919): n is a, c, g, or t
  misc_feature (1100)..(1100): n is a, c, g, or t
  misc_feature (1321)..(1321): n is a, c, g, or t
  misc_feature (1396)..(1396): n is a, c, g, or t
  misc_feature (1429)..(1429): n is a, c, g, or t
  misc_feature (1478)..(1478): n is a, c, g, or t
  misc_feature (1531)..(1531): n is a, c, g, or t
  misc_feature (1570)..(1570): n is a, c, g, or t
  misc_feature (1576)..(1576): n is a, c, g, or t
  misc_feature (1620)..(1620): n is a, c, g, or t
  misc_feature (1745)..(1745): n is a, c, g, or t
  misc_feature (1756)..(1756): n is a, c, g, or t
  misc_feature (1775)..(1775): n is a, c, g, or t
  misc_feature (1884)..(1884): n is a, c, g, or t
  misc_feature (1932)..(1932): n is a, c, g, or t
  misc_feature (1956)..(1956): n is a, c, g, or t
  misc_feature (1967)..(1967): n is a, c, g, or t
  misc_feature (1987)..(1987): n is a, c, g, or t
  misc_feature (1989)..(1989): n is a, c, g, or t
  misc_feature (2010)..(2010): n is a, c, g, or t
  misc_feature (2028)..(2028): n is a, c, g, or t
  misc_feature (2051)..(2051): n is a, c, g, or t
  misc_feature (2071)..(2071): n is a, c, g, or t
  Probeset Number=SeqID_15759
tgccgtcgcctcccccacctccctcctctgccggcgcgcggcgtcacactcatatcaataactcaacttataataacgcgttataatatgtaccgcgcttcttcgccgctcaanaagggggggagagtgtatatcagctccaagcccttctatttctattattaaagatgtcactaagagagatgtagaatgagagacactctntctctggggaagaacctgtgtctccatcgctcgcgcagatccggtctcatagacatagtcgggaagtctttatatcagatgtgcgtatctatctgcgtctgaagcgcacgtagcgctggacgtgcgagggccctcncgtctttcttaagacagacgatgcgttgtgagcggggcgtcacgtacgctcacttgtagatcgctacccagcgagccagagtatcagagcgcagactagcgaggtatacgacctattcgtgttacgccggtttaagctggtgctttcttggnacacactgcncctccggcgctccgcagcgagtacatgcacgctacatgctcagcctgccttgcgtgatgtcgtgtgtcgcaggacatgcgtgtctgcgtcatcggtgctattatataatctcggtgttacaagntcatgtatatccgcgatatcactggatacgcgctcgcagatacccactctgctgcgagcatccggagccaacgatgcggacaacacagaggtgcacgtcagtctccncagtataangcgcatctgctgtaatatggtagagcatcattggccgtattcctatctatgtgtagacgagtgcgataactgctgtgctaggcagcactctcgtgagacgcctataccactctcgtcacagcaggcnactagttacgtatagcgtaagcgtcacaccncgcacaacgtcagtggatnggtcgtctattaatatctatatacacggtacagattcactattccgtaaatcacagtactagcctgttggtcgtaatgttcggatgtatccacgacctctcacgcgcctgtatctcgtacagtatggtgtcaccgcagatctactgacactgatgagatatatcgcgacgctctgacgtanttctgatagactagagatgcggctagatacggtgactctgagaagtgctacggacctggcgatctactcatcgtcgtctagtgtctgcactctctcgactgcttacaatctcctacgactgactagatatgcgtcttctcatatacgcgaacacgacgctatctcagcgtccgtgtgtcagaaccgatacgcactgcatgtgctcgtgtatgcgacagcgngagcgtatgcgacactgcaatgctgagacacgtcgcgatactcgctcttgatgatactcacattcatgatgatcnacagaatccatatatgacttaaacacttcgcancgcgatactgtctacctatacctctgcatgtctgatatatcgagcactnatctactatcgatctctcactcatcgacggtgaatcatacgactgcatcgctntgatggtcgatctacatgatctgatatatcatctctatnctgtcncagcgtagctctccactactcgtgcggcaggacgctgacgtcgngagatcagtgtgctatagtcgatgtgaaccgctgccatacgcgacgcgcgcaagcacatatagtgtcgcgactctaactggttccctcagctcggcctacgttgtcatgacattcgctgcagctngacactcgtcngctcatcactgactcatanctactcgccctagttgctcgccatgactcatcatcatgtgtgcacatagagtgtgtagtcagagtatggactatgatgcagatcgcactagatgacagctgcactggtncgtctctcttacatccggagaactcgagtaaccgacagtcgttgcatngagctgcgtatcgtgctgtagatntgactgcgtgnacagacgatgcgaaagtgcngnacgtatggatcgactgtggtncgtcagtcagtatatggncgcggcgtacatgtgcatgattncacgatgctgctcaccagtn

SEQ ID NO: 5981 - DNA, 485 bp, Glycine max
  misc_feature (474)..(474): n is a, c, g, or t
  Peptide Sequence Number=SeqID_8703
  Probeset Number=SeqID_15760
aaccttaacaacgaaaataaacacatggccggaaaattaatgacattacaggtttctcatctgctatgcatatctttagtcatcttctttgtattctctgtgaatgttgtcagtgaggaggattaccagagagtggtgcctccggaagataaaacgactacggtttggttctctacgatcaaacaatctggtaatgattactgggcgaaactcaaagagagtttaggtcgtggtcacgcccgcttttttcctccgaacatagattttagaggaaaggatgatgcatcaatgggagcaggaggaaagatgaaagaggcggtcacaaggagcttcgagcacagtaaagatacggtggaggaagctgccaggtcagcagcggaggtggcgtgtgatgcgacggaagcagttaaagaaaaggtgaagaggagcttttccggcagcgagacgactcagcagcagtcggatgagctctanatacgtcgtct

SEQ ID NO: 5982 - DNA, 859 bp, Glycine max
  misc_feature (1)..(42): n is a, c, g, or t
  misc_feature (643)..(859): n is a, c, g, or t
  Peptide Sequence Number=SeqID_8704
  Probeset Number=SeqID_15761
nnnnnnnnnnnnnnnnnnnnnnnnnnnnnnnnnnnnnnnnnntttttttttgtaatccccaagacagtaaccatttaattttgtcacccgctgatccacaaaagactaattcggcagccaggtacaaaagtgagttccagatctaccacaacgacctaccaacaagaggaaaagataagggagttgccctttaacacacacaagtccctaaacggaattgctttgacggaactcagagctgaaaacggtgctccctcaacctagccggagccgacgatcacttcggtgaccactagcctggagggtgagccgatcaacccgaggagccgactgatgatgatgttgataggggatgaagatgagcttttggtgaactccttgcaggaaggcttgaggcagagcttgacgaggtggacgctgcgcttggcgaacttgggtgaagctcctaccgcggccggcttgtggcaccgcttgacgagccgggatgctgtcgttggccgaactcccggagcgggtcgaactaccgagtgtaactgcgtccgatggcggcgcggggagggagagatctcgaggggtgctattcgcttgcttggactggagacgaagaggacgacgctgtggtggctttgcgcgtgctttgccnnnnnnnnnnnnnnnnnnnnnnnnnnnnnnnnnnnnnnnnnnnnnnnnnnnnnnnnnnnnnnnnnnnnnnnnnnnnnnnnnnnnnnnnnnnnnnnnnnnnnnnnnnnnnnnnnnnnnnnnnnnnnnnnnnnnnnnnnnnnnnnnnnnnnnnnnnnnnnnnnnnnnnnnnnnnnnnnnnnnnnnnnnnnnnnnnnnnnnnnnnnnnnnnnnnnnnnnn

SEQ ID NO: 5983 - DNA, 474 bp, Glycine max
  misc_feature (12)..(13): n is a, c, g, or t
  misc_feature (17)..(17): n is a, c, g, or t
  misc_feature (41)..(42): n is a, c, g, or t
  misc_feature (286)..(286): n is a, c, g, or t
  Probeset Number=SeqID_15762
aggttcgcgtgnngggnggtgtaagttggcggcggggggtnntatgccttttttacccaaaagttttttttttttttttaaaattaacagcttaaaaaatttggggtaagatccggggggccccattttggatccaaaaaaccccccggggggtttcccaatttagaggggccaacctcagggcctgagcggttaacctggcgtggaagatacggccctggttttcattccaggtttagacaagtgtaggcgatcgaccagagatccactcagcataaacaaacancgtacggagctgttgtcgacgatccattcctgattctgcaactttgtctttgattcgccattgatgacaacccaaaaaaaattattcgaagaaaaataaaaaacgattgtaagagaaacaatgtgcgtgcggcggtgttttaaagcaaacaccaaggcggaaaattctgagaaagagaaacccaattt

SEQ ID NO: 5984 - DNA, 1561 bp, Glycine max
  misc_feature (195)..(195): n is a, c, g, or t
  misc_feature (240)..(242): n is a, c, g, or t
  misc_feature (244)..(244): n is a, c, g, or t
  misc_feature (258)..(259): n is a, c, g, or t
  misc_feature (557)..(557): n is a, c, g, or t
  misc_feature (715)..(715): n is a, c, g, or t
  misc_feature (718)..(718): n is a, c, g, or t
  misc_feature (747)..(747): n is a, c, g, or t
  misc_feature (790)..(790): n is a, c, g, or t
  misc_feature (898)..(898): n is a, c, g, or t
  misc_feature (948)..(948): n is a, c, g, or t
  misc_feature (951)..(951): n is a, c, g, or t
  misc_feature (1143)..(1143): n is a, c, g, or t
  misc_feature (1150)..(1150): n is a, c, g, or t
  misc_feature (1170)..(1170): n is a, c, g, or t
  misc_feature (1453)..(1453): n is a, c, g, or t
  misc_feature (1530)..(1530): n is a, c, g, or t
  misc_feature (1561)..(1561): n is a, c, g, or t
  Peptide Sequence Number=SeqID_8705
  Probeset Number=SeqID_15763
ttttgttgctttttgtttcttttctatcttctattggtgcgacgggcaggcggtcgtgtggataaggatcgaagtataataagcatatacacaacataaacatcctcgtcttttctcctccttcgaccttgtcggtttgctaagttttttctttggttgtctcttactgggctgtccttcctttgagtgcaattnagagtgttgttatggttgtgttatctctctttggaccactctatnnncntgttataatctaanngaagaggagagacaggaggaagaggagccacgggagcacggcaaggggggcgcaggaaaagagaggcgagtgagcagagtgaaagaaacacaacacaaacgggggtgagggcgccacacggcagaccggaagaagaataaacacaacaacaacaatataccataacacgatatccccccacattactaccactctgcctctttcattcttacattactttctcatttatcctctggtctgtatataataaattgagtatatcaccctatctttcatagctacaatataaatgtatagnaggatatgagttaggtatagtatatcttatatattatatctatacacaccgcccaaccatgcgaattacgcagatatatagaatgagaatgttatttttgcccccgtcaccaccaaccactatcattatctctgggcggtgggatgagttgagataanacnaaacatgttatatataggtattataatgnattaaataactgtactctatcgtgcggctactcacgtgaatcnatctgatcatctcactgctctcttgtctcgctctcttctgtcgtcgcgacgcgagctgctcgctcgctgtcgtgtatatctatgcctctctcgactcacctcttgtantctcacgactcgttgtcttcgctttggtgtttgcattacacactatacgngtntctgtcggatgtagcccccccccgtctcgcaatcaagaacggagcagtaatgaagaggtgcgtcgagtatgtgatagaaataacaagatacacatgagaacacgaatataggatgttaactatatataatgtaaatactctacctttgtgttctataagacgtctgacctgcgtatattagttcatacatcnttgtttnatcttctcgtttttgtcatntgccatagggtgatcgcgtagatgtgttgtaaaatataggccgtttggttatgtgtgagagtacgtcatccggaccagtgccgagatgatattgtgatatgtggcaccacgcttccctcccgctcatctttctgatgactgtcatacacgaaagtcgtgcttgtataatcgagctaataagatagatagtcatttagtaaagacgaaaaagaccgcacaacgctgaatacaccaacaatcacatacatcatacgtcgacgacagatgttacaatgactcacanatccacacacgctccgtagctcgctgcggtgccgttgatgcttatatagataagagtacatatgttcacacagctantcacatctagtgtcgcctgtgtcgagatagn

SEQ ID NO: 5985 - DNA, 1396 bp, Glycine max
  misc_feature (21)..(23): n is a, c, g, or t
  misc_feature (28)..(29): n is a, c, g, or t
  misc_feature (34)..(34): n is a, c, g, or t
  misc_feature (40)..(40): n is a, c, g, or t
  misc_feature (50)..(50): n is a, c, g, or t
  misc_feature (79)..(79): n is a, c, g, or t
  misc_feature (180)..(180): n is a, c, g, or t
  misc_feature (446)..(446): n is a, c, g, or t
  misc_feature (451)..(451): n is a, c, g, or t
  misc_feature (516)..(516): n is a, c, g, or t
  misc_feature (570)..(570): n is a, c, g, or t
  misc_feature (757)..(757): n is a, c, g, or t
  misc_feature (796)..(796): n is a, c, g, or t
  misc_feature (809)..(809): n is a, c, g, or t
  misc_feature (833)..(833): n is a, c, g, or t
  misc_feature (883)..(883): n is a, c, g, or t
  misc_feature (965)..(965): n is a, c, g, or t
  misc_feature (1071)..(1071): n is a, c, g, or t
  misc_feature (1092)..(1092): n is a, c, g, or t
  misc_feature (1147)..(1147): n is a, c, g, or t
  misc_feature (1166)..(1166): n is a, c, g, or t
  misc_feature (1217)..(1217): n is a, c, g, or t
  misc_feature (1314)..(1314): n is a, c, g, or t
  misc_feature (1373)..(1373): n is a, c, g, or t
  misc_feature (1390)..(1390): n is a, c, g, or t
  misc_feature (1396)..(1396): n is a, c, g, or t
  Probeset Number=SeqID_15764
gtttttctctccgtctccttnnnttttnnttttntttttntcttttctcnttgcttttttactgcttatctctctctcnccttgtcttgtaatcttttgctgtctgtgggtgctcccgagttgttttgtcttttgttgttccctcgtttttttctttggttctggtatttcctcctatcntaccttctctcctagttctgcttagtgtggcgtggtgccgcgcgtcgtcgcccgccgccgctgtttctttcttctctctcgcgtttgttggcgtggtttgtttagtcgtcccgcttcacgcgcggcggtccgcgcctgggctcggcggcgcgctgcgcctcgtccgctccggcgctccccctcctctgtcgcgcagccgccgctcttcgctgccccctcttctgcccttcctgctttttcttcctctctcctcttctctgcttccngcttntggtcgtgttctgtgttgcgcggtagccgcgctctcggccggctttgtggtgtggcgggatgtgngcgggcggcgtctccggtggtggtggcgccgtgtgtgtgttggttgttgtgtgnttgtgtctctgctggtgtcgcccttctgtgtgttcgttcctccctgtaggtgccggcctcgtcgctgagtgatgtttgtatgcttttctagtgtgcgcgtgatgctggctatgtctgggtggtgttgtgccgcgtcttgctcgctccgctgccgtgtctcttgtgtctgcgccgcctcgcgcgctcntgccctgcttctctctacgcttccctctccctctacgtntcgctgtgcgggncgctgcgcgctgctccgctgtgcnctgttcttgcgctagctttctgtatgctgtggactatgccgtgtggcccngtgtctgctctgccgttatgtgtgctgtttgctcgtttgtctgtttgtctcctcgttccactctcagctatgtctattgttntggtgtgttgggatgcgctcggcgctggcgcagcctctctctcgtgaggcggtcgcgtgcgggtgttgtcgtgtccgcttccgtgctcgcttgcgtcgcgcttcgntctgcgtcctgcactcgtctngtgtgtggtgtggtgctgtcgccggcgctcgcccgcgttgcgtggctgcgatcantgtgtctatgattattggngtgcggtgtgcgtgactctgtgccctcgcggttgatcggatgctgtgttcnctcttgtacggcgtgctgtgctgtcgcgtcgtgtctgcttacggtggtgcgctgccgcctcttatcttacgagtgcgactgggtggattggtcgtcngctcgatgcgttcttgaggtatcttgtgcgtgtgttgcggcgacgactatcactgtccnctcctctcagcgactcncgctgn

SEQ ID NO: 5986 - DNA, 453 bp, Glycine max
  Peptide Sequence Number=SeqID_8706
  Probeset Number=SeqID_15765
cccttagatgtgtagctccatgctcttgtagccgagccgtagccagtagcagctcaaccatgtccgcatcatcttcctccgtaggtcaggatgagatcttacccctggttccttgcatagagtgcagcggccgggtgtactcttggattgctcgtcatggagtgaacgcgggtcgtcgcttctacaagtgtgtcaacaaggaaaggtgtggattcatgagatcttccgaagagtatcgtgcgcagctgataggtagccagctgctggcagatcggctagttgtccctgcgcattcacagccggcagcttacttgcaccgtcgagttattcctggcgaacaagtcgagcaatggaggcgcggaggggaggtggcggcagatgcacgagtggagcagcagccatggaaaggaaaggctctggcgtcccagcccaggcaggtccactttcggaagt

SEQ ID NO: 5987 - DNA, 1429 bp, Glycine max
  Probeset Number=SeqID_15766
aacacataaacaacaaatatacacaacatggtgaaacaagttgataaagccgatcaattctggcaagaattggctaatgcaggcgataagccagtagtagtagactttttcgccacttggtgtggaccatgcaaagaatgcgcaccaatttttgaaagtttatcaaacaaatacaaaaatgctgtattcttaaaagtcgatgtcgataagaatacacaaattgcacaatccgaagctgttagtgcaatgccaacattcaaagtctatgtgaagaaaacaaaagttggtgaagtggtaggtgcagacatgcgcaaattagaatccttgatcacacaacacatgagtcaaacaaaaccagcagaaccaattcccacattagaaacagcagagcaatacaaggaagaaggaaacaagaaatacaaagaacgtgattttcaaggcgcacacgcattatacacacgcgctattgaaaagaatccaaacgaaccctcgttgtacaccaatagagcagcaacaaatcttcaattaaaacaatacaaagaagcagttgatgatgctgtacgtgcaactgatattgatccaaaattctcaaaaggttattatcgtgcaggacaagcctatcttcaattaggaaaaatgttggaagcaaaactctcgttacaaaaagcacaacaagcaacacctcaagataaagcaatagcacaagaacttgctaatttggatcgtatttccaactttttagaatcaggtcgtaataatttggaaaaaaaagattttgaacacgcgttgaatcaattcaatatggcactacaattagcaccacaaagtattgcgttaaaattattacgtgcagaagcattattaggattaggcaagtacactgatgctgccaaggaagcaggtttgatcctacgtgatgatgatccaaacagtagtgaagcatatttcattcgtggaagagctttatactacaatggatcagtagataatggtttaagtcacgtgaatcgtgcattaagtttggatcctgataatcaacgttgtttcacgtttagaaaacaattaaaacaaattgaacagatgaaagaggaaggaaaccaagcgtttaaaaatggaaatttcacagaagcaattgaaaaatattcacgtgcagtagcagttgatcccaacaacaaagtattgaattcaacaattaattgtaatatggcagcagcgtatgcaaaacaaaacaaacatcaagaagcagtaaaatacgcatcattagcagttgatcaaaatccagaatatgtgaaagcatatttaagacgtggtgattcttacacaatacttgaaaaacacgaagatgccatgcgtgattatcaaaaagcaaatgaacttgaaaaagggaatcaacaaacacaacaaaaactacgagaagcacaaaaaaagt

SEQ ID NO: 5988 - DNA, 1388 bp, Glycine max
  misc_feature (364)..(364): n is a, c, g, or t
  misc_feature (1310)..(1310): n is a, c, g, or t
  misc_feature (1314)..(1314): n is a, c, g, or t
  misc_feature (1324)..(1324): n is a, c, g, or t
  misc_feature (1334)..(1334): n is a, c, g, or t
  misc_feature (1376)..(1377): n is a, c, g, or t
  Peptide Sequence Number=SeqID_8707
  Probeset Number=SeqID_15767
cgtcgcctgagctaacactctgacaccgaggtgagactcactacgcacatctgctccactggccgcgttatatcacatcattgcatcacgggtgtactccgcgatgcagcacaatcctggtaatgatatgcagtaagaggagtggtgaaaaatagatgtatattcctaacctcacccatcctgcctgcagacgaccgacatctacacactaagtacgcgtagatcgtgagccctgtctccatgcgcaaggacagcatcgggtcgagcgaaggccggcacatataatacacacgctcattgcatcgtgatgtgttattaatatttcataactcagagcacttcgagcaatctgacaagatcacgntagcttatacctatcatggcgtcttgattcagtagtacgtatacaacacactagccacgcagaatctcgcgcctcaccgatacgatggcgtcgtgatcgacatagacgttcgtgctccaatacatccacacatgaacgtgatcaaccatgactcacgaacaaatagcgtacgtttgtatactgatcaaatgaaatatacactcgtcaatcgttctcacttcttgttgtttgtatgtaaatttagtgctcactcaatcctcaccgtggtggcacgaatacctgtgtgcgagagttgacagcgtccgtcattcattctcccctctatcatcggtcccgctggccgtccgccatctaatacaaatttacttatatagaacatatgtcatatagaactgacatgagccgcctacgtagcaccactcactgctagaacacacattacgctagaataagccgcccactcatccctccttacgcccatcacccacaccgctccacacacgtcttccctacccatatcccctttcataagcagacgtcacatatatttatgtcattttaaatgatgcatgtatcatattttttcgctgtttcgttataaaaggtactgattaagagttcaacgcacaactgatcacggtctcagcgcgacagaccacacaaatcgaagcccaccaacccgagcacgcgccgataagatggtagtatatccgtcacaaatactacgcgatctcctcccactccgaaacttccttactacgcgctctcacgccgttgttcctcgttccgcgtcctctctctctcttcttctctattccgacttatctattacctccgtgtataaaaacgcttccagtaataacgtcttagacacacaacaccacaccccaccctctctctgcgccgccctctgagtactgccgcattggaacgcgaattcgacganacgngcattcgcantcgctatcgnggtgcgcggtaaaatgaacatacgaatagaaaagcggagagnngaacgaaaaaa

SEQ ID NO: 5989 - DNA, 1358 bp, Glycine max
  misc_feature (9)..(9): n is a, c, g, or t
  misc_feature (11)..(27): n is a, c, g, or t
  misc_feature (29)..(32): n is a, c, g, or t
  misc_feature (36)..(36): n is a, c, g, or t
  misc_feature (45)..(45): n is a, c, g, or t
  misc_feature (91)..(91): n is a, c, g, or t
  misc_feature (647)..(647): n is a, c, g, or t
  misc_feature (967)..(967): n is a, c, g, or t
  misc_feature (1194)..(1194): n is a, c, g, or t
  Probeset Number=SeqID_15768
ttttttttngnnnnnnnnnnnnnnnnngnnnnttgnggttagtgngtatcctcgagcccccacctgctcctcccccaccacaccgcctggncacctctatatcattcttctaacaaagaccagtcgcatcacacaggccatacacagtctcatctctctcaagaatatcatcaacatgatcccactatagcgcccacagaccaacatacctacaaaatacaaactaccaatcaactccaacccatcaacaacaacaacaataactcctaagacacatacaacacattacattcccctctccccccccacccccacccctcccttattctcccccctcaccccccctctcttcccctcgtcccctcacatattaaacatccatacaccattctctcccaaccactcactactcaccccatatcccctctccccacctcttctcccccccctccctccccccctccccaccttgcccaacagcaacaactcacacaccacccctcccaaaaactacacccccaactcccccccctaccaccacccaaccccaccaacccacacaccacgctcccccattattccaccactcccccacatcccacacctcccacacccactaccccacacccatttcccactcccatccncaccccttcttaatcttatcttctaaaacaacactcccaccccccataacaaacccacacccaatcactcccataacacactcaccacccccctacacccactcaccatctcccccaaccccaccacactacaacacaccaccctccatctccacacacacccccctactcccacaccctacacacccacacccaacccacctaccacctacatccgtattactcgctacccccctaattatcaaccacacaatatctaccaatctcaatgtccacgcacatcctcacccaacaacagatcacctccaccctcctacatnactcctcactcatccattctcgcctaccccaccccccctcaccaccatctctccacaccacccaccacctacacccacctctcccatatcatctccaacttttattacaaatacaccaatatactcactctcacactcacacccaccactacaactacccaaaccatcacatctaactcatactactcctacacacccacctactaccccctcacgcccacctctcntctccactctcttccccccaccacctcctctcatcctctcccactactcctcccacacaaccacccctcctcccaccacaacactcaccctcacgacacaccaccaactcgcacacacaccactcccctcttctctaccccatcaccaccacacacacccatcg

SEQ ID NO: 5990 - DNA, 794 bp, Glycine max
  misc_feature (794)..(794): n is a, c, g, or t
  Peptide Sequence Number=SeqID_8708
  Probeset Number=SeqID_15769
gccatttcatgggaaatctctccctcacgaccaaaggaaaaacagatctgggaagccaagcgcacaccgccggtttgtctcagactcctgtgagtttccttagcggtggctccgtttggatagcgtcggtctcctctgagtgacggcgatgctggttttgtggggttagagctgttgggttttgttcatgagtgatgacggctagggtttccgctggtcagatctttgtttccgggagtgagagcaggcgtatctcactaatctacgacatctaactcagatttcagtcgggtctttatcattttgctatatccgggtcagttccttggaggtgttgatgagttaggccactgcatgcatctctctatttagatctaccagttggtgtggttttagccattggtttaaggctctggtagggagtagagagaatgggtcgcggtcttatcaactttgatcatcattcctcagtggcagcgtgtttcagctctcgtgtcattggagtttttgcggtaggttgttattcacctatttgggctttatgagatgctggatggaagcatatcctctttttgaattctcattggtgtggtgagcgtagtcatcatcctctgaaaaaataaaagctttagtaactagccaagacagaggagatttctaggtagtaggtttggtcggtggggaaaaaattgaacaattgtcttgatctgaatcctgtggtggatttcctcgggggattatgctcagaccggtctgactttttattttgggttttaatagaaatgacaatgccn

SEQ ID NO: 5991 - DNA, 1423 bp, Glycine max
  misc_feature (43)..(43): n is a, c, g, or t
  misc_feature (91)..(91): n is a, c, g, or t
  misc_feature (188)..(188): n is a, c, g, or t
  misc_feature (202)..(202): n is a, c, g, or t
  misc_feature (205)..(205): n is a, c, g, or t
  misc_feature (565)..(565): n is a, c, g, or t
  misc_feature (578)..(578): n is a, c, g, or t
  misc_feature (639)..(639): n is a, c, g, or t
  misc_feature (654)..(654): n is a, c, g, or t
  misc_feature (680)..(680): n is a, c, g, or t
  misc_feature (682)..(682): n is a, c, g, or t
  misc_feature (694)..(695): n is a, c, g, or t
  misc_feature (703)..(703): n is a, c, g, or t
  misc_feature (705)..(705): n is a, c, g, or t
  misc_feature (1158)..(1158): n is a, c, g, or t
  misc_feature (1311)..(1311): n is a, c, g, or t
  misc_feature (1327)..(1327): n is a, c, g, or t
  misc_feature (1350)..(1351): n is a, c, g, or t
  misc_feature (1353)..(1354): n is a, c, g, or t
  Probeset Number=SeqID_15770
cggttagaagagatgcgagatatgtagtaaggagagagtaganaggagaggatgagagtatagtggagtgtatagggtgagataggatgtngattagttgaatatatagaatagtgtgagatgtaggatggtagagcgaaggaggagtctgtgagtgagttcgagtgcggagaaattggtgtatgatnagaggatgagtgtnagngggatgtagatagtggatggccaagagaggtagagttggtagtggtgagggtgattgagaaatatagtaataatatattaatttatgatgaatgaagataatatagtataaaaatataggaagtagtatagagagtatatgagataggtgagagtgtagaaaggtgtaccgaggaggtggagtggagtagatatgatgatgtatatgtgtgggtgattatcagttgagatataagaggtagagagagagagtaaatatagatagagacagagggaggagagaatgaaatagaggtatatggtgatagtgaggaagtggataggagagatagatagaatatagataaaatgaagatagtanaagaggtgtggtngttattaatattgaattatagtagagatacatacgaataaatgagtgtgttatatttgagnaggaataatgcaggngagagtgccagtagttgtatagatgntngttataattatnnaagtggantntttggtgatgatcaaatgtgatatatataaattaatattaagtgagagatgagggaagtgtggagagatagtgagggattagagaaggagagatatatgtataggtaaatatatatatataattataatataaagtgtgtgagagtagtgtgggagggatagagtgagaggaggttgagtgagtaagagatagagtgtagggaggagagagtagagagatgaagagggagagggtaggagatgagggggtgagaatataaaatattaagtttgataagatggagaagagaaagacgagagaagaggattagtgatatagatagagtattgttaatatatatgaaggggtgagtgaagaggtatgagagcaaaggagatagaataaaaatcttgagtaatattattaatgtgagggatagtgatgggtagtgtgttgaagaattaggtaagtangaggaatacgtgagtgaagagtggaggagagaggtggggtgggtgggagaggataaagagaggaagaagagttgtagagagagatatgttggaatgaaatacaaagagagaagtagaagagaggggggggtggggggtggggttggtgtggtntcggtgtgggggggtnttgtcgaaatatatcacttctcnncnnggggggagccgggtgttgggatggaggaggatgagagggttcatgttatatgagatgtgtaaaaaaaaa

SEQ ID NO: 5992 - DNA, 455 bp, Glycine max
  misc_feature (205)..(205): n is a, c, g, or t
  misc_feature (231)..(231): n is a, c, g, or t
  misc_feature (234)..(234): n is a, c, g, or t
  misc_feature (242)..(242): n is a, c, g, or t
  misc_feature (254)..(255): n is a, c, g, or t
  misc_feature (283)..(283): n is a, c, g, or t
  misc_feature (285)..(285): n is a, c, g, or t
  misc_feature (300)..(300): n is a, c, g, or t
  misc_feature (328)..(328): n is a, c, g, or t
  misc_feature (356)..(356): n is a, c, g, or t
  misc_feature (364)..(364): n is a, c, g, or t
  Peptide Sequence Number=SeqID_8709
  Probeset Number=SeqID_15771
ggtccggaattcccggggcgaccccgcgtccgcacgcaccacaagtcgcgtccataagcgcgggcggggggggggctcgccgtcttcgaagaccgccgccgccagctccacaccacgcgctccccgcagttcctcgggctccgcaaccagcgcgggctgtgggccgaatccgactacgggtccgacgtcatcattggagtcttcnacaccggcgtggtacgctagacgccncancttctccnatttgaacctcnnccccattcccgggcggggggaaggcgcntncggggggggggtcanattctcccccaaaaactgcaaccacaanctcatcggggccagattcttctccaaangccacaangcaagtgcggggggggggggctctcaatccaatcaaccacaccatgaaattacaatcccctatcaacgcccgtggggcccgggcccatgcc

SEQ ID NO: 5993 - DNA, 675 bp, Glycine max
  Peptide Sequence Number=SeqID_8718
  Probeset Number=SeqID_15772
ccagaaagagaaagtaaaaagatccacatgttccggttattgggaccacctccaattgagatggatgtgttaatggttaattagccacccataccagacattggcagtggtatccacccggtagagattttgggaaggtggtgttattaacaccccaaataaaccatgggatgaccatgggattttttgggtaggaccataaattggggcagccattgcagccttctacccccagttaattttaaaagcaggggcagccaaggcccttggatcattcaggagtaccccccataattgaaaggtttttcttttcataaagatggctctagggaaaaaaaaataattggaaaaatggaggttgaaatggcaagtttaaaaatgggaaaagcttttggctttgaatttgcaacgtttttttgaccctctcaattaggttttcaaagattggggaaaaggggagattaaaagtttctttcatgaaagggggacccttttgcactttcctctggggggtttttcccttaagggggtcatttttttttttaaagtaatttttttctgtcatctctgaactcaaacaaatcatgggaaaaattttaaattttaattttaaaaaaaaaaaaaaaaaaaaaaaaaaaaaaaaaaaaaaaaaaaaaaaaaaaaaaaaaacctcgt

SEQ ID NO: 5994 - DNA, 1432 bp, Glycine max
  misc_feature (3)..(3): n is a, c, g, or t
  misc_feature (180)..(180): n is a, c, g, or t
  Peptide Sequence Number=SeqID_8719
  Probeset Number=SeqID_15773
cancgttcatataacggcaaatacgtcgtgtatgtatgcgcggcgagagtcacaaatatatacgactataatacgcgtctcgtcgcccgcggccagcacgccgtataccatctatattgtcgtgcgcgcgcgcgcgcctttagtagtctcgccctgagtattattcgcggcgaacgacancgcagacgctctctcatagtgcgcgtctcttctcgcgctctccccgcgtcacaccgcgagcgtatatattcattatgcaccgccaacggggacgcgcgcgctcacgagtttttttttacaagcgtttcttattattatatatttagcacgcgcgcgcgagctcgagcgcactcattctattcaccagcttgtaccgccgccgctcgcgccgcttatatctctcgccgcgcggcgcattatatttatagaacaaatagtccggctcaacacgtacacggtcgactgaataaagtagcgcggtggatccaccgacacagaacgcctcctccatctatctacacgcattatataacacacctccttgttgttctgtgcgcacgtattgtcacagaaagcatgtttcaaacgtgtgtgcgcaaactacacacgcgactacgaaacgcgctcgcccgcggtaggtccgtcaatatagcgttggcggggtttcacactattatcatcagttggagtgggtattttttcacactcaccccccgtcatttcgtttttcggcacacccctcgtagcacaactaccaccacgttcagcgtatatttacccccgtggtcatacattccacacacccccacgatattttttatccgcggtggggagctatatatcctaatccgtcccaattaataacagcgcggccggcccacacacatgtttcgtttcgcggcctacatcgattgtaatgcgagttcgatatatctaatattacgcgcgcgccgccttctgcgtactgacaatatacccgcaccgcattctgtaaccctcattcgggtttgtttgtggctcgcgggggggggggggggggcgcgcgtgtttattacgggcgggatcgcactacaattcacttcgggcgtggcgattttaaaatgacgcggggcgttatgtttcttttatataatcgggggattttagagcgtctcgtcggtctaatttaacaatacaacgcggacacaaacaatggccggccgaatcatgtgtgtagagtggtgggggtgtgaagaattcctcgctattcaacggggcccgcggttaacggttggtttaaatcacaattgtacggcgagaagaaagagagagaaatttctctaatcatcagcgcgaaggtcgatggaagaacaaggtgataacccggacggcggtgtgcggcgcggacctatcgcgatggggataaaagttcgtgccatgtttgccttcttcc

SEQ ID NO: 5995 - DNA, 1729 bp, Glycine max
  misc_feature (122)..(122): n is a, c, g, or t
  misc_feature (213)..(213): n is a, c, g, or t
  misc_feature (293)..(293): n is a, c, g, or t
  misc_feature (332)..(332): n is a, c, g, or t
  misc_feature (364)..(364): n is a, c, g, or t
  misc_feature (442)..(442): n is a, c, g, or t
  misc_feature (457)..(457): n is a, c, g, or t
  misc_feature (535)..(535): n is a, c, g, or t
  misc_feature (675)..(675): n is a, c, g, or t
  misc_feature (844)..(844): n is a, c, g, or t
  misc_feature (846)..(846): n is a, c, g, or t
  misc_feature (848)..(848): n is a, c, g, or t
  misc_feature (875)..(875): n is a, c, g, or t
  misc_feature (895)..(895): n is a, c, g, or t
  misc_feature (920)..(920): n is a, c, g, or t
  misc_feature (925)..(925): n is a, c, g, or t
  misc_feature (929)..(929): n is a, c, g, or t
  misc_feature (932)..(932): n is a, c, g, or t
  misc_feature (998)..(998): n is a, c, g, or t
  misc_feature (1009)..(1009): n is a, c, g, or t
  misc_feature (1043)..(1043): n is a, c, g, or t
  misc_feature (1078)..(1078): n is a, c, g, or t
  misc_feature (1095)..(1095): n is a, c, g, or t
  misc_feature (1146)..(1146): n is a, c, g, or t
  misc_feature (1148)..(1148): n is a, c, g, or t
  misc_feature (1150)..(1150): n is a, c, g, or t
  misc_feature (1167)..(1167): n is a, c, g, or t
  misc_feature (1277)..(1277): n is a, c, g, or t
  misc_feature (1305)..(1305): n is a, c, g, or t
  misc_feature (1311)..(1311): n is a, c, g, or t
  misc_feature (1314)..(1314): n is a, c, g, or t
  misc_feature (1347)..(1347): n is a, c, g, or t
  misc_feature (1349)..(1349): n is a, c, g, or t
  misc_feature (1428)..(1428): n is a, c, g, or t
  misc_feature (1504)..(1504): n is a, c, g, or t
  misc_feature (1532)..(1532): n is a, c, g, or t
  misc_feature (1565)..(1565): n is a, c, g, or t
  misc_feature (1567)..(1567): n is a, c, g, or t
  misc_feature (1572)..(1572): n is a, c, g, or t
  misc_feature (1588)..(1588): n is a, c, g, or t
  misc_feature (1621)..(1621): n is a, c, g, or t
  misc_feature (1639)..(1639): n is a, c, g, or t
  misc_feature (1645)..(1645): n is a, c, g, or t
  misc_feature (1655)..(1655): n is a, c, g, or t
  misc_feature (1693)..(1693): n is a, c, g, or t
  misc_feature (1697)..(1697): n is a, c, g, or t
  Probeset Number=SeqID_15774
ccgcatctcacagcaccaattgagtcaccgtgtagacacagctgatatctcatgacagctactgaacaacgatggtccacatcgtcggtcaccccagactcagcaggcgagtgattcacgcnggcgcagtcacagcgtgtcgcaccgtagacagcagcgacacgtcgccgctagcgccagctgatgctcagcacgcgacaccgtcgtgcgcgncaccagcgcctcgcgcgtagacagacgacacggcgcgagcgcagcatgtgccacgcagtatagtctggccgccgcgcggnggaatggcccgactggcgccgtcgctgttgctacatcanttcatcgactcatcacggtccatccatcacancgacagcgagtcataagtgctcacacccacatcatgtcgcactcgcccagcagcgcacccacgttcgccacgccccgngtgtccgcagcgccnccggcagtcaaccgtggcgtccaccgtgttcgtagcccgccgagtggcacatgcctgctgttcactcacttctacagnagatgcgcgtcgacgcaggcgactacacgatgccgcgaaaggtatacatcgcgacagcgtcacgtacgcacactcacagatcgcgtgctcgcgacgaaccgtacaacgtgccgtgagccagctaatgcatagcacatgcnattggcaagtgtgtcgatcggagcggcggacgtagcgtccgagtagacggtcaagggtcggaggctgatgaagatgtacaatataccagagcagcgcgcgcggagtgcgtgcattgatgcgaggcggtatgtgtgtttcgatccatactagtcatcgccgacgcgcagncngncgtgcgtagaggccgctggtgtgcgtncagcggcgcgtgaggtgtgntagtataacgatgctctctctctcntttcngcgntcntgcatcaggtgtctctctgtgcgtctacggacttcgtcgctctcgttctctctattctattatccntagtcatatgngatggtgcagagacgtgagcgcgcgccgtcatgncgccagcgctaagacactagatccatacctgcgcntacgcatcaataacatnatgagcgtcgctacagtcattcacagtgtcgtagacgagcaagactacaancnanaggtagagtgtgttggnttgtgctcatgatacataaagagtagttaacgatttcataacgttaatgctggtgataatgatctgacgtgagatagtccagcaagcagtattatagatgctatgagatngtcgacgtcgcagacgcgtgctagttcngggagnatngagtgtgctcgtcggtattgttgtatatagtcntntatcgtggatggatatgtagtgaagtagtgggtagtagtagatagaagtatatgatatagtgtatattttgtagtagtntattagttgatgatgatgagtgaggtagagagagtagatagatagtacatcataggtctatatctcctgtcgctcnagcagtctctctgtgtgttggtctgatnacacagcacgagccgatgcgcgcgctcactctncnacctntctctctatatacacnccacgtgtgtatgctcccacgctcacgtacttngtttcgcgctcgtctgcntctccntctgcttatntatacactagacagtagtaccaagacgaataccactancctnctaccatcgcgtcagtatatctgcatcttcgg

SEQ ID NO: 5996 - DNA, 1343 bp, Glycine max
  misc_feature (73)..(73): n is a, c, g, or t
  misc_feature (212)..(212): n is a, c, g, or t
  misc_feature (289)..(289): n is a, c, g, or t
  misc_feature (519)..(519): n is a, c, g, or t
  misc_feature (564)..(564): n is a, c, g, or t
  misc_feature (1249)..(1249): n is a, c, g, or t
  Peptide Sequence Number=SeqID_8720
  Probeset Number=SeqID_15775
agtagtatgagcatgcagtagctgatagagatcactacatcatcacagcgccgcacgcctcattgtgataganatatcgatctcgcataccgagtcgcctagcaatcagataggacgagagtagagagctaagagcggaggtacagaacgaatgagttcgtagagagtgtcatgctgagctgattaatcataatgcaagatacataacatgnaagtccaccacatcgagcgactcacagatgcgatccgctacggcggtctaggatatgtcatctgagctctactcatnaaatgacgagaatgtgcgtaagccgaggagtaggcggtgcagtgtgatcagtttatattattagatagtgactgtaatgtatagagttagcagcgctatgcgaatagctctgcagagagaatcgcgactcgcgacgaagtacgcgcgctatcactgacgagtagctcgtgcgccgtagctcctgcagaatgtagtcgagacaccgttcaggtgcagctatgcgagatgtnatcatgagcagtcaggtggcagtcataattccatatgtggatgangtcagcagcttcattcatgcacacatattcgagagtggttgcacagacaaatattatctcgctgcgcagcagagaagtcgtgcgtggaggaggaggtgagagataagtagcccctgcgattcacgggctaatacatctagaatatgattcatagaacgtctgtgtaatggactacgttgcgacatttgagagccgataggataatattatcagcaggcagaggtgagagagaaagaaacgaaacagataaggagcgggcagtaggtgataagaaaaattaacggcgagcaacggcaaaaatcacaccacacgaacacgtgcagacccattactacacgcaagcacggcaataacaggagtaagtaagtccgtgtttgtaaagtgtcggctgagctcgggtaaattatgctacgcagcaaccacgatcccatcataatgagcgtagtgaatacggagtagcagtaatatagaggtttagtgtaggttgagatggtaaacagagagaattccgcttcatctttttagttctttggtctatccggtggatcggtcgactagcttatgtgtttgtagatggtaggacacaccgccaatttacattaccaatgcgctaatagttagaaaacgacacacccaatgtatagaggaggggagggtgatcgataaaaaaggcaaactacacatnaaagtgaaaccgtacatgaggtaaggggaaggagaagatggtagtaggatagaggcaaaaccatataacggacataaatcgatggagagaaata

SEQ ID NO: 5997 - DNA, 277 bp, Glycine max
  Probeset Number=SeqID_15776
ctcgagccgcaattctctgtgaactttctagaatctcgttcttcctttgccttctccttcttcttcaaccctttttctttctctttctttcgcactttcattctctaaaaaaatctaagtccctttggtcttcatcttctgttcttatccacgtatggcctctaaacccctcttgatggtcctcaaggttttgctgaaggttcctcctacctcatgcagtgcaggccctgtggctgaggacatgtttcactggcaagccacaatcatgggacctgct

SEQ ID NO: 5998 - DNA, 612 bp, Glycine max
  misc_feature (364)..(364): n is a, c, g, or t
  misc_feature (501)..(501): n is a, c, g, or t
  Peptide Sequence Number=SeqID_8721
  Probeset Number=SeqID_15777
aagtggcaaactaagtaacactactaactctcaaaggttataagaagcgctaatgccagaataactccaattaccacccgatttcagattccaccccactgacgatgaacttgtgaatcactacttgtgtagaaagtgtgatgcacaaaccattgctgttcccatcatcaaagaaatcgatttgaacaagtttgatccatggaagcttccacagatggctctttacggcgagaaagagtgctactttttctctcctcgagacagaaataccccatacgctcgagaccgatcaggctgccggaatgagtactgctaggttaccggacgtgactatccgatgggatgaacgatatgccgtgtatcnagaattgcctcgtgatctacgcgtgcaaatcccaatggagtggagaccaatgggatcatgcacgactatcgcttagcgacgtcgacagatcctgcctcaaaaacagcaccaccaccacatcttgatgctggatgatngggcttttgcgcccaatttcccacagtaatgtatattgagaatttcaatgttgttcgcgtaggagatccaaagtggacaggtatccaaaaagctggtcagtcccccacgag

SEQ ID NO: 5999 - DNA, 1736 bp, Glycine max
  misc_feature (1)..(1): n is a, c, g, or t
  misc_feature (34)..(34): n is a, c, g, or t
  misc_feature (53)..(53): n is a, c, g, or t
  misc_feature (123)..(123): n is a, c, g, or t
  misc_feature (211)..(211): n is a, c, g, or t
  misc_feature (374)..(374): n is a, c, g, or t
  misc_feature (586)..(586): n is a, c, g, or t
  misc_feature (612)..(612): n is a, c, g, or t
  misc_feature (641)..(641): n is a, c, g, or t
  misc_feature (802)..(802): n is a, c, g, or t
  misc_feature (815)..(815): n is a, c, g, or t
  misc_feature (889)..(889): n is a, c, g, or t
  misc_feature (1000)..(1000): n is a, c, g, or t
  misc_feature (1043)..(1043): n is a, c, g, or t
  misc_feature (1074)..(1074): n is a, c, g, or t
  misc_feature (1296)..(1296): n is a, c, g, or t
  misc_feature (1313)..(1313): n is a, c, g, or t
  misc_feature (1405)..(1405): n is a, c, g, or t
  misc_feature (1511)..(1511): n is a, c, g, or t
  misc_feature (1584)..(1585): n is a, c, g, or t
  misc_feature (1587)..(1587): n is a, c, g, or t
  misc_feature (1634)..(1634): n is a, c, g, or t
  misc_feature (1641)..(1641): n is a, c, g, or t
  misc_feature (1662)..(1662): n is a, c, g, or t
  misc_feature (1695)..(1695): n is a, c, g, or t
  misc_feature (1707)..(1707): n is a, c, g, or t
  misc_feature (1720)..(1720): n is a, c, g, or t
  misc_feature (1723)..(1723): n is a, c, g, or t
  Peptide Sequence Number=SeqID_8722
  Probeset Number=SeqID_15778
ntctctcgcgacttagttctgccacgtagcgagntgcacgcgcatgcactatntgctcgcgtctcgttgctgtctccgagacgtacacacacaacaagtgctgagggtagtaagttaatacgngagacgcgatcgtcaaatgcgtagttctactcgattgacgcgcgaggagacgcaagctcggcggcgatagcgtcgctcgtgacgcganccatatgcgcgcgtgatggcgagcgactgcgcacactcgcgtcgtggcgctatctcgtctgtgcctgatgtaccagatcgacgacaaggatgtcgatgtagagtgcagaacgagatacagaatacggatgactgattagtagtagggtgatgtgatagatgcnggccggcgagacaagcggcgttgatgcgactgattacaacgcgagtgtacgggcgtgcgtgcgtagcattgtgtgtcgtatcgttcttatccatcaactatatcacaatcatcatcgtcacgactgcgtcagatacgtacatgtagtggccggtgatgactgtagagagtagtagtagtgtacttattgtctgcgtcaaacatccggtatanttgagtatcaattcaactttggagtnatggtacacagtagatactgtcactcgtngcgacatgcgctagacgtagcagagctgtgcgaacgcgcaccgacagagatcgtacgtcacgctagtagatagacatatatatataggagaagatgtatgctagtgattagtgggtgacagtgtaggtgaatgtcgacacgtcttatgctcatgcgcgagncagtgcgagagancgagcagccgctcgacgtaagcagcgcggactgagcccggcgacgggtggagagagtgtgaatcgagagatgtnagtacgatagaagcacgggcagaagactcagattattcgcgttgcgattaatattgcgtgcttggctcttctcgtacgacagtaacaagtctgatatgtgatacacacatntctaagtcacatcgcgaacacgcgcgccgacacgcagagcgtncatcaccgatagaggccagaaaatgacacgngcggagtgcgctatgggggacgagatggtgcggtgcgcgcgatgcacgcggcgagatgcgcacgcgtgtatgtcgagggtaggagtaagcaagcacacgtcgagctatgtgtgttcacatacgttattccgtgtgtgtcttgctgtatccgtcgttgcattagcgtgtacatgcgtcgccaacactcgcgctctgcgatcgtgcacaggtgagtggtatacnataatagtatgtgatgngtcttcgtatatatatatcactttgtggcgctcctcttgtcttgctgagtctttcatatgtgtcggtgtgcttacgtctatcctcatattantcatatcgctcgcgcgagtcatccagcatactattgctgctcgtactgtgtgtatggggtcgtgctccgccctcccgtactactggactaaggtagagaggtatgngcgcctcttccttgtgtccgcctgtcgtgttcagcagcacttagtccgctctatatgtggatattcaattgtnntnctcgcggcggtgtgtggagagcggttagctcgacagtcgaacacacnattcacnttacagcctgcgacttacacnaccacaccaccactatgtaagaggcgcggcacnccgaccacacancaccacaacccanaanacacacaaacacc

SEQ ID NO: 6000 - protein, 146 aa, Glycine max
  misc_feature (18)..(18): Xaa can be any naturally occurring amino acid
  misc_feature (36)..(36): Xaa can be any naturally occurring amino acid
  misc_feature (76)..(77): Xaa can be any naturally occurring amino acid
  misc_feature (115)..(116): Xaa can be any naturally occurring amino acid
  misc_feature (130)..(132): Xaa can be any naturally occurring amino acid
  misc_feature (135)..(137): Xaa can be any naturally occurring amino acid
  misc_feature (142)..(143): Xaa can be any naturally occurring amino acid
  misc_feature (145)..(145): Xaa can be any naturally occurring amino acid
  Coding DNA Sequence Number=SeqID_1
SLYYRFMCSSVSLSSLSXAHPTSAPVEIFCVFLTIXLDISHTPEHIHLFAQEWREEKRTHTNPRRLHPAHPTNTTXXRPCAAWLHPLFLFLCVGCVIWRSLLPCSPTLCFPFLFXXSVSSLARLRWLCGXXXVGXXXGGGEXXTXD

SEQ ID NO: 6001 - protein, 175 aa, Glycine max
  misc_feature (17)..(18): Xaa can be any naturally occurring amino acid
  misc_feature (21)..(21): Xaa can be any naturally occurring amino acid
  misc_feature (37)..(37): Xaa can be any naturally occurring amino acid
  misc_feature (43)..(43): Xaa can be any naturally occurring amino acid
  misc_feature (53)..(53): Xaa can be any naturally occurring amino acid
  misc_feature (68)..(68): Xaa can be any naturally occurring amino acid
  misc_feature (92)..(92): Xaa can be any naturally occurring amino acid
  misc_feature (115)..(115): Xaa can be any naturally occurring amino acid
  Coding DNA Sequence Number=SeqID_3
YSIVFHISPERSVCYDXXLIXQPSWIDKSTHTRTTTXPQPHAXATTTHSHTYXPPTPSNKFNHIILTXVVTGHIATQREATRPHRAHTAASXTPDSHTTDKGECVYCSRSVFSCXIITECSPSDTHRTSLSQTTYPQTRHYLNTLASYSPNPHEHPNTLSSSTCSTLATTVHCTH

SEQ ID NO: 6002 - protein, 130 aa, Glycine max
  misc_feature (1)..(11): Xaa can be any naturally occurring amino acid
  Coding DNA Sequence Number=SeqID_5
XXXXXXXXXXXWFFCSTWFRDTKRPEMGRGVSAGGGQSSLDYLFGSGVPASSANGARTQNASAPSPPADMQSPATSTSTSACTCSSSSTCSCSSTSTKHQLLSDFQLEFLEVVKSNYQSRWWAKLRQLSH

SEQ ID NO: 6003 - protein, 173 aa, Glycine max
  misc_feature (101)..(101): Xaa can be any naturally occurring amino acid
  Coding DNA Sequence Number=SeqID_7
  Gene Ontology: Mol. function=magnesium ion binding; Cellular component=integral to membrane; Biological process=photosynthesis, light harvesting
  Homolog annotation: Hit_ID=P12333; Match level="QueryCoverage=99%, HitCoverage=66%, E-value=2e-53, Identity=62%"; Hit description =Chlorophyll a-b binding protein, chloroplast precursor
  Pfam annotation: Domain name=Chloroa_b-bind; Domain location=61-173; Score=-7.6; E_value=7.9e-05; Accession=PF00504.12; Description =Chlorophyll A-B binding protein
  Subcellular localization annotation: CTP_CleavageSite=12; ConfidenceScore=5.09e-01
AAATSKDISSPSGAGKAEKLGPSSPEVGRESMRNTVTKQVSSRIPWYGPNRDKYLGPFSGEPAPYLSGEFPSDYGWDTVGLSADPETFAKNRELKVIHSKXAMHGTLGCVFPEVLDRNGAKVRETGKAKGRTHTFSEGGLDYVGEPRLIHNQSNLAIWAKQKSLMAADERYRL

SEQ ID NO: 6004 - protein, 178 aa, Glycine max
  misc_feature (1)..(2): Xaa can be any naturally occurring amino acid
  misc_feature (8)..(8): Xaa can be any naturally occurring amino acid
  misc_feature (23)..(23): Xaa can be any naturally occurring amino acid
  misc_feature (50)..(50): Xaa can be any naturally occurring amino acid
  misc_feature (103)..(103): Xaa can be any naturally occurring amino acid
  misc_feature (111)..(111): Xaa can be any naturally occurring amino acid
  misc_feature (141)..(141): Xaa can be any naturally occurring amino acid
  misc_feature (166)..(167): Xaa can be any naturally occurring amino acid
  misc_feature (176)..(176): Xaa can be any naturally occurring amino acid
  Coding DNA Sequence Number=SeqID_8
XXLRIASXSGIELKPWMCCMKSXAIYAVSMLLSSSTMLRTRAPAHAVHYXRHQGSRWCLVRGGLSTRQTSDARVRCRRRSCTLVDGEVLLQSYEQRDLAMTAXSRVEQTAXFDCAVILVSRETTSSCMHVAASRSVNSACXVHTTMPSLLVDVWSIALSRAVPRLXXAVRVHVSVXST

SEQ ID NO: 6005 - protein, 53 aa, Glycine max
  Coding DNA Sequence Number=SeqID_10
ETWENFVVKRFVFTRIAIRILDSETKGFGEKNTAMTLQISDDGTQECVSQCDL

SEQ ID NO: 6006 - protein, 110 aa, Glycine max
  misc_feature (1)..(16): Xaa can be any naturally occurring amino acid
  misc_feature (21)..(21): Xaa can be any naturally occurring amino acid
  misc_feature (24)..(24): Xaa can be any naturally occurring amino acid
  misc_feature (26)..(28): Xaa can be any naturally occurring amino acid
  misc_feature (30)..(35): Xaa can be any naturally occurring amino acid
  misc_feature (37)..(37): Xaa can be any naturally occurring amino acid
  misc_feature (39)..(39): Xaa can be any naturally occurring amino acid
  misc_feature (56)..(56): Xaa can be any naturally occurring amino acid
  misc_feature (59)..(60): Xaa can be any naturally occurring amino acid
  misc_feature (72)..(72): Xaa can be any naturally occurring amino acid
  misc_feature (75)..(75): Xaa can be any naturally occurring amino acid
  misc_feature (82)..(83): Xaa can be any naturally occurring amino acid
  misc_feature (85)..(85): Xaa can be any naturally occurring amino acid
  misc_feature (90)..(90): Xaa can be any naturally occurring amino acid
  Coding DNA Sequence Number=SeqID_12
XXXXXXXXXXXXXXXXVLVDXVLXGXXXIXXXXXXCXHXHTFYAFILYRGRWPGTXCLXXSHPLKRILVSIXHLXTSPVHTXXKXQRVSXAKINHRTARRVRLVALRLFF

SEQ ID NO: 6007 - protein, 172 aa, Glycine max
  misc_feature (1)..(1): Xaa can be any naturally occurring amino acid
  misc_feature (6)..(6): Xaa can be any naturally occurring amino acid
  misc_feature (8)..(8): Xaa can be any naturally occurring amino acid
  misc_feature (26)..(26): Xaa can be any naturally occurring amino acid
  misc_feature (29)..(30): Xaa can be any naturally occurring amino acid
  misc_feature (33)..(33): Xaa can be any naturally occurring amino acid
  misc_feature (38)..(39): Xaa can be any naturally occurring amino acid
  misc_feature (42)..(43): Xaa can be any naturally occurring amino acid
  misc_feature (60)..(60): Xaa can be any naturally occurring amino acid
  misc_feature (121)..(121): Xaa can be any naturally occurring amino acid
  misc_feature (130)..(130): Xaa can be any naturally occurring amino acid
  Coding DNA Sequence Number=SeqID_109
XHAERXLXTRDAAHQYMTQQHHVTTXRRXXVEXSRNTXXDRXXHRFTQYVCRHRRATTIXCDIESDADDVRRSADSRHRTDSSGHVTYHSIVRYERVNLDIGGRDVLLRHVYSVRHDVSGXERSGPMRGXAQAVVSLIHHINYTLVDLRVQMLGYHSEEAYMVIVVTVVVIE

SEQ ID NO: 6008 - protein, 166 aa, Glycine max
  misc_feature (11)..(11): Xaa can be any naturally occurring amino acid
  misc_feature (144)..(144): Xaa can be any naturally occurring amino acid
  Coding DNA Sequence Number=SeqID_1280
  Gene Ontology: Mol. function=zinc ion binding; Cellular component =integral to membrane
  Homolog annotation: Hit_ID=A9PGU1; Match level="QueryCoverage=76%, HitCoverage=53%, E-value=1e-17, Identity=44%"; Hit description =Putative uncharacterized protein
FCTRKGRTAIXRALYQDVDEFYGVWDPDKEKLWVYGDKNETWEVTLLGEEVRPELPERELGKKGERDGFFCRDRIKKEEVKSDSRQIKEELKNGGRANGKERKREIRLINDLTTVEEGETERKAGKDKGNVENGRKERGRRKRXRDGEEKRKKEGAEDGKEEEEEE

SEQ ID NO: 6009 - protein, 148 aa, Glycine max
  misc_feature (2)..(2): Xaa can be any naturally occurring amino acid
  misc_feature (8)..(9): Xaa can be any naturally occurring amino acid
  misc_feature (15)..(15): Xaa can be any naturally occurring amino acid
  misc_feature (17)..(17): Xaa can be any naturally occurring amino acid
  misc_feature (20)..(20): Xaa can be any naturally occurring amino acid
  misc_feature (24)..(24): Xaa can be any naturally occurring amino acid
  misc_feature (26)..(26): Xaa can be any naturally occurring amino acid
  misc_feature (42)..(42): Xaa can be any naturally occurring amino acid
  misc_feature (47)..(47): Xaa can be any naturally occurring amino acid
  misc_feature (50)..(50): Xaa can be any naturally occurring amino acid
  misc_feature (54)..(54): Xaa can be any naturally occurring amino acid
  misc_feature (56)..(57): Xaa can be any naturally occurring amino acid
  misc_feature (61)..(61): Xaa can be any naturally occurring amino acid
  misc_feature (73)..(73): Xaa can be any naturally occurring amino acid
  misc_feature (82)..(82): Xaa can be any naturally occurring amino acid
  misc_feature (92)..(92): Xaa can be any naturally occurring amino acid
  misc_feature (94)..(94): Xaa can be any naturally occurring amino acid
  misc_feature (102)..(102): Xaa can be any naturally occurring amino acid
  misc_feature (111)..(111): Xaa can be any naturally occurring amino acid
  misc_feature (125)..(125): Xaa can be any naturally occurring amino acid
  misc_feature (132)..(132): Xaa can be any naturally occurring amino acid
  misc_feature (134)..(135): Xaa can be any naturally occurring amino acid
  misc_feature (146)..(146): Xaa can be any naturally occurring amino acid
  Coding DNA Sequence Number=SeqID_1281
KXAHYAEXXIATSLXMXSHXPHQXNXICTTTSTLIIETDNEXPAHGXQRXSRDXYXXVSSXRINTRLIATHRXRSLVRLRSXETRAREPRKXSXTNARIAVXEDSIQYMSXCSTGVRLRKYRVVXTSIDDHXRXXGVTDTLVTSPXYA

SEQ ID NO: 6010 - protein, 217 aa, Glycine max
  misc_feature (7)..(7): Xaa can be any naturally occurring amino acid
  misc_feature (12)..(13): Xaa can be any naturally occurring amino acid
  misc_feature (119)..(119): Xaa can be any naturally occurring amino acid
  misc_feature (134)..(134): Xaa can be any naturally occurring amino acid
  misc_feature (152)..(152): Xaa can be any naturally occurring amino acid
  misc_feature (162)..(163): Xaa can be any naturally occurring amino acid
  misc_feature (179)..(179): Xaa can be any naturally occurring amino acid
  Coding DNA Sequence Number=SeqID_1283
YYAPHDXAHLLXXIFSSLTHSHPSSLHLSPVTRGHAHARLAAATHRRDAHAADARKSVVGEARDLTRHRDRTRDAGTLTTRNEICCRHMLNSICLLCRLVSAAASSPLVSCVDVRVVRXPMYITRARLCVCTLXCRPYRLRDYRSDLNSYTXLVHPTRLHIXXRCLHSLLDADVSVTCXTWHTVRLCDVLSTRVYCDYSRSLGLSLRAPRGLYVMVP

SEQ ID NO: 6011 - protein, 257 aa, Glycine max
  misc_feature (5)..(6): Xaa can be any naturally occurring amino acid
  misc_feature (10)..(10): Xaa can be any naturally occurring amino acid
  misc_feature (14)..(14): Xaa can be any naturally occurring amino acid
  misc_feature (21)..(21): Xaa can be any naturally occurring amino acid
  misc_feature (25)..(28): Xaa can be any naturally occurring amino acid
  misc_feature (32)..(34): Xaa can be any naturally occurring amino acid
  misc_feature (38)..(44): Xaa can be any naturally occurring amino acid
  misc_feature (46)..(46): Xaa can be any naturally occurring amino acid
  misc_feature (50)..(50): Xaa can be any naturally occurring amino acid
  misc_feature (60)..(60): Xaa can be any naturally occurring amino acid
  misc_feature (64)..(64): Xaa can be any naturally occurring amino acid
  misc_feature (68)..(69): Xaa can be any naturally occurring amino acid
  misc_feature (74)..(74): Xaa can be any naturally occurring amino acid
  misc_feature (84)..(84): Xaa can be any naturally occurring amino acid
  misc_feature (100)..(100): Xaa can be any naturally occurring amino acid
  misc_feature (138)..(138): Xaa can be any naturally occurring amino acid
  misc_feature (142)..(142): Xaa can be any naturally occurring amino acid
  misc_feature (147)..(147): Xaa can be any naturally occurring amino acid
  misc_feature (149)..(149): Xaa can be any naturally occurring amino acid
  misc_feature (157)..(157): Xaa can be any naturally occurring amino acid
  misc_feature (182)..(182): Xaa can be any naturally occurring amino acid
  misc_feature (190)..(190): Xaa can be any naturally occurring amino acid
  misc_feature (193)..(193): Xaa can be any naturally occurring amino acid
  misc_feature (209)..(209): Xaa can be any naturally occurring amino acid
  misc_feature (214)..(214): Xaa can be any naturally occurring amino acid
  misc_feature (225)..(225): Xaa can be any naturally occurring amino acid
  misc_feature (230)..(230): Xaa can be any naturally occurring amino acid
  Coding DNA Sequence Number=SeqID_1285
LCLVXXLGGXGVLXVVSRVRXFPCXXXXPPFXXXPPPXXXXXXXEXRGRXRRMWARCDLXVVAXGWAXXILSLXRIFSPLSCVXVGNREKRGASLSSFIXFYNLLSLCTGRLARLCATLCPSCMVVRWLRRVVAWCDXFSLXRVSLXSXVRLAGSAXSGLLFYGLSAIVGFALHLSCDVLLXLYSLSSTXLVXSAREVADVEVVVVACXARRRXREDTPGAPAAXLSASXSECTRARLSKRLLLYIIIKLSYRMYIY

SEQ ID NO: 6012 - protein, 334 aa, Glycine max
  Coding DNA Sequence Number=SeqID_1287
  Gene Ontology: Mol. function=oxidoreductase activity; Cellular component=cytoplasm; Biological process=electron transport
  Homolog annotation: Hit_ID=Q16UC6; Match level="QueryCoverage=99%, HitCoverage=97%, E-value=8e-98, Identity=52%"; Hit description =Dimeric dihydrodiol dehydrogenase
  Pfam annotation: Domain name=GFO_IDH_MocA; Domain location=3-124; Score=106.5; E_value=8.4e-29; Accession=PF01408.12; Description =Oxidoreductase family, NAD-binding Rossmann fold
  Pfam annotation: Domain name=GFO_IDH_MocA_C; Domain location=136-241; Score=28.6; E_value=2.2e-05; Accession=PF02894.8; Description =Oxidoreductase family, C-terminal alphabeta domain
  Pfam module annotation: Pfam domain module=GFO_IDH_MocA::GFO_IDH_MocA_ C; Domain location=3-124::136-241
MALRWGISCAGLIANDFVNALQTLNPDDHQIVAVGCHDIKESEKLATKFEIPKAYGSYLELAQDPNVELAYVGTLNPWHYEVSKLMLEHGKHVLCEKPLCMNLKQGQELIALAKEKGVFFMEGLWCRFFPSYQHVRKQIRSGAVGEILSVKAEFGIKDLVKVGRLSKKEMGGGTILDMGVYTIQACQWVLEQEPIAIKAKGKLNEEGVDVEMSADLDYGDNKKVQINTSALNQLSNSVKIVGTKGEITIHQIFCSISVTDVDGKVHEWPLPSAKFDFHYPNSCGLRYEAEEIRKAIRAGKLEHENVPHTDSLGIARIQDELRRQLGVHYEGHDD

SEQ ID NO: 6013 - protein, 133 aa, Glycine max
  Coding DNA Sequence Number=SeqID_1288
  Homolog annotation: Hit_ID=A7PDG0; Match level="QueryCoverage=71%, HitCoverage=23%, E-value=2e-19, Identity=55%"; Hit description =Chromosome chr17 scaffold_12, whole genome shotgun sequence
VEHDGHANYERGHEILEKMAKQNEEPEHIIEQLKVELREQKLKAKEDAEDLTQEMAELRYQITGMLEEEYKRRSCIEQAAIQQIQQLEVQVSKEQRKLSGALRRLQESHELADTQATEIKKLKDALGVCACRL

SEQ ID NO: 6014 - protein, 77 aa, Glycine max
  misc_feature (1)..(1): Xaa can be any naturally occurring amino acid
  misc_feature (6)..(8): Xaa can be any naturally occurring amino acid
  misc_feature (48)..(48): Xaa can be any naturally occurring amino acid
  misc_feature (50)..(51): Xaa can be any naturally occurring amino acid
  misc_feature (55)..(56): Xaa can be any naturally occurring amino acid
  Coding DNA Sequence Number=SeqID_1289
  Subcellular localization annotation: CTP_CleavageSite=20; ConfidenceScore=5.00e-01
XSLLLXXXNLSGAMRIPHARSSSSHNSRESCVRQGAYIVCFLFILFFXNXXLHPXXIIITQPHSLQHNSILYTVLRR

SEQ ID NO: 6015 - protein, 198 aa, Glycine max
  Coding DNA Sequence Number=SeqID_1291
  Subcellular localization annotation: CTP_CleavageSite=82; ConfidenceScore=5.89e-01
RPPSPSSFLSLFLCFLFLLSPRSFSSPSRARGFCSSRRLSAPPSPPPRSSSLFLLRLLLLLLPPPFFLFRSSSPPLFFVDIRRASFGGFCRARGLLLGEGLEAGWGSRRWNIPRPQTGERVPSPVERWLVLRGRGGEAPPVEGNGARRREGRGAGEGLRLGRMGGLEWARTVKRGCCGGMVRVLGVKEKMEDDEDAEV

SEQ ID NO: 6016 - protein, 113 aa, Glycine max
  misc_feature (1)..(2): Xaa can be any naturally occurring amino acid
  misc_feature (27)..(27): Xaa can be any naturally occurring amino acid
  misc_feature (30)..(30): Xaa can be any naturally occurring amino acid
  misc_feature (38)..(39): Xaa can be any naturally occurring amino acid
  misc_feature (57)..(57): Xaa can be any naturally occurring amino acid
  misc_feature (63)..(63): Xaa can be any naturally occurring amino acid
  misc_feature (84)..(84): Xaa can be any naturally occurring amino acid
  misc_feature (113)..(113): Xaa can be any naturally occurring amino acid
  Coding DNA Sequence Number=SeqID_2295
  Subcellular localization annotation: CTP_CleavageSite=14; ConfidenceScore=5.25e-01
XXERSVIYVSRTLSSSRRRSHAPLVIXSPXRTVLSRTXXACTLSAWSAHGMCDAVMXCSTLLXRSLLSPSRVTIRVDVRSVRRXCRATVEVVLTTSEGRATATLGARNSIIDX

SEQ ID NO: 6017 - protein, 75 aa, Glycine max
  misc_feature (68)..(68): Xaa can be any naturally occurring amino acid
  Coding DNA Sequence Number=SeqID_2297
CIYTRCRREREKEQSWEQGNYPPTPCLEYLNSKRGNSSLSKCLTFVHTPTKSWKENPRVRGRVVDREXGPVPQAT

SEQ ID NO: 6018 - protein, 95 aa, Glycine max
  misc_feature (27)..(27): Xaa can be any naturally occurring amino acid
  misc_feature (70)..(71): Xaa can be any naturally occurring amino acid
  Coding DNA Sequence Number=SeqID_2299
RRIRALLARCAAHTSDPAPHYIILYSXRCAGTNMSDVFCIARRVRDDLTLVSLSYITSTIHALKPRDHCXXQRDILYVSDVIYCADPRTPARSSM

SEQ ID NO: 6019 - protein, 101 aa, Glycine max
  misc_feature (17)..(17): Xaa can be any naturally occurring amino acid
  misc_feature (20)..(20): Xaa can be any naturally occurring amino acid
  misc_feature (24)..(24): Xaa can be any naturally occurring amino acid
  misc_feature (29)..(29): Xaa can be any naturally occurring amino acid
  misc_feature (52)..(52): Xaa can be any naturally occurring amino acid
  misc_feature (65)..(65): Xaa can be any naturally occurring amino acid
  misc_feature (72)..(72): Xaa can be any naturally occurring amino acid
  misc_feature (84)..(84): Xaa can be any naturally occurring amino acid
  Coding DNA Sequence Number=SeqID_2301
PTSVTSTTSLYALICVXILXEDMXVGGVXHSHYSTRMQAPSTRHDTDVLTLXVYRHELSAHHTRXPLTTREXSSSLQYTIHTTXSHIVSYIYSLYTNTHTH

SEQ ID NO: 6020 - protein, 121 aa, Glycine max
  misc_feature (11)..(11): Xaa can be any naturally occurring amino acid
  misc_feature (14)..(14): Xaa can be any naturally occurring amino acid
  misc_feature (99)..(99): Xaa can be any naturally occurring amino acid
  misc_feature (119)..(119): Xaa can be any naturally occurring amino acid
  misc_feature (121)..(121): Xaa can be any naturally occurring amino acid
  Coding DNA Sequence Number=SeqID_2303
CFCRESACLEXSLXLHTLFSCIHMSEFYLISHILLKSVTHHYIISLLYLILLHSITTMSSIMIIVCIYRFVCYSAASISVCLLYDCASRIEVSTAAQSXRVVARSAILTSHQYCILCSXEX

SEQ ID NO: 6021 - protein, 145 aa, Glycine max
  misc_feature (60)..(60): Xaa can be any naturally occurring amino acid
  misc_feature (94)..(95): Xaa can be any naturally occurring amino acid
  misc_feature (120)..(120): Xaa can be any naturally occurring amino acid
  misc_feature (135)..(135): Xaa can be any naturally occurring amino acid
  misc_feature (137)..(137): Xaa can be any naturally occurring amino acid
  Coding DNA Sequence Number=SeqID_2305
IYIDSARYVCRPRVTPRCIVIVWTCAADCRFCLVAHARVISVWVVVCGLPSSRSAARSLXAPPHARSDMIFRYLSLTRSLLVLGYALRDVVAVXXFTCCLISLTRSSPILTLCRTSTLPXCRCDVALFTTTRWRXTXSVCGLLPR

SEQ ID NO: 6022 - protein, 417 aa, Glycine max
  Coding DNA Sequence Number=SeqID_2307
  Homolog annotation: Hit_ID=A0CYJ0; Match level="QueryCoverage=24%, HitCoverage=33%, E-value=2e-07, Identity=37%"; Hit description =Chromosome undetermined scaffold_31, whole genome shotgun sequence
MIHQTKRTINKSSVESSEPNMFLEKQSYKHQLHDSDLKPVTKTIKKTSSNKRRYVNTPNDVRLDLIDAVHTYGEKIKHAAKRLGINYSSAKAICQIYKREGRSDKIIAKRKDAKGPYKVSKQNNSIFQTDAPEEFDIKCSKEDNYNDEKSDTSQDDSHSEPEDSTLEPQTAWKEEGYTHDIEKRVQEMEDLPAQTSYQTLAQISQPQQQINQTITQNNFFLSVQPSYLPQTQQASRFSMDEATNAKTQSGCNYINIANIMNPAALSNLQAQQNLLCQAMNPLISQSNLNLFPANNYNNYPILKDLDKQYQANCNPNKASCSYPNPHQPLNPYTSMPLSHQFQFYSGHQMLNPSMYMNANPSNLNLPFMSLPQMMPNRQIYGTGYDPRISHALSKFHENLTQNIPNIKINKVSKPQEQ

SEQ ID NO: 6023 - protein, 64 aa, Glycine max
  Coding DNA Sequence Number=SeqID_2308
  Homolog annotation: Hit_ID=Q9SZC9; Match level="QueryCoverage=96%, HitCoverage=6%, E-value=6e-08, Identity=50%"; Hit description =Putative copper-transporting ATPase PAA1
  Subcellular localization annotation: CTP_CleavageSite=26; ConfidenceScore=5.22e-01
VIALSAEACVKSVLIQRAGRFSYGVMATSVAPFSFWSSCGALNLPLALNQGGAFSTAMRLCCQV

SEQ ID NO: 6024 - protein, 72 aa, Glycine max
  misc_feature (69)..(69): Xaa can be any naturally occurring amino acid
  Coding DNA Sequence Number=SeqID_2309
SPGYNAKTKEQPPACSLRRALELAIPIRCASRASSSPCAPILPMPSPKSLPARHKSKPQSLQITHKSVXPQP

SEQ ID NO: 6025 - protein, 279 aa, Glycine max
  misc_feature (263)..(263): Xaa can be any naturally occurring amino acid
  Coding DNA Sequence Number=SeqID_2311
  Subcellular localization annotation: CTP_CleavageSite=43; ConfidenceScore=5.16e-01
AHWRPLFFPLGAALGCWRAFGPLFPRVLVLVLNPFLLPYAVISASPSTNLLLRSADASWSLYQAFSLRGCLRRALLACCHWFLDFTHFGLLPLGFDKFWFMCRRFGRFPWWSLFFRTACPVLLPASFRSALSYFCLLFASRGPSFFFSLFFAASLWGSRSFPCVSSPPDPVLLPASLVVVRRPALRLFALWRGGSLSFMVGSCSSCAPSPSLSRCVLWIYPGLSPSSAYCFSHALLCHSFAAPAARGVLFCRASAAAGCPFVXGANVSRRGGCGVRAVG

SEQ ID NO: 6026 - protein, 125 aa, Glycine max
  misc_feature (38)..(38): Xaa can be any naturally occurring amino acid
  misc_feature (46)..(46): Xaa can be any naturally occurring amino acid
  misc_feature (79)..(79): Xaa can be any naturally occurring amino acid
  misc_feature (86)..(86): Xaa can be any naturally occurring amino acid
  misc_feature (95)..(95): Xaa can be any naturally occurring amino acid
  misc_feature (97)..(97): Xaa can be any naturally occurring amino acid
  misc_feature (101)..(101): Xaa can be any naturally occurring amino acid
  misc_feature (116)..(116): Xaa can be any naturally occurring amino acid
  Coding DNA Sequence Number=SeqID_2313
LLRRVECLRGAVRCRVMARADLARCMRKWIEHLTPSPXTAKNLARXFLLLWHLSQVERDAISVICTCSYGLLMFDTRRXSMMYTHXDVTHRKYHXRXILHXCRYITVHTKSYTTPXSLQTCVVYL

SEQ ID NO: 6027 - protein, 169 aa, Glycine max
  misc_feature (4)..(4): Xaa can be any naturally occurring amino acid
  misc_feature (12)..(12): Xaa can be any naturally occurring amino acid
  misc_feature (29)..(29): Xaa can be any naturally occurring amino acid
  Coding DNA Sequence Number=SeqID_2315
EKKXDEKDDQIXTKTAQIELLQNNLGLAXKELKMLKQLKPAHAEGNILDGNNNDNKSIRGGKASGNNRNKGGFTLFDKHVVKPIRGGGGDVNNFARNNALVFESKAPSVEQKEEKAGEKKEITAVKEVKEKITGLFGFGTSEESKSAKIKEKEDQSFKKFDDLLKKKKK

SEQ ID NO: 6028 - protein, 41 aa, Glycine max
  misc_feature (10)..(11): Xaa can be any naturally occurring amino acid
  Coding DNA Sequence Number=SeqID_2317
  Gene Ontology: Mol. function=two-component sensor activity; Cellular component=membrane; Biological process=signal transduction
  Homolog annotation: Hit_ID=A7P3Y7; Match level="QueryCoverage=100%, HitCoverage=6%, E-value=3e-13, Identity=87%"; Hit description =Chromosome chr1 scaffold_5, whole genome shotgun sequence
VRYRLYGEWXXDDERIPMLLSARQTAKLDTRRILKRLAKEN

SEQ ID NO: 6029 - protein, 92 aa, Glycine max
  misc_feature (12)..(12): Xaa can be any naturally occurring amino acid
  misc_feature (20)..(20): Xaa can be any naturally occurring amino acid
  misc_feature (27)..(27): Xaa can be any naturally occurring amino acid
  misc_feature (29)..(29): Xaa can be any naturally occurring amino acid
  misc_feature (34)..(34): Xaa can be any naturally occurring amino acid
  misc_feature (44)..(44): Xaa can be any naturally occurring amino acid
  misc_feature (49)..(49): Xaa can be any naturally occurring amino acid
  misc_feature (58)..(58): Xaa can be any naturally occurring amino acid
  misc_feature (60)..(61): Xaa can be any naturally occurring amino acid
  misc_feature (75)..(75): Xaa can be any naturally occurring amino acid
  Coding DNA Sequence Number=SeqID_2318
ALDDSSIVDYLXPSGAHKRXRPLDITXIXQLCHXKRDTRSHVHXNESSXYIQDTSKIXLXXTLTPSFSTHIIVAXTLCILSRHTRDWTGMRR

SEQ ID NO: 6030 - protein, 89 aa, Glycine max
  misc_feature (4)..(10): Xaa can be any naturally occurring amino acid
  misc_feature (12)..(12): Xaa can be any naturally occurring amino acid
  misc_feature (14)..(17): Xaa can be any naturally occurring amino acid
  misc_feature (20)..(20): Xaa can be any naturally occurring amino acid
  misc_feature (22)..(22): Xaa can be any naturally occurring amino acid
  misc_feature (26)..(26): Xaa can be any naturally occurring amino acid
  misc_feature (28)..(29): Xaa can be any naturally occurring amino acid
  misc_feature (32)..(33): Xaa can be any naturally occurring amino acid
  misc_feature (41)..(42): Xaa can be any naturally occurring amino acid
  misc_feature (51)..(51): Xaa can be any naturally occurring amino acid
  misc_feature (58)..(58): Xaa can be any naturally occurring amino acid
  misc_feature (60)..(61): Xaa can be any naturally occurring amino acid
  Coding DNA Sequence Number=SeqID_2320
KKKXXXXXXXIXNXXXXYTXTXRNYXAXXIPXXIVPKASLXXYGTSSQPFXDACLIGXRXXPRTYCRRTRRELVPRRAESWLLHVECRW

SEQ ID NO: 6031 - protein, 80 aa, Glycine max
  Coding DNA Sequence Number=SeqID_2322
  Subcellular localization annotation: CTP_CleavageSite=45; ConfidenceScore=5.66e-01
KKFWHMVSSTSTGRLFGSDGGRSSLAPVTRPSFGTVTGSDYGEPSSSLLVSSGSSPGLPQILLALRFHTSLCYNHSRSLN

SEQ ID NO: 6032 - protein, 82 aa, Glycine max
  misc_feature (78)..(78): Xaa can be any naturally occurring amino acid
  Coding DNA Sequence Number=SeqID_2324
LGSSGFERVVLIILVKLLEKELVDLSCLSWWHFCLFSDQHPKLLKDKRFLNVNCIPHCTLHISCVVHLVRLMNGCEVXSPCM

SEQ ID NO: 6033 - protein, 129 aa, Glycine max
  misc_feature (17)..(17): Xaa can be any naturally occurring amino acid
  misc_feature (67)..(67): Xaa can be any naturally occurring amino acid
  misc_feature (86)..(86): Xaa can be any naturally occurring amino acid
  Coding DNA Sequence Number=SeqID_2326
KVYYMCENQRYTSILEXNSSVSYKYTYDRSRPYFIYIYTRPPCGGRVASHMGVVVWNGAARVTEFSXPGVECTCADSTSRRSMRMXHHSTFATIRALSRLRHQEKSLEETHSLSDYCDLILYIECDRVR

SEQ ID NO: 6034 - protein, 57 aa, Glycine max
  Coding DNA Sequence Number=SeqID_2328
STRTQSTTSRKTNMYFVQKYEQIYEGWLEMKQTGANIVKCYQQTILGFCHFLTDFIW

SEQ ID NO: 6035 - protein, 196 aa, Glycine max
  misc_feature (22)..(22): Xaa can be any naturally occurring amino acid
  misc_feature (173)..(173): Xaa can be any naturally occurring amino acid
  misc_feature (189)..(189): Xaa can be any naturally occurring amino acid
  Coding DNA Sequence Number=SeqID_2329
  Gene Ontology: Mol. function=GTP binding; Cellular component =perinuclear region of cytoplasm; Biological process=small GTPase mediated signal transduction
  Homolog annotation: Hit_ID=UPI000069F16A; Match level="QueryCoverage =88%, HitCoverage=27%, E-value=2e-93, Identity=96%"; Hit description =Nucleolar GTP-binding protein 1 (Chronic renal failure gene protein) (GTP-binding protein NGB).
SLYKKAAGTGPFPGYRRPSVRXDMVVPAAKDFIDLTLSKTQRKTPTVVHKHYQINRIRHFYMRKVKYTQQNYHDRLSQILTDFPKLDDVHPFYADLMNVLYDKDHYKLALGQLNIAKNLIDNVSKDYVRLMKYGDSLYRCKQLKRAALGRMCTIIKRQKQSLEYLEQVRQHLXRLPTIDPNTRTLLLCXYPNVGKS

SEQ ID NO: 6036 - protein, 174 aa, Glycine max
  misc_feature (101)..(101): Xaa can be any naturally occurring amino acid
  Coding DNA Sequence Number=SeqID_2330
  Homolog annotation: Hit_ID=Q0V6K3; Match level="QueryCoverage=70%, HitCoverage=32%, E-value=1e-16, Identity=41%"; Hit description =Putative uncharacterized protein
MNTLLIALSVIGQAAADRLLVASYGNETHAGAIQTLEVLPSTSANSSHAMKVTQENHECGTLPTWLDASLGLDRIVCLDESAANASLTMLSLGDDGSLQKXSNTSVLGGAVSSASYNNKSALALAHYGPEPAISLFTIDGENKFSSLQNITFQAPQIHQAVVDPTGQYMIFPSL

SEQ ID NO: 6037 - protein, 146 aa, Glycine max
  misc_feature (2)..(2): Xaa can be any naturally occurring amino acid
  misc_feature (20)..(20): Xaa can be any naturally occurring amino acid
  misc_feature (60)..(60): Xaa can be any naturally occurring amino acid
  misc_feature (69)..(69): Xaa can be any naturally occurring amino acid
  misc_feature (78)..(78): Xaa can be any naturally occurring amino acid
  misc_feature (80)..(80): Xaa can be any naturally occurring amino acid
  misc_feature (88)..(88): Xaa can be any naturally occurring amino acid
  misc_feature (93)..(93): Xaa can be any naturally occurring amino acid
  misc_feature (98)..(98): Xaa can be any naturally occurring amino acid
  misc_feature (137)..(137): Xaa can be any naturally occurring amino acid
  Coding DNA Sequence Number=SeqID_2331
NXYPTLDDNCTCQYNIYGRXYIDASMYKYYRRRSIIHMHQYCHAIMSRLSLLYIFLERLXRSHYIIRYXLSVHTQSHXTXYASTPFSXHNYSXAAHRXDDKHLCNYYCPQSSSYDPTLLLHTPFIYAHNHKPALSIXRSYTKYVDC

SEQ ID NO: 6038 - protein, 117 aa, Glycine max
  misc_feature (5)..(5): Xaa can be any naturally occurring amino acid
  misc_feature (7)..(7): Xaa can be any naturally occurring amino acid
  misc_feature (10)..(11): Xaa can be any naturally occurring amino acid
  misc_feature (93)..(93): Xaa can be any naturally occurring amino acid
  Coding DNA Sequence Number=SeqID_2333
LVCLXLXCGXXGGLAGWVCRVCVTSDDNLPPHALLTFALYYSLTHLVSAVWLVLLLYCMYPITYCEIHTYLQNELPSSSLLILPPIILSLLCXLLQDIHYLTMRLLGEFSILRHRYH

SEQ ID NO: 6039 - protein, 102 aa, Glycine max
  misc_feature (21)..(21): Xaa can be any naturally occurring amino acid
  misc_feature (32)..(32): Xaa can be any naturally occurring amino acid
  misc_feature (45)..(45): Xaa can be any naturally occurring amino acid
  misc_feature (70)..(71): Xaa can be any naturally occurring amino acid
  misc_feature (78)..(78): Xaa can be any naturally occurring amino acid
  misc_feature (87)..(88): Xaa can be any naturally occurring amino acid
  misc_feature (102)..(102): Xaa can be any naturally occurring amino acid
  Coding DNA Sequence Number=SeqID_2335
LEAMADVIVRIKSVRVSARCXSLDVYVHIYVXASCVRVILCGQRXERSRYLDRSMLRLSVHINIDYMREXXVCVTSYXDVIDCTRSXXASVATASITRVSSX

SEQ ID NO: 6040 - protein, 82 aa, Glycine max
  misc_feature (68)..(68): Xaa can be any naturally occurring amino acid
  Coding DNA Sequence Number=SeqID_2337
  Subcellular localization annotation: CTP_CleavageSite=71; ConfidenceScore=5.48e-01
SQQHRSNILQSPATHEIEKPFLNSTFSSSSYMASNASMLAVFMACALLLAGSTCHASRNLADTTPAAXAPAASALPGLPAVP

SEQ ID NO: 6041 - protein, 121 aa, Glycine max
  misc_feature (9)..(9): Xaa can be any naturally occurring amino acid
  misc_feature (40)..(40): Xaa can be any naturally occurring amino acid
  Coding DNA Sequence Number=SeqID_2339
GWRESHTTXWRGARDPECTKVGRPPRRGCKRRIRAHEQHXSPRMKLYSYSPQKLRLTQYDTVRYSLVTNVCVLSHIVIIIQYTSLPPSVRACTADVTPNATHLRAAGGQHAHGYRRRRAPM

SEQ ID NO: 6042 - protein, 147 aa, Glycine max
  misc_feature (18)..(18): Xaa can be any naturally occurring amino acid
  misc_feature (39)..(39): Xaa can be any naturally occurring amino acid
  Coding DNA Sequence Number=SeqID_2341
  Gene Ontology: Mol. function=zinc ion binding; Cellular component =integral to membrane; Biological process=peroxisome organization and biogenesis
  Homolog annotation: Hit_ID=A7Q841; Match level="QueryCoverage=61%, HitCoverage=22%, E-value=7e-30, Identity=75%"; Hit description =Chromosome undetermined scaffold_62, whole genome shotgun sequence
MLFQVGGQGVAPTFFEMXAAQQLPASLRAALTYSIGRLXLRRPFLHKLLDFEDESFPLLTLGRESHTLRTTDAPFSESLYGPPRKTSQYRPQEWQRHYQQPRLTEAPERSFPVLFLVGVAGFGNPSCFQSSTRKRGNPGFQPPSMGR

SEQ ID NO: 6043 - protein, 224 aa, Glycine max
  misc_feature (10)..(10): Xaa can be any naturally occurring amino acid
  misc_feature (25)..(25): Xaa can be any naturally occurring amino acid
  misc_feature (29)..(29): Xaa can be any naturally occurring amino acid
  misc_feature (34)..(34): Xaa can be any naturally occurring amino acid
  misc_feature (74)..(74): Xaa can be any naturally occurring amino acid
  misc_feature (76)..(76): Xaa can be any naturally occurring amino acid
  misc_feature (89)..(89): Xaa can be any naturally occurring amino acid
  misc_feature (102)..(102): Xaa can be any naturally occurring amino acid
  misc_feature (106)..(106): Xaa can be any naturally occurring amino acid
  misc_feature (113)..(113): Xaa can be any naturally occurring amino acid
  misc_feature (131)..(131): Xaa can be any naturally occurring amino acid
  misc_feature (146)..(146): Xaa can be any naturally occurring amino acid
  misc_feature (155)..(155): Xaa can be any naturally occurring amino acid
  misc_feature (201)..(202): Xaa can be any naturally occurring amino acid
  misc_feature (208)..(208): Xaa can be any naturally occurring amino acid
  misc_feature (213)..(213): Xaa can be any naturally occurring amino acid
  Coding DNA Sequence Number=SeqID_2342
CYTEYNDRYXINLSLTTSRRTTPTXTGDXFTRSXALHNKDHTTLRAYDQERSAIRIVYMRPLHTLYTHTYTHTXTXITPVCDSTHHHVXPRRTVVAHSTARXIDDXSIYTLRXQSLSPHTIDRLNRASQLXAHMTTLYNVLSSMLXADTTDSLQXILYLTHEKHARQLNIYSSSTRAQTYASSAGGCLSLRRAAILPPHLXXSFSYHXLSIHXHYCLSSSLSHS

SEQ ID NO: 6044 - protein, 136 aa, Glycine max
  misc_feature (30)..(30): Xaa can be any naturally occurring amino acid
  Coding DNA Sequence Number=SeqID_2344
  Gene Ontology: Mol. function=N-acetyltransferase activity; Biological process=metabolic process
  Homolog annotation: Hit_ID=Q16W72; Match level="QueryCoverage=97%, HitCoverage=14%, E-value=1e-31, Identity=47%"; Hit description =Putative uncharacterized protein
APPLNAKQFYQNQEMCWFPEMRLKYPISCXDSPDLTPAAKDSINHFHNFKYDYPQEVLNTHPSIMVCSVLKEQCNADSSLPKRLVTVLLAALRSNGSFGVHVCINTTDRFMHQFYSKLGFTEIFEDTTKVYLGRNF

SEQ ID NO: 6045 - protein, 229 aa, Glycine max
  Coding DNA Sequence Number=SeqID_2345
  Subcellular localization annotation: CTP_CleavageSite=47; ConfidenceScore=5.27e-01
LLLRCPPTANPISIRPPKPIMAVAFASSRRALHTLHRRLLLHPSPTHAAARRELPTSARTPIPAHSPTFISSSSSPLLQHPREPKAKKAGATGLPNRSRPVGTGIQGPLADATPLTTFVLPPLSPPRSSHVPTLTFRSLRRLFVPIPPLPSLNPRAHQTKPTPPPRIPPLRTTYLFLHLLDRNLSHLALSFFLPYRPLPFLPANPTHTHATPTNSNKTAKHTIIPITNS

SEQ ID NO: 6046 - protein, 75 aa, Glycine max
  Coding DNA Sequence Number=SeqID_2347
LYRIQIGYRSSSVTYSYPMSYLHLFVAIYTRHRAHNLSYHADLEEQCDSVCGSESTSLRSAHALISSTIAHIRTI

SEQ ID NO: 6047 - protein, 139 aa, Glycine max
  Coding DNA Sequence Number=SeqID_2349
  Subcellular localization annotation: CTP_CleavageSite=42; ConfidenceScore=5.41e-01
PFPSLPRTAIDLPAPARQNQHRHGLRRSRAHRAPGHQRICPRDSSSSTTSTTSKDRAGTRQVKRIEAFFHLQHPLLLPSLAEPFLCSPMLEPRSQMIPRMILHGVRLRGVVRRSQAGGLTFSIVATFMLAFLRQTCLNL

SEQ ID NO: 6048 - protein, 127 aa, Glycine max
  misc_feature (39)..(39): Xaa can be any naturally occurring amino acid
  misc_feature (42)..(42): Xaa can be any naturally occurring amino acid
  misc_feature (113)..(113): Xaa can be any naturally occurring amino acid
  misc_feature (123)..(123): Xaa can be any naturally occurring amino acid
  Coding DNA Sequence Number=SeqID_2351
RSESSEGRYRRSVLQDVRSIDARNTQITQHDRRLPRSVXKKXEIGALKSTPDALYYITPRIVVLSIMLYRYDHFTPPIHTNAPHSIRMNVRDECIDDVMMLVLALSPPPRHIXAISSTSRTTXSALT

SEQ ID NO: 6049 - protein, 163 aa, Glycine max
  misc_feature (8)..(8): Xaa can be any naturally occurring amino acid
  misc_feature (66)..(66): Xaa can be any naturally occurring amino acid
  Coding DNA Sequence Number=SeqID_2353
AQLTPLHXPYSRPPLLIHPPHLLDTHHSDVVGDRAAPPPLAVLATRRSESQTPSSSSLSVFYYYIXLTYAFAFIEPTSVREIQARHALTRYAKLCWRFIPHRIGPRGTHISVSAVTAYWTLGSTTYIHFSNLLLVPWTGNSQPAARVLDARIFPTSQAPCYQT

SEQ ID NO: 6050 - protein, 138 aa, Glycine max
  misc_feature (88)..(88): Xaa can be any naturally occurring amino acid
  misc_feature (119)..(119): Xaa can be any naturally occurring amino acid
  Coding DNA Sequence Number=SeqID_2355
  Gene Ontology: Mol. function=unfolded protein binding; Cellular component=chloroplast; Biological process=cellular protein metabolic process
  Homolog annotation: Hit_ID=P08926; Match level="QueryCoverage=92%, HitCoverage=21%, E-value=2e-42, Identity=74%"; Hit description =RuBisCO large subunit-binding protein subunit alpha, chloroplast precursor
SARVRKLGIRLEAATKDELQARVAQLKKELSQTDSVYDTEKLAERIAKLSGGVAVIKVGAATETELEDRKLRIEDANNATFAAIEEGXIVPGGGTALVHLSTHIPALNNNLNNADNILXSYIIQNTLIASTALITQNA

SEQ ID NO: 6051 - protein, 97 aa, Glycine max
  misc_feature (45)..(46): Xaa can be any naturally occurring amino acid
  misc_feature (77)..(77): Xaa can be any naturally occurring amino acid
  misc_feature (92)..(92): Xaa can be any naturally occurring amino acid
  Coding DNA Sequence Number=SeqID_2356
VVSRVSRHNHVLAMRATMSCTSISPYLYLCSVYCSIYSIQMWWQXXDTRSAVTTDEHVSQRGSQIGYKDSCEYSGSXVINGISVSIVRDICXVVCAS

SEQ ID NO: 6052 - protein, 99 aa, Glycine max
  misc_feature (6)..(10): Xaa can be any naturally occurring amino acid
  misc_feature (12)..(14): Xaa can be any naturally occurring amino acid
  misc_feature (16)..(17): Xaa can be any naturally occurring amino acid
  misc_feature (24)..(27): Xaa can be any naturally occurring amino acid
  misc_feature (31)..(33): Xaa can be any naturally occurring amino acid
  misc_feature (35)..(35): Xaa can be any naturally occurring amino acid
  misc_feature (41)..(41): Xaa can be any naturally occurring amino acid
  misc_feature (44)..(44): Xaa can be any naturally occurring amino acid
  misc_feature (63)..(63): Xaa can be any naturally occurring amino acid
  misc_feature (85)..(85): Xaa can be any naturally occurring amino acid
  Coding DNA Sequence Number=SeqID_2358
GGVCGXXXXXSXXXIXXLTTHNLXXXXCPPXXXTXYTTHLXILXFFLSIRGVPHNCSTSDIRXITHSSTTICGGGERREWRNNRXQSVLTVFIANCWYV

SEQ ID NO: 6053 - protein, 105 aa, Glycine max
  misc_feature (74)..(74): Xaa can be any naturally occurring amino acid
  Coding DNA Sequence Number=SeqID_2360
  Gene Ontology: Mol. function=transporter activity; Cellular component= membrane; Biological process=oligopeptide transport
  Homolog annotation: Hit_ID=A7Q2Q4; Match level="QueryCoverage=100%, HitCoverage=16%, E-value=1e-28, Identity=57%"; Hit description =Chromosome chr1 scaffold_46, whole genome shotgun sequence
MFCSIIMFFVGTRIYVHVKPEGSIFTSIAQVLVAAYRKRKVELPSEKHVDGVFYDPPLTGTQVFLKLPLTNQFXCLNKAAVIMEGEQNPDGSRANNWKVVIIQQV

SEQ ID NO: 6054 - protein, 60 aa, Glycine max
  misc_feature (6)..(7): Xaa can be any naturally occurring amino acid
  Coding DNA Sequence Number=SeqID_2361
  Homolog annotation: Hit_ID=A7PKY5; Match level="QueryCoverage=96%, HitCoverage=9%, E-value=1e-20, Identity=81%"; Hit description =Chromosome chr7 scaffold_20, whole genome shotgun sequence
SVREQXXYKNPENNSCWRRPPVEEVLAKLTTNFNKVHSRQCADEAELAEHVVGLTCSLAA

SEQ ID NO: 6055 - protein, 184 aa, Glycine max
  misc_feature (43)..(43): Xaa can be any naturally occurring amino acid
  misc_feature (145)..(145): Xaa can be any naturally occurring amino acid
  misc_feature (169)..(169): Xaa can be any naturally occurring amino acid
  misc_feature (176)..(177): Xaa can be any naturally occurring amino acid
  Coding DNA Sequence Number=SeqID_2362
  Subcellular localization annotation: CTP_CleavageSite=73; ConfidenceScore=5.13e-01
LYTRIWFIDILIARVDFVIATMYGVVRSSCTRSTVSLFVHCTXSPSLISVLTTCVMWRIIFSRRISTTSRDDYCSAVANHCNFDFHLLHILSTPLHTLRLFTAVSLRMCILIVFSPQYTSMRSVITVLVTDISATYIYSHSYIYXPTTLLYNMAQSGARHTLTHHYTQXRARPRQXXSRRPAVR

SEQ ID NO: 6056 - protein, 190 aa, Glycine max
  misc_feature (113)..(113): Xaa can be any naturally occurring amino acid
  misc_feature (162)..(162): Xaa can be any naturally occurring amino acid
  misc_feature (164)..(164): Xaa can be any naturally occurring amino acid
  misc_feature (174)..(174): Xaa can be any naturally occurring amino acid
  Coding DNA Sequence Number=SeqID_2364
  Gene Ontology: Mol. function=protein serine/threonine kinase activity; Cellular component=integral to membrane; Biological process=protein amino acid phosphorylation
  Homolog annotation: Hit_ID=A5BD87; Match level="QueryCoverage=86%, HitCoverage=25%, E-value=3e-50, Identity=60%"; Hit description =Putative uncharacterized protein
CNCAGKNSISIIVPIVVPIVVVIVLFIVGVCFLRKRASKKYNTFVQDSIVDDLTDVESLQFDLATVEAATDGFSDENKIGQGGFGVVYKGVFLNRQEITVKRLLVTFLLGAVXFRNEPVLVAKLHHTSLMRLWGFCLEGHETILIYEYIPNKSLDRFLFDPXKXRELDWSRRYXIIVCIARGIPDLHENS

SEQ ID NO: 6057 - protein, 66 aa, Glycine max
  Coding DNA Sequence Number=SeqID_2365
AFSHPKAACQGTSINLRQRTNAGYKFNEATGCHSRILQHGSRNDESKQIEAAQAKDHSSLMPVELD

SEQ ID NO: 6058 - protein, 168 aa, Glycine max
  misc_feature (29)..(29): Xaa can be any naturally occurring amino acid
  misc_feature (62)..(62): Xaa can be any naturally occurring amino acid
  misc_feature (79)..(79): Xaa can be any naturally occurring amino acid
  misc_feature (105)..(105): Xaa can be any naturally occurring amino acid
  misc_feature (140)..(140): Xaa can be any naturally occurring amino acid
  Coding DNA Sequence Number=SeqID_2367
YIITSICRLTFLLYYIIVYHTSSMHPLIXLYSHVINHLTELRETRSYSTRHYNRAVPIRLHXRTTERSRWITTQSSHLXYHLAPLPTIPSKLRHTPPLLITHTIXLHMTYYIATIPTNTAHVLSLRRLHSTSFLSYYTIXTAQCIYATPFRIYSLRDHHIIRYAIPLL

SEQ ID NO: 6059 - protein, 129 aa, Glycine max
  Coding DNA Sequence Number=SeqID_2369
LLGRSFIETHALTVTITNLLQVDGMKLRIWYHLYPLYDNYLYIILHPSKDKAVCWIQVVIYMITDHNIYLIPLQHPTTSPHPKICITYHSLSPHPPPALHTFLDSSYLFNCAVLSSSALYDHLVFNIIS

SEQ ID NO: 6060 - protein, 125 aa, Glycine max
  Coding DNA Sequence Number=SeqID_2371
  Gene Ontology: Mol. function=long-chain-fatty-acid-CoA ligase activity; Cellular component=endoplasmic reticulum membrane; Biological process=metabolic process
  Homolog annotation: Hit_ID=O65748; Match level="QueryCoverage=98%, HitCoverage=75%, E-value=1e-40, Identity=67%"; Hit description=Acyl -coA synthetase
DRKKNIFKLSQGEYVAVENLENIYVQASSVESIWVYGNSFESYLVAIVNPSKQALDKWAEDNDITADFNSLCEDSRTTTYILAPLRRMAEVTTPTGPHFIKAVLLHPLPFDMERALLTPPSKRPD

SEQ ID NO: 6061 - protein, 69 aa, Glycine max
  Coding DNA Sequence Number=SeqID_2372
  Gene Ontology: Mol. function=histone acetyltransferase activity; Cellular component=nucleus; Biological process=regulation of transcription, DNA-dependent
  Homolog annotation: Hit_ID=A2WMS6; Match level="QueryCoverage=84%, HitCoverage=4%, E-value=4e-15, Identity=58%"; Hit description =Putative uncharacterized protein
MKKLFYHGVRCAIRNQGGCRNCVFMWRLLLTHSKQCDHGDCSVPRCRDLKVFMGKAKMVTAGPCCAMEC

SEQ ID NO: 6062 - protein, 456 aa, Glycine max
  Coding DNA Sequence Number=SeqID_2373
  Gene Ontology: Mol. function=methyltransferase activity; Cellular component=nucleus; Biological process=rRNA processing
  Homolog annotation: Hit_ID=A7P8Y6; Match level="QueryCoverage=96%, HitCoverage=52%, E-value=1e-118, Identity=53%"; Hit description =Chromosome chr3 scaffold_8, whole genome shotgun sequence
  Pfam annotation: Domain name=Spb1_C; Domain location=277-452; Score =187.3; E_value=4e-53; Accession=PF07780.3; Description=Spb1 C -terminal domain
KALSPTQKPDSTTTEQMGNEPKVDEEDRILNEMEELTYVMDRKKKRAKKLLAKRRAKDKARKATGMQMDAIDDGYVDQELFALSSIKGKKDLVAVDNTEYEGDEGELEDSENEETHESPEHSSGDLEDSDEERKRYNEQMEDLMDKAYERFVIRKEGSAKQRKRIKKSYDAKDQLLEGGEDDDIVQSKYDSDEDQGDQEANPLMVPLNDGAELTQEEVMNKWFSQDVFAEAAEEGDFEKDESKDEMDIDEPKEKISIAKKVKENKTAAPAVVAHPQPQPSKAGDDFEIVPAPDTDSSDDSSSDEWEEDIEAKAEILAYAKKMMRKKQREHLLDDAYNKYMFDDEGLPKWFLDEERRHRQPIKPITKEEIAAMKAQFKEIDARPAKKVAEAKARKKRVAMRKLEKVRKKANAISDQTEISDRSKRKQIEQLYKRAVPKRPKGICIGQVLIPSKGWQG

SEQ ID NO: 6063 - protein, 103 aa, Glycine max
  misc_feature (9)..(9): Xaa can be any naturally occurring amino acid
  misc_feature (15)..(15): Xaa can be any naturally occurring amino acid
  misc_feature (17)..(17): Xaa can be any naturally occurring amino acid
  misc_feature (36)..(36): Xaa can be any naturally occurring amino acid
  misc_feature (39)..(39): Xaa can be any naturally occurring amino acid
  misc_feature (62)..(62): Xaa can be any naturally occurring amino acid
  misc_feature (101)..(101): Xaa can be any naturally occurring amino acid
  Coding DNA Sequence Number=SeqID_2374
CVLCMNGVXDPRCIXPXSVMIMLCLLVRALVLCLCXTPXHISARSRSLCSTLQPIPLSPPLXYSDSLFNDRRTTQASHLALLCCMISALPTTCDSIFYLYXHL

SEQ ID NO: 6064 - protein, 150 aa, Glycine max
  misc_feature (98)..(98): Xaa can be any naturally occurring amino acid
  misc_feature (105)..(105): Xaa can be any naturally occurring amino acid
  misc_feature (108)..(108): Xaa can be any naturally occurring amino acid
  misc_feature (125)..(125): Xaa can be any naturally occurring amino acid
  misc_feature (133)..(134): Xaa can be any naturally occurring amino acid
CSWPEFAHYWYLITHFSDFQLACLGSFFLHEGVFFLSGLPFIWLERAGWMSKYKIQAKNNTPAAQEKCIVRLLLYHFGVNLPVMVFSYPVFKYMDMQXSCPLPSXKVXLISIVFDFILEDFIFYXRHTILRTXXVYKHIHNIHHEYTSRH

SEQ ID NO: 6065 - protein, 187 aa, Glycine max
  misc_feature (13)..(13): Xaa can be any naturally occurring amino acid
  misc_feature (16)..(16): Xaa can be any naturally occurring amino acid
  misc_feature (32)..(32): Xaa can be any naturally occurring amino acid
  misc_feature (54)..(54): Xaa can be any naturally occurring amino acid
  misc_feature (105)..(105): Xaa can be any naturally occurring amino acid
  misc_feature (116)..(116): Xaa can be any naturally occurring amino acid
  misc_feature (123)..(123): Xaa can be any naturally occurring amino acid
  misc_feature (128)..(128): Xaa can be any naturally occurring amino acid
  misc_feature (149)..(149): Xaa can be any naturally occurring amino acid
  Coding DNA Sequence Number=SeqID_2377
  Subcellular localization annotation: CTP_CleavageSite=70; ConfidenceScore=5.23e-01
ISPRPRLINAALXLTXARRVVLIQSASGYALXISPRLVRLLRTASLTAARRRFXLDFIRPHRLRPVRHIRASSRREPRLSSIYTLHHITLLSYSLRLSARTAHGXSGVSTSDRQLXSALTHCXRMMPXLTTIVDPRLTDPPSLTSHKHXASTYSSGLASSSAREPPRTLTILHSHPAYLCPLPPYVL

SEQ ID NO: 6066 - protein, 97 aa, Glycine max
  misc_feature (40)..(42): Xaa can be any naturally occurring amino acid
  misc_feature (60)..(60): Xaa can be any naturally occurring amino acid
  misc_feature (70)..(70): Xaa can be any naturally occurring amino acid
  misc_feature (90)..(90): Xaa can be any naturally occurring amino acid
  misc_feature (93)..(94): Xaa can be any naturally occurring amino acid
  Coding DNA Sequence Number=SeqID_2379
  Subcellular localization annotation: CTP_CleavageSite=17; ConfidenceScore=5.37e-01
RVRSMSLSSVYTTIVVVALAASSRPTFTPISLREKMSQTXXXSPARRSMTIIQMKEKKDXYCCRFTSLVXILRGGGVSLVYLLYVARGGXGGXXATT

SEQ ID NO: 6067 - protein, 166 aa, Glycine max
  Coding DNA Sequence Number=SeqID_2381
  Gene Ontology: Mol. function=aspartate kinase activity; Cellular component=chloroplast; Biological process=amino acid biosynthetic process
  Homolog annotation: Hit_ID=A2WYM3; Match level="QueryCoverage=77%, HitCoverage=27%, E-value=4e-20, Identity=47%"; Hit description =Aspartokinase
  Subcellular localization annotation: CTP_CleavageSite=47; ConfidenceScore=5.34e-01
MAIALRFAATPPRLAAPIPPTSAPRAHGGVVRVGAQGGTRCGRRLAMAAADSARCRAKREGDGDGVLAGVAVHGGTGAEGEDQLSVVMKFGGSSVSSAAKMKEVAGLIQAFPEERPVVVLSAMGKTTNLLLLVRLLSGHFFRLTAKKSCKAHCFSTSRIFSHGSVS

SEQ ID NO: 6068 - protein, 112 aa, Glycine max
  misc_feature (19)..(19): Xaa can be any naturally occurring amino acid
  misc_feature (56)..(56): Xaa can be any naturally occurring amino acid
  misc_feature (90)..(90): Xaa can be any naturally occurring amino acid
  Coding DNA Sequence Number=SeqID_2382
SFCSRIALPLTIDSHTVTXRLSIHVIERVQYMRHIMYHECHSHHTQSYDRLSRNRXRVGGSQRTYSMIHPDIDILSVMYQLVISNIVFLXSIDANCPRGSPSRSYSVARAIV

SEQ ID NO: 6069 - protein, 76 aa, Glycine max
  misc_feature (31)..(31): Xaa can be any naturally occurring amino acid
  misc_feature (63)..(63): Xaa can be any naturally occurring amino acid
  Coding DNA Sequence Number=SeqID_2384
  Gene Ontology: Mol. function=translation initiation factor activity; Cellular component=protein complex; Biological process=translation
  Homolog annotation: Hit_ID=A9PCS2; Match level="QueryCoverage=100%, HitCoverage=26%, E-value=1e-18, Identity=67%"; Hit description =Putative uncharacterized protein
MLHMLVLIDDIYKYVKDVVEGLVAPATIIGXVISTAVGSLPQVSPSVFDKLVNDSWPDPLLLXYLSSIPRTQLSLA

SEQ ID NO: 6070 - protein, 157 aa, Glycine max
  misc_feature (41)..(41): Xaa can be any naturally occurring amino acid
  misc_feature (66)..(66): Xaa can be any naturally occurring amino acid
  Coding DNA Sequence Number=SeqID_2385
  Gene Ontology: Mol. function=oxidoreductase activity; Cellular component=cytosol; Biological process=metabolic process
  Homolog annotation: Hit_ID=A9PG43; Match level="QueryCoverage=98%, HitCoverage=44%, E-value=3e-42, Identity=59%"; Hit description =Putative uncharacterized protein
YIEKVDLLSNKCGLDGGFMYKEDPGMNAALKRLFPEGIEVXLMNVGGKTLATVLLNMRVRGGIAVXGMISQYNLTLLEGVTNLSQIRYKWIIMQVFSFMDFARIYLKFLEFFLTNIREGKVVYVEDICEGHENGPSTLVDLCSGRNAGKQVLVVSHE

SEQ ID NO: 6071 - protein, 421 aa, Glycine max
  Coding DNA Sequence Number=SeqID_2386
  Gene Ontology: Mol. function=translation initiation factor activity; Cellular component=nucleus; Biological process=regulation of alternative nuclear mRNA splicing, via spliceosome
  Homolog annotation: Hit_ID=UPI000051A9CB; Match level="QueryCoverage =99%, HitCoverage=99%, E-value=0.0, Identity=82%"; Hit description =PREDICTED: similar to Eukaryotic initiation factor 4A (ATP-dependent RNA helicase ...
  Homolog annotation: Hit description=eIF4A) (eIF-4A) isoform 2
  Pfam annotation: Domain name=DEAD; Domain location=72-238; Score =227.4; E_value=3.3e-65; Accession=PF00270.19; Description=DEADDEAH box helicase
  Pfam annotation: Domain name=Helicase_C; Domain location=306-382; Score=126.2; E_value=9.8e-35; Accession=PF00271.21; Description =Helicase conserved C-terminal domain
  Pfam module annotation: Pfam domain module=DEAD::Helicase_C; Domain location=72-238::306-382
MSVNSGERREDWAGDSKNGPGDKKPVYDGVSSMDPDGLIDSNWEEVVDNFDDMNLKEQLLRGIYAYGFEKPSAIQQRAIIPCIRGHDVIAQAQSGTGKTATFSISILQQIDTSSRECQALILAPTRELAQQIQKVVIALGDFMQANCHACIGGTNVREDMRKLESGVHVVVGTPGRVYDMINRRSLRTSSIKIFVLDEADEMLSRGFKDQIHDVFKTLKPEVQVILLSATMPTEVHDVSKCFMRNPIKILVKKEELTLEGIKQFFVFVEKEDWKLETLCDLYDTLSITQAVIFCNTRRKVDWLTDSMQTKDFTVSAMHGDMEQRERDLIMRQFRTGSSRVLITTDLLARGIDVQQVSLVINYDLPSNRENYIHRIGRGGRFGRKGVAINFVTENDKRVLSDIEHFYNTTIHEMPMNVADLI

SEQ ID NO: 6072 - protein, 107 aa, Glycine max
  misc_feature (9)..(9): Xaa can be any naturally occurring amino acid
  misc_feature (54)..(54): Xaa can be any naturally occurring amino acid
  misc_feature (65)..(65): Xaa can be any naturally occurring amino acid
  misc_feature (88)..(88): Xaa can be any naturally occurring amino acid
  misc_feature (106)..(106): Xaa can be any naturally occurring amino acid
  Coding DNA Sequence Number=SeqID_2387
CMSIYRPIXAYSLILEICGVYVYVIAVILRCVYLQRLLSIDIESASYVSFSSLXSIHSVRSIYTXCDDLTKICHCSNIILSTCVDESXLLLDVCACHFVYIYNVLXV

SEQ ID NO: 6073 - protein, 142 aa, Glycine max
  misc_feature (1)..(1): Xaa can be any naturally occurring amino acid
  misc_feature (85)..(85): Xaa can be any naturally occurring amino acid
  Coding DNA Sequence Number=SeqID_13
  Gene Ontology: Mol. function=nucleotide binding; Cellular component =intracellular; Biological process=hermaphrodite genitalia development
  Homolog annotation: Hit_ID=A1X875; Match level="QueryCoverage=63%, HitCoverage=18%, E-value=2e-29, Identity=65%"; Hit description =Putative nuclear GTPase
XRLVLLLNKIDLVPKEALEKWLKYLREELPTVAFKCSTQQQRSNLSDCLGADTLIKLLKNYSRSHEKSITVGLIALSSVGETCLXAYLHRLHRSQGRLRRWSRLFLRDALLYSMPCSLRPPSAILRSGTARVCSSCLILHLL

SEQ ID NO: 6074 - protein, 130 aa, Glycine max
  misc_feature (14)..(14): Xaa can be any naturally occurring amino acid
  misc_feature (19)..(19): Xaa can be any naturally occurring amino acid
  misc_feature (40)..(40): Xaa can be any naturally occurring amino acid
  misc_feature (43)..(43): Xaa can be any naturally occurring amino acid
  misc_feature (52)..(52): Xaa can be any naturally occurring amino acid
  misc_feature (111)..(111): Xaa can be any naturally occurring amino acid
  misc_feature (124)..(124): Xaa can be any naturally occurring amino acid
  misc_feature (127)..(127): Xaa can be any naturally occurring amino acid
  Coding DNA Sequence Number=SeqID_14
NADDTAPSTRHTVXHSYAXHDAVRESRESGGVRRAQTDAXARXTTTRLPINXRSISRITRINEQVHDTTTQLSGGAHARTTRSHAAGSAPARERTLGVVASRRMTQIPACXRHVASERPCDRDXMCXTSL

SEQ ID NO: 6075 - protein, 74 aa, Glycine max
  misc_feature (51)..(52): Xaa can be any naturally occurring amino acid
  Coding DNA Sequence Number=SeqID_16
  Homolog annotation: Hit_ID=A2YMP3; Match level="QueryCoverage=100%, HitCoverage=97%, E-value=1e-36, Identity=95%"; Hit description =Putative uncharacterized protein
MVFFCFLVDQRRKVRSSKPAAGICSRCGGCASVADMETATRLCYLLTVHRXXWRAIICTFCGAMLKSYRHYRLY

SEQ ID NO: 6076 - protein, 107 aa, Glycine max
  misc_feature (4)..(15): Xaa can be any naturally occurring amino acid
  misc_feature (18)..(18): Xaa can be any naturally occurring amino acid
  misc_feature (20)..(21): Xaa can be any naturally occurring amino acid
  misc_feature (23)..(24): Xaa can be any naturally occurring amino acid
  misc_feature (31)..(33): Xaa can be any naturally occurring amino acid
  misc_feature (36)..(39): Xaa can be any naturally occurring amino acid
  misc_feature (41)..(42): Xaa can be any naturally occurring amino acid
  misc_feature (44)..(44): Xaa can be any naturally occurring amino acid
  misc_feature (46)..(46): Xaa can be any naturally occurring amino acid
  misc_feature (50)..(50): Xaa can be any naturally occurring amino acid
  misc_feature (54)..(54): Xaa can be any naturally occurring amino acid
  misc_feature (59)..(59): Xaa can be any naturally occurring amino acid
  misc_feature (65)..(66): Xaa can be any naturally occurring amino acid
  misc_feature (69)..(69): Xaa can be any naturally occurring amino acid
  misc_feature (72)..(72): Xaa can be any naturally occurring amino acid
  misc_feature (77)..(78): Xaa can be any naturally occurring amino acid
  misc_feature (80)..(85): Xaa can be any naturally occurring amino acid
  misc_feature (87)..(91): Xaa can be any naturally occurring amino acid
  Coding DNA Sequence Number=SeqID_17
  Subcellular localization annotation: CTP_CleavageSite=92; ConfidenceScore=5.33e-01
FFFXXXXXXXXXXXXLFXLXXSXXPSPSLFXXXPLXXXXLXXLXLXPPCXSSLXSPTPXPSLPTXXPLXLLXARALXXYXXXXXXLXXXXXNCGDSSDCTDYTHVGE

SEQ ID NO: 6077 - protein, 104 aa, Glycine max
  misc_feature (11)..(11): Xaa can be any naturally occurring amino acid
  misc_feature (32)..(32): Xaa can be any naturally occurring amino acid
  misc_feature (35)..(35): Xaa can be any naturally occurring amino acid
  misc_feature (40)..(42): Xaa can be any naturally occurring amino acid
  misc_feature (46)..(46): Xaa can be any naturally occurring amino acid
  misc_feature (63)..(63): Xaa can be any naturally occurring amino acid
  misc_feature (76)..(76): Xaa can be any naturally occurring amino acid
  misc_feature (85)..(85): Xaa can be any naturally occurring amino acid
  misc_feature (92)..(92): Xaa can be any naturally occurring amino acid
  misc_feature (96)..(96): Xaa can be any naturally occurring amino acid
  misc_feature (104)..(104): Xaa can be any naturally occurring amino acid
  Coding DNA Sequence Number=SeqID_19
ATSTYESQHHXAHRARAILERAHWLESATRDXHIXLDVIXXXVPSXHCTRSLQQRVEIQNDRXHTQPLSMRSTRPXACHSLRECXLCMRQRXTCHXQRKLSITX

SEQ ID NO: 6078 - protein, 128 aa, Glycine max
  misc_feature (1)..(1): Xaa can be any naturally occurring amino acid
  misc_feature (10)..(10): Xaa can be any naturally occurring amino acid
  misc_feature (17)..(17): Xaa can be any naturally occurring amino acid
  misc_feature (38)..(38): Xaa can be any naturally occurring amino acid
  misc_feature (45)..(45): Xaa can be any naturally occurring amino acid
  misc_feature (112)..(112): Xaa can be any naturally occurring amino acid
  Coding DNA Sequence Number=SeqID_21
XSSVGRLYTXLLSCFCXPTSSLYLLHHIFGVVYIFYVXVQRAYGXQPSRLVYLYMSYVGTVESARVVRCLIALRWWMSCVIYSDDSNYTTHIDAASHDMRLSHPIPSSPRDXAVAQPHRHPRDIYSNI

SEQ ID NO: 6079 - protein, 153 aa, Glycine max
  misc_feature (24)..(24): Xaa can be any naturally occurring amino acid
  misc_feature (41)..(41): Xaa can be any naturally occurring amino acid
  misc_feature (82)..(82): Xaa can be any naturally occurring amino acid
  misc_feature (89)..(89): Xaa can be any naturally occurring amino acid
  misc_feature (153)..(153): Xaa can be any naturally occurring amino acid
  Coding DNA Sequence Number=SeqID_23
LLLIEYTYVLTRRRTITHARTNTXRVRVRVLSIIHTTICHXTRAPRPHDRDISDCRVIVLSTLVMISIHIMILMWCMRPVTXLSPLSYXLHPQSTRTRMCVLYISKSYIHIHCVVYYTRTIYDLYLLSLSHYLRVLCDSCGAHHNNIISCSIX

SEQ ID NO: 6080 - protein, 120 aa, Glycine max
  Coding DNA Sequence Number=SeqID_229
GSPCWWVPPRLKSMIWGAFCFVTHLEKSVFGFGQLWGRPPFFFLFRMGKAGQGEFFLRPQNLNFPGVFQFRGGGFFLGGAAHLFFFFLCFFFFFFFFFFFFFFFFFFFFFFFFFFFFFLI

SEQ ID NO: 6081 - protein, 125 aa, Glycine max
  misc_feature (70)..(70): Xaa can be any naturally occurring amino acid
  misc_feature (99)..(99): Xaa can be any naturally occurring amino acid
  misc_feature (116)..(116): Xaa can be any naturally occurring amino acid
  Coding DNA Sequence Number=SeqID_231
  Subcellular localization annotation: CTP_CleavageSite=31; ConfidenceScore=5.38e-01
RVSGVFSYLASLSVPPSTRLVSYLYLFYIFCCAYITVFARRSSSSLLSLFSPLSLRFFPSTFSSLAGSDXLYLVYHLVVSYLHPSAYYHRAAFTISTFXLPSSSPVRMYMRVVFDXNTHSACRGR

SEQ ID NO: 6082 - protein, 250 aa, Glycine max
  Coding DNA Sequence Number=SeqID_233
ASVVLVWANNNRLVYTTTTAAIHPEHRKWMEQGAPQMPPTSKSRSVRALQLQAAAMVVQVGPAAVMRVTTTATAMRVGTAVMRVGAAALAMPPTTPPPPPPPPPPPSPAPPPPPSCPPGAPGPCPLSTISYPLASPHLSATPLRPSRSAPPSHLDSPYSSTPLLPSSPPISLSSPLHSPPGTPLRRLLPPFIRRWRSPPTGRWSHSRLWFLSFTLITSPSPPLSPYSPPSPSRPFPLPFFSHYFCLSSAL

SEQ ID NO: 6083 - protein, 54 aa, Glycine max
  Coding DNA Sequence Number=SeqID_235
FTTTQKHPIEQSDKQSSILTVTHQNFPNKYPFGIVCTVQISIRQLQTKTKETAP

SEQ ID NO: 6084 - protein, 140 aa, Glycine max
  misc_feature (19)..(19): Xaa can be any naturally occurring amino acid
  misc_feature (54)..(54): Xaa can be any naturally occurring amino acid
  misc_feature (98)..(98): Xaa can be any naturally occurring amino acid
  misc_feature (104)..(104): Xaa can be any naturally occurring amino acid
  Coding DNA Sequence Number=SeqID_237
  Subcellular localization annotation: CTP_CleavageSite=44; ConfidenceScore=5.05e-01
LSGNSQTIFSACASRAPPXASTRLHVLYGHPVSSYLFNNEPLPRQQAPMTLAGXIVLMHDGHTQRVYTELIDVEITTQEHTAWMVSTSSDRMCCVVSXCLVIVXVLHTTYDACAVCASPRSLYVTGAPDCAVGVIRRREI

SEQ ID NO: 6085 - protein, 212 aa, Glycine max
  misc_feature (15)..(16): Xaa can be any naturally occurring amino acid
  misc_feature (61)..(61): Xaa can be any naturally occurring amino acid
  misc_feature (82)..(82): Xaa can be any naturally occurring amino acid
  misc_feature (148)..(148): Xaa can be any naturally occurring amino acid
  misc_feature (206)..(206): Xaa can be any naturally occurring amino acid
  Coding DNA Sequence Number=SeqID_239
SHKEVSQLPSFQSAXXLKNTKERVPDSQKQLQNALETLQRRMLLEQQAYIIRDIVKRAQFXQDILRIPTLNSNDEVESPRPXNFSHQELRKAFIRGEDDPEIIIGEIEYPLLSMAPPSTKLDLNSKRSTSKANESKKTKRSYAKNSVXSSPDSDSSESLLDSLTVTRAETQRSETEVAYSMKEMSESFVKAIEGGKRKNKKEAVEXPKKKKK

SEQ ID NO: 6086 - protein, 138 aa, Glycine max
  Coding DNA Sequence Number=SeqID_2389
RLVGAVVGPQGIEGDGLRDGELEGPGRVKDGGGGGGSGAGAVVGDDADGGGRVGDDGVREREEVRLGGGLGRDAAERELEHHDVVALVREQVRGCLRRALAHPVGQRHHGAGHRRAGHLVLHLGLFLRRRHGFGGRVV

SEQ ID NO: 6087 - protein, 169 aa, Glycine max
  misc_feature (84)..(84): Xaa can be any naturally occurring amino acid
  misc_feature (87)..(87): Xaa can be any naturally occurring amino acid
  misc_feature (92)..(92): Xaa can be any naturally occurring amino acid
  misc_feature (102)..(102): Xaa can be any naturally occurring amino acid
  misc_feature (119)..(119): Xaa can be any naturally occurring amino acid
  misc_feature (123)..(123): Xaa can be any naturally occurring amino acid
  misc_feature (147)..(147): Xaa can be any naturally occurring amino acid
  Coding DNA Sequence Number=SeqID_2390
  Gene Ontology: Mol. function=protein binding; Cellular component =endoplasmic reticulum; Biological process=vesicle-mediated transport
  Homolog annotation: Hit_ID=Q9FFV2; Match level="QueryCoverage=92%, HitCoverage=83%, E-value=3e-55, Identity=70%"; Hit description =Transport protein particle component Bet3p-like protein
  Pfam annotation: Domain name=TRAPP_Bet3; Domain location=23-162; Score=61.4; E_value=3.1e-15; Accession=PF04051.6; Description =Transport protein particle (TRAPP) component, Bet3
MPPVAPRSGDAIFANVERVNAELFTLTYGAIVRQLLTDLEEVEEVNEQLDQMGYNIGTRLIDEFLAKSNVSRCNDFRETTDVIXQVXYKMFXLGGTASVNTXDADANMCNIVFADNPLXKIWXSFPDNCQGLYYCNILSEVIRGTLXMWSMKTGGNWPSGKNLPEDKVF

SEQ ID NO: 6088 - protein, 162 aa, Glycine max
  Coding DNA Sequence Number=SeqID_2391
IGCRFRVIVFVKDSGIIRFVDLQIHTDPNIPYSETPSGWTVVTWILEGLNEGLETRGGLSFRQEHELRSSDISNYNLPQSLFVTNPILSAHEDGFLYLRTNVSSRTSSNSRVITVDIKHGKLLDVQDFDMQRPNTYMRTAISSHLMPPVSKENLKRRATVPQ

SEQ ID NO: 6089 - protein, 151 aa, Glycine max
  misc_feature (12)..(12): Xaa can be any naturally occurring amino acid
  misc_feature (28)..(28): Xaa can be any naturally occurring amino acid
  misc_feature (30)..(30): Xaa can be any naturally occurring amino acid
  misc_feature (35)..(35): Xaa can be any naturally occurring amino acid
  misc_feature (44)..(45): Xaa can be any naturally occurring amino acid
  misc_feature (68)..(68): Xaa can be any naturally occurring amino acid
  misc_feature (70)..(70): Xaa can be any naturally occurring amino acid
  misc_feature (145)..(145): Xaa can be any naturally occurring amino acid
  Coding DNA Sequence Number=SeqID_2393
  Subcellular localization annotation: CTP_CleavageSite=58; ConfidenceScore=5.25e-01
FTMTPRSSDSLXSSYHSSYLRLLCLLAXSXAAQYXATVHSASVXXSTLHQRTVSIYVRAATLRSRACXFXSLDLINEPRSLRCVVSSSPYMAALLVLVRLLLRISLSIEPQLSIISHPRTRSVHTSEGAQSSPIHHARTPSRPLXFAHLLY

SEQ ID NO: 6090 - protein, 101 aa, Glycine max
  Coding DNA Sequence Number=SeqID_2395
ANPSGYVWYTKTKRQPLYKRKFCAQKKTCVFPSYYNTKKNNKNPKINIAQRAPSNQNEKEDDWYYKQTLSVPYHPSPIAKKKRPRNEQRRYQGRALGCPVL

SEQ ID NO: 6091 - protein, 91 aa, Glycine max
  misc_feature (63)..(63): Xaa can be any naturally occurring amino acid
  misc_feature (66)..(67): Xaa can be any naturally occurring amino acid
  misc_feature (69)..(69): Xaa can be any naturally occurring amino acid
  misc_feature (71)..(71): Xaa can be any naturally occurring amino acid
  misc_feature (74)..(75): Xaa can be any naturally occurring amino acid
  misc_feature (78)..(78): Xaa can be any naturally occurring amino acid
  misc_feature (82)..(83): Xaa can be any naturally occurring amino acid
  Coding DNA Sequence Number=SeqID_2397
KNSVALHGIWHQFHCKELPLITISTYHTTHFRIQSTGMQFKHVIISCFSRRYKVSGGRREGSXRGXXPXFXISXXFFXLSFXXYTRRRSSY

SEQ ID NO: 6092 - protein, 112 aa, Glycine max
  misc_feature (60)..(60): Xaa can be any naturally occurring amino acid
  misc_feature (64)..(64): Xaa can be any naturally occurring amino acid
  misc_feature (75)..(75): Xaa can be any naturally occurring amino acid
  misc_feature (89)..(89): Xaa can be any naturally occurring amino acid
  Coding DNA Sequence Number=SeqID_2399
SPLIITQAMIIVDTRPTAVDHSESVIISPALTYLRDNTSVYPHSTSANHQVRHPINLNSXSLSXRPLEYVLRSYXLSLISRPAFIIQGXFPPRIYNKSRAHTETNHLSLSTL

SEQ ID NO: 6093 - protein, 116 aa, Glycine max
  misc_feature (15)..(15): Xaa can be any naturally occurring amino acid
  misc_feature (32)..(32): Xaa can be any naturally occurring amino acid
  misc_feature (35)..(35): Xaa can be any naturally occurring amino acid
  misc_feature (40)..(40): Xaa can be any naturally occurring amino acid
  Coding DNA Sequence Number=SeqID_2401
  Gene Ontology: Mol. function=actin binding; Cellular component=actin cytoskeleton; Biological process=actin cytoskeleton organization and biogenesis
  Homolog annotation: Hit_ID=O65809; Match level="QueryCoverage=100%, HitCoverage=88%, E-value=1e-32, Identity=56%"; Hit description =Profilin-1
  Pfam annotation: Domain name=Profilin; Domain location=1-115; Score =87.9; E_value=3.3e-23; Accession=PF00235.9; Description=Profilin
SWQAYVDDHLLCKIXSNHLTHATIIDQDRSIXAQXTNFPXFKPKEITTINNNFNKPKSLTPTKLYINNTKYIIIQDKPNTIIRRKKGPNNITIKKTGTTLIISIYDKPITPGQYNI

SEQ ID NO: 6094 - protein, 64 aa, Glycine max
  misc_feature (17)..(18): Xaa can be any naturally occurring amino acid
  Coding DNA Sequence Number=SeqID_2402
  Homolog annotation: Hit_ID=A7QSA4; Match level="QueryCoverage=85%, HitCoverage=19%, E-value=5e-20, Identity=76%"; Hit description =Chromosome chr3 scaffold_157, whole genome shotgun sequence
GVHPCDRRRSVSEYQFXXPAVDFSLANSDEDTWWKANIRETKEELAARGLKFLNWYELGIIRNF

SEQ ID NO: 6095 - protein, 78 aa, Glycine max
  misc_feature (2)..(2): Xaa can be any naturally occurring amino acid
  misc_feature (4)..(4): Xaa can be any naturally occurring amino acid
  misc_feature (49)..(49): Xaa can be any naturally occurring amino acid
  Coding DNA Sequence Number=SeqID_2403
TXEXPHTPNTHSLLMSLYVIHLSLNTLCNISSSIYISLTVVIYILIYLXAADDTAYTAHITQLISHFSTGSISLRSSR

SEQ ID NO: 6096 - protein, 78 aa, Glycine max
  misc_feature (70)..(70): Xaa can be any naturally occurring amino acid
  Coding DNA Sequence Number=SeqID_1293
VRVSVERARDTGLMSLQAGLNAARAYISTHTTSSSSITWFGYILALNSVIIACASGEMRLLRRMRWLLRXTNYIYLYS

SEQ ID NO: 6097 - protein, 98 aa, Glycine max
  misc_feature (7)..(7): Xaa can be any naturally occurring amino acid
  misc_feature (49)..(49): Xaa can be any naturally occurring amino acid
  misc_feature (85)..(86): Xaa can be any naturally occurring amino acid
  misc_feature (96)..(96): Xaa can be any naturally occurring amino acid
  Coding DNA Sequence Number=SeqID_1295
LFFTRAXVILFRCVCSICEYRAAHTRLLLLSVVSSCISLPACCSCVVDXLFGHILRTTQTRVITSLILASHYISLHSFVIYSSLXXVLSQHYVILXTL

SEQ ID NO: 6098 - protein, 138 aa, Glycine max
  Coding DNA Sequence Number=SeqID_1297
ESLPGRNKQRWFKGPGGNHPWGTFFFFWEESAKQPGRYSRGPRGGNRQATNFGLVGTRRAAASGKPGHHILHLVDVATGAAIAFQLPPVAGREHHHHQQQQERDIQTLRHCYALLIKNRRYYWPFGMRYGSCVDLRLC

SEQ ID NO: 6099 - protein, 127 aa, Glycine max
  misc_feature (121)..(122): Xaa can be any naturally occurring amino acid
  Coding DNA Sequence Number=SeqID_1299
  Subcellular localization annotation: CTP_CleavageSite=7; ConfidenceScore=5.41e-01
CNSSFLFARHLSRCFRNIHNITHTNTKALFTTPLYTRPLHLHSATPQRTMTSMAARARRTPMRPHNCLTLVSRDQSVSDIYDGATSPRDIRIAPPVVRRRYEITRLSCDERVGVARLRHHXXIIRSC

SEQ ID NO: 6100 - protein, 141 aa, Glycine max
  misc_feature (119)..(119): Xaa can be any naturally occurring amino acid
  misc_feature (124)..(124): Xaa can be any naturally occurring amino acid
  misc_feature (130)..(130): Xaa can be any naturally occurring amino acid
  Coding DNA Sequence Number=SeqID_1301
  Gene Ontology: Mol. function=iron-sulfur cluster binding; Cellular component=mitochondrion; Biological process=iron-sulfur cluster assembly
  Homolog annotation: Hit_ID=Q9LIG6; Match level="QueryCoverage=53%, HitCoverage=26%, E-value=2e-31, Identity=93%"; Hit description=NifU -like protein 4, mitochondrial precursor
  Pfam annotation: Domain name=Nfu_N; Domain location=81-141; Score =58.4; E_value=2.5e-14; Accession=PF08712.1; Description=Scaffold protein NfuNifU N terminal
  Subcellular localization annotation: CTP_CleavageSite=22; ConfidenceScore=5.55e-01
MKGIARIVNSLSRLGGREIISRGSSSSSSSLLLVSRRSLFISAATHFPTNSRDLTSSSRSSSLLPQKWAFLGGGQRRTMFIQTQSTPNPSSLMFYPGKPVMEVGSADFPNVRSALGSPXLAKSXYSIDGXVRVFFGSDFVT

SEQ ID NO: 6101 - protein, 114 aa, Glycine max
  misc_feature (6)..(6): Xaa can be any naturally occurring amino acid
  misc_feature (59)..(59): Xaa can be any naturally occurring amino acid
  Coding DNA Sequence Number=SeqID_1302
GAYTCXAACSAQKNCGNILYYIIERRAAYIKRAHTCYIGDIIYTMRAHCVQEANIGKIXSFCAHIMTIRRRFGQRLNSRAASDKKNTYTHARVIDSPLFLPHQWQKNNIRCSGE

SEQ ID NO: 6102 - protein, 145 aa, Glycine max
  misc_feature (94)..(94): Xaa can be any naturally occurring amino acid
  misc_feature (100)..(100): Xaa can be any naturally occurring amino acid
  Coding DNA Sequence Number=SeqID_1304
IDGWRAGGWELPAHNLLLSIGHSPAEEPRHVATLGRRARRLHTRHFITQGATCGTIAPYPADALLNSAQRPAIDRIYMLTKASPWSQWLDIVCXFSPQTXAPTNSNVLATTSKAEIWGDGMTIHYSHDHPREASSMYTTHSPNER

SEQ ID NO: 6103 - protein, 63 aa, Glycine max
  Coding DNA Sequence Number=SeqID_1306
TLTASPLHGMHIVNATISQNKVNEYKASISFLNSKNNNIKLAFFHTDICIEDKQIRIQKTVYI

SEQ ID NO: 6104 - protein, 165 aa, Glycine max
  misc_feature (47)..(47): Xaa can be any naturally occurring amino acid
  misc_feature (137)..(137): Xaa can be any naturally occurring amino acid
  misc_feature (163)..(163): Xaa can be any naturally occurring amino acid
  Coding DNA Sequence Number=SeqID_2405
SLHVEDADASLLWHDPPSSFYSCTRHVTILTRRPCLVSISYSNAMLXHVHLLIPVCSYILSLTMYYVCIRLSLQQRPTSMRVLMSQYMYILVSLTRGRVSTSSRPAPPITAHRYLLTTRSQSPRLPLVVLSSAQPAXQPSRGPTTSTSDSIHTLFLRSIAIDXHI

SEQ ID NO: 6105 - protein, 76 aa, Glycine max
  misc_feature (18)..(18): Xaa can be any naturally occurring amino acid
  misc_feature (27)..(27): Xaa can be any naturally occurring amino acid
  misc_feature (61)..(61): Xaa can be any naturally occurring amino acid
  Coding DNA Sequence Number=SeqID_2407
  Gene Ontology: Mol. function=DNA binding; Cellular component=nucleus; Biological process=regulation of transcription, DNA-dependent
  Homolog annotation: Hit_ID=A7QPQ9; Match level="QueryCoverage=80%, HitCoverage=8%, E-value=2e-18, Identity=80%"; Hit description =Chromosome chr10 scaffold_138, whole genome shotgun sequence
DSCTPAVCFSSLDYSQQXRPSQELVAXDLHGLEWRFRPLYMGQPLRHLLTTGRSAFVNKKXKLVSGDAEPCLTYTI

SEQ ID NO: 6106 - protein, 393 aa, Glycine max
  Coding DNA Sequence Number=SeqID_2408
  Gene Ontology: Mol. function=nucleic acid binding; Cellular component= cytoplasm; Biological process=nervous system development
  Homolog annotation: Hit_ID=UPI0000DB6D53; Match level="QueryCoverage =25%, HitCoverage=23%, E-value=2e-20, Identity=53%"; Hit description =PREDICTED: similar to CG32169-PA isoform 2
  Pfam annotation: Domain name=RRM_1; Domain location=11-82; Score =92.6; E_value=1.2e-24; Accession=PF00076.12; Description=RNA recognition motif. (a.k.a. RRM, R
KEGANYRTKKLFVGGLTQTTTDEQFRGYFEQFGEIEDSVIMTDKETGKSRGFGFITFVSEDSVDQVIERYNDNKIDGKWVECKRAQAKDVMQAGSKKGGRHDSRGGPSDYQRHGGGGDRRRDDRSRGQGGYYQNSPTSQSGGGGGGSGRRGPRNQSGQDNYGGGYYQGGGYGGQGGYPGGPRGNYEGAPYGSYPGYDYAGGQPGYGGGDGRGPAGGYGYDQGYSAYSNPNYPNPYQNPYNPAYAGGYPGQYNPAYGQQGYDMMAANPQNANPSASATASTKGSEATSANPNQMAANPYAQGAPSGYGGEGQYNPTAYGYNPMPQGDYANSAYYGQPGMQQGQGGQPKYGGGGQVQSPSQMSGGSYQRQGQPDVGPIKGSAKKGGSEPRHYQPY

SEQ ID NO: 6107 - protein, 242 aa, Glycine max
  misc_feature (65)..(65): Xaa can be any naturally occurring amino acid
  misc_feature (73)..(73): Xaa can be any naturally occurring amino acid
  misc_feature (90)..(90): Xaa can be any naturally occurring amino acid
  misc_feature (150)..(150): Xaa can be any naturally occurring amino acid
  misc_feature (161)..(161): Xaa can be any naturally occurring amino acid
  misc_feature (164)..(164): Xaa can be any naturally occurring amino acid
  misc_feature (179)..(179): Xaa can be any naturally occurring amino acid
  misc_feature (182)..(182): Xaa can be any naturally occurring amino acid
  misc_feature (197)..(198): Xaa can be any naturally occurring amino acid
  misc_feature (212)..(212): Xaa can be any naturally occurring amino acid
  Coding DNA Sequence Number=SeqID_2409
  Homolog annotation: Hit_ID=Q5N7G7; Match level="QueryCoverage=94%, HitCoverage=100%, E-value=2e-42, Identity=48%"; Hit description =Prolyl 4-hydroxylase alpha subunit-like
  Pfam annotation: Domain name=DUF584; Domain location=99-242; Score= -6.0; E_value=2.6e-06; Accession=PF04520.4; Description=Protein of unknown function, DUF584
KEKTSHPPAQRSLAIDRARHKSSPSSERFLGTFLPRAAAGDQPASAAFELDVDDLFGSPERPRPXPRRRPLLXSSICAANPSPPRRPPGXILEALPERLEPLSPPPSASFVSTSPASPAMALPRMIPAIPRPVPSSAMHMPQCAPMNVPXARMRRPTVEAXATXASEADEDDYDVEMLXPHXMVARSPAWESPMTTXXGVGGRWTHAPMTTXWVLEGAGHTLKGRHLRQVRNAVWWKTCLLD

SEQ ID NO: 6108 - protein, 113 aa, Glycine max
  misc_feature (16)..(16): Xaa can be any naturally occurring amino acid
  misc_feature (52)..(53): Xaa can be any naturally occurring amino acid
  misc_feature (63)..(63): Xaa can be any naturally occurring amino acid
  misc_feature (72)..(72): Xaa can be any naturally occurring amino acid
  misc_feature (75)..(75): Xaa can be any naturally occurring amino acid
  misc_feature (88)..(88): Xaa can be any naturally occurring amino acid
  misc_feature (92)..(92): Xaa can be any naturally occurring amino acid
  misc_feature (96)..(96): Xaa can be any naturally occurring amino acid
  misc_feature (103)..(103): Xaa can be any naturally occurring amino acid
  Coding DNA Sequence Number=SeqID_2410
  Gene Ontology: Mol. function=hydrolase activity, acting on carbon -nitrogen (but not peptide) bonds; Biological process=nitrogen compound metabolic process
  Homolog annotation: Hit_ID=A9PJQ3; Match level="QueryCoverage=92%, HitCoverage=34%, E-value=2e-37, Identity=73%"; Hit description =Putative uncharacterized protein
TYDGRLTLGPWKRVMXGHAGANLVPLVASNRIGKEIIETEHGKSEITFYGNXXIGGPTGEIVXIADDKEEAXLIXEFDLDNMKCMRHXWGVXRDRXTDVYKGXLTLDGKNVVE

SEQ ID NO: 6109 - protein, 124 aa, Glycine max
  misc_feature (46)..(46): Xaa can be any naturally occurring amino acid
  misc_feature (88)..(88): Xaa can be any naturally occurring amino acid
  misc_feature (102)..(102): Xaa can be any naturally occurring amino acid
  misc_feature (108)..(108): Xaa can be any naturally occurring amino acid
  misc_feature (114)..(115): Xaa can be any naturally occurring amino acid
  misc_feature (119)..(119): Xaa can be any naturally occurring amino acid
  misc_feature (121)..(121): Xaa can be any naturally occurring amino acid
  Coding DNA Sequence Number=SeqID_2411
ERPKIRLWIKIRNMNVISSTVRNICFNVNITILTTVSTITLSRWCXAPSKTVTTARRSYDYPFYESDCLPDKFPSTQLLRGCRLAVGXYRESSSPSVWTKGXSASVDXSYVCLXXLTKXEXPPT

SEQ ID NO: 6110 - protein, 90 aa, Glycine max
  misc_feature (19)..(19): Xaa can be any naturally occurring amino acid
  misc_feature (64)..(64): Xaa can be any naturally occurring amino acid
  Coding DNA Sequence Number=SeqID_2413
  Gene Ontology: Mol. function=magnesium ion binding; Cellular component=integral to membrane; Biological process=photosynthesis, light harvesting
  Homolog annotation: Hit_ID=A2ZV40; Match level="QueryCoverage=100%, HitCoverage=36%, E-value=1e-27, Identity=68%"; Hit description =Putative uncharacterized protein
GVKFGEAVWFKAGAQIFSXGGLDYLGNPNLIHAQSILAIWAVHVVLLGSVEGNTDSGRPFVERXDPFYPSGALRFSSLVDDSVAFVELNV

SEQ ID NO: 6111 - protein, 99 aa, Glycine max
  Coding DNA Sequence Number=SeqID_2414
  Subcellular localization annotation: CTP_CleavageSite=81; ConfidenceScore=5.04e-01
RTIHLKSDLFTGEKPVATKVSSGRFTVAKKKPQRNIPLRTKPTDTKGIQAPKQPQKTPRPYKFINPRSGRSGPRTEPTTVLCQATHQGRQATKGQAQTT

SEQ ID NO: 6112 - protein, 217 aa, Glycine max
  misc_feature (169)..(169): Xaa can be any naturally occurring amino acid
  Coding DNA Sequence Number=SeqID_2416
  Homolog annotation: Hit_ID=A7PY94; Match level="QueryCoverage=90%, HitCoverage=90%, E-value=1e-56, Identity=59%"; Hit description =Chromosome chr15 scaffold_37, whole genome shotgun sequence
  Pfam annotation: Domain name=DUF1499; Domain location=65-206; Score =15.8; E_value=3.1e-06; Accession=PF07386.2; Description=Protein of unknown function (DUF1499)
SLSSARGTFPNFNIHILKNNKGSFSRRFQLSQKLDDDNFIDKIKRRELILESGELATIGAIFNFRGKKPDYLGVQKNQPALALCPATKNCISTSENVTNLTHYTPPWNYNPEGRKDHVSKEAMEELIDVIESTILPENFTPRIVERTEDYLRLEYQSVYKPQILTSMSXYHCMQRDSVVEYRSASRLGNFDFHVNRKRIKALRLELEKKGWASQDSI

SEQ ID NO: 6113 - protein, 142 aa, Glycine max
  misc_feature (124)..(124): Xaa can be any naturally occurring amino acid
  Coding DNA Sequence Number=SeqID_2417
PQERKTSRHPRKRTTQGSLVTKFVEKYGKDQKGDKDFVNKQVVEFMKNEKLTEENLKKLENKIKVGVTAQPADAASVKSAAKSEKQSHQVGQHQYAHDHQGVHHHHHHDDDNVSTTSSQKPKSXYAQGDSDDEWATMMKYDT

SEQ ID NO: 6114 - protein, 72 aa, Glycine max
  Coding DNA Sequence Number=SeqID_2419
  Subcellular localization annotation: CTP_CleavageSite=9; ConfidenceScore=5.33e-01
NPPPTLPPLAQKKPPPPNTEEGSQEIRNPPPFSFPPTPFSVLHFPLVASSVFWANPSSRGHRMTLVSAKFCQ

SEQ ID NO: 6115 - protein, 164 aa, Glycine max
  misc_feature (6)..(6): Xaa can be any naturally occurring amino acid
  misc_feature (80)..(81): Xaa can be any naturally occurring amino acid
  misc_feature (131)..(131): Xaa can be any naturally occurring amino acid
  misc_feature (133)..(141): Xaa can be any naturally occurring amino acid
  misc_feature (148)..(148): Xaa can be any naturally occurring amino acid
  misc_feature (153)..(153): Xaa can be any naturally occurring amino acid
  misc_feature (155)..(158): Xaa can be any naturally occurring amino acid
  Coding DNA Sequence Number=SeqID_2421
  Subcellular localization annotation: CTP_CleavageSite=15; ConfidenceScore=5.18e-01
ARFKRXQQERVRVVLAVISMSFSMLLSLLVSLVILSPAARCVSPSIPPPFLRRPSPPSYSLSRVELLDRNKCGDICGRGXXPTLPAVASAERAQGGGAWHLSVSASLHSPHSPLTHPAFLAYPNGSATRPXSXXXXXXXXXGGNGGRXRRRGXRXXXXVPGPPK

SEQ ID NO: 6116 - protein, 126 aa, Glycine max
  Coding DNA Sequence Number=SeqID_2423
  Gene Ontology: Mol. function=metal ion binding; Cellular component =intracellular; Biological process=inflorescence development
  Homolog annotation: Hit_ID=A7R4C1; Match level="QueryCoverage=77%, HitCoverage=23%, E-value=1e-47, Identity=85%"; Hit description =Chromosome undetermined scaffold_648, whole genome shotgun sequence
  Pfam annotation: Domain name=PHD; Domain location=4-54; Score=-6.9; E_ value=0.085; Accession=PF00628.19; Description=PHD-finger
  Pfam annotation: Domain name=zf-B_box; Domain location=1-47; Score =38.1; E_value=3.1e-08; Accession=PF00643.14; Description=B-box zinc finger
  Pfam annotation: Domain name=zf-B_box; Domain location=48-90; Score =3.0; E_value=0.06; Accession=PF00643.14; Description=B-box zinc finger
  Pfam module annotation: Pfam domain module=PHD::zf-B_box::zf-B_box; Domain location=4-54::1-47::48-90
MGYICDFCGDQRSMVYCRSDAACLCLSCDRNVHSANALSKRHSRTLLCERCNSQPAFVRCVEEKISLCQNCDWLGHGTSTSSSTHKRQAINCYSGCPSHRFLIHNAQCSSVIGFLFRRSNSQLQLK

SEQ ID NO: 6117 - protein, 112 aa, Glycine max
  Coding DNA Sequence Number=SeqID_2424
RDIVPRLDRRTHINTPPRAQYEERDVRPVDTHDSRKARVCDIYNNIRYESVHTDSRHRHYTAATTVSSVHSSLLFTRCDARTQHSTYTPHAYLPSRVDGDRTNINEWSDSEL

SEQ ID NO: 6118 - protein, 124 aa, Glycine max
  Coding DNA Sequence Number=SeqID_2425
TVFWPHPRQAREWCHRHRRRRHKPGIAARRGTPSSLAAASAAAAAAATTSTITTSIIPAPSSTISVPITGNPKTRSSAQERTMRRRLPCGRRGTTSGTGTAPTDSLDLSAAHARLSEGEEKGEG

SEQ ID NO: 6119 - protein, 165 aa, Glycine max
  misc_feature (52)..(52): Xaa can be any naturally occurring amino acid
  misc_feature (67)..(67): Xaa can be any naturally occurring amino acid
  misc_feature (72)..(72): Xaa can be any naturally occurring amino acid
  misc_feature (86)..(87): Xaa can be any naturally occurring amino acid
  misc_feature (99)..(99): Xaa can be any naturally occurring amino acid
  misc_feature (106)..(106): Xaa can be any naturally occurring amino acid
  misc_feature (109)..(110): Xaa can be any naturally occurring amino acid
  Coding DNA Sequence Number=SeqID_2427
LKYYYSLFFFFLLLLPTTTTLHHHHPHHRRLHIITNPLHLHLHLHHLLTTIXVLLHHLPLLILPITXNPLHXPRHILHLLTLREPXXTFSSPPPPYIHXHTSSFPXSAXXYITIPLHSGLYLASHFHLSTVSLNGEAPSGRPGSSSIENKAVYFGPREPFSPPKF

SEQ ID NO: 6120 - protein, 137 aa, Glycine max
  Coding DNA Sequence Number=SeqID_2429
  Homolog annotation: Hit_ID=Q84MH1; Match level="QueryCoverage=100%, HitCoverage=21%, E-value=3e-58, Identity=79%"; Hit description =Expressed protein
NFSRDQLGNIAWSYAVLGQLDRQFFSHIWNTLSQHEEQRVSDQYREDIMFASQVYLANQSLKLEYPHLNMGLRDDLEEKITKAVKSKRFNQKTTSLFQKDVGRLLYSTGHEWVREYTVDGYTVDAVLVDEKLASEID

SEQ ID NO: 6121 - protein, 139 aa, Glycine max
  misc_feature (74)..(74): Xaa can be any naturally occurring amino acid
  misc_feature (118)..(118): Xaa can be any naturally occurring amino acid
  Coding DNA Sequence Number=SeqID_2430
  Gene Ontology: Mol. function=protein binding; Cellular component =transcription factor complex; Biological process=positive regulation of transcription, DNA-dependent
  Homolog annotation: Hit_ID=UPI00006CC0DE; Match level="QueryCoverage =67%, HitCoverage=10%, E-value=1e-17, Identity=44%"; Hit description =TPR Domain containing protein
RVSYVGPPPHELGNAHLRSNQYGPGLRQFKFIEKHFQDFYEDQFDFHTYCLRKYDLRAYVALLRKEDDIYNNKXYIKSAISMIKGLQAYDKYLPELQRQEEEEKKMLEGMDAHERKRXKKEKEGKDKDSDAAKEKLDLS

SEQ ID NO: 6122 - protein, 129 aa, Glycine max
  Coding DNA Sequence Number=SeqID_2431
  Subcellular localization annotation: CTP_CleavageSite=22; ConfidenceScore=5.16e-01
PLLDPQGFTFILPAHFCLGIFKGNHFSPGKPLSPFFPKLFNPPLNEKRLPLRAPVPNIFPGAQPHKRGAPPQFFFFYFIFFFFFFFFFFPPFFFFFFFFFFFFFFFFFFFFFFLYLNTLIAHRSLKGCT

SEQ ID NO: 6123 - protein, 353 aa, Glycine max
  misc_feature (210)..(210): Xaa can be any naturally occurring amino acid
  misc_feature (241)..(241): Xaa can be any naturally occurring amino acid
  Coding DNA Sequence Number=SeqID_2432
  Gene Ontology: Mol. function=nucleotide binding; Cellular component =striated muscle thick filament; Biological process=striated muscle contraction
  Homolog annotation: Hit_ID=A2FD36; Match level="QueryCoverage=99%, HitCoverage=91%, E-value=9e-16, Identity=21%"; Hit description=Viral A-type inclusion protein, putative
  Pfam annotation: Domain name=CHASE3; Domain location=221-345; Score= -26.1; E_value=0.059; Accession=PF05227.4; Description=CHASE3 domain
  Pfam annotation: Domain name=Filament; Domain location=81-340; Score=- 185.2; E_value=0.029; Accession=PF00038.11; Description=Intermediate filament protein
  Pfam annotation: Domain name=Strep_SA_rep; Domain location=158-182; Score=15.7; E_value=0.18; Accession=PF06696.2; Description =Streptococcal surface antigen repeat
  Pfam annotation: Domain name=Strep_SA_rep; Domain location=223-247; Score=10.4; E_value=2.1; Accession=PF06696.2; Description =Streptococcal surface antigen repeat
  Pfam module annotation: Pfam domain module=CHASE3::Filament::Strep_SA_ rep::Strep_SA_rep; Domain location=221-345::81-340::158-182::223-247
MTEIDRLREELSKASIRSYEVSPDKLHGDTDYSERTKRAGAAKVDNTQITQEKARLEGVVFELQNKVAELENKNILFMIEIERLGIIVGELQVENELWRQQVVEAEENSSQQIAEFKRQYELIIRPQIESEIRNATGKLESEKTSMDIQIQSHKSKQTDYENRINYLQADLAKLQDRNLELSRQLEEWKLKYSQLERGNESLKYSLENDXRLKWEREKSDLNSRWAQDRAQYEADLARCKXRISEIETKAILLGTENEHLNIVIRDKDSEIEVLRNRLLEAQEQRKQLDQLREQLEITFNQREIEIRSRASQLEAARDSLESELRNAQNRINYLEDQLTSLNNENQRLRQDIL

SEQ ID NO: 6124 - protein, 174 aa, Glycine max
  misc_feature (7)..(7): Xaa can be any naturally occurring amino acid
  misc_feature (9)..(9): Xaa can be any naturally occurring amino acid
  misc_feature (44)..(44): Xaa can be any naturally occurring amino acid
  misc_feature (73)..(73): Xaa can be any naturally occurring amino acid
  misc_feature (92)..(92): Xaa can be any naturally occurring amino acid
  misc_feature (110)..(110): Xaa can be any naturally occurring amino acid
  misc_feature (119)..(119): Xaa can be any naturally occurring amino acid
  misc_feature (137)..(137): Xaa can be any naturally occurring amino acid
  misc_feature (150)..(150): Xaa can be any naturally occurring amino acid
  misc_feature (162)..(162): Xaa can be any naturally occurring amino acid
  misc_feature (169)..(169): Xaa can be any naturally occurring amino acid
  Coding DNA Sequence Number=SeqID_2433
GEYVVDXAXTSPLVSRDTNSPQRSTHTRRRHESLATEGTVYTLXCVHLRTASHTMPRSGSRAEAMQSINEICXMLIIILFSSIVHPCSHHRXHTTYRLAHTRDECVAVAXRQRHVVLSXFRSLAVRGRVCVVASGVXSRVCDGVRSAARXYCHLCVIGSERXRVISDEXADVEV

SEQ ID NO: 6125 - protein, 94 aa, Glycine max
  misc_feature (4)..(4): Xaa can be any naturally occurring amino acid
  misc_feature (11)..(11): Xaa can be any naturally occurring amino acid
  misc_feature (16)..(17): Xaa can be any naturally occurring amino acid
  misc_feature (19)..(19): Xaa can be any naturally occurring amino acid
  misc_feature (46)..(46): Xaa can be any naturally occurring amino acid
  misc_feature (77)..(77): Xaa can be any naturally occurring amino acid
  Coding DNA Sequence Number=SeqID_2435
  Homolog annotation: Hit_ID=UPI00006CB069; Match level="QueryCoverage =98%, HitCoverage=8%, E-value=8e-07, Identity=35%"; Hit description =Protein kinase domain containing protein
PANXDEWHQLXNGRLXXLXAIPGVSQRLKMLIRKMLSKNPFERPSXQELLAHDLPSEMEIELKWEKIQNRILQERKXDLENQLNKRKKRRNSVA

SEQ ID NO: 6126 - protein, 85 aa, Glycine max
  misc_feature (15)..(15): Xaa can be any naturally occurring amino acid
  misc_feature (18)..(18): Xaa can be any naturally occurring amino acid
  misc_feature (27)..(27): Xaa can be any naturally occurring amino acid
  misc_feature (32)..(32): Xaa can be any naturally occurring amino acid
  misc_feature (34)..(34): Xaa can be any naturally occurring amino acid
  misc_feature (62)..(62): Xaa can be any naturally occurring amino acid
  misc_feature (64)..(64): Xaa can be any naturally occurring amino acid
  Coding DNA Sequence Number=SeqID_2437
SSFVVYSVLYEHALXRVXGHIDASSIXLSSRXSXPLASYRHSCADVLRGRTPDYEIFTDYTXSXHYERSQFMDIETMAASHFFQT

SEQ ID NO: 6127 - protein, 154 aa, Glycine max
  misc_feature (37)..(37): Xaa can be any naturally occurring amino acid
  misc_feature (54)..(54): Xaa can be any naturally occurring amino acid
  misc_feature (124)..(124): Xaa can be any naturally occurring amino acid
  Coding DNA Sequence Number=SeqID_2439
  Gene Ontology: Mol. function=transporter activity; Cellular component= integral to membrane; Biological process=auxin mediated signaling pathway
  Homolog annotation: Hit_ID=Q673E7; Match level="QueryCoverage=98%, HitCoverage=28%, E-value=6e-31, Identity=50%"; Hit description =Putative auxin efflux carrier protein 7
MIKVKDILEVVAALEPLNVALILGYGSVHWWKIFTPXQCNDIHSYVSVLAVPFXFHFISSHNPYTMNFRLLESDSLQKFVILVALFICITISISGVAYDMVHQSIMRLSTMHQSLFRGVLLQKXMISGEFNHALIIQVGVWHGVIWIPHLLFPS

SEQ ID NO: 6128 - protein, 125 aa, Glycine max
  Coding DNA Sequence Number=SeqID_2440
RAIIAMVVVASCASRGYIVGSALTIVAYTRRIGSLRISIRVPYVHHVLYCRILDIRHTRVGSLCSVIAPCVRCAYVVPWGGALYLRYHPHAASLHRMDIGLRTALRIVSYIRVGVHYTASDVRVM

SEQ ID NO: 6129 - protein, 164 aa, Glycine max
  misc_feature (112)..(112): Xaa can be any naturally occurring amino acid
  Coding DNA Sequence Number=SeqID_2442
STSGQRPPTTHHILSISHHYNTRTRILSSLVIIHSILSLTHLHLLLQSHLTFLFPISLLIPLSSSILHYTLPICGSPSYYPLSPLSPTSSRSHPLLPLLTAPHSFYTSACPXISYLPLPLRSSSQHIYINIYTTLLSSALLCFPLTLRRQHTHYIHTFYKTQTI

SEQ ID NO: 6130 - protein, 208 aa, Glycine max
  misc_feature (40)..(40): Xaa can be any naturally occurring amino acid
  misc_feature (52)..(52): Xaa can be any naturally occurring amino acid
  misc_feature (113)..(113): Xaa can be any naturally occurring amino acid
  misc_feature (184)..(184): Xaa can be any naturally occurring amino acid
  Coding DNA Sequence Number=SeqID_2444
KYKTMNEKIPRHAHTRYTGTAPPEPRDRYLSRKYLLIITXRNTTTLTYLSTXDDYVHPTTTMYVPPTHPTLPPHLTLITMCKDDAQSCSYVQRHTCTAPTTYTIVVSTTLPDXTPLVTLTYTLSRPAPPYICSTTPDNTHHTDHNDSSTTPQHTLLRLTLTPTTTIILISTSYIISSRGHHHTXLLPSIESSQHTHTPRYTIYSTHTE

SEQ ID NO: 6131 - protein, 124 aa, Glycine max
  misc_feature (16)..(16): Xaa can be any naturally occurring amino acid
  Coding DNA Sequence Number=SeqID_2446
STTDCTQRYSERDTRXIVRACSSSAARLSYLDTRVCVCEGCSCRRWMTRDTTQKYDRREVGRMIVDSHTSDVSSVHRRTTPTQRVRVRVESHRPMMSHKTHTPRGRVIVRPVHAPSLQTLRRRQ

SEQ ID NO: 6132 - protein, 167 aa, Glycine max
  Coding DNA Sequence Number=SeqID_2448
  Gene Ontology: Mol. function=ARF GTPase activator activity; Cellular component=intracellular; Biological process=regulation of ARF GTPase activity
  Homolog annotation: Hit_ID=A0BSF3; Match level="QueryCoverage=69%, HitCoverage=32%, E-value=3e-34, Identity=55%"; Hit description =Chromosome undetermined scaffold_125, whole genome shotgun sequence
  Pfam annotation: Domain name=ArfGap; Domain location=11-131; Score =124.7; E_value=2.7e-34; Accession=PF01412.9; Description=Putative GTPase activating protein for Arf
MNIQIDDAERDEIFQRLRATPENNKCFDCDKKNPKWSSVSLGLYLCLDCAGKHREYGPQVSFVRSLNLDTWNKKYITSMELGGNVKALDYFKKQGLKTPYDYKGAQIQKYKQDLAKKVDAALAGSKTEAEANKPVFTKPAEEEKTQPEQSHHLSGKSHSDKPTHGEK

SEQ ID NO: 6133 - protein, 169 aa, Glycine max
  misc_feature (33)..(33): Xaa can be any naturally occurring amino acid
  Coding DNA Sequence Number=SeqID_2449
ESQCALDVWCTLLCAIAIGSVAAPSGISQKQTXYGTTEDMLCNSPYVAHDARLLTSSTPHSACGSLRYSASSVLEPARCLRGFLLCFRGRVRCFRMQRSALELKSHVSSLAVRPASLSEDVPARVWCSVRRASCTFLLLSRSRGVSWICIVCYFISYTATYSTRPGGCS

SEQ ID NO: 6134 - protein, 156 aa, Glycine max
  Coding DNA Sequence Number=SeqID_2451
LSLLHTPLSPSPSTRALSLSLSTRGKGKEKEGAGGEPVVGNGRRVLAAPDAQVAQAAAAAPGARQGPLWPRQDRAPRPPRVHRRGTRPPLPSRSRQIRGAFTADPLRCSPTRARSGRRFQNHKDSGRAIFGRISWFGWPVKSRRIMSYRAPIGFNS

SEQ ID NO: 6135 - protein, 140 aa, Glycine max
  misc_feature (70)..(70): Xaa can be any naturally occurring amino acid
  misc_feature (82)..(82): Xaa can be any naturally occurring amino acid
  misc_feature (95)..(95): Xaa can be any naturally occurring amino acid
  misc_feature (107)..(107): Xaa can be any naturally occurring amino acid
  misc_feature (109)..(109): Xaa can be any naturally occurring amino acid
  misc_feature (113)..(113): Xaa can be any naturally occurring amino acid
  misc_feature (137)..(137): Xaa can be any naturally occurring amino acid
  Coding DNA Sequence Number=SeqID_2453
  Subcellular localization annotation: CTP_CleavageSite=15; ConfidenceScore=5.03e-01
SGLPAVAPLRIVDPRAEDSHETLPRNPNRNPSTLPLTLTPKPNSITVTVFRSSLPHSLSLPHTHGHCSQXPRSHRRTHRAHXGRHHHRRPPPLRXRCHRRFLLRQLXVXALHXVKIIADASVSDVAATAFDSSLSPXFYR

SEQ ID NO: 6136 - protein, 96 aa, Glycine max
  misc_feature (13)..(16): Xaa can be any naturally occurring amino acid
  misc_feature (19)..(19): Xaa can be any naturally occurring amino acid
  misc_feature (34)..(34): Xaa can be any naturally occurring amino acid
  misc_feature (38)..(38): Xaa can be any naturally occurring amino acid
  misc_feature (42)..(42): Xaa can be any naturally occurring amino acid
  misc_feature (51)..(51): Xaa can be any naturally occurring amino acid
  misc_feature (56)..(56): Xaa can be any naturally occurring amino acid
  misc_feature (62)..(64): Xaa can be any naturally occurring amino acid
  misc_feature (66)..(66): Xaa can be any naturally occurring amino acid
  misc_feature (74)..(74): Xaa can be any naturally occurring amino acid
  misc_feature (88)..(91): Xaa can be any naturally occurring amino acid
  Coding DNA Sequence Number=SeqID_2454
CCVWFLWRKACDXXXXPKXISTLVTLCLDEASCXYLCXLRGXARAGHSAPXAGRGXKMSVRXXXGXRAGARGPXERGQSALRQRKGAXXXXRERKK

SEQ ID NO: 6137 - protein, 170 aa, Glycine max
  misc_feature (40)..(40): Xaa can be any naturally occurring amino acid
  misc_feature (73)..(73): Xaa can be any naturally occurring amino acid
  misc_feature (83)..(83): Xaa can be any naturally occurring amino acid
  misc_feature (97)..(97): Xaa can be any naturally occurring amino acid
  misc_feature (127)..(127): Xaa can be any naturally occurring amino acid
  Coding DNA Sequence Number=SeqID_2456
  Gene Ontology: Mol. function=oxidoreductase activity, acting on single donors with incorporation of molecular oxygen, incorporation of two atoms of oxygen; Cellular component=cytoplasm; Biological process=fatty acid biosynthetic process
  Homolog annotation: Hit_ID=P24095; Match level="QueryCoverage=100%, HitCoverage=19%, E-value=5e-70, Identity=77%"; Hit description=Seed lipoxygenase
  Pfam annotation: Domain name=Lipoxygenase; Domain location=1-168; Score=-349.5; E_value=0.0039; Accession=PF00305.9; Description =Lipoxygenase
EKGHGDLKEKPWWPKMQTTEDLIQSCSIIVWTASALHAAXNFGQYPYGGEILNRPTLARRFIPAERTPEYDEXVKNPQRVNCXTITPKFGNLIGLSXVEILARRASDEIYLGERETSNWTTDKKALXAFKRVGSQLSGIEREINAQDMIPVLKPGSASYLAYTLLHRSNE

SEQ ID NO: 6138 - protein, 58 aa, Glycine max
  Coding DNA Sequence Number=SeqID_2457
PLLSLYSLSLLCSKTLVKRTLTGVAHTLALLSELAVLEDASEAYTHWCSSHTHTHTSI

SEQ ID NO: 6139 - protein, 262 aa, Glycine max
  misc_feature (1)..(1): Xaa can be any naturally occurring amino acid
  misc_feature (13)..(14): Xaa can be any naturally occurring amino acid
  misc_feature (21)..(21): Xaa can be any naturally occurring amino acid
  misc_feature (130)..(130): Xaa can be any naturally occurring amino acid
  misc_feature (156)..(156): Xaa can be any naturally occurring amino acid
  misc_feature (181)..(181): Xaa can be any naturally occurring amino acid
  misc_feature (209)..(209): Xaa can be any naturally occurring amino acid
  misc_feature (236)..(236): Xaa can be any naturally occurring amino acid
  Coding DNA Sequence Number=SeqID_2459
  Subcellular localization annotation: CTP_CleavageSite=31; ConfidenceScore=5.34e-01
XSSICLVSHCVCXXSLCSVPXLSRGRAMWCRAVVVVCCGWVSAVLRVRLACRSPCVACTSRLAVAAPPPRSRRTRGAAAARACTAARATPAVRGARARAPSSVRGTGGGVVLDGARAQPACDRLYDVRAXHATPRLLSVGRCYHRCRSRPDADTVXRAHTVTRDVYTRARSSVRACRSRLXRLTARRPRAARPAALPQRGRASHDASAXVGVGRLLLSVRARARRARAPCAHLKRXRRTDVHGVRAARTRRARACAVLAPRC

SEQ ID NO: 6140 - protein, 77 aa, Glycine max
  Coding DNA Sequence Number=SeqID_2461
  Gene Ontology: Mol. function=peptidase activity; Cellular component =extracellular region; Biological process=defense response
  Homolog annotation: Hit_ID=Q39182; Match level="QueryCoverage=100%, HitCoverage=100%, E-value=3e-24, Identity=71%"; Hit description=Low -molecular-weight cysteine-rich protein LCR69 precursor
  Pfam annotation: Domain name=Gamma-thionin; Domain location=31-77; Score=98.8; E_value=1.7e-26; Accession=PF00304.11; Description=Gamma- thionins family
  Pfam annotation: Domain name=SLR1-BP; Domain location=8-77; Score= -13.6; E_value=0.028; Accession=PF07333.3; Description=S locus -related glycoprotein 1 bindin
  Pfam module annotation: Pfam domain module=Gamma-thionin::SLR1-BP; Domain location=31-77::8-77
MKLSMRLISAVLLLFMIFVATGMGPVSVEARTCESQSHRFKGPCVSDNNCANVCHNEGFGGGKCRGLRRRCFCTRHC

SEQ ID NO: 6141 - protein, 77 aa, Glycine max
  Coding DNA Sequence Number=SeqID_2462
SKSCFVGTVRKMGPLVISSSFLWYLSFVLSAAVRVVHVQANYGWLNAHATFYGANQNPTTLGKSFLMCKNNIYNLYV

SEQ ID NO: 6142 - protein, 153 aa, Glycine max
  misc_feature (16)..(16): Xaa can be any naturally occurring amino acid
  misc_feature (21)..(21): Xaa can be any naturally occurring amino acid
  misc_feature (37)..(37): Xaa can be any naturally occurring amino acid
  misc_feature (42)..(42): Xaa can be any naturally occurring amino acid
  misc_feature (58)..(59): Xaa can be any naturally occurring amino acid
  misc_feature (64)..(65): Xaa can be any naturally occurring amino acid
  misc_feature (82)..(82): Xaa can be any naturally occurring amino acid
  misc_feature (84)..(84): Xaa can be any naturally occurring amino acid
  misc_feature (93)..(93): Xaa can be any naturally occurring amino acid
  misc_feature (95)..(95): Xaa can be any naturally occurring amino acid
  misc_feature (111)..(111): Xaa can be any naturally occurring amino acid
  misc_feature (113)..(113): Xaa can be any naturally occurring amino acid
  misc_feature (126)..(126): Xaa can be any naturally occurring amino acid
  misc_feature (153)..(153): Xaa can be any naturally occurring amino acid
  Coding DNA Sequence Number=SeqID_2464
RGSERDISARRVLLLXRVLSXLSDSFTHTRSPHYYVXPLFLXENRDDVFLSRTLRLLXXGVRHXXLCTVCCQHIVCTWGRVXMXCSTSQSHSXVXPNIHTLPTSYTSTTLXYXSRNTLHTHRRISXDTTSMRRDARVPSILVIYEVRRVLSSX

SEQ ID NO: 6143 - protein, 156 aa, Glycine max
  misc_feature (2)..(2): Xaa can be any naturally occurring amino acid
  misc_feature (66)..(67): Xaa can be any naturally occurring amino acid
  misc_feature (88)..(88): Xaa can be any naturally occurring amino acid
  misc_feature (93)..(93): Xaa can be any naturally occurring amino acid
  misc_feature (116)..(116): Xaa can be any naturally occurring amino acid
  misc_feature (118)..(118): Xaa can be any naturally occurring amino acid
  misc_feature (122)..(122): Xaa can be any naturally occurring amino acid
  Coding DNA Sequence Number=SeqID_2466
KXKNYRSIMSLVFYYNYNGVYFVIQVMVLVGELSCGKCAAYVRGDPVWGVLCAAPAREALGVARQXXSVLFVSLLCSACRCDDTARRXSRSPXCRARLLRRRARATLPLVGARVAXRXHTLXRASAPARLLRMHVFCALVSGLDGRESRVAWLWPL

SEQ ID NO: 6144 - protein, 210 aa, Glycine max
  misc_feature (64)..(64): Xaa can be any naturally occurring amino acid
  misc_feature (91)..(92): Xaa can be any naturally occurring amino acid
  misc_feature (144)..(144): Xaa can be any naturally occurring amino acid
  misc_feature (161)..(161): Xaa can be any naturally occurring amino acid
  misc_feature (163)..(163): Xaa can be any naturally occurring amino acid
  misc_feature (173)..(173): Xaa can be any naturally occurring amino acid
  misc_feature (209)..(209): Xaa can be any naturally occurring amino acid
  Coding DNA Sequence Number=SeqID_2468
CVRRDGNTRTHTCDGGEYSTLACSERSTAREYSHRASRNHIHDHTSHTSHYIYYHNYNELRHKXHNSIHRVLHDICRFSAEACECIGKYVXXRRAPRTIHVYSIDHAHHESTAHSPPLRSVLPHHILCVRIGALHRSSRADRRXPQTTIQVNSVIVRRPLXRXHAAVTSPSLXALAPRTSSSTLAVYTTMSREEIMTRTAMRDMRIEVXV

SEQ ID NO: 6145 - protein, 125 aa, Glycine max
  misc_feature (3)..(5): Xaa can be any naturally occurring amino acid
  misc_feature (10)..(10): Xaa can be any naturally occurring amino acid
  misc_feature (23)..(23): Xaa can be any naturally occurring amino acid
  misc_feature (29)..(29): Xaa can be any naturally occurring amino acid
  misc_feature (56)..(56): Xaa can be any naturally occurring amino acid
  misc_feature (80)..(80): Xaa can be any naturally occurring amino acid
  misc_feature (99)..(99): Xaa can be any naturally occurring amino acid
  Coding DNA Sequence Number=SeqID_2470
CRXXXAYAMXSVHSSIECLVASXRLSHSXFSIYIVCVSRYVAMNRKRRLTRVAERXGGAISSGAVSHTPHTHPHTTCVLXSMCQWMPRRVRRVYISCTXLITLDIILILLLTALYLCDPALCRCV

SEQ ID NO: 6146 - protein, 131 aa, Glycine max
  misc_feature (15)..(15): Xaa can be any naturally occurring amino acid
  misc_feature (26)..(26): Xaa can be any naturally occurring amino acid
  misc_feature (28)..(28): Xaa can be any naturally occurring amino acid
  misc_feature (32)..(32): Xaa can be any naturally occurring amino acid
  misc_feature (36)..(37): Xaa can be any naturally occurring amino acid
  misc_feature (42)..(42): Xaa can be any naturally occurring amino acid
  misc_feature (44)..(44): Xaa can be any naturally occurring amino acid
  misc_feature (47)..(48): Xaa can be any naturally occurring amino acid
  misc_feature (51)..(51): Xaa can be any naturally occurring amino acid
  misc_feature (53)..(53): Xaa can be any naturally occurring amino acid
  misc_feature (55)..(55): Xaa can be any naturally occurring amino acid
  misc_feature (61)..(61): Xaa can be any naturally occurring amino acid
  misc_feature (63)..(63): Xaa can be any naturally occurring amino acid
  misc_feature (79)..(79): Xaa can be any naturally occurring amino acid
  misc_feature (88)..(88): Xaa can be any naturally occurring amino acid
  misc_feature (95)..(95): Xaa can be any naturally occurring amino acid
  misc_feature (106)..(106): Xaa can be any naturally occurring amino acid
  misc_feature (110)..(110): Xaa can be any naturally occurring amino acid
  misc_feature (113)..(113): Xaa can be any naturally occurring amino acid
  misc_feature (119)..(119): Xaa can be any naturally occurring amino acid
  misc_feature (123)..(123): Xaa can be any naturally occurring amino acid
  misc_feature (125)..(125): Xaa can be any naturally occurring amino acid
  misc_feature (127)..(127): Xaa can be any naturally occurring amino acid
  Coding DNA Sequence Number=SeqID_2472
GYTPATSLLFTLQCXRKRRIARDLNXLXQQSXRCHXXMRCMXNXLRXXIDXRXVXFDRCRXDXCYCVTRMRTSIVRVSXISVETCRRXCCALDRXDAAADVSVLRXEYVXIIXSYYDAXYRCXHXSXVRRR

SEQ ID NO: 6147 - protein, 126 aa, Glycine max
  misc_feature (26)..(26): Xaa can be any naturally occurring amino acid
  misc_feature (60)..(60): Xaa can be any naturally occurring amino acid
  misc_feature (83)..(83): Xaa can be any naturally occurring amino acid
  misc_feature (94)..(94): Xaa can be any naturally occurring amino acid
  misc_feature (125)..(125): Xaa can be any naturally occurring amino acid
  Coding DNA Sequence Number=SeqID_2473
RARWWERVKACDYRTRVRSGARGGGXIITKASVSESEATTNSDVYYRSPCDSLSLLIATXRISGALSSHGMYDVSVHSRIVVXSSSRRHSRVVXSITRYDVSVCVMYMYHAGGGCPRRSENRAMXI

SEQ ID NO: 6148 - protein, 108 aa, Glycine max
  misc_feature (6)..(6): Xaa can be any naturally occurring amino acid
  misc_feature (8)..(11): Xaa can be any naturally occurring amino acid
  misc_feature (18)..(18): Xaa can be any naturally occurring amino acid
  misc_feature (21)..(21): Xaa can be any naturally occurring amino acid
  misc_feature (55)..(55): Xaa can be any naturally occurring amino acid
  misc_feature (58)..(58): Xaa can be any naturally occurring amino acid
  misc_feature (62)..(62): Xaa can be any naturally occurring amino acid
  misc_feature (64)..(64): Xaa can be any naturally occurring amino acid
  misc_feature (91)..(91): Xaa can be any naturally occurring amino acid
  Coding DNA Sequence Number=SeqID_2475
TLLPPXTXXXXIVLLPAXFAXLSYYYRVASVRYNHIDYTCTNIRAGKNKIYLGWXPRXRSHXKXVRRGGAARPVLYILEYTPSARTLILSXVTPACERARSARVRSPL

SEQ ID NO: 6149 - protein, 168 aa, Glycine max
  misc_feature (69)..(69): Xaa can be any naturally occurring amino acid
  misc_feature (104)..(104): Xaa can be any naturally occurring amino acid
  misc_feature (137)..(137): Xaa can be any naturally occurring amino acid
  misc_feature (142)..(142): Xaa can be any naturally occurring amino acid
  misc_feature (146)..(146): Xaa can be any naturally occurring amino acid
  Coding DNA Sequence Number=SeqID_2477
  Gene Ontology: Mol. function=nucleotide binding; Cellular component =intracellular; Biological process=small GTPase mediated signal transduction
  Homolog annotation: Hit_ID=A7PMP5; Match level="QueryCoverage=94%, HitCoverage=22%, E-value=5e-38, Identity=57%"; Hit description =Chromosome chr14 scaffold_21, whole genome shotgun sequence
  Pfam annotation: Domain name=GTP_EFTU; Domain location=5-128; Score= -61.9; E_value=0.0016; Accession=PF00009.17; Description=Elongation factor Tu GTP binding domain
GVNANGTSDGKESRKFMITVTHSGGHAGQSYEVSRSMAACQGELLEVDPVQGVQAQKVATLASAFEFNXAIDPVISKIEQLIADPDGGIAQVGSMFDLDPSDVXLLTSAKTGEGLQQIPSAVIEGKPAHPGSSDPPXRMILXFNKXYDEYIGVICQVDAVDGVTRIGE

SEQ ID NO: 6150 - protein, 107 aa, Glycine max
  misc_feature (32)..(32): Xaa can be any naturally occurring amino acid
  misc_feature (36)..(36): Xaa can be any naturally occurring amino acid
  misc_feature (47)..(47): Xaa can be any naturally occurring amino acid
  Coding DNA Sequence Number=SeqID_2478
RCSTVLYILRAVTSPRSVCVRYEYIIWQSVSXSLSXHMITLIDSRSXVFCYASSIYDHDRHVIIRQDSVNRVSYHDRAHRRSSSDRREAVLCMPLGVCARAPRTRLS

SEQ ID NO: 6151 - protein, 167 aa, Glycine max
  misc_feature (56)..(56): Xaa can be any naturally occurring amino acid
  Coding DNA Sequence Number=SeqID_2480
  Gene Ontology: Mol. function=binding; Cellular component=cytoplasm; Biological process=glycerol ether metabolic process
  Homolog annotation: Hit_ID=A7P1Y9; Match level="QueryCoverage=96%, HitCoverage=23%, E-value=5e-52, Identity=62%"; Hit description =Chromosome chr19 scaffold_4, whole genome shotgun sequence
  Pfam annotation: Domain name=Thioredoxin; Domain location=85-164; Score=17.9; E_value=7.3e-06; Accession=PF00085.10; Description =Thioredoxin
TEAPRPRPSAQSKGQPREAAPAPYAPLRTEPPHPTGVAENLFHAQVVLKKSRGEEXINLKFGGEVEDISGLEQFRAAISLPGVSVVHFETASNLQCKQISPLVNTLCGRYPSINFLKVNIQPSPTVATAENVRVVPTFKIYKNGSQVKEILCPSLEMLEQSVRHYSF

SEQ ID NO: 6152 - protein, 89 aa, Glycine max
  misc_feature (37)..(37): Xaa can be any naturally occurring amino acid
  misc_feature (59)..(59): Xaa can be any naturally occurring amino acid
  misc_feature (74)..(74): Xaa can be any naturally occurring amino acid
  Coding DNA Sequence Number=SeqID_2481
VYDEADRLRPHANASSASLAPVYNSSDILPLTSEHLXTPMFSRSSHLAGCARLLVYSSXCETRCILYRSRAATXHTIHLTHSRIFTAFV

SEQ ID NO: 6153 - protein, 203 aa, Glycine max
  misc_feature (12)..(12): Xaa can be any naturally occurring amino acid
  misc_feature (43)..(43): Xaa can be any naturally occurring amino acid
  misc_feature (113)..(113): Xaa can be any naturally occurring amino acid
  misc_feature (126)..(126): Xaa can be any naturally occurring amino acid
  misc_feature (135)..(135): Xaa can be any naturally occurring amino acid
  misc_feature (155)..(155): Xaa can be any naturally occurring amino acid
  Coding DNA Sequence Number=SeqID_2483
  Homolog annotation: Hit_ID=A9PFT5; Match level="QueryCoverage=92%, HitCoverage=47%, E-value=9e-38, Identity=52%"; Hit description =Putative uncharacterized protein
VDKMNGRAVLQXTCNRVQNLERRISIKKVVPPKSICPPSPPLXRKTSLTPPVSPKLKSPRLPATKRGNDNNGLNSSYEKIVIPRSSTKTPTLERKKYKSFKEGSCVFVSIEAXLSYSSSLITDFPXTLAAVRREXMALQLAQRKMQIGHYGKTKXLKSLKELFLLNPSNTNTWFKVNWRRKKRCSFIQPQFQIPIVYWVNQDG

SEQ ID NO: 6154 - protein, 112 aa, Glycine max
  misc_feature (99)..(99): Xaa can be any naturally occurring amino acid
  Coding DNA Sequence Number=SeqID_2484
LRMSCVAVCIALYLFARFYHTLQYRIFRHHLLYIILNTYWSSTCSPPSCAGDLLYMYHSVIFSVCIQCLAGRSRFAIIFCVRATPLTLTVDVATPTVSXPFSLHDYLHHFHI

SEQ ID NO: 6155 - protein, 183 aa, Glycine max
  misc_feature (164)..(164): Xaa can be any naturally occurring amino acid
  misc_feature (181)..(181): Xaa can be any naturally occurring amino acid
  misc_feature (183)..(183): Xaa can be any naturally occurring amino acid
  Coding DNA Sequence Number=SeqID_2485
  Gene Ontology: Mol. function=methyltransferase activity; Cellular component=cytoplasm; Biological process=fatty acid biosynthetic process
  Homolog annotation: Hit_ID=Q2HRW2; Match level="QueryCoverage=95%, HitCoverage=65%, E-value=4e-44, Identity=45%"; Hit description=Beta -ketoacyl synthase; SAM dependent carboxyl methyltransferase
  Pfam annotation: Domain name=Methyltransf_7; Domain location=13-183; Score=10.5; E_value=6.5e-16; Accession=PF03492.6; Description=SAM dependent carboxyl methyltransferase
MQQKVILKVKPILEESIKRLCCTNFKSKLRVADLGCASGPNALMVMVQERRDGVGACVVNATPGSFYGRLFPNNYIHFFQSSYSLHWLSQTPEELIKGAKPLNKGNIYITTTSSPIVFKAYLEQFQRDFSFFLKSRSDELKVGGIMVLTFQGREKAHEITHPLXVIGMLLKDMILEGLVEXTX

SEQ ID NO: 6156 - protein, 104 aa, Glycine max
  misc_feature (102)..(102): Xaa can be any naturally occurring amino acid
  Coding DNA Sequence Number=SeqID_2486
TYIKTLCCASHTYLILCVAVKIYDRLARYISTCRRGCTLCVLWCAPHSPLSAPTCDKYIHHSHMRCLASHIYLTTQLSIYLYLPIALPTYYLLSHDLHFSLXLS

SEQ ID NO: 6157 - protein, 126 aa, Glycine max
  misc_feature (113)..(113): Xaa can be any naturally occurring amino acid
  Coding DNA Sequence Number=SeqID_2488
  Gene Ontology: Mol. function=structural constituent of ribosome; Cellular component=intracellular; Biological process=protein modification process
  Homolog annotation: Hit_ID=Q8MY15; Match level="QueryCoverage=98%, HitCoverage=80%, E-value=3e-32, Identity=56%"; Hit description =Ubiquitin
  Pfam annotation: Domain name=Ribosomal_S27; Domain location=74-120; Score=79.1; E_value=1.4e-20; Accession=PF01599.9; Description =Ribosomal protein S27a
  Pfam annotation: Domain name=ubiquitin; Domain location=2-47; Score =34.1; E_value=4.9e-07; Accession=PF00240.13; Description=Ubiquitin family
  Pfam module annotation: Pfam domain module=Ribosomal_S27::ubiquitin; Domain location=74-120::2-47
AKFPDQEGILSDQQRLIFAGKQLEDGRTLVDFNIQKESTLHLVLRFRGGAKKGKKKTYPQPQKIQPQPKKVQVGIFQFYKVDDFGKVQRLRKECPNAECGAGTFKAHPFDRHXFGKCGLTYVYQKA

SEQ ID NO: 6158 - protein, 124 aa, Glycine max
  misc_feature (106)..(106): Xaa can be any naturally occurring amino acid
  misc_feature (114)..(115): Xaa can be any naturally occurring amino acid
  Coding DNA Sequence Number=SeqID_2489
LPPLTHTHSHSPSLPASVASRRRERQTIKCTQDTSRGHAVAESIRIIYNAQCDIVCIICMLLCDNNNLISVHITIFFILLFTLLILIVLYHTHNTRTSCISYTTIXLGHVSYVXXVFICAGSRY

SEQ ID NO: 6159 - protein, 160 aa, Glycine max
  misc_feature (75)..(75): Xaa can be any naturally occurring amino acid
  Coding DNA Sequence Number=SeqID_2491
  Gene Ontology: Mol. function=transporter activity; Cellular component= integral to membrane; Biological process=iron ion transport
  Homolog annotation: Hit_ID=A7NU57; Match level="QueryCoverage=98%, HitCoverage=29%, E-value=2e-53, Identity=66%"; Hit description =Chromosome chr18 scaffold_1, whole genome shotgun sequence
  Pfam annotation: Domain name=Nramp; Domain location=1-161; Score= -92.6; E_value=4.2e-10; Accession=PF01566.9; Description=Natural resistance-associated macrophage protein
ENYGVRKLEAAFAVLIAVMGLSFAWMFGDAQPNREELLMGILVPRLGSKTIRQAVGVVGCVIMPHNVFLHSALVXSKKVDPKKNKSIQEALNYYSIKSSTTLTISFIINLFITTVFTKDCYKTKRTDNIKLINTKQYLKEKYKKKVFPMLCILKIGLLHS

SEQ ID NO: 6160 - protein, 115 aa, Glycine max
  Coding DNA Sequence Number=SeqID_2492
HDIDGSLNKMETLKRAMCCAGCEEEVLPLKRSKAEGASMTASHLEVDSPRSKRNLEDEDQSEQILQRSKYDSPIAAESPCESSALIDALRSVMRRGKDLHLKRRDATLENAELRM

SEQ ID NO: 6161 - protein, 676 aa, Glycine max
  Coding DNA Sequence Number=SeqID_2494
  Homolog annotation: Hit_ID=A0EIE5; Match level="QueryCoverage=57%, HitCoverage=82%, E-value=2e-10, Identity=18%"; Hit description =Chromosome undetermined scaffold_99, whole genome shotgun sequence
MITSTPQSILTRGRDEVEDIPNEGSEIRRDMRLGHVHPATGTHNSNLASPMGQPLTTQDLGNLGQATTVISASGERYQAIGEPRVISSVPISDIGIPVTQSVDYQPRTAAPISNVTNVTRREEVIVDRPVMTTSTTAMPTTTTAMPTTTYQTGTYQTGNYQAGTNLGTSHVITTEAPRTTLLSSTVAQPLQTSITTQYVSQVPVMEGVSNVSEIQVVEEHMRDSISMGRQTEDPTHQSRWEQQQAQLSSMRYENHQTFENWEVNRNLFFSDRLNVMDDLLAGMERKLDWLDAGVQKVILFFKERESQEIEFSKRVKHGLTQLGDHFERVENGELMSDFSRGMKESDAFHAQATRNSEILGLFIKKDILDWILLPSEKEYKLQAHSLRVPIQDARKRLSHVGSQRTRRYNKYFKLYDSIQRHPTKVTPKDNGIFKRQLKYSLSAREELRLLRLYNEQGLLVISEFTRLAIMRMGEIQRAFSLYLQKYTELFANSAPAPTPILELIEKSNGPEAIQALFSPRSLLSIPNYEFLSKKLGTTDIMYPDLTSFLINFPESVDPARSSFVLREWEAVKEGHLLRRPRACTIIATTGNSLLIVEKKHKEQELGKVETPLQMRYTKVENIAEGIDGTTLKVVERTPGTLFTHTHKARLKFETQEDAQSFVNFLSNQTSQMIGDV

SEQ ID NO: 6162 - protein, 93 aa, Glycine max
  Coding DNA Sequence Number=SeqID_2495
  Homolog annotation: Hit_ID=A8FE76; Match level="QueryCoverage=96%, HitCoverage=57%, E-value=5e-33, Identity=76%"; Hit description =Putative uncharacterized protein yozR
MIRMFDWNRLFPFQKQFSKEALKNSDPKDVEQYVNQVMESVFGSNYPAQFPFQDPLSQNQKTRETDVEKEKEPEVKVFETTDHVFVKIELARP

SEQ ID NO: 6163 - protein, 162 aa, Glycine max
  misc_feature (52)..(52): Xaa can be any naturally occurring amino acid
  Coding DNA Sequence Number=SeqID_2496
YLYGQSEAICALVISRPLILIAQSNSTHRRERQRARRVGTAERVKERRKMIXKQSSSTLFSINILHSHLLVTSTQRRLAATKITSTTQTANKKTDALLRPPHTSALCPLARSAMSTMDGTLPRDSAVCRACDVCYAHSSPVVASALGSHVLATNALSLLLHL

SEQ ID NO: 6164 - protein, 174 aa, Glycine max
  misc_feature (17)..(17): Xaa can be any naturally occurring amino acid
  misc_feature (29)..(29): Xaa can be any naturally occurring amino acid
  misc_feature (31)..(31): Xaa can be any naturally occurring amino acid
  misc_feature (47)..(47): Xaa can be any naturally occurring amino acid
  misc_feature (52)..(52): Xaa can be any naturally occurring amino acid
  misc_feature (58)..(58): Xaa can be any naturally occurring amino acid
  misc_feature (87)..(87): Xaa can be any naturally occurring amino acid
  misc_feature (140)..(140): Xaa can be any naturally occurring amino acid
  misc_feature (155)..(155): Xaa can be any naturally occurring amino acid
  misc_feature (160)..(160): Xaa can be any naturally occurring amino acid
  misc_feature (168)..(168): Xaa can be any naturally occurring amino acid
  misc_feature (171)..(171): Xaa can be any naturally occurring amino acid
  Coding DNA Sequence Number=SeqID_2497
  Subcellular localization annotation: CTP_CleavageSite=44; ConfidenceScore=5.05e-01
RAVRAARYRSVSSRAIXTSTCVCVAICLXSXSTIAVLACQCACMCAXERTSXDSSTPXAVRITHLHCSRAESVVCSVSGCLYCFTHXSLRHHYPLSHVVRTRCACRSSLTSRCGRCDYHSSVKYLLRVIVPSASLASHAXLSPSARSGCMISTSXECLSXLSSSSVAXSRXLLG

SEQ ID NO: 6165 - protein, 71 aa, Glycine max
  Coding DNA Sequence Number=SeqID_2499
RARALFELDGCLFGLLGIHVLGAVHITKGGHKCHPSASAMAAAAKTGVYSTITFMPSVLCNKTHWGGGLRS

SEQ ID NO: 6166 - protein, 309 aa, Glycine max
  misc_feature (3)..(3): Xaa can be any naturally occurring amino acid
  misc_feature (42)..(42): Xaa can be any naturally occurring amino acid
  misc_feature (74)..(74): Xaa can be any naturally occurring amino acid
  misc_feature (143)..(143): Xaa can be any naturally occurring amino acid
  misc_feature (176)..(176): Xaa can be any naturally occurring amino acid
  misc_feature (219)..(219): Xaa can be any naturally occurring amino acid
  misc_feature (233)..(233): Xaa can be any naturally occurring amino acid
  misc_feature (241)..(241): Xaa can be any naturally occurring amino acid
  misc_feature (257)..(257): Xaa can be any naturally occurring amino acid
  misc_feature (262)..(262): Xaa can be any naturally occurring amino acid
  misc_feature (267)..(267): Xaa can be any naturally occurring amino acid
  misc_feature (280)..(284): Xaa can be any naturally occurring amino acid
  misc_feature (289)..(289): Xaa can be any naturally occurring amino acid
  misc_feature (296)..(297): Xaa can be any naturally occurring amino acid
  misc_feature (299)..(299): Xaa can be any naturally occurring amino acid
  misc_feature (301)..(301): Xaa can be any naturally occurring amino acid
  misc_feature (303)..(303): Xaa can be any naturally occurring amino acid
  Coding DNA Sequence Number=SeqID_2501
  Subcellular localization annotation: CTP_CleavageSite=31; ConfidenceScore=5.11e-01
RWXRGALLPPLVWPQPPSAPPSSTPPLRHIAAHSLSPHLHSXRRHPPRPPLLSDLISLHRWNKSARRVVINSTXLCIPPSSPPTLLVVSHTPQSPRAGRMRAGRIRRAPRGAGTAPSRAAAPPRASGPPERSHSTPTSSIFPXSLSSRRRLVSLLVISTHAHVSHPLILFLSPLSXPPLPLAICATSQWWGDRARFAWSIMACAGAGDSLTRLCVRRRXTRGDDDVTCVTPVXTPATRPAXCLPASARRPLFRRFSXSRAPXPCPLXLRSRLSVYRAARXXXXXPRRAXGRGAPAXXAXPXTXTPTQKK

SEQ ID NO: 6167 - protein, 107 aa, Glycine max
  Coding DNA Sequence Number=SeqID_2503
  Gene Ontology: Biological process=embryonic development
  Homolog annotation: Hit_ID=Q01417; Match level="QueryCoverage=100%, HitCoverage=61%, E-value=1e-28, Identity=60%"; Hit description=18 kDa seed maturation protein
RMTASDPVQIESFTQLKDAEMNSAKLDKQASLQHNTGARHAVTTDVHMRHGHHTSGTGTGTASYCTSGEYGQPMGAHQTSVMPGHGTVQPTGHVTERVAGSHPIGTN

SEQ ID NO: 6168 - protein, 83 aa, Glycine max
  Coding DNA Sequence Number=SeqID_2504
MSSEEDDPQKPTAEGGPPGYKGQRVDCMQGGRGIKGIEDCREQGEFDMRRGPKALDRAEARAAPTTGQRRPMTQVDRDKEPRN

SEQ ID NO: 6169 - protein, 119 aa, Glycine max
  Coding DNA Sequence Number=SeqID_2505
SNLIPPHIYVYVCVWRKLNFYIFVEAKLHDESRLIQRCFDNNKNDDKGDDKKFKGQSKNKFKMFKIESRTLQDSRGKLKNTSRFKRKVEFRIRIRFRIKLPRIRSDSRIREDLGGGLRS

SEQ ID NO: 6170 - protein, 206 aa, Glycine max
  Coding DNA Sequence Number=SeqID_2507
KQYWHSHCLPSNTATRTDNKTQLQLANKQLEIYPTPPLLSELPNAPFALPHPQTTSCPLFQKERRQSGAPPIESSTITLNLRRMAAMVGTFNSFASKLYGPQGPPLLPAVPRRLYPTTFTPPEAPLLKTPRTLRPSPPPPLPALQSPGACTPSHTTSISLLRPRTIFVPPIPTTAFFRHTDSIATRARIQKRPPGPLEKSRNSLGV

SEQ ID NO: 6171 - protein, 100 aa, Glycine max
  Coding DNA Sequence Number=SeqID_241
  Gene Ontology: Mol. function=oxidoreductase activity, acting on the CH-CH group of donors; Cellular component=integral to membrane; Biological process=lipid metabolic process
  Homolog annotation: Hit_ID=Q3E6X4; Match level="QueryCoverage=97%, HitCoverage=32%, E-value=2e-41, Identity=83%"; Hit description =Uncharacterized protein At1g73650.3
LWWGIYVASLPVLEGAEYLVIVGPIFLTLLLFFVSGIPLLEESADKKYGNLGAYRHYKKTTSPLILLPRGVYGYLPKWCKTVFLFEFPLYSKNLPQETTV

SEQ ID NO: 6172 - protein, 135 aa, Glycine max
  misc_feature (3)..(3): Xaa can be any naturally occurring amino acid
  misc_feature (7)..(7): Xaa can be any naturally occurring amino acid
  misc_feature (21)..(21): Xaa can be any naturally occurring amino acid
  misc_feature (39)..(41): Xaa can be any naturally occurring amino acid
  misc_feature (43)..(43): Xaa can be any naturally occurring amino acid
  misc_feature (46)..(47): Xaa can be any naturally occurring amino acid
  misc_feature (52)..(52): Xaa can be any naturally occurring amino acid
  misc_feature (69)..(69): Xaa can be any naturally occurring amino acid
  misc_feature (74)..(75): Xaa can be any naturally occurring amino acid
  misc_feature (82)..(82): Xaa can be any naturally occurring amino acid
  misc_feature (84)..(84): Xaa can be any naturally occurring amino acid
  misc_feature (92)..(92): Xaa can be any naturally occurring amino acid
  misc_feature (112)..(112): Xaa can be any naturally occurring amino acid
  misc_feature (117)..(118): Xaa can be any naturally occurring amino acid
  misc_feature (120)..(122): Xaa can be any naturally occurring amino acid
  misc_feature (125)..(126): Xaa can be any naturally occurring amino acid
  misc_feature (130)..(130): Xaa can be any naturally occurring amino acid
  Coding DNA Sequence Number=SeqID_242
PMXYVTXSGRVPLHDRISVLXVTSTYHLAICTQSRIADXXXVXFPXXYIRCXFTSASYPELYSASLVGXRHRQXXPNLYADXSXHLCVATNXYLSMQYHSLISYVTSWAYSXLCRAXXRXXXACXXLVYXRIRVH

SEQ ID NO: 6173 - protein, 282 aa, Glycine max
  misc_feature (21)..(21): Xaa can be any naturally occurring amino acid
  misc_feature (65)..(65): Xaa can be any naturally occurring amino acid
  misc_feature (93)..(93): Xaa can be any naturally occurring amino acid
  misc_feature (185)..(185): Xaa can be any naturally occurring amino acid
  misc_feature (202)..(202): Xaa can be any naturally occurring amino acid
  misc_feature (229)..(229): Xaa can be any naturally occurring amino acid
  misc_feature (248)..(248): Xaa can be any naturally occurring amino acid
  misc_feature (256)..(256): Xaa can be any naturally occurring amino acid
  Coding DNA Sequence Number=SeqID_244
  Subcellular localization annotation: CTP_CleavageSite=35; ConfidenceScore=5.25e-01
SQIAQIPTQHRPSSRLARVLXCSHSAFVFLTTQISCLSRQRTTLCDLLVFVAHIATPLDMCIRTXRERHILISPSHCAHRSALRTISHTRTDXSVHSRTQDNTSHTNGHTLHTTHSYTTLIHTAKCEYATPTTHHCVHTTHPLHSSATNTAAHIETSLVSCTSLSTTITANICVHISRYTLRTTXASCAVALPLPLLTRRSXDTLIIHTPRNQWIPYCRVTSPTRSLLXTYHLFHSTLRLLLRPTAAXTRSRTTTXTLRASVRLLTSAPDDTLKRVTRSPSL

SEQ ID NO: 6174 - protein, 188 aa, Glycine max
  misc_feature (6)..(11): Xaa can be any naturally occurring amino acid
  misc_feature (22)..(22): Xaa can be any naturally occurring amino acid
  misc_feature (33)..(33): Xaa can be any naturally occurring amino acid
  misc_feature (42)..(42): Xaa can be any naturally occurring amino acid
  misc_feature (44)..(44): Xaa can be any naturally occurring amino acid
  misc_feature (57)..(57): Xaa can be any naturally occurring amino acid
  misc_feature (74)..(74): Xaa can be any naturally occurring amino acid
  misc_feature (78)..(79): Xaa can be any naturally occurring amino acid
  misc_feature (162)..(162): Xaa can be any naturally occurring amino acid
  misc_feature (171)..(171): Xaa can be any naturally occurring amino acid
  misc_feature (180)..(180): Xaa can be any naturally occurring amino acid
  misc_feature (185)..(185): Xaa can be any naturally occurring amino acid
  Coding DNA Sequence Number=SeqID_246
VCGAPXXXXXXVCVLCLFLASXVFQRALSHRFXPLSTTIDYXYXLQPSTDTSRRRDXISSKVITVSHILYIYMXHEDXXRLPPYARNAASRYRVSIRSHAPTLAQRKRYTHTQERWGVSRSSNYTRTYSKNTHAHQHTTKRMIGETRYNRDKYSARLRCSTXSDRQVRERXMMIQTPKYXRLTIXHYT

SEQ ID NO: 6175 - protein, 61 aa, Glycine max
  misc_feature (28)..(28): Xaa can be any naturally occurring amino acid
  Coding DNA Sequence Number=SeqID_248
  Gene Ontology: Mol. function=transferase activity, transferring glycosyl groups; Cellular component=integral to membrane; Biological process=metabolic process
  Homolog annotation: Hit_ID=Q8S9A0; Match level="QueryCoverage=83%, HitCoverage=10%, E-value=2e-18, Identity=75%"; Hit description =Glucosyltransferase-9
MLEAFSFGGWAPQILILSHPAIGGFITXGWNSTFEAICAGVPMLTWPLFADQFLNDNPFWC

SEQ ID NO: 6176 - protein, 68 aa, Glycine max
  misc_feature (10)..(10): Xaa can be any naturally occurring amino acid
  misc_feature (36)..(36): Xaa can be any naturally occurring amino acid
  Coding DNA Sequence Number=SeqID_249
GRTSGHHLEXHVDWLLSGITMIISTFHPAMGCCLVXHQCHLFMVVVHTSLHFYLNPYSLNNSSKSLSY

SEQ ID NO: 6177 - protein, 106 aa, Glycine max
  misc_feature (19)..(19): Xaa can be any naturally occurring amino acid
  misc_feature (25)..(25): Xaa can be any naturally occurring amino acid
  misc_feature (54)..(54): Xaa can be any naturally occurring amino acid
  misc_feature (58)..(58): Xaa can be any naturally occurring amino acid
  misc_feature (66)..(66): Xaa can be any naturally occurring amino acid
  Coding DNA Sequence Number=SeqID_251
DTMRGVHEAHQLEYKIRRXLLIYNXYTLTSLYYYRINGQVEQDLSCRQRGLSRXTYKXPRRQASTXRLPDYRRQQIPTRRSGLRSPQLQHKEKALPRKERDRIINT

SEQ ID NO: 6178 - protein, 230 aa, Glycine max
  misc_feature (74)..(75): Xaa can be any naturally occurring amino acid
  misc_feature (106)..(106): Xaa can be any naturally occurring amino acid
  Coding DNA Sequence Number=SeqID_2509
  Gene Ontology: Mol. function=nucleoside-triphosphatase activity; Cellular component=nucleus; Biological process=regulation of transcription, DNA-dependent
  Homolog annotation: Hit_ID=O81047; Match level="QueryCoverage=67%, HitCoverage=24%, E-value=6e-58, Identity=75%"; Hit description =Putative helicase
YPWEFVSKQNVIKLLILMRFRCDMEEKKDEEDSTFNEGEAEVTVTHAKRLVQSGVLPSDIGIITPYAARVVLLXXLKNKEDRLKDVEISTVDGFQGREKEAIIISXMVRSNSFFVVGFLSDRRRMNGAVTRSTSQCCLVCDTETASGDGFLKRLIESFEEHGESLSASECQSEWARFTRLRFLLLHPGINLVVLLGLLFLKSFLFSDWKKLFIPFFQKNFRSLLMVLHRR

SEQ ID NO: 6179 - protein, 238 aa, Glycine max
  Coding DNA Sequence Number=SeqID_2510
  Homolog annotation: Hit_ID=Q4PI84; Match level="QueryCoverage=21%, HitCoverage=10%, E-value=9e-09, Identity=60%"; Hit description =Putative uncharacterized protein
  Pfam annotation: Domain name=DUF947; Domain location=64-223; Score =87.2; E_value=5.4e-23; Accession=PF06102.2; Description=Domain of unknown function (DUF947)
MSSDEEAYLKEEEQKIREALKHASFETLLKLREEPAEAPGLQQQLTSNRKKQKQLQQKKEEQLKKKAKNQPVERSSKIPVSRLEKVVDSKKSKGRDPRFNSLSGSLNPELFKKSYEFLGEKKKKEIEILSKEMKKKKYTPEQKQKLQDAIAQNKSDLGRARELDLANQTRKEIKAKTKGQFFLKKGEFKKKVLEKKFDNLDSRKKLEAKLNEKRARVTKRMHRDMQVLEARKERRDNL

SEQ ID NO: 6180 - protein, 56 aa, Glycine max
  Coding DNA Sequence Number=SeqID_2511
EGDRVNPLVLAMEVIHHFHFHLIPEILYVKFSGLRTLSLGATGDSIFFGCLTLEQF

SEQ ID NO: 6181 - protein, 103 aa, Glycine max
  misc_feature (86)..(86): Xaa can be any naturally occurring amino acid
  misc_feature (89)..(89): Xaa can be any naturally occurring amino acid
  misc_feature (99)..(99): Xaa can be any naturally occurring amino acid
  Coding DNA Sequence Number=SeqID_2513
  Homolog annotation: Hit_ID=A7P4H3; Match level="QueryCoverage=97%, HitCoverage=60%, E-value=1e-26, Identity=56%"; Hit description =Chromosome chr4 scaffold_6, whole genome shotgun sequence
  Pfam annotation: Domain name=DUF866; Domain location=1-104; Score= -21.1; E_value=0.00012; Accession=PF05907.3; Description=Eukaryotic protein of unknown function (DUF866)
ANFMLMITAELENLTNLQPQDGCDDPNSSYLFKLKCPRCGELSQNDTCAALNDTVPLPVGKSTAPLIQPRQLSWRDGSGTMMERKXKPXTQEITESRKXAPPT

SEQ ID NO: 6182 - protein, 109 aa, Glycine max
  misc_feature (87)..(87): Xaa can be any naturally occurring amino acid
  misc_feature (102)..(102): Xaa can be any naturally occurring amino acid
  Coding DNA Sequence Number=SeqID_2514
VRYSACEPSEMMVVSKMARDMCSRAHHPRARDGNEGESIMSCDALVLYFSLYLRRSVSVAASVLHSRLASRQMPVGACTLISLLSHXYSQDGYVLPLPILSXATIDADR

SEQ ID NO: 6183 - protein, 177 aa, Glycine max
  misc_feature (65)..(65): Xaa can be any naturally occurring amino acid
  misc_feature (85)..(85): Xaa can be any naturally occurring amino acid
  misc_feature (159)..(159): Xaa can be any naturally occurring amino acid
  Coding DNA Sequence Number=SeqID_2516
  Gene Ontology: Mol. function=structural constituent of ribosome; Cellular component=ribonucleoprotein complex; Biological process =translation
  Homolog annotation: Hit_ID=O80360; Match level="QueryCoverage=83%, HitCoverage=56%, E-value=5e-40, Identity=58%"; Hit description=50S ribosomal protein L3, chloroplast precursor
  Pfam annotation: Domain name=Ribosomal_L3; Domain location=44-177; Score=-35.6; E_value=2.4e-07; Accession=PF00297.12; Description =Ribosomal protein L3
MAMAADKLKQKSEQRYVGEGIEKIDMKGKVVMSMEAGIGVMGTKLGMMSYFVSGGEVVPVTVVGXNEGNIVAQIKTEATDGFDAXVQVGYRMVRDRKLTEPVIGHLQRVGAIPMRHLQEFRLQAIDGLDLNQRLVFDEIFKEGDLVDVSGTTMCKECQXKCMHHNFKRRSWTHVARL

SEQ ID NO: 6184 - protein, 184 aa, Glycine max
  Coding DNA Sequence Number=SeqID_1308
  Gene Ontology: Mol. function=translation elongation factor activity; Cellular component=cytoplasm; Biological process=translational elongation
  Homolog annotation: Hit_ID=P13905; Match level="QueryCoverage=100%, HitCoverage=40%, E-value=4e-44, Identity=54%"; Hit description =Elongation factor 1-alpha
  Pfam annotation: Domain name=GTP_EFTU; Domain location=1-173; Score= -73.5; E_value=0.011; Accession=PF00009.17; Description=Elongation factor Tu GTP binding domain
CIVLDAGGHTDLIKSERSGTSQAECAELIIYSTTGVFEAGMPNDGQSLAQALLSLTGGVKQMICRCNKMDAITHKYFIARNDEMAKERAADQNTAGYHHDDKPHATIKGFEGDNMIETPTKDDWNKGTTQENPLDESNEKKRGYDKSLQHPPPDANKNAGRGTVPVALVEMPPAKPGLRLISSP

SEQ ID NO: 6185 - protein, 147 aa, Glycine max
  misc_feature (18)..(18): Xaa can be any naturally occurring amino acid
  misc_feature (32)..(32): Xaa can be any naturally occurring amino acid
  misc_feature (36)..(36): Xaa can be any naturally occurring amino acid
  misc_feature (59)..(59): Xaa can be any naturally occurring amino acid
  misc_feature (61)..(63): Xaa can be any naturally occurring amino acid
  misc_feature (67)..(67): Xaa can be any naturally occurring amino acid
  misc_feature (71)..(72): Xaa can be any naturally occurring amino acid
  misc_feature (83)..(83): Xaa can be any naturally occurring amino acid
  misc_feature (86)..(86): Xaa can be any naturally occurring amino acid
  misc_feature (99)..(100): Xaa can be any naturally occurring amino acid
  misc_feature (103)..(103): Xaa can be any naturally occurring amino acid
  misc_feature (110)..(110): Xaa can be any naturally occurring amino acid
  misc_feature (112)..(112): Xaa can be any naturally occurring amino acid
  misc_feature (116)..(116): Xaa can be any naturally occurring amino acid
  misc_feature (122)..(122): Xaa can be any naturally occurring amino acid
  misc_feature (133)..(133): Xaa can be any naturally occurring amino acid
  misc_feature (136)..(136): Xaa can be any naturally occurring amino acid
  misc_feature (139)..(139): Xaa can be any naturally occurring amino acid
  misc_feature (144)..(144): Xaa can be any naturally occurring amino acid
  Coding DNA Sequence Number=SeqID_121
  Subcellular localization annotation: CTP_CleavageSite=37; ConfidenceScore=5.13e-01
VDYHYTSTALFSVCCLCXACLPIARAASLSLXASLXRSHTERSTRNRSCATQLAHSTHXPXXXLRCXVRTXXLHLSRVESECXRGXLYHHEVTHASSIXXILXTRPSGCXCXCVWXGVPRIXYQTIMKIYHTXECXVEXLHTPXIPP

SEQ ID NO: 6186 - protein, 161 aa, Glycine max
  misc_feature (61)..(61): Xaa can be any naturally occurring amino acid
  Coding DNA Sequence Number=SeqID_123
  Gene Ontology: Mol. function=methionine adenosyltransferase activity; Cellular component=cytoplasm; Biological process=one-carbon compound metabolic process
  Homolog annotation: Hit_ID=P49612; Match level="QueryCoverage=99%, HitCoverage=43%, E-value=5e-45, Identity=60%"; Hit description=S -adenosylmethionine synthetase 1
  Pfam annotation: Domain name=S-AdoMet_synt_C; Domain location=10-152; Score=217.8; E_value=2.5e-62; Accession=PF02773.6; Description=S -adenosylmethionine synthetase, C-te
PLNPFGRFVIGGPPGDAGLPGPKIIIDTFGGWGAHGGGAFSGKDPPKVDRSGASLVRQAAXSIVASGLAKRGLGQVFYALGGAEPLSVFVAPYGPGKIPDKEIFPLVKENFDFRPGMISLPLDFKRGGNNRFLKTAAYGPFGREGPAFPWEVVQPPQWGKA

SEQ ID NO: 6187 - protein, 77 aa, Glycine max
  misc_feature (39)..(40): Xaa can be any naturally occurring amino acid
  Coding DNA Sequence Number=SeqID_124
QPYQLFNLLRLALLILSYGRLYKSRIYMLCLGVRHPAKXXKNTTNPTTPRNALFIVSICMSCIYCPHSPYVCMLNMH

SEQ ID NO: 6188 - protein, 156 aa, Glycine max
  misc_feature (50)..(50): Xaa can be any naturally occurring amino acid
  misc_feature (83)..(83): Xaa can be any naturally occurring amino acid
  Coding DNA Sequence Number=SeqID_126
  Gene Ontology: Mol. function=magnesium ion binding; Cellular component=integral to membrane; Biological process=photosynthesis, light harvesting
  Homolog annotation: Hit_ID=A7PSQ5; Match level="QueryCoverage=91%, HitCoverage=50%, E-value=2e-28, Identity=50%"; Hit description =Chromosome chr6 scaffold_28, whole genome shotgun sequence
GKAGLIPQETALPWFRTGVFPPAGTLHYWADSYTLVVFEMALDGIAKHRXFQTWANPGLWAKHYSLELKKGLGGSGEPSFPRXEPFFNPIWFLKGIKTPLKILTLTEGKKWKVGFFWKTVVHSFPNPFSTGVWPTQKLLKNILWNPPGNKHFLSKF

SEQ ID NO: 6189 - protein, 255 aa, Glycine max
  misc_feature (19)..(19): Xaa can be any naturally occurring amino acid
  misc_feature (56)..(56): Xaa can be any naturally occurring amino acid
  misc_feature (78)..(78): Xaa can be any naturally occurring amino acid
  misc_feature (83)..(83): Xaa can be any naturally occurring amino acid
  misc_feature (86)..(86): Xaa can be any naturally occurring amino acid
  misc_feature (97)..(97): Xaa can be any naturally occurring amino acid
  misc_feature (103)..(103): Xaa can be any naturally occurring amino acid
  misc_feature (110)..(110): Xaa can be any naturally occurring amino acid
  misc_feature (130)..(130): Xaa can be any naturally occurring amino acid
  misc_feature (139)..(139): Xaa can be any naturally occurring amino acid
  misc_feature (200)..(200): Xaa can be any naturally occurring amino acid
  misc_feature (224)..(224): Xaa can be any naturally occurring amino acid
  misc_feature (230)..(230): Xaa can be any naturally occurring amino acid
  misc_feature (232)..(232): Xaa can be any naturally occurring amino acid
  misc_feature (242)..(242): Xaa can be any naturally occurring amino acid
  misc_feature (244)..(244): Xaa can be any naturally occurring amino acid
  Coding DNA Sequence Number=SeqID_127
SLSDTHATSDLQWCLRSDXYDLIYMTYIFIYIDEHDERSHISNIVYMYNTHTHCCXTALEYHYRDVSRLFDLAALRLXARCAXTHXLPHPPHSTRLXMHSPRXSHYLRFXHDCTSLSLLYHTSLYLTHTXPSPATLHCXYTLLSLRIYILRLYAAITIYSLSLVSILILAYTPHTSYADYLYINCPDPLSRVPSSHLCAXHLAASRSHTLSLTLNILVTYTALXNHAPPXFXKDSQRRLHQXRXYIDDIEQLYNY

SEQ ID NO: 6190 - protein, 159 aa, Glycine max
  misc_feature (151)..(151): Xaa can be any naturally occurring amino acid
  misc_feature (158)..(158): Xaa can be any naturally occurring amino acid
  Coding DNA Sequence Number=SeqID_129
NLNLSYRLEQVRRHQEKFKMKTSISVFLVAAVLVLVINQCMASHGKGHDHKNWKDNVKVEIEKLDPNHLRSELLEHLKEFSDPAKFYPKALDEIDTMLSIYKERDPQDLSTKELITKTEKLETELKKACGSEVKISTLTRAWATVSINNWXIHLWTIXI

SEQ ID NO: 6191 - protein, 291 aa, Glycine max
  Coding DNA Sequence Number=SeqID_131
  Gene Ontology: Cellular component=integral to membrane; Biological process=protein transport
  Homolog annotation: Hit_ID=UPI0000048228; Match level="QueryCoverage =100%, HitCoverage=100%, E-value=1e-120, Identity=73%"; Hit description=secretory carrier membrane protein (SCAMP) family protein
  Pfam annotation: Domain name=SCAMP; Domain location=99-273; Score =390.9; E_value=1.9e-114; Accession=PF04144.4; Description=SCAMP family
MAGRYDRNPFDEGDEVNPFANPGSVPAASSSRLSPLPPEPAGFGFGRTVDVPLDRPGSGAQDLKKKEKELQAKEAELKRREQDLKRKEDAAARAGIVIEVKNWPPLFPLIHHDIANEIPIRLQRLQYIAFSTYLGLVLALFWNVIAVTTAWIKGEGVTIWLLALIYFISGVPGGYVLWYRPLYRAFRNDSALSFGWFFLFYMLHIAFCVFAAVAPPVVFKGKSLAGILPALDMLSSQALVGIFYFIGFAFFCLESVVSIWVIQQVYMYFRGSGKADEMKRDAARGAMRAAV

SEQ ID NO: 6192 - protein, 175 aa, Glycine max
  misc_feature (63)..(63): Xaa can be any naturally occurring amino acid
  misc_feature (114)..(114): Xaa can be any naturally occurring amino acid
  Coding DNA Sequence Number=SeqID_2517
GVAPATGLVRSRACSHTHTTLPHTHLSPVLFRVTVVLYVEVCVWLLWCVAYLFGGTTVYDGVXTCGCVSPLSPSRYAWPATSPSRLVGRPAFSHLIFAQSLSAATLRDPLHEHXYSNTASQHKRSSNDVSRHQTHNYYTSIHEHKSRRKRSHTRYYHYLTRLLGRPPAPQHRHPL

SEQ ID NO: 6193 - protein, 117 aa, Glycine max
  Coding DNA Sequence Number=SeqID_2519
  Homolog annotation: Hit_ID=Q93WK6; Match level="QueryCoverage=94%, HitCoverage=100%, E-value=2e-33, Identity=61%"; Hit description =Putative uncharacterized protein At1g19530
MGSLMSGWDSPTKDPNSVRRCKSLTREEIDAFWKTKKKTEEKHVQAVSNLVAQEVAESQGIEDRYENQSKTTGWWKRSNWAFLNEPREEEGRPNNYVPQFQVAHIAKIASNSAGVTG

SEQ ID NO: 6194 - protein, 90 aa, Glycine max
  misc_feature (23)..(23): Xaa can be any naturally occurring amino acid
  misc_feature (53)..(53): Xaa can be any naturally occurring amino acid
  Coding DNA Sequence Number=SeqID_2520
  Homolog annotation: Hit_ID=Q9SJZ6; Match level="QueryCoverage=92%, HitCoverage=37%, E-value=5e-30, Identity=75%"; Hit description =Expressed protein
MGYGILGQGNIKTQHVEGLEILXKGLCGFQRKRLRIHEICLKSGPHLGTVASXVRLLCDLDQAEPSWTVKHVCGAMRGAGAKQISVLGRS

SEQ ID NO: 6195 - protein, 137 aa, Glycine max
  misc_feature (82)..(82): Xaa can be any naturally occurring amino acid
  misc_feature (105)..(105): Xaa can be any naturally occurring amino acid
  misc_feature (111)..(111): Xaa can be any naturally occurring amino acid
  misc_feature (123)..(123): Xaa can be any naturally occurring amino acid
  Coding DNA Sequence Number=SeqID_2521
  Gene Ontology: Mol. function=structural constituent of ribosome; Cellular component=intracellular; Biological process=protein modification process
  Homolog annotation: Hit_ID=A8N901; Match level="QueryCoverage=100%, HitCoverage=86%, E-value=6e-39, Identity=61%"; Hit description =Ubiquitin
  Pfam annotation: Domain name=Ribosomal_S27; Domain location=98-137; Score=43.2; E_value=9.1e-10; Accession=PF01599.9; Description =Ribosomal protein S27a
  Pfam annotation: Domain name=ubiquitin; Domain location=3-71; Score =93.6; E_value=6.2e-25; Accession=PF00240.13; Description=Ubiquitin family
  Pfam module annotation: Pfam domain module=Ribosomal_S27::ubiquitin; Domain location=98-137::3-71
FVKTVRGKTITLEVESSDTIDNVKAKIQDKEGIPPDQKCLIFAGKQLEDGRTLADYHIQNVFFIHRDLRLRGGVNPRNKKTXTKPKKIKHEHKKGKVALLQVYKXEDSGKXRRLRKECPKAEXGAGNFMANHFDRHY

SEQ ID NO: 6196 - protein, 138 aa, Glycine max
  misc_feature (30)..(30): Xaa can be any naturally occurring amino acid
  misc_feature (35)..(35): Xaa can be any naturally occurring amino acid
  misc_feature (42)..(42): Xaa can be any naturally occurring amino acid
  misc_feature (52)..(52): Xaa can be any naturally occurring amino acid
  misc_feature (62)..(62): Xaa can be any naturally occurring amino acid
  misc_feature (73)..(73): Xaa can be any naturally occurring amino acid
  misc_feature (78)..(78): Xaa can be any naturally occurring amino acid
  misc_feature (94)..(94): Xaa can be any naturally occurring amino acid
  misc_feature (97)..(97): Xaa can be any naturally occurring amino acid
  misc_feature (105)..(105): Xaa can be any naturally occurring amino acid
  misc_feature (107)..(107): Xaa can be any naturally occurring amino acid
  misc_feature (113)..(113): Xaa can be any naturally occurring amino acid
  misc_feature (117)..(117): Xaa can be any naturally occurring amino acid
  misc_feature (120)..(122): Xaa can be any naturally occurring amino acid
  misc_feature (125)..(126): Xaa can be any naturally occurring amino acid
  misc_feature (129)..(129): Xaa can be any naturally occurring amino acid
  misc_feature (131)..(132): Xaa can be any naturally occurring amino acid
  misc_feature (137)..(137): Xaa can be any naturally occurring amino acid
  Coding DNA Sequence Number=SeqID_2522
  Subcellular localization annotation: CTP_CleavageSite=44; ConfidenceScore=5.09e-01
CDVVCYASPSTIPTINIHNSTHRRSDMMAXTRRVXTPRERCXAFAMHLVSPXIAQNQSQDYXVIHITVSVYNXYHTHXMLTTLYRNKHNTRCGXLCXPWCCAALXSXGRWRGXGGCXVAXXXSLXXSLXSXXLAPRXQ

SEQ ID NO: 6197 - protein, 120 aa, Glycine max
  misc_feature (9)..(9): Xaa can be any naturally occurring amino acid
  misc_feature (14)..(14): Xaa can be any naturally occurring amino acid
  misc_feature (103)..(103): Xaa can be any naturally occurring amino acid
  misc_feature (106)..(106): Xaa can be any naturally occurring amino acid
  Coding DNA Sequence Number=SeqID_2524
  Subcellular localization annotation: CTP_CleavageSite=54; ConfidenceScore=5.19e-01
IASLAARIXNSLLXLRRCRYTPLSSSLYILLSLHTLVSTLRPRRATRHARYDVRSATTRSLSSLPSLCGLAFCVVCYIELASDVCRSFILSTIVSVVSDVTSXRRXRYALTGAWRRAPSQ

SEQ ID NO: 6198 - protein, 118 aa, Glycine max
  misc_feature (12)..(12): Xaa can be any naturally occurring amino acid
  misc_feature (62)..(62): Xaa can be any naturally occurring amino acid
  misc_feature (94)..(94): Xaa can be any naturally occurring amino acid
  misc_feature (105)..(105): Xaa can be any naturally occurring amino acid
  misc_feature (113)..(113): Xaa can be any naturally occurring amino acid
  Coding DNA Sequence Number=SeqID_2526
  Gene Ontology: Mol. function=structural constituent of ribosome; Cellular component=ribonucleoprotein complex; Biological process =translational elongation
  Homolog annotation: Hit_ID=Q9LH85; Match level="QueryCoverage=40%, HitCoverage=41%, E-value=3e-12, Identity=70%"; Hit description=60S acidic ribosomal protein P2-3
  Pfam annotation: Domain name=Ribosomal_60s; Domain location=28-117; Score=38.0; E_value=3.4e-08; Accession=PF00428.9; Description=60s Acidic ribosomal protein
QSKTPQSKKKKXKVIAAFLLAKLAGNEKPTKDDLKSIFDSVGAEFDEAKTDLFFSLVKDHDXAELIAVGREKMGALSSGGAGVAMVAGGGGGDXPSAAEPAAETXKVEEEKEXSDDGE

SEQ ID NO: 6199 - protein, 212 aa, Glycine max
  Coding DNA Sequence Number=SeqID_2527
  Gene Ontology: Mol. function=structural constituent of ribosome; Cellular component=cytosolic small ribosomal subunit; Biological process=glucose homeostasis
  Homolog annotation: Hit_ID=A6RU16; Match level="QueryCoverage=100%, HitCoverage=89%, E-value=8e-71, Identity=64%"; Hit description=40S ribosomal protein S6
  Pfam annotation: Domain name=Ribosomal_S6e; Domain location=1-127; Score=270.5; E_value=3.5e-78; Accession=PF01092.9; Description =Ribosomal protein S6e
MKLNISCPSTGCQKPIAIDDEKKLSAFYGRRMGQEVDGEHLGDEFKGYVFKITGGNDKDGFSMKQGVLVQGRVRLLMKAGHKCYRPRRAGERKRKSVRGCIVGPDLSVIALAIVKIGEQPIAGLTDTKQPKRLGPKRATRIRKLFALTKDDDVRRFVIRRKIEKEGKPVRYKAPKIQRLVTDARLRRKRVYKAHKKARWERTRAAVTEYQKV

SEQ ID NO: 6200 - protein, 49 aa, Glycine max
  Coding DNA Sequence Number=SeqID_2528
SNGNKTSAVDEYGTGMNFTHPYQTSKKKAFFKDRYEKNFHFYCLQSSLA

SEQ ID NO: 6201 - protein, 69 aa, Glycine max
  misc_feature (19)..(19): Xaa can be any naturally occurring amino acid
  misc_feature (30)..(30): Xaa can be any naturally occurring amino acid
  Coding DNA Sequence Number=SeqID_2530
LYLYFAHLLLSFIVSLTRXLYAIYISVHIXVHLLFFYWISPIMSLIFIINYIYLISSVSYIIYHYIIRY

SEQ ID NO: 6202 - protein, 68 aa, Glycine max
  Coding DNA Sequence Number=SeqID_2532
NNVDEGRSIRCGAWHHLLLLCPRLQKETRGRNYRKQTVERSQLHAVHHVFFTCLIHEVICGGTKKKKK

SEQ ID NO: 6203 - protein, 103 aa, Glycine max
  misc_feature (101)..(101): Xaa can be any naturally occurring amino acid
  Coding DNA Sequence Number=SeqID_2533
LSLPSIFIIYSTFAARLISFNRAPYMYIHRLYATARLCGVYYARRGARSARSYAAICSRNIMVGHRGSEVIISRRPSNIGGAVGVESILYNRCASAHRGLXVL

SEQ ID NO: 6204 - protein, 66 aa, Glycine max
  misc_feature (4)..(9): Xaa can be any naturally occurring amino acid
  misc_feature (30)..(30): Xaa can be any naturally occurring amino acid
  misc_feature (35)..(35): Xaa can be any naturally occurring amino acid
  misc_feature (54)..(55): Xaa can be any naturally occurring amino acid
  Coding DNA Sequence Number=SeqID_2535
EECXXXXXXMTAPCEPCYSSWHLCPSKIVXRSVIXNHIIVISILFSPRLFETLXXVLVIFKLLCGR

SEQ ID NO: 6205 - protein, 103 aa, Glycine max
  misc_feature (27)..(27): Xaa can be any naturally occurring amino acid
  misc_feature (61)..(61): Xaa can be any naturally occurring amino acid
  misc_feature (92)..(92): Xaa can be any naturally occurring amino acid
  Coding DNA Sequence Number=SeqID_2537
  Subcellular localization annotation: CTP_CleavageSite=38; ConfidenceScore=5.27e-01
VMLQNGACSKSTVFRVVDLHARACQTXRRRERLSGCVCCFMYVATPLIISRVRRGARCARXRVRPPSHSHHTSGSDESLFFTGGQWWPPARXTYPTHVCTCYI

SEQ ID NO: 6206 - protein, 168 aa, Glycine max
  Coding DNA Sequence Number=SeqID_2539
  Homolog annotation: Hit_ID=A7QKF6; Match level="QueryCoverage=45%, HitCoverage=32%, E-value=4e-25, Identity=72%"; Hit description =Chromosome chr2 scaffold_112, whole genome shotgun sequence
MTQKQRTRIPDSMETQYEESEKDESSSSYSSSEDEEEEIEKELADVTFEELQKARSNGAHAFFQKPKEDIKLKRANKNRPMEASSKKPVTGFREVIQAPKKVVRDPRFESLCGKLDPDGNCQMLPVSAALDICTLFLLCSFFSCLMLSPFTLVLRNAITLVAIIITNF

SEQ ID NO: 6207 - protein, 156 aa, Glycine max
  misc_feature (1)..(1): Xaa can be any naturally occurring amino acid
  misc_feature (17)..(17): Xaa can be any naturally occurring amino acid
  misc_feature (22)..(23): Xaa can be any naturally occurring amino acid
  misc_feature (38)..(38): Xaa can be any naturally occurring amino acid
  misc_feature (42)..(44): Xaa can be any naturally occurring amino acid
  misc_feature (75)..(75): Xaa can be any naturally occurring amino acid
  misc_feature (81)..(82): Xaa can be any naturally occurring amino acid
  misc_feature (89)..(91): Xaa can be any naturally occurring amino acid
  misc_feature (99)..(99): Xaa can be any naturally occurring amino acid
  misc_feature (136)..(136): Xaa can be any naturally occurring amino acid
  misc_feature (142)..(144): Xaa can be any naturally occurring amino acid
  misc_feature (146)..(146): Xaa can be any naturally occurring amino acid
  misc_feature (154)..(154): Xaa can be any naturally occurring amino acid
  misc_feature (156)..(156): Xaa can be any naturally occurring amino acid
  Coding DNA Sequence Number=SeqID_2540
XILLPPQRAQRACVSSXPRATXXIYNYTNCTYRMSSDXREDXXXRKSNNHPTYKNTMILNEDSHPYSYIYYIFFXYATYTXXRKEYTRXXXIRCMYCRXSSPPPDRATDASAADNDEYRVRVNVRQKYTCSMIALXTSHDLXXXTXAIVSDSVXCX

SEQ ID NO: 6208 - protein, 87 aa, Glycine max
  misc_feature (12)..(12): Xaa can be any naturally occurring amino acid
  misc_feature (49)..(49): Xaa can be any naturally occurring amino acid
  misc_feature (77)..(77): Xaa can be any naturally occurring amino acid
  Coding DNA Sequence Number=SeqID_2542
DGHTSERAAGVXHTSSDRDVMQSDYTTRAYINNIRCRHGVCESVRMMIXDITICLRATYVVRVLIQKSVYYIIRRSXCGSAAQHNIE

SEQ ID NO: 6209 - protein, 123 aa, Glycine max
  misc_feature (6)..(6): Xaa can be any naturally occurring amino acid
  misc_feature (10)..(11): Xaa can be any naturally occurring amino acid
  misc_feature (23)..(23): Xaa can be any naturally occurring amino acid
  misc_feature (27)..(27): Xaa can be any naturally occurring amino acid
  misc_feature (91)..(91): Xaa can be any naturally occurring amino acid
  misc_feature (95)..(95): Xaa can be any naturally occurring amino acid
  misc_feature (97)..(97): Xaa can be any naturally occurring amino acid
  Coding DNA Sequence Number=SeqID_2544
TMSSIXYGKXXTHHYVSTILFTXISEXLRTRYFILILLSEPSVTSLLAIRHAHAARDMECCRGRRAEVTLVAFIYTSHRAHYVICRMEVCXHGAXGXLIFSVTWQSLLDDRLMTLLTRRPPAT

SEQ ID NO: 6210 - protein, 90 aa, Glycine max
  misc_feature (30)..(30): Xaa can be any naturally occurring amino acid
  misc_feature (55)..(55): Xaa can be any naturally occurring amino acid
  misc_feature (73)..(73): Xaa can be any naturally occurring amino acid
  misc_feature (76)..(76): Xaa can be any naturally occurring amino acid
  misc_feature (82)..(83): Xaa can be any naturally occurring amino acid
  Coding DNA Sequence Number=SeqID_2545
MLDHDMHNSSCRHADHQSSTLVYYEAMGTXSYCIISVVYLPLSLLSLIFSILHMXYSTQSPPHTTHIHLVVPXYDXYSLLLXXIISHDDN

SEQ ID NO: 6211 - protein, 42 aa, Glycine max
  Coding DNA Sequence Number=SeqID_2547
  Gene Ontology: Mol. function=protein binding; Cellular component =membrane; Biological process=protein transport
  Homolog annotation: Hit_ID=A9PB46; Match level="QueryCoverage=95%, HitCoverage=14%, E-value=6e-10, Identity=82%"; Hit description =Putative uncharacterized protein
SSNAYQKVEHEKAKQDDALEDLSGILGDLKGMAIGMGSELDK

SEQ ID NO: 6212 - protein, 152 aa, Glycine max
  misc_feature (96)..(96): Xaa can be any naturally occurring amino acid
  misc_feature (116)..(116): Xaa can be any naturally occurring amino acid
  Coding DNA Sequence Number=SeqID_2548
  Gene Ontology: Mol. function=protein binding; Cellular component =chloroplast; Biological process=iron-sulfur cluster assembly
  Homolog annotation: Hit_ID=A7R5P1; Match level="QueryCoverage=99%, HitCoverage=27%, E-value=1e-43, Identity=61%"; Hit description =Chromosome undetermined scaffold_1017, whole genome shotgun sequence
PPIDFQNICFYSAPANKPSLHSLDDADPELLRYFDKLGVPLNEQKRLANVSVDAVLDSASIATTHRRTLYTACAILCSISDAIKEYPGSVRKHTRXNTRSYDTCSIPLCTTVFTDXSSRYIPMDTNRPVHISTYFTDHREQTWLICRTVIVP

SEQ ID NO: 6213 - protein, 106 aa, Glycine max
  misc_feature (3)..(3): Xaa can be any naturally occurring amino acid
  misc_feature (8)..(11): Xaa can be any naturally occurring amino acid
  misc_feature (13)..(20): Xaa can be any naturally occurring amino acid
  misc_feature (22)..(22): Xaa can be any naturally occurring amino acid
  misc_feature (24)..(26): Xaa can be any naturally occurring amino acid
  misc_feature (28)..(28): Xaa can be any naturally occurring amino acid
  misc_feature (31)..(31): Xaa can be any naturally occurring amino acid
  misc_feature (33)..(33): Xaa can be any naturally occurring amino acid
  misc_feature (38)..(39): Xaa can be any naturally occurring amino acid
  misc_feature (42)..(43): Xaa can be any naturally occurring amino acid
  misc_feature (47)..(47): Xaa can be any naturally occurring amino acid
  misc_feature (49)..(49): Xaa can be any naturally occurring amino acid
  misc_feature (52)..(52): Xaa can be any naturally occurring amino acid
  misc_feature (54)..(58): Xaa can be any naturally occurring amino acid
  misc_feature (60)..(61): Xaa can be any naturally occurring amino acid
  misc_feature (64)..(64): Xaa can be any naturally occurring amino acid
  misc_feature (69)..(77): Xaa can be any naturally occurring amino acid
  misc_feature (79)..(80): Xaa can be any naturally occurring amino acid
  misc_feature (92)..(92): Xaa can be any naturally occurring amino acid
  misc_feature (97)..(97): Xaa can be any naturally occurring amino acid
  misc_feature (99)..(100): Xaa can be any naturally occurring amino acid
  misc_feature (102)..(102): Xaa can be any naturally occurring amino acid
  misc_feature (104)..(106): Xaa can be any naturally occurring amino acid
  Coding DNA Sequence Number=SeqID_2549
VGXVCWGXXXXPXXXXXXXXLXSXXXFXSVXIXYILLXXFTXXSPSXHXNTXHXXXXXIXXSLXTPYVXXXXXXXXXIXXCVAYDDESCLLXIFLAXIXXMXGXXX

SEQ ID NO: 6214 - protein, 131 aa, Glycine max
  misc_feature (13)..(13): Xaa can be any naturally occurring amino acid
  misc_feature (20)..(20): Xaa can be any naturally occurring amino acid
  misc_feature (30)..(30): Xaa can be any naturally occurring amino acid
  misc_feature (35)..(35): Xaa can be any naturally occurring amino acid
  misc_feature (60)..(60): Xaa can be any naturally occurring amino acid
  misc_feature (74)..(74): Xaa can be any naturally occurring amino acid
  misc_feature (90)..(90): Xaa can be any naturally occurring amino acid
  misc_feature (92)..(92): Xaa can be any naturally occurring amino acid
  misc_feature (107)..(107): Xaa can be any naturally occurring amino acid
  misc_feature (110)..(110): Xaa can be any naturally occurring amino acid
  misc_feature (116)..(116): Xaa can be any naturally occurring amino acid
  Coding DNA Sequence Number=SeqID_2551
SEKCVELYIHTGXRSPLDKXQLCATTLIPXTENTXENDTIASTITTDRVTRAHHLSHCGXVAQISRCTRTYSSXEYMTHLARLPLHIAPXMXLCVLDTQTKHTLKTXGGXTTTLYXTLYNSQPRVSYASSH

SEQ ID NO: 6215 - protein, 102 aa, Glycine max
  misc_feature (1)..(1): Xaa can be any naturally occurring amino acid
  misc_feature (4)..(4): Xaa can be any naturally occurring amino acid
  misc_feature (6)..(6): Xaa can be any naturally occurring amino acid
  misc_feature (8)..(8): Xaa can be any naturally occurring amino acid
  misc_feature (14)..(14): Xaa can be any naturally occurring amino acid
  misc_feature (17)..(17): Xaa can be any naturally occurring amino acid
  misc_feature (22)..(22): Xaa can be any naturally occurring amino acid
  misc_feature (25)..(26): Xaa can be any naturally occurring amino acid
  misc_feature (28)..(28): Xaa can be any naturally occurring amino acid
  misc_feature (30)..(31): Xaa can be any naturally occurring amino acid
  misc_feature (40)..(40): Xaa can be any naturally occurring amino acid
  misc_feature (44)..(45): Xaa can be any naturally occurring amino acid
  misc_feature (51)..(52): Xaa can be any naturally occurring amino acid
  misc_feature (66)..(66): Xaa can be any naturally occurring amino acid
  misc_feature (97)..(97): Xaa can be any naturally occurring amino acid
  misc_feature (101)..(101): Xaa can be any naturally occurring amino acid
  Coding DNA Sequence Number=SeqID_2553
XKEXPXSXSQRGAXSSXKRAKXPKXXEXLXXNDTQRGLKXEFRXXKANRRXXRGSHLRKGSQGGPXSRCLKSLLECVIEQPHGKNGGRILDSLMSFXILSXH

SEQ ID NO: 6216 - protein, 77 aa, Glycine max
  Coding DNA Sequence Number=SeqID_2555
  Homolog annotation: Hit_ID=A4BIV2; Match level="QueryCoverage=96%, HitCoverage=16%, E-value=6e-23, Identity=71%"; Hit description =Putative uncharacterized protein
KQPTHQLAANLRRLFSGIVTGNVKEYGIKAIEKHGPYEIAGDPEIMKLLDDLLAAFVAQRRMKLPGTTYKPVYRLVA

SEQ ID NO: 6217 - protein, 185 aa, Glycine max
  misc_feature (39)..(39): Xaa can be any naturally occurring amino acid
  misc_feature (57)..(57): Xaa can be any naturally occurring amino acid
  misc_feature (88)..(88): Xaa can be any naturally occurring amino acid
  misc_feature (123)..(123): Xaa can be any naturally occurring amino acid
  misc_feature (164)..(164): Xaa can be any naturally occurring amino acid
  Coding DNA Sequence Number=SeqID_2556
  Gene Ontology: Mol. function=helicase activity; Biological process =protein amino acid phosphorylation
  Homolog annotation: Hit_ID=Q2QZU2; Match level="QueryCoverage=90%, HitCoverage=10%, E-value=3e-45, Identity=53%"; Hit description=AT hook motif-containing protein, putative, expressed
AFFFFFLWNDIYAHTTNGEKYYMRMLLNARKGCMSFKRXTVNGVVHTSYKSACEALXISTTEWIECINGASDWVIGYQLKQLFTTLMXIEVTSPKILWGTCSKVLSEHMEYRQRRLLNYPTLXLTDTQKQGYALVKVDKLMRQAGKTFKEYPGIQHSDSSQIKXLGNRLLNEEITSFQDLWQYEL

SEQ ID NO: 6218 - protein, 87 aa, Glycine max
  Coding DNA Sequence Number=SeqID_2557
FQYWVSYWLHNQATRFGGRPSVGLFLITEAHKRALLKELSRVHQGLPVVGMKISRKRSDRLGLARIMVTASSVTMLSMPMSPMIGIQ

SEQ ID NO: 6219 - protein, 179 aa, Glycine max
  Coding DNA Sequence Number=SeqID_2558
EHTVTPLEGSKEVSFGSLAEEEERRNGRNSHAASPNLSQSSAKNGLPRIICSPKRYCSPSRSTAGFSAVLIFPDGQSRSQRVLHFKNCGQEAQQRRAHRVLRGHPGRHCQGLSQAAREDEEAVVAGWHVRRSRHEDETTRGTGARWAAKFRGHDGARAEGLGEGEGDERLLQAEERGAD

SEQ ID NO: 6220 - protein, 112 aa, Glycine max
  misc_feature (73)..(73): Xaa can be any naturally occurring amino acid
  Coding DNA Sequence Number=SeqID_2560
  Gene Ontology: Cellular component=extracellular region
  Homolog annotation: Hit_ID=A3AB41; Match level="QueryCoverage=81%, HitCoverage=38%, E-value=2e-27, Identity=70%"; Hit description =Putative uncharacterized protein
MVARATATFLPVLSLLLLRAGADDDSAFVYAGCSQGRYDAGTQYESGVDSVLTSLANSAPYAPYANITSPSAXPPVAGLYQCRSDLPASVCTGWGVAMSQCVGLDAASDCVS

SEQ ID NO: 6221 - protein, 75 aa, Glycine max
  Coding DNA Sequence Number=SeqID_2561
LILKQLRPIFGSSVGSLVSRFYEHVCLLNSCRNPPHPPPHHFKIYISIISVMEFRFKEMFIVQTSKKKKKKGRPL

SEQ ID NO: 6222 - protein, 128 aa, Glycine max
  misc_feature (21)..(21): Xaa can be any naturally occurring amino acid
  misc_feature (27)..(27): Xaa can be any naturally occurring amino acid
  misc_feature (56)..(56): Xaa can be any naturally occurring amino acid
  misc_feature (97)..(98): Xaa can be any naturally occurring amino acid
  Coding DNA Sequence Number=SeqID_2563
YTRITQTYYGMILIALPKYDXIFVVCXVYHHKSTTHHLRPSRDVSHGAEAGRHDSXRAHDGGEDGIGGSRMNERVDGSERDDKLIPRPRPTTHQILXXIYIRNNTVSYPLTLSFIIPILCFHCHIYAS

SEQ ID NO: 6223 - protein, 167 aa, Glycine max
  Coding DNA Sequence Number=SeqID_2565
  Subcellular localization annotation: CTP_CleavageSite=39; ConfidenceScore=5.73e-01
TLDHSSPSSAQFARTPSPLPTPPPRILPSPARKPVSAPSAASASATVFWSLRGEECTEEGRILDITHRYVPEIAGVGLDGRGAGRHCLWLDKNMKNGSLAKSFYMEARCSPPAPMVNAPGPFIQKLTKNGGFKVGSLRPNPSQKGLAISGWGSRGKKKLLAEGYEGP

SEQ ID NO: 6224 - protein, 139 aa, Glycine max
  misc_feature (79)..(79): Xaa can be any naturally occurring amino acid
  misc_feature (95)..(95): Xaa can be any naturally occurring amino acid
  misc_feature (105)..(105): Xaa can be any naturally occurring amino acid
  misc_feature (109)..(109): Xaa can be any naturally occurring amino acid
  misc_feature (115)..(115): Xaa can be any naturally occurring amino acid
  misc_feature (127)..(128): Xaa can be any naturally occurring amino acid
  misc_feature (130)..(130): Xaa can be any naturally occurring amino acid
  misc_feature (134)..(134): Xaa can be any naturally occurring amino acid
  Coding DNA Sequence Number=SeqID_2567
ACTGTRGDYIYSGILGCISYSDRLLDVIKRSRSKFTFIHMIDECRPIVRRPTYYAVACIDVSFRVYARAVRIVSTNAMXVDAYDVSSRNESCHIXSERTYIVLHXMTVXLTRPYXHISVAAMRSICXXAXIESXNSARV

SEQ ID NO: 6225 - protein, 108 aa, Glycine max
  misc_feature (88)..(88): Xaa can be any naturally occurring amino acid
  Coding DNA Sequence Number=SeqID_2569
RGVSFAAHILSASRVIYALRLYAFTVLVFAALGLCPPSLSLEPYRDQRRAVDVCCSVVALLYALHIYSLFRRASVRVSADLSANRRVXSDAHILIGRTHINYICVCMI

SEQ ID NO: 6226 - protein, 110 aa, Glycine max
  misc_feature (58)..(58): Xaa can be any naturally occurring amino acid
  Coding DNA Sequence Number=SeqID_2571
  Gene Ontology: Mol. function=pyruvate decarboxylase activity; Cellular component=cytosol; Biological process=response to stress
  Homolog annotation: Hit_ID=Q684K0; Match level="QueryCoverage=95%, HitCoverage=18%, E-value=1e-37, Identity=74%"; Hit description =Pyruvate decarboxylase isozyme 1
KTIIFFINNGGYTIEVEIHDGPTNVIKNWGYPPFVGAIHNGQGKFWPPKVRPKDYFFXAIAKAFGPQKNSLCFIKVFVPKDAPPKKLLEWGSRVAAANSGPPNPQKKIIS

SEQ ID NO: 6227 - protein, 88 aa, Glycine max
  Coding DNA Sequence Number=SeqID_2572
  Homolog annotation: Hit_ID=P93370; Match level="QueryCoverage=89%, HitCoverage=15%, E-value=5e-14, Identity=50%"; Hit description =Calmodulin-binding protein
MLLQVQVYVDSLVKKAYENWDQVVDYDGKSLVNAKIASENELRVESIDYGSGLDHQLQLPALPVSVPSEQQINSGMPVGGKHYHFLEL

SEQ ID NO: 6228 - protein, 164 aa, Glycine max
  misc_feature (3)..(3): Xaa can be any naturally occurring amino acid
  misc_feature (18)..(18): Xaa can be any naturally occurring amino acid
  misc_feature (23)..(23): Xaa can be any naturally occurring amino acid
  misc_feature (38)..(39): Xaa can be any naturally occurring amino acid
  misc_feature (72)..(72): Xaa can be any naturally occurring amino acid
  misc_feature (97)..(97): Xaa can be any naturally occurring amino acid
  misc_feature (102)..(102): Xaa can be any naturally occurring amino acid
  misc_feature (108)..(108): Xaa can be any naturally occurring amino acid
  misc_feature (122)..(122): Xaa can be any naturally occurring amino acid
  misc_feature (148)..(148): Xaa can be any naturally occurring amino acid
  Coding DNA Sequence Number=SeqID_2573
LRXHIHMLLSNDHDVVRXVFCVXYITSTSRSYLYRCRXXSIALVRNTRISYDITSYATPLDTVFSPSIAYAXFVRSARIDARVDVMILILDVSIRVXVLRRXSVYDQXAPATTISRLITMCXVSRGTILRATYSLSYPIYYYHRRVAXTVAQPTYDHRDVVRYM

SEQ ID NO: 6229 - protein, 98 aa, Glycine max
  misc_feature (39)..(39): Xaa can be any naturally occurring amino acid
  misc_feature (49)..(50): Xaa can be any naturally occurring amino acid
  misc_feature (54)..(55): Xaa can be any naturally occurring amino acid
  Coding DNA Sequence Number=SeqID_2575
ELWNHHESCELSPVESDESHSGEQFDKPVLAEDKGKKGXGDFFWGGFPXXPPRXXTKNHPSGGRGGRRVPKIEYEKEVRQEMRWIKANHHRGVKGTWR

SEQ ID NO: 6230 - protein, 95 aa, Glycine max
  misc_feature (41)..(42): Xaa can be any naturally occurring amino acid
  Coding DNA Sequence Number=SeqID_2577
  Gene Ontology: Mol. function=kinase activity
  Homolog annotation: Hit_ID=A7PDU3; Match level="QueryCoverage=85%, HitCoverage=18%, E-value=8e-21, Identity=64%"; Hit description =Chromosome chr11 scaffold_13, whole genome shotgun sequence
AEQLSKSLLDGSDENHGIENRSFWNFFWYPSKLGKDLLTTXXFGLVQYVKQMILKTVCALLAFILELAGVYGDGEFKWYYGYHTKCLFCEIVHTD

SEQ ID NO: 6231 - protein, 104 aa, Glycine max
  misc_feature (16)..(16): Xaa can be any naturally occurring amino acid
  misc_feature (60)..(60): Xaa can be any naturally occurring amino acid
  misc_feature (100)..(100): Xaa can be any naturally occurring amino acid
  Coding DNA Sequence Number=SeqID_2578
VALEHIYARIHLHDKXLTSSVLYRLSARLARSFFAYCAYRGNISRRRSTAHVADSRRPLXRHIRRKLYQYTHIQLHDKYTSRIYNCYILSSPCAAANHVXIINT

SEQ ID NO: 6232 - protein, 171 aa, Glycine max
  misc_feature (69)..(69): Xaa can be any naturally occurring amino acid
  misc_feature (130)..(130): Xaa can be any naturally occurring amino acid
  Coding DNA Sequence Number=SeqID_2580
  Gene Ontology: Mol. function=structural constituent of cytoskeleton; Cellular component=cytoskeleton; Biological process=sensory perception of sound
  Homolog annotation: Hit_ID=P53505; Match level="QueryCoverage=96%, HitCoverage=43%, E-value=1e-89, Identity=96%"; Hit description=Actin, cytoplasmic type 5
  Pfam annotation: Domain name=Actin; Domain location=3-171; Score =48.5; E_value=3.8e-17; Accession=PF00022.9; Description=Actin
MDRRRRSSLVIDNGSGMCKAGFAGDDAPRAVFPSIVGRPRHTGVMVGMGQKDSYVGDEAQSKRGILTLXYPIEHGIVTNWDDMEKIWHHTFYNELRVAPEEHPVLLTEAPLNPKANREKMTQIMFETFNXPAMYVAIQAVLSLYASGRTTGIVMDSGDGVSHTVPIYEGYA

SEQ ID NO: 6233 - protein, 117 aa, Glycine max
  Coding DNA Sequence Number=SeqID_2581
RDSELKAKMEYIRSSIGDRIGKAKKHLNRELNEITTEMKPETEMISKMLTKVTRTRRATITPIKRRNVDLSSEMTYEWRSYDLENGSIEVIFRNVEAEKVPLFLYKLLLKNSMIGLI

SEQ ID NO: 6234 - protein, 85 aa, Glycine max
  Coding DNA Sequence Number=SeqID_2583
  Pfam annotation: Domain name=SLR1-BP; Domain location=4-85; Score= -9.4; E_value=0.0099; Accession=PF07333.3; Description=S locus -related glycoprotein 1 bindin
LLEITKMAFMQYFVLLLIISVVSVTSEMVAQKICINVAQPSNCGFDVCKLLCKELFKDTLVSAECIIKNIHGPRGTNQCTCFYRC

SEQ ID NO: 6235 - protein, 178 aa, Glycine max
  misc_feature (58)..(58): Xaa can be any naturally occurring amino acid
  misc_feature (104)..(104): Xaa can be any naturally occurring amino acid
  misc_feature (119)..(119): Xaa can be any naturally occurring amino acid
  Coding DNA Sequence Number=SeqID_2585
  Homolog annotation: Hit_ID=A7PU01; Match level="QueryCoverage=64%, HitCoverage=65%, E-value=1e-45, Identity=76%"; Hit description =Chromosome chr7 scaffold_31, whole genome shotgun sequence
  Subcellular localization annotation: CTP_CleavageSite=40; ConfidenceScore=5.74e-01
MMTTLKLNLGQHMIVSPRATRTVAFAPPSSTVSLTHQHASAPSSSSSLILRHNGTRVXSHSQPFPESDDQVEDLRVPDNWLDPTIAFQESEWLRVTLHKWLDDXYCPEETNVEISRVAXNSFYNSLLQKQTDLGEILLKMARELESINYKESFHGAFSSANAAIDLIAQRIEQLCQSI

SEQ ID NO: 6236 - protein, 148 aa, Glycine max
  misc_feature (24)..(24): Xaa can be any naturally occurring amino acid
  misc_feature (31)..(31): Xaa can be any naturally occurring amino acid
  misc_feature (45)..(45): Xaa can be any naturally occurring amino acid
  misc_feature (98)..(98): Xaa can be any naturally occurring amino acid
  Coding DNA Sequence Number=SeqID_2586
  Gene Ontology: Mol. function=transporter activity; Cellular component= integral to membrane; Biological process=transport
  Homolog annotation: Hit_ID=Q39882; Match level="QueryCoverage=100%, HitCoverage=59%, E-value=2e-41, Identity=65%"; Hit description =Nodulin-26
  Pfam annotation: Domain name=MIP; Domain location=13-148; Score= -54.0; E_value=2.9e-06; Accession=PF00230.10; Description=Major intrinsic protein
MPIRNIAIGRPGEGSYPDPFKGGXAEFISTXIFLVGGSRCGIGFXKLTDNGAATPAGLIFGFIGHAFGLFVGGFPGANIFGGRRNTPGNFGGFLGGRXTLFRGIVYVICQLLGSIVASLLLAFVTASPVPAFGLSAGVGVGNALVLEI

SEQ ID NO: 6237 - protein, 107 aa, Glycine max
  misc_feature (7)..(7): Xaa can be any naturally occurring amino acid
  misc_feature (92)..(92): Xaa can be any naturally occurring amino acid
  Coding DNA Sequence Number=SeqID_2587
TNIYNKXTYQQHTTKPQHTHIHHTHRHYLHSLSILTMSPSIVKHRRRSYHTILLSSHSLIPLSIASIHNILSRHSILRVYYQTHCVTSYTIXCSNLMTHSTHPPPHR

SEQ ID NO: 6238 - protein, 102 aa, Glycine max
  misc_feature (21)..(21): Xaa can be any naturally occurring amino acid
  misc_feature (68)..(68): Xaa can be any naturally occurring amino acid
  Coding DNA Sequence Number=SeqID_2589
  Gene Ontology: Mol. function=protein dimerization activity; Cellular component=nucleus; Biological process=regulation of transcription, DNA-dependent
  Homolog annotation: Hit_ID=Q39897; Match level="QueryCoverage=92%, HitCoverage=25%, E-value=2e-21, Identity=59%"; Hit description=TGACG- motif-binding protein
REAAPKSRLRKKAYVQQIESXRLKLLQLEQEGDLVLQQGLYIGNGLGSKNLGWAGAVNSGGTLSQREXAKGWEDQNKQILELRSGLRSPNGGVKGAERGDRG

SEQ ID NO: 6239 - protein, 111 aa, Glycine max
  Coding DNA Sequence Number=SeqID_2590
  Gene Ontology: Mol. function=structural constituent of ribosome; Cellular component=ribonucleoprotein complex; Biological process =translation
  Homolog annotation: Hit_ID=P34788; Match level="QueryCoverage=100%, HitCoverage=73%, E-value=3e-56, Identity=98%"; Hit description=40S ribosomal protein S18
  Pfam annotation: Domain name=Ribosomal_S13; Domain location=14-111; Score=153.4; E_value=6.3e-43; Accession=PF00416.12; Description =Ribosomal protein S13S18
MSLVANEEFQHILRVLNTNVDGKQKIMFALTSIKGIGRRLANIVCKKADVDMNKRAGELSAAEIDNLMTIVANPKQYKIPDWFLNRQKDYKDGKYSQVVSNALDMKLRDDL

SEQ ID NO: 6240 - protein, 142 aa, Glycine max
  misc_feature (25)..(25): Xaa can be any naturally occurring amino acid
  misc_feature (48)..(48): Xaa can be any naturally occurring amino acid
  Coding DNA Sequence Number=SeqID_2591
  Gene Ontology: Mol. function=structural constituent of ribosome; Cellular component=intracellular; Biological process=translation
  Homolog annotation: Hit_ID=Q9SZF8; Match level="QueryCoverage=100%, HitCoverage=84%, E-value=4e-49, Identity=71%"; Hit description =Ribosomal-like protein
  Pfam annotation: Domain name=Ribosomal_L12; Domain location=101-142; Score=14.3; E_value=0.00041; Accession=PF00542.9; Description =Ribosomal protein L7L12 C-terminal domain
  Subcellular localization annotation: CTP_CleavageSite=30; ConfidenceScore=5.14e-01
MRSPISGLFSRSLSFLHRTSPLTSXARHLCAVTSPEARTKNLERIADXLLNLNRIELYDYSILFSHKLGLNRYGSAVSSPAGDLPDASASAETKTAEKTAFDVKLEKFDSASKIKVIKEIRAFTELGLKEAKDLVEKAPVVV

SEQ ID NO: 6241 - protein, 159 aa, Glycine max
  Coding DNA Sequence Number=SeqID_2592
  Gene Ontology: Mol. function=hydrolase activity; Cellular component =cytoplasm; Biological process=regulation of transcription, DNA -dependent
  Homolog annotation: Hit_ID=Q8RX28; Match level="QueryCoverage=94%, HitCoverage=23%, E-value=1e-65, Identity=76%"; Hit description =Histone deacetylase 5
MAMAGDSETASWRSDLSKVDVWYASFGSNMWKPRFLCYIQGGQAAGMKKACVGAMDKTPPKETTWGTFPNRLFFGRESTVTWGEGGSAFLNPLTNLSDQTHMCFYRITLEQFNDVLFQENGMKVDSDTPLFDLAAMQLVQNNGSIPLAKAGWYGNVVCV

SEQ ID NO: 6242 - protein, 76 aa, Glycine max
  Coding DNA Sequence Number=SeqID_2593
LRSKSFRGISRTQQVNKLKEETKTLDLFTGGRRRRRYILPCSNFFWIFFPPLRKVRGKTNGGWKIIFIGMKGCIDK

SEQ ID NO: 6243 - protein, 194 aa, Glycine max
  Coding DNA Sequence Number=SeqID_2595
  Homolog annotation: Hit_ID=Q22Z32; Match level="QueryCoverage=83%, HitCoverage=75%, E-value=3e-33, Identity=41%"; Hit description =Putative uncharacterized protein
MLSRFSKLTTKALPRVTVRRFGGGGGESHPVHLDKQQNWLDNQDVNKEMVSLFGWNDANDHWHADNSDPFAYMRTKPLFSFSRMYFPDPYHGSDDFEPLMNEPHGYLTGDDPLDTRNSIERAVPEYFMYFLVGLTFTLMFGYNFMNFVHPSVTLFNLNQTAHLLEDDIRKRREENSKLESRRDELRRQLSGDSE

SEQ ID NO: 6244 - protein, 148 aa, Glycine max
  Coding DNA Sequence Number=SeqID_2596
  Gene Ontology: Mol. function=oxidized purine base lesion DNA N -glycosylase activity; Biological process=nucleotide-excision repair
  Homolog annotation: Hit_ID=A7QIJ1; Match level="QueryCoverage=72%, HitCoverage=26%, E-value=7e-33, Identity=67%"; Hit description =Chromosome chr9 scaffold_104, whole genome shotgun sequence
  Pfam annotation: Domain name=Fapy_DNA_glyco; Domain location=1-135; Score=27.6; E_value=6.3e-07; Accession=PF01149.14; Description =Formamidopyrimidine-DNA glycosylase
PELPEVEADRRAVEYNCVGKRITKCVVADDSTAIHGASPSDFQASDLSKLIVPAHRKGKNMWFQLDSPPFPSFQFRMAGATHIKGAARTHYYTPPVTNYHDSARKYSHTCPTPHQPLPPSFPDHPPFTTPPPLTHRPPPPSTPTLVPE

SEQ ID NO: 6245 - protein, 140 aa, Glycine max
  misc_feature (20)..(20): Xaa can be any naturally occurring amino acid
  misc_feature (33)..(33): Xaa can be any naturally occurring amino acid
  misc_feature (44)..(44): Xaa can be any naturally occurring amino acid
  misc_feature (62)..(62): Xaa can be any naturally occurring amino acid
  misc_feature (71)..(71): Xaa can be any naturally occurring amino acid
  misc_feature (80)..(81): Xaa can be any naturally occurring amino acid
  Coding DNA Sequence Number=SeqID_2597
GWLWRRGDRREVACGVSVSXYSHMSACDAISSXLYSIAVLSVDXGMVAGRRDDGVGALPDGXVVEPALPPXEEGVEPARXXTASWGTLCSSVSQEVSLDVVIYILITMIRFVHDKTLIIICLTYTYLVLRCAERIASMIC

SEQ ID NO: 6246 - protein, 143 aa, Glycine max
  Coding DNA Sequence Number=SeqID_2599
  Gene Ontology: Mol. function=acetate-CoA ligase activity; Cellular component=cytoplasm; Biological process=metabolic process
  Homolog annotation: Hit_ID=A7PA75; Match level="QueryCoverage=84%, HitCoverage=19%, E-value=6e-58, Identity=82%"; Hit description =Chromosome chr14 scaffold_9, whole genome shotgun sequence
KLGRLLALRRVRPVPGDPRRPRADSRWQTETAGFMITPLPGAWPQKPGSATLPSFGVQPVIVDEKGVELEGECNGYLSVKKSRPGAFRTLYGDHERYDTTYVKPFPGYYFSGDGCSRDKDGYHWLTGRAAEAINASGHRIGTA

SEQ ID NO: 6247 - protein, 99 aa, Glycine max
  misc_feature (48)..(48): Xaa can be any naturally occurring amino acid
  Coding DNA Sequence Number=SeqID_2600
  Subcellular localization annotation: CTP_CleavageSite=61; ConfidenceScore=5.88e-01
MANPSTSSRPPCAAPSGTKLTCLCSPTNHPGSFRCTRHRNPRGRPQTXSPPSSSRAALGASATVRVEGITRSGDVAAGGRTGKGRSVLRAHLLRLVSLP

SEQ ID NO: 6248 - protein, 130 aa, Glycine max
  misc_feature (7)..(7): Xaa can be any naturally occurring amino acid
  misc_feature (29)..(29): Xaa can be any naturally occurring amino acid
  misc_feature (100)..(100): Xaa can be any naturally occurring amino acid
  Coding DNA Sequence Number=SeqID_2601
AYTRSRXHITRRIHLTSHTYLICTLSSYXSRRYRLISVPNASHYTLTTSRPQHYHNNTHYYSSTRTRHNQHLTYTISSRRVPESARHSSTRPDHSERRHXLSRIQHTRTVINIIPNTAGVRYITLIYIQI

SEQ ID NO: 6249 - protein, 150 aa, Glycine max
  Coding DNA Sequence Number=SeqID_2603
VKPLDFSMNENLFERMLCSFTASSVLPISLLHPSGPSAGWGPLSWPSTIPSSPRSFPRARNFGPPVPGGAPRPPPFFLPGGCPPRGTPQGPRGGSCLAGAPPFRRSRAPNPPGSFKGAPWPGRGAVMRWPPPRPLKTCVCLNPLAWRGGF

SEQ ID NO: 6250 - protein, 152 aa, Glycine max
  misc_feature (3)..(3): Xaa can be any naturally occurring amino acid
  misc_feature (35)..(35): Xaa can be any naturally occurring amino acid
  misc_feature (88)..(88): Xaa can be any naturally occurring amino acid
  Coding DNA Sequence Number=SeqID_2605
  Subcellular localization annotation: CTP_CleavageSite=41; ConfidenceScore=5.12e-01
TGXARDTTSLLFPHSVLSADGARRRARYVLLLSVXSNQSIRTAEISATASRLLMRYAILPHDPYRSLRYRNNGRDAPHRSRVHQHPRXTSNVYRQPALRGDAYYIGCVVVAFLLLYPSPLPITTSVAPGIVSQRPFDLDSRSDAINRVVLRY

SEQ ID NO: 6251 - protein, 124 aa, Glycine max
  Coding DNA Sequence Number=SeqID_2607
  Gene Ontology: Mol. function=lipid binding; Cellular component =extracellular region; Biological process=lipid transport
  Homolog annotation: Hit_ID=Q6E0U9; Match level="QueryCoverage=96%, HitCoverage=100%, E-value=2e-29, Identity=50%"; Hit description=Non -specific lipid-transfer protein
  Pfam annotation: Domain name=Tryp_alpha_amyl; Domain location=33-120; Score=103.5; E_value=6.3e-28; Accession=PF00234.12; Description =Protease inhibitorseed storageLTP f
MGKSVVKLLWMAIVCLVLGVISITPKAQAAVTCNQVVSNLTPCISYVLNGGKTVPGPCCNGIKTLFNLAHSTPDRQTVCKCIKNAVSAFHYGKSNVDRAAALPKQCGVNIPYQISPSTDCTRVQ

SEQ ID NO: 6252 - protein, 61 aa, Glycine max
  misc_feature (11)..(11): Xaa can be any naturally occurring amino acid
  Coding DNA Sequence Number=SeqID_2608
  Gene Ontology: Mol. function=structural constituent of ribosome; Cellular component=ribonucleoprotein complex; Biological process =translation
  Homolog annotation: Hit_ID=Q8VYF1; Match level="QueryCoverage=100%, HitCoverage=29%, E-value=1e-18, Identity=77%"; Hit description=60S ribosomal protein L15-2
MGAYKYVSELXRKKQSDVMRFLHRVRCCEYRQQPSIVRLTRSTRPDHARRLYLMAKHRYMI

SEQ ID NO: 6253 - protein, 94 aa, Glycine max
  misc_feature (10)..(10): Xaa can be any naturally occurring amino acid
  Coding DNA Sequence Number=SeqID_2609
  Subcellular localization annotation: CTP_CleavageSite=26; ConfidenceScore=5.02e-01
VKRSGRSPSXAWPAPAPQQTRVSIPPADLAEELPFFSSSLSTLAQRIYICYKIVSHQQVLLLSSTRPNMCVRSSRPSHTEVGPASHCFDLYKIG

SEQ ID NO: 6254 - protein, 191 aa, Glycine max
  Coding DNA Sequence Number=SeqID_2611
  Gene Ontology: Mol. function=metal ion binding; Cellular component =integral to membrane; Biological process=ubiquitin cycle
  Homolog annotation: Hit_ID=A7P6A3; Match level="QueryCoverage=97%, HitCoverage=53%, E-value=1e-31, Identity=44%"; Hit description =Chromosome chr9 scaffold_7, whole genome shotgun sequence
  Pfam annotation: Domain name=PHD; Domain location=16-61; Score=-6.3; E_value=0.072; Accession=PF00628.19; Description=PHD-finger
  Pfam annotation: Domain name=zf-C3HC4; Domain location=17-58; Score =33.1; E_value=9.9e-07; Accession=PF00097.15; Description=Zinc finger, C3HC4 type (RING finger)
  Pfam module annotation: Pfam domain module=PHD::zf-C3HC4; Domain location=16-61::17-58
LASVVFQPEDFKEGLECAVCLSEIVQGEKLRLLPKCNHGFHVDCIDMWFHSHSTCPLCRNPVAFESSKCEESNVSGNSDSSSSSYEENSGGVSGLEPSNFPTNVLVWGNQTQVSSIGVSLEEKEEEEEEGTSQSQQPPCSTPPTASSSASSNVNGRCHGMLVIDIPSECTSSSLSPSGSRCAEEEVKSPMA

SEQ ID NO: 6255 - protein, 140 aa, Glycine max
  misc_feature (47)..(47): Xaa can be any naturally occurring amino acid
  misc_feature (74)..(74): Xaa can be any naturally occurring amino acid
  misc_feature (99)..(99): Xaa can be any naturally occurring amino acid
  misc_feature (104)..(104): Xaa can be any naturally occurring amino acid
  misc_feature (125)..(125): Xaa can be any naturally occurring amino acid
  misc_feature (127)..(127): Xaa can be any naturally occurring amino acid
  Coding DNA Sequence Number=SeqID_2612
TGSSEIVCRCHECVSLELLRLLRVSSGPCYKFVLSDQGDDACYASRXRYSARVVAAPFRARPLQLACVSAKSRXVGVCGSVHVACLLLLYCLTYYSLVXLCCVXYNTILCIDTFMLCTIAGERCXPXRVLPRRRVRSVLE

SEQ ID NO: 6256 - protein, 107 aa, Glycine max
  misc_feature (31)..(31): Xaa can be any naturally occurring amino acid
  misc_feature (51)..(51): Xaa can be any naturally occurring amino acid
  misc_feature (62)..(62): Xaa can be any naturally occurring amino acid
  Coding DNA Sequence Number=SeqID_2614
LIICNIYIYAEFHPRLNPHTATQLLGQLWPXLISNCHKSACLYLLRIVRIXFFCILSWYIFXQTKPPPLNHSRHIMSHTLTHMTLTLPKQHKQQNTHPKPTISYNLY

SEQ ID NO: 6257 - protein, 182 aa, Glycine max
  misc_feature (128)..(128): Xaa can be any naturally occurring amino acid
  Coding DNA Sequence Number=SeqID_2616
  Homolog annotation: Hit_ID=A7Q773; Match level="QueryCoverage=99%, HitCoverage=99%, E-value=1e-37, Identity=51%"; Hit description =Chromosome chr18 scaffold_59, whole genome shotgun sequence
  Subcellular localization annotation: CTP_CleavageSite=64; ConfidenceScore=5.87e-01
MSMACSIPCIKIPTRSSSPSCTSSSSSYSLRFSSSKPHNSVTIRNSQAEGPIRRPVAPPIREPSSSSSAPQLQKPTLPSQPPSPSSSPPQKPATVVGDDKNVITLEFQRQKAKGLPGFFQQKKLDDAXKGPFFGFLGQNGFSNGRWAMFGFAVGLLTEYAPGSDFVGQVKILFSNFGIVGLG

SEQ ID NO: 6258 - protein, 102 aa, Glycine max
  misc_feature (12)..(12): Xaa can be any naturally occurring amino acid
  misc_feature (15)..(15): Xaa can be any naturally occurring amino acid
  misc_feature (18)..(18): Xaa can be any naturally occurring amino acid
  Coding DNA Sequence Number=SeqID_2617
LIWRDGCCLLTXTTXLLXPQPLPGRYAHIYTTFPHSISRMHDVVARPLSSPSLSIPPALARAISACLWHIALYSTASSLSRVTIIHLSCLSHSSLISHYVSY

SEQ ID NO: 6259 - protein, 149 aa, Glycine max
  Coding DNA Sequence Number=SeqID_2619
PVCVRAPMETHDKTRPPQPPLSPVGPLIAHGVPTTANLYTIYPHIMNFLQSFSPVHPPRFCFLFFFSYHQYIKPPTIFLFRSLLTTSHTSHLLHNSSPNHWCRYVGLLKRYPTRPRTRLYFKILQLLFNIRLFNTRHQPYPFYAHKCSL

SEQ ID NO: 6260 - protein, 148 aa, Glycine max
  misc_feature (75)..(75): Xaa can be any naturally occurring amino acid
  misc_feature (84)..(84): Xaa can be any naturally occurring amino acid
  misc_feature (91)..(91): Xaa can be any naturally occurring amino acid
  misc_feature (147)..(147): Xaa can be any naturally occurring amino acid
  Coding DNA Sequence Number=SeqID_2621
DRLQLVYLITHHHSSAHYQTYTTQTTHKRANTKYAQKNNTNTHTDHHRQHRNVIHVLSYQILARSSRPSVICLVXQLKMHKYVXPVFCLFXIWLRMLCWHRVSGDMREEYKETPLALLNLRPLSHYSLSHNLHTFSQFYILTSPVIXH

SEQ ID NO: 6261 - protein, 176 aa, Glycine max
  misc_feature (153)..(153): Xaa can be any naturally occurring amino acid
  Coding DNA Sequence Number=SeqID_2623
  Gene Ontology: Mol. function=transcription elongation regulator activity; Cellular component=integral to membrane; Biological process=regulation of transcription, DNA-dependent
  Homolog annotation: Hit_ID=A6EFK1; Match level="QueryCoverage=90%, HitCoverage=85%, E-value=1e-43, Identity=54%"; Hit description =Transcription antitermination protein nusG
  Pfam annotation: Domain name=KOW; Domain location=145-176; Score =24.0; E_value=0.00056; Accession=PF00467.19; Description=KOW motif
  Pfam annotation: Domain name=NusG; Domain location=15-118; Score =93.4; E_value=6.9e-25; Accession=PF02357.9; Description =Transcription termination factor nusG
  Pfam module annotation: Pfam domain module=KOW::NusG; Domain location= 145-176::15-118
MEAITENTVTPQQDTKWYVLRVVSGKERKVKEYLDKDIIRSGWQELIKQVFLPMEKVYKVQNGKKVMREKNYFPGYVMMEVLEGKLNDDMIQHISNISNVMHFLTDGKGSKGNIISLRKAEVNKMLGKVDEMNDQGVTMSEPFIVGETIKIIXGPFNDFNGVIEEVNDEKKKLKVP

SEQ ID NO: 6262 - protein, 149 aa, Glycine max
  misc_feature (48)..(48): Xaa can be any naturally occurring amino acid
  Coding DNA Sequence Number=SeqID_2624
  Homolog annotation: Hit_ID=A9PAI4; Match level="QueryCoverage=40%, HitCoverage=25%, E-value=2e-16, Identity=63%"; Hit description =Putative uncharacterized protein
MVAQKFVVDLNKPLVFQVGHLGEAYDDWVHDPIVKQRKASGFFKSGFXELFTRTAWWVIPNRLGCPVARWVHFPTSAKSSPPLLLNGSSGSSFLGNLLFGHFGLKTTLAPVFPPSTGKKPKRVTGGEKTLCNLILPPMGLANPQSQPQL

SEQ ID NO: 6263 - protein, 119 aa, Glycine max
  misc_feature (37)..(40): Xaa can be any naturally occurring amino acid
  misc_feature (42)..(42): Xaa can be any naturally occurring amino acid
  misc_feature (45)..(47): Xaa can be any naturally occurring amino acid
  misc_feature (50)..(50): Xaa can be any naturally occurring amino acid
  misc_feature (53)..(53): Xaa can be any naturally occurring amino acid
  misc_feature (56)..(58): Xaa can be any naturally occurring amino acid
  misc_feature (60)..(61): Xaa can be any naturally occurring amino acid
  misc_feature (66)..(67): Xaa can be any naturally occurring amino acid
  misc_feature (73)..(74): Xaa can be any naturally occurring amino acid
  misc_feature (76)..(76): Xaa can be any naturally occurring amino acid
  misc_feature (78)..(80): Xaa can be any naturally occurring amino acid
  misc_feature (82)..(82): Xaa can be any naturally occurring amino acid
  misc_feature (86)..(87): Xaa can be any naturally occurring amino acid
  misc_feature (89)..(93): Xaa can be any naturally occurring amino acid
  misc_feature (97)..(97): Xaa can be any naturally occurring amino acid
  misc_feature (100)..(101): Xaa can be any naturally occurring amino acid
  misc_feature (106)..(106): Xaa can be any naturally occurring amino acid
  misc_feature (108)..(108): Xaa can be any naturally occurring amino acid
  misc_feature (110)..(110): Xaa can be any naturally occurring amino acid
  misc_feature (113)..(113): Xaa can be any naturally occurring amino acid
  misc_feature (118)..(119): Xaa can be any naturally occurring amino acid
  Coding DNA Sequence Number=SeqID_2625
  Subcellular localization annotation: CTP_CleavageSite=21; ConfidenceScore=5.08e-01
TLLASSAPSLPCVRRLRIPLSCASPPITFPNLLTPVXXXXHXRLXXXILXSTXPAXXXAXXYTDVXXLRPKEXXDXKXXXVXGGDXXDXXXXXLVGXGDXXVVLEXLXGXGMXADNQXX

SEQ ID NO: 6264 - protein, 89 aa, Glycine max
  misc_feature (19)..(19): Xaa can be any naturally occurring amino acid
  misc_feature (26)..(27): Xaa can be any naturally occurring amino acid
  misc_feature (41)..(41): Xaa can be any naturally occurring amino acid
  misc_feature (58)..(58): Xaa can be any naturally occurring amino acid
  misc_feature (71)..(71): Xaa can be any naturally occurring amino acid
  misc_feature (80)..(80): Xaa can be any naturally occurring amino acid
  misc_feature (84)..(87): Xaa can be any naturally occurring amino acid
  Coding DNA Sequence Number=SeqID_2627
NIVIMSRMWHTGLMYKLQXHQDSRCXXAYMSTCLSHYIAWXHLLAVLNNIRVPPILFXWSASVFSLLIYIXIIYTIFVRXILDXXXXLL

SEQ ID NO: 6265 - protein, 165 aa, Glycine max
  Coding DNA Sequence Number=SeqID_253
  Subcellular localization annotation: CTP_CleavageSite=63; ConfidenceScore=5.16e-01
GSRGRLLEPDCYPGPFPNGRLHPGLSFPLKFMLNSPRCSDRPGFSVQADSSSSVKALFHGFPYSSASRCCGRLSLSTTILFMLYSYVSSWLRGWIHSVHLLVLLRELIPPPGAMRSISSWLSPWTSAPSASCGPSELWCLRAEDGELVAAWNWGGVDFMGDLPVF

SEQ ID NO: 6266 - protein, 179 aa, Glycine max
  Coding DNA Sequence Number=SeqID_255
RQRMDGMGVGDVCEKGSPGLASSSTTPSEPKEDGHVILIPHSHIFALMLQALKLPPANYHHKTYPAIRFMENACGKEIRDYHYTHVERLENQVTLLERYLDEAKKRIKKVRKGWFYAVRYMSSYSTQIQNTTAARRLRGQDSTKGAMKTALASTRKLAKRLRCIGLKSEQCLETTDSIW

SEQ ID NO: 6267 - protein, 90 aa, Glycine max
  misc_feature (20)..(20): Xaa can be any naturally occurring amino acid
  Coding DNA Sequence Number=SeqID_257
  Subcellular localization annotation: CTP_CleavageSite=61; ConfidenceScore=5.61e-01
FFFFFFFFFFFFFFFFFFFXGGGKSPTQMKTKDLSGTTHEITPARHWTTTRKTPLKPTLPSSGGRPSRRWWRGQQLLGPTTPARWPLRDA

SEQ ID NO: 6268 - protein, 216 aa, Glycine max
  Coding DNA Sequence Number=SeqID_259
TKPTFLHFPISILRSSFLLLLISMASIFTLFLIFFFLHHPHSAVAQIHQACKATRFPLQCHSSLLPNLPLHHLLRSHTTTILHHLQSTTTLTPIFTPTHTLILHHLLRSHTTIILHHLQSTPTLTPILTPTHTLTPILTPTHTLILLTFTTLLLHPLRSPTSTLHPHHQFTLPTFHTQFTTLLHHHLTRSLTSMHHLPLLTTISIPLIDMKNMCNE

SEQ ID NO: 6269 - protein, 159 aa, Glycine max
  misc_feature (87)..(87): Xaa can be any naturally occurring amino acid
  misc_feature (98)..(98): Xaa can be any naturally occurring amino acid
  Coding DNA Sequence Number=SeqID_261
  Gene Ontology: Mol. function=RNA binding; Biological process =gynoecium development
  Homolog annotation: Hit_ID=A7QUD9; Match level="QueryCoverage=90%, HitCoverage=31%, E-value=4e-25, Identity=51%"; Hit description =Chromosome chr11 scaffold_177, whole genome shotgun sequence
MGTLDPIQNGVSSDNPAAEPCSTPGEDPTPDPAAAEKRWPGWPGHWGGRLIVPVLKGGSIIGREGGVIKRTWEGTKGRIRVLDGGGXTSDRIGLISGXEEAGAPLSPGMNAWIRGFKRGSGGSEIGAGNKGSGGAFCSVPVLGGLTPGINLVGEGGVVD

SEQ ID NO: 6270 - protein, 172 aa, Glycine max
  misc_feature (22)..(22): Xaa can be any naturally occurring amino acid
  misc_feature (87)..(87): Xaa can be any naturally occurring amino acid
  misc_feature (97)..(97): Xaa can be any naturally occurring amino acid
  misc_feature (105)..(105): Xaa can be any naturally occurring amino acid
  misc_feature (146)..(146): Xaa can be any naturally occurring amino acid
  Coding DNA Sequence Number=SeqID_262
SRVWRQDATATFRPPWYSCCRXPLSLYDILYFLCSRFRRLPDEYNIQERCSNAGYGLCSSCVVCARRSRLSIDEVLGLDHLSYCLSXGLVYFRLSLXFQIYDVVXMRVGGASLSVDAHMLLFQSLIILHSTMPVSPRLCDPPHTVXYTLLSMDLHRRTHIGATPTLLPRPDA

SEQ ID NO: 6271 - protein, 315 aa, Glycine max
  misc_feature (127)..(127): Xaa can be any naturally occurring amino acid
  misc_feature (273)..(273): Xaa can be any naturally occurring amino acid
  Coding DNA Sequence Number=SeqID_264
  Gene Ontology: Mol. function=aspartic-type endopeptidase activity; Cellular component=small subunit processome; Biological process=DNA integration
  Homolog annotation: Hit_ID=A5BZB2; Match level="QueryCoverage=99%, HitCoverage=47%, E-value=1e-108, Identity=59%"; Hit description =Putative uncharacterized protein
  Pfam annotation: Domain name=RVT_2; Domain location=1-76; Score= -146.1; E_value=3.2e-05; Accession=PF07727.4; Description=Reverse transcriptase (RNA-dependent DNA pol
DIIIAGDDELEEQTLRERLAAQFEMKDLKKLKYFLGIEVAYFRQGIFISQRKYILDLLKEVGKLGCKTTRAPIEQNHWIGNDEEIPKVENTQYQRLVGKLVYLSHTRLDIAYAVSVVSQFMHDPREXHLQAVNRIIQYLKSSLGKGLLFKNEKNLSMKVYIDADYAGSIADGRSTTGYRMFLGGNLVTWRSKKQNVVARSSVKAEFRAMAQGVCELLWMKIILDYLKIKYEAPMGLVCDNKSAINIAPNPVQHDRTKHIEIDRHFIKEKLDSXVIATKYIPSKLQLADMFTKGLPTEQLQDLTCKVGMIDVHSLA

SEQ ID NO: 6272 - protein, 77 aa, Glycine max
  misc_feature (42)..(42): Xaa can be any naturally occurring amino acid
  Coding DNA Sequence Number=SeqID_132
  Subcellular localization annotation: CTP_CleavageSite=38; ConfidenceScore=5.56e-01
LAPFEAISLLFFFFVFCSPVLITSYISFSTRSLFNSLTDSVXVVLFFLILFNTLIQLTLSFSFSFRILTREHIIVSV

SEQ ID NO: 6273 - protein, 145 aa, Glycine max
  misc_feature (42)..(42): Xaa can be any naturally occurring amino acid
  misc_feature (90)..(90): Xaa can be any naturally occurring amino acid
  misc_feature (109)..(110): Xaa can be any naturally occurring amino acid
  misc_feature (113)..(113): Xaa can be any naturally occurring amino acid
  misc_feature (145)..(145): Xaa can be any naturally occurring amino acid
  Coding DNA Sequence Number=SeqID_1309
NTATYPRLSGSVLYTNFVSIHTLGQRHNPLYCSVLGTCVESXPYTSSQIELFGHPMQDDPRLYYRTQLLLHLPPPSACDSFASAPPLRSXLALVTHHYRDSYCARVSAXXVTXLDEWRVEVLLEYTLSRRVLLVSCTPRSNHLAX

SEQ ID NO: 6274 - protein, 81 aa, Glycine max
  misc_feature (39)..(39): Xaa can be any naturally occurring amino acid
  Coding DNA Sequence Number=SeqID_1311
  Gene Ontology: Mol. function=nucleoside-triphosphatase activity; Cellular component=protein complex; Biological process=protein catabolic process
  Homolog annotation: Hit_ID=Q9SSB5; Match level="QueryCoverage=100%, HitCoverage=19%, E-value=5e-26, Identity=74%"; Hit description=26S protease regulatory subunit 7
QILIIHTLPISCERDIQDELVARLFPYSTGADIRSVCTXSGMYAVRARRKTVTEKDFLDAVIQVINGYLKFIATPKCVVYN

SEQ ID NO: 6275 - protein, 99 aa, Glycine max
  misc_feature (5)..(5): Xaa can be any naturally occurring amino acid
  misc_feature (8)..(8): Xaa can be any naturally occurring amino acid
  misc_feature (48)..(48): Xaa can be any naturally occurring amino acid
  misc_feature (70)..(70): Xaa can be any naturally occurring amino acid
  misc_feature (77)..(77): Xaa can be any naturally occurring amino acid
  misc_feature (82)..(84): Xaa can be any naturally occurring amino acid
  misc_feature (98)..(98): Xaa can be any naturally occurring amino acid
  Coding DNA Sequence Number=SeqID_1312
CVCLXCRXFLLQNTRHIISRTEHRHLYRSVYSVMFDRFIYKFTLMYMXEQNKPTSVVDVVHWSPRPAALXQASPSHXTLAAXXXTRMYPLLDLAVMFXT

SEQ ID NO: 6276 - protein, 127 aa, Glycine max
  Coding DNA Sequence Number=SeqID_1314
  Homolog annotation: Hit_ID=A3AX32; Match level="QueryCoverage=75%, HitCoverage=18%, E-value=1e-22, Identity=59%"; Hit description =Putative uncharacterized protein
PGSRSSPALRSEGKRHTQHSVHQATNKRQKHGSFGLGSAQLHMDNAAAPYATAGAAGNKDFRYSAYGFRTSALEEHNQFISAAMDTAMDNYSWRLMPAQNSAFSLSSYPMLGTLGDLDQSAICSLAK

SEQ ID NO: 6277 - protein, 125 aa, Glycine max
  misc_feature (3)..(3): Xaa can be any naturally occurring amino acid
  misc_feature (6)..(6): Xaa can be any naturally occurring amino acid
  misc_feature (8)..(8): Xaa can be any naturally occurring amino acid
  misc_feature (12)..(22): Xaa can be any naturally occurring amino acid
  misc_feature (24)..(24): Xaa can be any naturally occurring amino acid
  misc_feature (27)..(36): Xaa can be any naturally occurring amino acid
  misc_feature (43)..(43): Xaa can be any naturally occurring amino acid
  misc_feature (46)..(48): Xaa can be any naturally occurring amino acid
  misc_feature (50)..(50): Xaa can be any naturally occurring amino acid
  misc_feature (53)..(53): Xaa can be any naturally occurring amino acid
  misc_feature (57)..(58): Xaa can be any naturally occurring amino acid
  misc_feature (69)..(70): Xaa can be any naturally occurring amino acid
  misc_feature (73)..(73): Xaa can be any naturally occurring amino acid
  misc_feature (85)..(86): Xaa can be any naturally occurring amino acid
  misc_feature (88)..(88): Xaa can be any naturally occurring amino acid
  misc_feature (90)..(91): Xaa can be any naturally occurring amino acid
  misc_feature (99)..(100): Xaa can be any naturally occurring amino acid
  misc_feature (102)..(103): Xaa can be any naturally occurring amino acid
  misc_feature (106)..(106): Xaa can be any naturally occurring amino acid
  misc_feature (108)..(110): Xaa can be any naturally occurring amino acid
  misc_feature (121)..(122): Xaa can be any naturally occurring amino acid
  Coding DNA Sequence Number=SeqID_1315
FFXPSXPXPPPXXXXXXXXXXXFXWVXXXXXXXXXXTHTPRHXVDXXXTXARXGIDXXCLAAYREEAPXXGAXTMHLQHRRTPPXXLXRXXMEEERREXXTXXNGXSXXXQHTRQRRSAKXXMYV

SEQ ID NO: 6278 - protein, 294 aa, Glycine max
  misc_feature (273)..(273): Xaa can be any naturally occurring amino acid
  misc_feature (281)..(281): Xaa can be any naturally occurring amino acid
  Coding DNA Sequence Number=SeqID_1317
  Gene Ontology: Mol. function=protein binding; Cellular component =protein complex; Biological process=proteasomal ubiquitin-dependent protein catabolic process
  Homolog annotation: Hit_ID=A7NVM1; Match level="QueryCoverage=97%, HitCoverage=59%, E-value=1e-124, Identity=78%"; Hit description =Chromosome chr18 scaffold_1, whole genome shotgun sequence
MTQDLEMKDRSTPSNSVSSPAPSTLQHLKEIASLIETGSYSKEVRRIARAVRLTIALRRKLTASAISSFLDHVLTPGSEVHAKLSAYLPKDDDHEMEVDAATSAIQTPAKHLLPELEIYCYLLVLLFLIDQKKYSEAKACSSASIVWLKNINRRTVDVIASRLYFYYSYSYELMGDLAEIRGNLLALHRIATLRHDELGQETLLNLLLRNYLHYNLYDQAEKLRSKAPRFEAHSNQQFCRYLFYLGKIRTIQLEYTDAKESLLQAARKAPVAXRGFRIQCXKWAVIVRYCGEKS

SEQ ID NO: 6279 - protein, 288 aa, Glycine max
  misc_feature (7)..(7): Xaa can be any naturally occurring amino acid
  misc_feature (10)..(15): Xaa can be any naturally occurring amino acid
  misc_feature (23)..(23): Xaa can be any naturally occurring amino acid
  misc_feature (45)..(48): Xaa can be any naturally occurring amino acid
  misc_feature (144)..(144): Xaa can be any naturally occurring amino acid
  misc_feature (212)..(212): Xaa can be any naturally occurring amino acid
  misc_feature (242)..(242): Xaa can be any naturally occurring amino acid
  Coding DNA Sequence Number=SeqID_1318
WWCGWGXTMXXXXXXRGRACAAXVRAPATWRLGVSSSCCRPVRFXXXXVVICWGCLFQPYYSLSLTLSRTPLALSRRRVFQLLTPRHSPPLLYATPLRARRRVVGGGGARRSVVCWRLPVGRVCDPSARARRHCVSLSTRASPXGRAEPDARASRFLFSLLPPRLYAAPSLFLSRALLLSPLTNHTLLSPAPSLSHVLFVQYYVHTALSLPXSFARPSAPRSSLYYVHSSRASLASSICVDXRCCLLARRGVRGVSPLRGCMRRFLDPVPPLCCSTAASPARRRARGA

SEQ ID NO: 6280 - protein, 125 aa, Glycine max
  misc_feature (56)..(56): Xaa can be any naturally occurring amino acid
  misc_feature (74)..(74): Xaa can be any naturally occurring amino acid
  misc_feature (116)..(116): Xaa can be any naturally occurring amino acid
  Coding DNA Sequence Number=SeqID_2629
  Gene Ontology: Mol. function=protein kinase CK2 regulator activity; Cellular component=protein kinase CK2 complex
  Homolog annotation: Hit_ID=Q70Z23; Match level="QueryCoverage=98%, HitCoverage=43%, E-value=3e-21, Identity=48%"; Hit description =Protein kinase 2 beta chain
SEGTSLDRNPIDDLLQIQLGRASPSTSRALAINTYDRSSSSRLSVYKDSGYDCVTXSISKNSDASNKESDTDIXESDVSGYYRDDTSWISWICTLLRNDFFCTGDDDYIHHHFDVXGLISKVPYY

SEQ ID NO: 6281 - protein, 96 aa, Glycine max
  Coding DNA Sequence Number=SeqID_2630
YHSLSPTVHPTYQYPIIFTLAMTSLGVLLPSSSVIGLSFHAKQDRTMLTIIQNYNPLRADSVPINIQINIATKYTMISNYISFRIAIQLQYSIFVC

SEQ ID NO: 6282 - protein, 263 aa, Glycine max
  Coding DNA Sequence Number=SeqID_2631
  Homolog annotation: Hit_ID=A0CY54; Match level="QueryCoverage=88%, HitCoverage=93%, E-value=5e-14, Identity=27%"; Hit description =Chromosome undetermined scaffold_30, whole genome shotgun sequence
  Pfam annotation: Domain name=Abi; Domain location=152-252; Score =21.7; E_value=0.00044; Accession=PF02517.7; Description=CAAX amino terminal protease family
MTGVKQQAVLSKYQPSQHAEDKEEKAMLNSKLQLTKKERFLLELIMLSPILIVLTVLHTTHSFVLTLFLFHVVLTVFPILFLRKKNIHIDWKGLLKHDLAKYTRVLNNDVKLIAIPAMLLTAIYTTYRFMFPDYPYDRFRIPQLSDKLAAIVLTIEFVILNPIVEELFWRFFADLFTGRSKTILNRLDLSIHFGLYHWFVAYYLSQDLLLATGGFIGVASLGFILTYVKQKAGLVTAMILHVGVDLAAAIVIVDMQNRFIPFY

SEQ ID NO: 6283 - protein, 137 aa, Glycine max
  Coding DNA Sequence Number=SeqID_2632
  Gene Ontology: Cellular component=nucleus
  Homolog annotation: Hit_ID=Q9C7N7; Match level="QueryCoverage=87%, HitCoverage=87%, E-value=6e-45, Identity=78%"; Hit description =Putative uncharacterized protein F15D2.20
  Pfam annotation: Domain name=DUF584; Domain location=1-136; Score =181.4; E_value=2.2e-51; Accession=PF04520.4; Description=Protein of unknown function, DUF584
MSEEFDESEIIFSDSFFPIRRREDVIEKENRPVNFRENSESRMRNTSRLSKTTPLPSPAVFSSSLPVNIPGRRYSEDEEYSEDGGRRMVPPHLIVGRRIESGQMAFSVCTGQGRTLKGRDLSRVRNSVLRLTGFLEA

SEQ ID NO: 6284 - protein, 126 aa, Glycine max
  misc_feature (39)..(39): Xaa can be any naturally occurring amino acid
  Coding DNA Sequence Number=SeqID_2633
  Gene Ontology: Mol. function=aspartic-type endopeptidase activity; Biological process=RNA-dependent DNA replication
  Homolog annotation: Hit_ID=Q6WAY9; Match level="QueryCoverage=97%, HitCoverage=51%, E-value=2e-30, Identity=52%"; Hit description=Pol
SLTRTLKRIVWNTVALFRKDWGLKLNDALWAYMTTLKTXMGLSPMQPECGKTCHLPVELEHKAYCALRLLNFDNNACGEKRKEHFQELDEMRLNAYESCRIYKETTIAYHDKKLQRREFQPGQRVL

SEQ ID NO: 6285 - protein, 126 aa, Glycine max
  misc_feature (8)..(8): Xaa can be any naturally occurring amino acid
  misc_feature (37)..(38): Xaa can be any naturally occurring amino acid
  misc_feature (62)..(62): Xaa can be any naturally occurring amino acid
  misc_feature (74)..(74): Xaa can be any naturally occurring amino acid
  misc_feature (79)..(80): Xaa can be any naturally occurring amino acid
  misc_feature (84)..(84): Xaa can be any naturally occurring amino acid
  misc_feature (92)..(92): Xaa can be any naturally occurring amino acid
  misc_feature (103)..(103): Xaa can be any naturally occurring amino acid
  misc_feature (113)..(113): Xaa can be any naturally occurring amino acid
  misc_feature (118)..(118): Xaa can be any naturally occurring amino acid
  misc_feature (121)..(121): Xaa can be any naturally occurring amino acid
  Coding DNA Sequence Number=SeqID_2634
IVCRRDSXRHRASDIAYSVVDVYDAHTQLHHINYNEXXCACSLSASLHSPSNSVSYMDITTXILHDAVLTVSNXSHHSXXTVYXEYTTTLCXRLTIDSLHACXAPASLALIIXIHALXTVXLLLIV

SEQ ID NO: 6286 - protein, 69 aa, Glycine max
  Coding DNA Sequence Number=SeqID_2636
QLFCVQNLVVAKEGEIAYFFGWSIWQANAFLSKPDFPRMRETEGHERILPCFTFFFPFLFTLNSFQSLN

SEQ ID NO: 6287 - protein, 104 aa, Glycine max
  misc_feature (22)..(22): Xaa can be any naturally occurring amino acid
  misc_feature (37)..(37): Xaa can be any naturally occurring amino acid
  misc_feature (93)..(93): Xaa can be any naturally occurring amino acid
  Coding DNA Sequence Number=SeqID_2638
LSHVGNLVCQPMVVSCCYITSXIYSVQASPLFSVLIXEVAILLLRSSFLYYMRDYSSASVSISADSPATTLLSCHGALACLASTHESHETLLXVIDNAYVIYVY

SEQ ID NO: 6288 - protein, 135 aa, Glycine max
  misc_feature (53)..(53): Xaa can be any naturally occurring amino acid
  misc_feature (59)..(59): Xaa can be any naturally occurring amino acid
  misc_feature (80)..(80): Xaa can be any naturally occurring amino acid
  misc_feature (114)..(114): Xaa can be any naturally occurring amino acid
  misc_feature (125)..(125): Xaa can be any naturally occurring amino acid
  Coding DNA Sequence Number=SeqID_2640
CKVLASHHPFRAGAPGINFRIYIECRGYTLSASRRSPKSGYCHATCVVLHSTXSVTSTXLHYIFLSLSHYLMPLYSADEXYMLRSFYLYSYRVLLLCVKIMLARSSTEEYQSFXSRASGYCRHHXMPVQFRHCYI

SEQ ID NO: 6289 - protein, 135 aa, Glycine max
  misc_feature (76)..(76): Xaa can be any naturally occurring amino acid
  misc_feature (91)..(91): Xaa can be any naturally occurring amino acid
  Coding DNA Sequence Number=SeqID_2641
  Gene Ontology: Mol. function=protein binding; Cellular component=RCAF complex; Biological process=female meiosis chromosome segregation
  Homolog annotation: Hit_ID=UPI000155FD81; Match level="QueryCoverage =85%, HitCoverage=61%, E-value=2e-29, Identity=61%"; Hit description =PREDICTED: similar to histone H4
  Pfam annotation: Domain name=Histone; Domain location=19-89; Score =26.5; E_value=9.7e-05; Accession=PF00125.14; Description=Core histone H2AH2BH3H4
MERNAVKGGAIQLLRVLCNNMQAITMPSMRDVAPRGAVKRINGLIYDETRGVLKIFLDNVIRDAVTYPEHARRKTXVTAMDVVYALNRQGXRTLYGFGRLGFLLDFPRQGKVLLPRKTYEAWIGVVFFYFLWWCL

SEQ ID NO: 6290 - protein, 145 aa, Glycine max
  Coding DNA Sequence Number=SeqID_2642
  Gene Ontology: Mol. function=structural constituent of ribosome; Cellular component=ribonucleoprotein complex; Biological process =translation
  Homolog annotation: Hit_ID=Q9ASV6; Match level="QueryCoverage=100%, HitCoverage=72%, E-value=1e-36, Identity=63%"; Hit description=30S ribosomal protein S20, chloroplast precursor
  Pfam annotation: Domain name=Ribosomal_S20p; Domain location=84-140; Score=-9.1; E_value=0.017; Accession=PF01649.8; Description =Ribosomal protein S20
  Subcellular localization annotation: CTP_CleavageSite=77; ConfidenceScore=5.92e-01
MATIVQCLSSCATLNSKFKSLSLNGASSSSSSSPTSSFSIRRGVCSSLSFAQSVSQCVAFSSGTMWVQKKTVRHSIVCEAAPTKKADSAAKRARQAEKRRVYNKSKKSEARTRMKKVLEALDGLKKKADAVPDEIVTVEKLIGEA

SEQ ID NO: 6291 - protein, 86 aa, Glycine max
  misc_feature (12)..(12): Xaa can be any naturally occurring amino acid
  misc_feature (20)..(21): Xaa can be any naturally occurring amino acid
  misc_feature (23)..(23): Xaa can be any naturally occurring amino acid
  misc_feature (31)..(32): Xaa can be any naturally occurring amino acid
  misc_feature (52)..(52): Xaa can be any naturally occurring amino acid
  misc_feature (57)..(57): Xaa can be any naturally occurring amino acid
  misc_feature (65)..(66): Xaa can be any naturally occurring amino acid
  Coding DNA Sequence Number=SeqID_2643
VRLVVKWIHHTXLIHRPARXXPXHCEHAPAXXHPSHSLLNVLLSSRPHTMLXYITSXPVYLYTIXXVCCKIRTRSSRLGAIVSIAR

SEQ ID NO: 6292 - protein, 103 aa, Glycine max
  Coding DNA Sequence Number=SeqID_2645
  Homolog annotation: Hit_ID=Q9SQX5; Match level="QueryCoverage=68%, HitCoverage=14%, E-value=1e-07, Identity=46%"; Hit description =Putative uncharacterized protein F13M14.28
GFLVPASTMSSATVLDGDNYAAEEVCIRNESLMSSAQRRKLADISNLEGQAKQTNREETHQQQDILFSCKEYAEKLEKAFPFALLFWCLLWWLTVILLILGCK

SEQ ID NO: 6293 - protein, 150 aa, Glycine max
  misc_feature (32)..(32): Xaa can be any naturally occurring amino acid
  misc_feature (57)..(57): Xaa can be any naturally occurring amino acid
  misc_feature (144)..(145): Xaa can be any naturally occurring amino acid
  Coding DNA Sequence Number=SeqID_2646
TVFSSYRVDTICNSVCIVVRAYSPTKSPIRLXEITHYACTVRVVYDASSHHYMKRVXMALIYLHSYAVLAILCYRSGVTDINNRRHEQSHDCCVSYGYVLGVGYTNIVSPIRLYSVGVVAVRRVLISMRAASEHDNMYTQTGDXXRKRIR

SEQ ID NO: 6294 - protein, 94 aa, Glycine max
  misc_feature (10)..(10): Xaa can be any naturally occurring amino acid
  Coding DNA Sequence Number=SeqID_2648
ISYPLVTVRXLFDDYDICYQSRCTVLTLVSIFTSQLLRHMLPHTPTHVYRYRFDRYSCCGSNNRYSGIQDTQRRIGFGSRLSCSLLVSELEILV

SEQ ID NO: 6295 - protein, 111 aa, Glycine max
  misc_feature (106)..(106): Xaa can be any naturally occurring amino acid
  Coding DNA Sequence Number=SeqID_2650
  Gene Ontology: Mol. function=small conjugating protein ligase activity; Cellular component=cytosol; Biological process=ubiquitin -dependent protein catabolic process
  Homolog annotation: Hit_ID=Q9FKT3; Match level="QueryCoverage=100%, HitCoverage=75%, E-value=4e-57, Identity=92%"; Hit description =Ubiquitin carrier protein
  Pfam annotation: Domain name=UQ_con; Domain location=5-111; Score =159.3; E_value=1e-44; Accession=PF00179.16; Description=Ubiquitin -conjugating enzyme
MASKRINKELRDLQRDPPVSCSAGPVGDDMFHWQATIMGPTDSPFSGGVFLVSIHFPPDYPFKPPKVSFRTKVYHPNINSNGSICLDILKEQWSPALTISKVLLSXCSLLT

SEQ ID NO: 6296 - protein, 147 aa, Glycine max
  misc_feature (66)..(66): Xaa can be any naturally occurring amino acid
  misc_feature (71)..(71): Xaa can be any naturally occurring amino acid
  misc_feature (73)..(73): Xaa can be any naturally occurring amino acid
  Coding DNA Sequence Number=SeqID_2651
ELPTLSAHGAREYNVAHLNAHVRYRLSAAYDACDAVRRDVRTAAYDSRREDLEYVYTAMLVSTSGXLRAIXLXRLARRAELYGPPSNRCAAASDDDTRSYSATSSPRARPLCNDVYHTRLPSRSVSVGAVSMASTQSAHVLCTCTPF

SEQ ID NO: 6297 - protein, 110 aa, Glycine max
  misc_feature (51)..(51): Xaa can be any naturally occurring amino acid
  Coding DNA Sequence Number=SeqID_2653
LIAARESAYVRPQYYSRTSQSRDNQLPSYAILYLLQHIYKRCMESSNLYSXSRSIIAASRRLKEYIVHVLIWLTIIANLLSNSSSLISTPRTYWRRHRASGLRATTSSTK

SEQ ID NO: 6298 - protein, 132 aa, Glycine max
  misc_feature (3)..(3): Xaa can be any naturally occurring amino acid
  misc_feature (18)..(19): Xaa can be any naturally occurring amino acid
  misc_feature (38)..(38): Xaa can be any naturally occurring amino acid
  misc_feature (54)..(54): Xaa can be any naturally occurring amino acid
  misc_feature (71)..(71): Xaa can be any naturally occurring amino acid
  misc_feature (94)..(94): Xaa can be any naturally occurring amino acid
  misc_feature (121)..(121): Xaa can be any naturally occurring amino acid
  Coding DNA Sequence Number=SeqID_2655
TSXAERHVLHVAPDDACXXRVVHADARHTSVAHRSGRXASRIIRVSVYPSCVIXSDATVRRMLTSHTQSVXRAVVLTSMHAATTDAYRLSYHIXTEIEFRHHGRTATDGPSYNHSRLTRHXRRRRPTSQRRH

SEQ ID NO: 6299 - protein, 229 aa, Glycine max
  Coding DNA Sequence Number=SeqID_2657
  Subcellular localization annotation: CTP_CleavageSite=49; ConfidenceScore=5.14e-01
FFFFFSFFFFFFFFFFFFFFFFFFFFFWGREPKWNWRLYYKKFWETQQRGTTQKGPKKKKSNPPPPFYSLNKKIKETPKKGRDFSHLLGIYISNPPSRVGFAPPLNPKKSGRGKGPPKKKNHPDRNQKLWSKKRTPSNFFSKNLNGKKKVPLGPKKSWPLSPEENKNRVPPEGGFPNLSLLEKRGGGGTKKINRGGGGFENVLGTKTWERRRGGWEWLGGKEKRKKGLP

SEQ ID NO: 6300 - protein, 120 aa, Glycine max
  misc_feature (81)..(81): Xaa can be any naturally occurring amino acid
  misc_feature (104)..(104): Xaa can be any naturally occurring amino acid
  Coding DNA Sequence Number=SeqID_2659
  Homolog annotation: Hit_ID=A7PLW7; Match level="QueryCoverage=90%, HitCoverage=33%, E-value=3e-30, Identity=63%"; Hit description =Chromosome chr14 scaffold_21, whole genome shotgun sequence
  Pfam annotation: Domain name=ATP12; Domain location=1-117; Score =40.0; E_value=8.2e-09; Accession=PF07542.2; Description=ATP12 chaperone protein
SNLNVWTLILVFRTLNTPYMRPLKRGGLPLAKSIAAECEYHQTDCIRPFTMPLMRLACTALEIVPLTTSKVIDNLINKFNXYLLFCRAPNDYELSSYVHAPQVXKIDPLLPWCSQILPLI

SEQ ID NO: 6301 - protein, 121 aa, Glycine max
  misc_feature (93)..(93): Xaa can be any naturally occurring amino acid
  misc_feature (110)..(110): Xaa can be any naturally occurring amino acid
  Coding DNA Sequence Number=SeqID_2660
FILYLLLNNVSSLTTNKPLITFITNYDIYELHMLLLFVYLISIYYLSSTQRHLHINYALFAEKERQHNNIHEYIYHNVNYLISLFYKCNQYNXYIYVYININKSIYIYYXLKIIIHRAYHI

SEQ ID NO: 6302 - protein, 142 aa, Glycine max
  misc_feature (36)..(36): Xaa can be any naturally occurring amino acid
  misc_feature (47)..(47): Xaa can be any naturally occurring amino acid
  Coding DNA Sequence Number=SeqID_2662
  Gene Ontology: Mol. function=solute:hydrogen antiporter activity; Cellular component=integral to membrane; Biological process =regulation of pH
  Homolog annotation: Hit_ID=A7QNF0; Match level="QueryCoverage=100%, HitCoverage=17%, E-value=4e-41, Identity=63%"; Hit description =Chromosome chr2 scaffold_132, whole genome shotgun sequence
TNVATITGAQSWGLLAFVIFTGSVGKIPGTICAPLXCQGPFNEALSXLGSLMKRKALPELIDLNMGNTGKVLNDHTSAIMALMAGFTTFITTPLVTGVYKPARKGKITNYKYRTIGRKNANSQLRILACFHGARNISSMINL

SEQ ID NO: 6303 - protein, 168 aa, Glycine max
  misc_feature (60)..(60): Xaa can be any naturally occurring amino acid
  misc_feature (84)..(84): Xaa can be any naturally occurring amino acid
  misc_feature (134)..(134): Xaa can be any naturally occurring amino acid
  misc_feature (137)..(137): Xaa can be any naturally occurring amino acid
  Coding DNA Sequence Number=SeqID_2663
  Gene Ontology: Mol. function=binding
  Homolog annotation: Hit_ID=A7NU85; Match level="QueryCoverage=91%, HitCoverage=34%, E-value=2e-40, Identity=58%"; Hit description =Chromosome chr18 scaffold_1, whole genome shotgun sequence
  Pfam annotation: Domain name=IFRD; Domain location=1-169; Score= -124.6; E_value=0.081; Accession=PF05004.4; Description=Interferon -related developmental regulator (IFRD)
YHVSETPSLLEGAAIITCVGGNDQEEAERSMDIMWRVINPKLGSNVVAVKPPASLIANVXSAWSFLLSTVSNLKLNSKNWQNSXISYLSSLLDKEDRSVRIAAGEALALIFERGVIDKSSAESDSARDTTQEGXNHXECYIFLQGLKGKVIYHMLILSIKAGRICSAY

SEQ ID NO: 6304 - protein, 403 aa, Glycine max
  misc_feature (153)..(153): Xaa can be any naturally occurring amino acid
  Coding DNA Sequence Number=SeqID_2664
  Gene Ontology: Mol. function=oxidoreductase activity, acting on single donors with incorporation of molecular oxygen, incorporation of two atoms of oxygen; Cellular component=phagocytic vesicle; Biological process=...
  Gene Ontology: Biological process=aromatic amino acid family metabolic process
  Homolog annotation: Hit_ID=A0E6B4; Match level="QueryCoverage=96%, HitCoverage=97%, E-value=1e-147, Identity=64%"; Hit description =Chromosome undetermined scaffold_8, whole genome shotgun sequence
  Pfam annotation: Domain name=Glyoxalase; Domain location=199-354; Score=58.3; E_value=2.7e-14; Accession=PF00903.15; Description =GlyoxalaseBleomycin resistance proteinDioxygenase superfamily
  Pfam annotation: Domain name=Glyoxalase; Domain location=29-160; Score=20.9; E_value=0.0012; Accession=PF00903.15; Description =GlyoxalaseBleomycin resistance proteinDioxygenase superfamily
  Pfam module annotation: Pfam domain module=Glyoxalase::Glyoxalase; Domain location=199-354::29-160
KNFLFFSNQPSFSLMDATKTRPEIGKFYGFDHVLFWVGNARQAASFYTSRFGFEYLAYKGLETGERNVATHVVRNGKIVFAFATTYGPYENKDETMAKHLAQHGDGVRDMAMTVEDAKRVYDLAVKRGAKSVAEPKTLSDEHGSVIIASVQTXYGDTIHTFVQRNVNGQEYKGAFLPGFKEHYLRDPLNEVLAPTKLDVIDHIVGNQSENEMVPTAEWYEKTLDFHRFWSIDDKMMHTEYSALNSIVVADFDEVIKLPINEPAKGKKKSQIQEYCDFYVGAGVQHLALKTENIIESVAALRKRGVEFLSIPKSYYDNFRKALPNLSIEVKEDIDTIEKLGLLIDYDDNGYLLQLFTKPLEDRPTVFIEIIQRRNFWGFGAGNFKSLFKALEDEQEKRGNLTDM

SEQ ID NO: 6305 - protein, 138 aa, Glycine max
  misc_feature (2)..(2): Xaa can be any naturally occurring amino acid
  misc_feature (4)..(4): Xaa can be any naturally occurring amino acid
  misc_feature (17)..(18): Xaa can be any naturally occurring amino acid
  misc_feature (36)..(36): Xaa can be any naturally occurring amino acid
  misc_feature (40)..(40): Xaa can be any naturally occurring amino acid
  misc_feature (42)..(42): Xaa can be any naturally occurring amino acid
  misc_feature (57)..(57): Xaa can be any naturally occurring amino acid
  misc_feature (66)..(66): Xaa can be any naturally occurring amino acid
  misc_feature (76)..(76): Xaa can be any naturally occurring amino acid
  misc_feature (80)..(80): Xaa can be any naturally occurring amino acid
  misc_feature (82)..(82): Xaa can be any naturally occurring amino acid
  misc_feature (93)..(93): Xaa can be any naturally occurring amino acid
  misc_feature (104)..(118): Xaa can be any naturally occurring amino acid
  misc_feature (120)..(120): Xaa can be any naturally occurring amino acid
  misc_feature (122)..(124): Xaa can be any naturally occurring amino acid
  misc_feature (127)..(130): Xaa can be any naturally occurring amino acid
  misc_feature (132)..(134): Xaa can be any naturally occurring amino acid
  Coding DNA Sequence Number=SeqID_2665
IXPXQTGNTHRRAQTPXXADRRPRAGACRYVPVVAXAYAXMXILYYTQAHYLFMQVXVSLACDRRXPCPPLSRPTXIAAXDXLQADRSHNSQXNLNVDDSCYLXXXXXXXXXXXXXXXRXEXXXRQXXXXKXXXKKKK

SEQ ID NO: 6306 - protein, 244 aa, Glycine max
  Coding DNA Sequence Number=SeqID_2667
MHWYPPHRGLLGYGSPPPPPIFLFSQRFLVLLSLERPAMRLYIRLDHICSLSAGRRHLYPCEAHKNNRVPPRRSSFVGRKYILMVSLAPSLSRFVITLRLIHTYKCSNSLHWPTVTTVLGLLDHNRETCTHAHGRREMPFPLSSKFALESFCRNIKYRDGVAPSPILRAPTPWKHLLHSRATAPPAQATSPDDRPRPRIVRGCLSSTGCPRPRVVSRTIGAPPPPPLLCARTATHISVLECSDT

SEQ ID NO: 6307 - protein, 126 aa, Glycine max
  misc_feature (24)..(24): Xaa can be any naturally occurring amino acid
  misc_feature (97)..(97): Xaa can be any naturally occurring amino acid
  Coding DNA Sequence Number=SeqID_2669
STPPNRTSNEPSQQRDLHIYLNLXISPPSHNRNGHSLPLSACPSALQCHNHHDSPLHYLDHNHNYLRRTARALSSSLPCSPAPAHSDLCTTRKSTRXPSLTLDTTTWNRTTSANEHPPIQFCLYTL

SEQ ID NO: 6308 - protein, 156 aa, Glycine max
  misc_feature (27)..(27): Xaa can be any naturally occurring amino acid
  misc_feature (31)..(31): Xaa can be any naturally occurring amino acid
  Coding DNA Sequence Number=SeqID_2671
  Gene Ontology: Mol. function=protein-tyrosine kinase activity; Cellular component=integral to membrane; Biological process=protein amino acid phosphorylation
  Homolog annotation: Hit_ID=Q84P43; Match level="QueryCoverage=100%, HitCoverage=42%, E-value=3e-51, Identity=68%"; Hit description =Protein kinase Pti1
IFEDYKAQIADFNLSNQAPDMARHIHXLVNXGTFAYHAPQYAMTGQLTQKSLFYNLGERLLHLLTRRKPADHTMPRGQQNLATWSIFRLSEYKVKHRLDLKLIGEYPPKRVAKLGPTAALCVPYEDDFMHNMSIVVKTLQPLLKIPAPAPAPVSES

SEQ ID NO: 6309 - protein, 114 aa, Glycine max
  misc_feature (8)..(9): Xaa can be any naturally occurring amino acid
  misc_feature (15)..(15): Xaa can be any naturally occurring amino acid
  misc_feature (18)..(18): Xaa can be any naturally occurring amino acid
  misc_feature (24)..(24): Xaa can be any naturally occurring amino acid
  misc_feature (26)..(27): Xaa can be any naturally occurring amino acid
  misc_feature (31)..(31): Xaa can be any naturally occurring amino acid
  misc_feature (33)..(34): Xaa can be any naturally occurring amino acid
  misc_feature (39)..(39): Xaa can be any naturally occurring amino acid
  misc_feature (71)..(71): Xaa can be any naturally occurring amino acid
  misc_feature (84)..(84): Xaa can be any naturally occurring amino acid
  Coding DNA Sequence Number=SeqID_2672
STTHDSIXXTVESEXRLXRSLHTXTXXHHSXIXXIIIAXSALALVVYILGADNTTHPMHDTRAHHAHIDQXELVIVATSVTTHXVAVRRRLIHTSTSTTNRACATMCSVAICDS

SEQ ID NO: 6310 - protein, 150 aa, Glycine max
  misc_feature (4)..(5): Xaa can be any naturally occurring amino acid
  misc_feature (7)..(7): Xaa can be any naturally occurring amino acid
  misc_feature (18)..(18): Xaa can be any naturally occurring amino acid
  misc_feature (22)..(22): Xaa can be any naturally occurring amino acid
  misc_feature (24)..(24): Xaa can be any naturally occurring amino acid
  misc_feature (105)..(105): Xaa can be any naturally occurring amino acid
  misc_feature (121)..(121): Xaa can be any naturally occurring amino acid
  misc_feature (124)..(124): Xaa can be any naturally occurring amino acid
  misc_feature (135)..(135): Xaa can be any naturally occurring amino acid
  misc_feature (137)..(137): Xaa can be any naturally occurring amino acid
  Coding DNA Sequence Number=SeqID_2674
VSYXXFXVFSARPLRTLXIIYXIXPAPAPAPVTIQRVTCDDATRAHITPHGDASIISVLLLPIYPAALRPSTALLYLSHDAIAYTAAHDGMSDSPRQLLFICHIXILQRGAADAASGSILXTRXVYHAVGARAAXIXSPRSARFIYYIIR

SEQ ID NO: 6311 - protein, 49 aa, Glycine max
  Coding DNA Sequence Number=SeqID_2676
DPLGDFAQSSSEHPNWVGSWLCSLDAHLLFEKMAQGDSMKTMMDMLAQI

SEQ ID NO: 6312 - protein, 91 aa, Glycine max
  Coding DNA Sequence Number=SeqID_2677
YYEHIADVEFVYAHSWYITSSYVFRSRLVACRVRSYLVSAVVSFIIFSYIILVLIMLFIAFISTSSRFLISLCLSPLYFVARERHLKTAMC

SEQ ID NO: 6313 - protein, 126 aa, Glycine max
  misc_feature (34)..(34): Xaa can be any naturally occurring amino acid
  misc_feature (40)..(40): Xaa can be any naturally occurring amino acid
  misc_feature (51)..(51): Xaa can be any naturally occurring amino acid
  misc_feature (62)..(62): Xaa can be any naturally occurring amino acid
  Coding DNA Sequence Number=SeqID_2679
QLVYVWTFHIAIVSLMYICTLRYSIDSRVTEYTXACGNDXARPYLIESERXVSYVRCVSYGXTFIVRQHLFVPVRSSTILMYSRSAVVTSQCFTLYFNLRGSSARDLVVVRTLSRYCVCASSCWII

SEQ ID NO: 6314 - protein, 127 aa, Glycine max
  Coding DNA Sequence Number=SeqID_2681
  Subcellular localization annotation: CTP_CleavageSite=20; ConfidenceScore=5.07e-01
FFVFHGARSMFMWSYSVGRRASTPPTFFSPPIIHTDSSRHLLYLPFIFLCVDTRYRFNIPHFLTISPSRPLFFISAPLTHLVFLLPRYRIARRWRDPRKQKKKINVIRLPGCIHSPPPIRRRSTLNY

SEQ ID NO: 6315 - protein, 164 aa, Glycine max
  misc_feature (34)..(35): Xaa can be any naturally occurring amino acid
  misc_feature (41)..(41): Xaa can be any naturally occurring amino acid
  misc_feature (47)..(47): Xaa can be any naturally occurring amino acid
  misc_feature (49)..(49): Xaa can be any naturally occurring amino acid
  misc_feature (65)..(65): Xaa can be any naturally occurring amino acid
  misc_feature (80)..(80): Xaa can be any naturally occurring amino acid
  misc_feature (90)..(90): Xaa can be any naturally occurring amino acid
  misc_feature (106)..(107): Xaa can be any naturally occurring amino acid
  misc_feature (112)..(114): Xaa can be any naturally occurring amino acid
  misc_feature (117)..(117): Xaa can be any naturally occurring amino acid
  misc_feature (125)..(125): Xaa can be any naturally occurring amino acid
  misc_feature (128)..(128): Xaa can be any naturally occurring amino acid
  misc_feature (130)..(130): Xaa can be any naturally occurring amino acid
  misc_feature (133)..(133): Xaa can be any naturally occurring amino acid
  misc_feature (141)..(141): Xaa can be any naturally occurring amino acid
  misc_feature (145)..(145): Xaa can be any naturally occurring amino acid
  misc_feature (148)..(149): Xaa can be any naturally occurring amino acid
  misc_feature (153)..(153): Xaa can be any naturally occurring amino acid
  misc_feature (158)..(158): Xaa can be any naturally occurring amino acid
  Coding DNA Sequence Number=SeqID_2683
SSFITTHTNELVVVLFVLCGGVDKPSLQLCSIAXXSSPAPXLVRRSXQXPAETPAKRTAAASEMXTRERAHPPNPAARAXAVPTDRASSXHTRPLRVMSRDRAYSXXHHLKXXXQHXTTRERHAXTGXGXRGXLVCVNNTXRVRXKGXXREGXGPPAXPRPHPP

SEQ ID NO: 6316 - protein, 76 aa, Glycine max
  Coding DNA Sequence Number=SeqID_2685
TKCVVCYGVKIYEETSPGRGTRVVTYQIADDEVFTRKEGALITNIQERARRGRLWRALYYIRYIVKPDMSFFCLVG

SEQ ID NO: 6317 - protein, 448 aa, Glycine max
  Coding DNA Sequence Number=SeqID_2687
  Homolog annotation: Hit_ID=A9G769; Match level="QueryCoverage=75%, HitCoverage=89%, E-value=2e-39, Identity=36%"; Hit description =Putative secreted protein
  Pfam annotation: Domain name=Keratin_B2; Domain location=3-189; Score= -73.1; E_value=0.048; Accession=PF01500.7; Description=Keratin, high sulfur B2 protein
ISIVACQFDSAATNNTGTTCVIEGVAYNDGHVNPKNACQACILATSSVAWTPTDEGKVCGSPGICHAGACSNGCLIANVYYDQSTPNPNDACSICDIAKSATAWSTNSDGTACGAGKICRTGSCQAGCEIGGTFYAPSALLPNGCQTCQPDKSTTNATPVADDTACGQSGKCFTGRCIEPIVTIPAPQALAVDATSIYFTENSNSVGKAPIGGGKPVQLATVANTFPTGIAVDASFVYWTVNANVYKVPLAGGSASPLASATNAQGITVDGTSVYWTNGGTQFVANGSIMSVPLAGGNPTTLASGLKFPRQIVLSGGNVLFTEFDGGRVSSVTIGGGAPTPLATTQVGAYGIAVDSTSAYFTDFQPGTVMKVPIGGGMVSTLAPKQAHPTNVAVDATSVYWTEDNAVMKQDFGGPAIVIAKTTTPIGLALDANYVYWSGGAIYRVAKK

SEQ ID NO: 6318 - protein, 73 aa, Glycine max
  Coding DNA Sequence Number=SeqID_2688
MLWDWGVNIVPKYIGDDMVLLLGLTEGQARQLMESNKSPFYSVERWNRQKILAAIGDVVEVDDEVEELRKMDR

SEQ ID NO: 6319 - protein, 164 aa, Glycine max
  misc_feature (1)..(6): Xaa can be any naturally occurring amino acid
  misc_feature (13)..(13): Xaa can be any naturally occurring amino acid
  misc_feature (17)..(17): Xaa can be any naturally occurring amino acid
  misc_feature (24)..(24): Xaa can be any naturally occurring amino acid
  misc_feature (57)..(57): Xaa can be any naturally occurring amino acid
  misc_feature (133)..(133): Xaa can be any naturally occurring amino acid
  misc_feature (140)..(140): Xaa can be any naturally occurring amino acid
  misc_feature (153)..(153): Xaa can be any naturally occurring amino acid
  Coding DNA Sequence Number=SeqID_2689
  Subcellular localization annotation: CTP_CleavageSite=49; ConfidenceScore=5.54e-01
XXXXXXPPPHTPXPHRXPPPPPPXTPYTRRRVPPRPTKPPPHTAPPHKRGSAKERTXDWSLVPSPGLLICTIYFSISLIFILPLLTPSTSTLPEHTQYFDPIDFLRIAPTYAGRLVVRQHSSFSLPSLHHPIXALYFKIXFFVARTDVCLSNXPLPFFSVCYLH

SEQ ID NO: 6320 - protein, 48 aa, Glycine max
  misc_feature (15)..(15): Xaa can be any naturally occurring amino acid
  Coding DNA Sequence Number=SeqID_2691
  Homolog annotation: Hit_ID=A7NVR9; Match level="QueryCoverage=97%, HitCoverage=12%, E-value=2e-08, Identity=63%"; Hit description =Chromosome chr18 scaffold_1, whole genome shotgun sequence
GYIFSQKWCKACVLXDGLNRGLSKLGIGRSCGSVAFDNGNESKVEKSI

SEQ ID NO: 6321 - protein, 144 aa, Glycine max
  misc_feature (82)..(82): Xaa can be any naturally occurring amino acid
  misc_feature (115)..(115): Xaa can be any naturally occurring amino acid
  Coding DNA Sequence Number=SeqID_2692
  Subcellular localization annotation: CTP_CleavageSite=28; ConfidenceScore=5.03e-01
SGIFSNLCIKLYSRYASISQPLSLLILRSSRATAGDVCRVLAQSCATERERTHSFIIRLIHTLCVSSVLPISPYYESVVIKXVTVDISKMWQCMTPRSRDGQDVHWRAYEHEDEXARVRARSDERIYVVCVDIASKDNVRDDLW

SEQ ID NO: 6322 - protein, 180 aa, Glycine max
  misc_feature (107)..(107): Xaa can be any naturally occurring amino acid
  misc_feature (157)..(157): Xaa can be any naturally occurring amino acid
  Coding DNA Sequence Number=SeqID_2694
  Homolog annotation: Hit_ID=Q237T1; Match level="QueryCoverage=72%, HitCoverage=75%, E-value=2e-14, Identity=35%"; Hit description =Putative uncharacterized protein
MNTLSETRDKFSLGSSVYGAIEKAKETPIPNNAELLASTTLTQTYHLTPEKEAILLSNIALNQNGDKQRALGFTHNGEKAHLIFGHGIRQNDFEKRELASTYNLSYXAQIKPKEFIFSKFDSTAVPPVINPEDKVYIKSHMKGIAAIGDSQNFENKXQYKHYDEFTKTFDSVQSKIAFRK

SEQ ID NO: 6323 - protein, 172 aa, Glycine max
  misc_feature (69)..(69): Xaa can be any naturally occurring amino acid
  misc_feature (89)..(89): Xaa can be any naturally occurring amino acid
  misc_feature (108)..(109): Xaa can be any naturally occurring amino acid
  misc_feature (114)..(114): Xaa can be any naturally occurring amino acid
  misc_feature (121)..(121): Xaa can be any naturally occurring amino acid
  misc_feature (123)..(123): Xaa can be any naturally occurring amino acid
  misc_feature (131)..(131): Xaa can be any naturally occurring amino acid
  misc_feature (136)..(137): Xaa can be any naturally occurring amino acid
  Coding DNA Sequence Number=SeqID_2695
  Homolog annotation: Hit_ID=Q8LFZ9; Match level="QueryCoverage=80%, HitCoverage=36%, E-value=4e-50, Identity=62%"; Hit description =Sucrase-like protein
  Pfam annotation: Domain name=Suc_Fer-like; Domain location=1-127; Score=16.3; E_value=1.1e-07; Accession=PF06999.3; Description =Sucraseferredoxin-like
ETSNGDVLIFPDMIRYRRLTHFDVETFVEEVLVKEGNWLPGNPESLKASYVFVCSHGSRDRRCGVFGPXLGNVIIFGSSINREVTGHLXGGDSPWYGYVTPDDVPLLXXQHIIXGEIFDSXWXRGQIGLSXDDQKXXHEQALGGLRCMVLAAQLSCCKTLCCCFSCRFLQGL

SEQ ID NO: 6324 - protein, 144 aa, Glycine max
  misc_feature (2)..(2): Xaa can be any naturally occurring amino acid
  misc_feature (8)..(8): Xaa can be any naturally occurring amino acid
  misc_feature (23)..(23): Xaa can be any naturally occurring amino acid
  misc_feature (34)..(35): Xaa can be any naturally occurring amino acid
  misc_feature (38)..(38): Xaa can be any naturally occurring amino acid
  misc_feature (51)..(51): Xaa can be any naturally occurring amino acid
  misc_feature (57)..(58): Xaa can be any naturally occurring amino acid
  misc_feature (63)..(63): Xaa can be any naturally occurring amino acid
  misc_feature (81)..(81): Xaa can be any naturally occurring amino acid
  misc_feature (85)..(85): Xaa can be any naturally occurring amino acid
  misc_feature (108)..(108): Xaa can be any naturally occurring amino acid
  misc_feature (121)..(121): Xaa can be any naturally occurring amino acid
  Coding DNA Sequence Number=SeqID_2696
QXLYIDIXSPVIARANFDISTCXSRVVTPSTSLXXVYXAYTIARRGVSCDXGLHVLXXAYHIXSSNIFVYDSRAVDVGRAXYCTXLSRSTARILSCGTLDNEQYMSSXRALVLEEHEELIXAAPLSIVRARAGYDTYYYIILTR

SEQ ID NO: 6325 - protein, 106 aa, Glycine max
  misc_feature (22)..(22): Xaa can be any naturally occurring amino acid
  misc_feature (31)..(31): Xaa can be any naturally occurring amino acid
  misc_feature (54)..(54): Xaa can be any naturally occurring amino acid
  misc_feature (60)..(61): Xaa can be any naturally occurring amino acid
  misc_feature (97)..(97): Xaa can be any naturally occurring amino acid
  misc_feature (100)..(100): Xaa can be any naturally occurring amino acid
  misc_feature (102)..(102): Xaa can be any naturally occurring amino acid
  misc_feature (104)..(104): Xaa can be any naturally occurring amino acid
  misc_feature (106)..(106): Xaa can be any naturally occurring amino acid
  Coding DNA Sequence Number=SeqID_2698
  Subcellular localization annotation: CTP_CleavageSite=28; ConfidenceScore=5.06e-01
IRQDTSTGLIVVVSAGRMLSSXMQRYTRAQXAVHRDSTSALLGSLRVRIIYTFXNGGRQXXLSSQPLHSTDVSVRIAVRRVTVCLSVYGTCSLEVSXSVXFXYXTX

SEQ ID NO: 6326 - protein, 127 aa, Glycine max
  misc_feature (44)..(44): Xaa can be any naturally occurring amino acid
  misc_feature (91)..(91): Xaa can be any naturally occurring amino acid
  misc_feature (118)..(118): Xaa can be any naturally occurring amino acid
  Coding DNA Sequence Number=SeqID_2700
  Subcellular localization annotation: CTP_CleavageSite=26; ConfidenceScore=5.19e-01
QPREHTQHSTTLLSVDHTPTHTLKSSCDYSRPRRLSTCLLSLTXAISVCLSAPYPPDAYSSFTSHHMRSHHSRMIPHACLIDRLRSIHSCXSYSRSPLSILTNRTACTVLRQLALYWXSSLYHAGRW

SEQ ID NO: 6327 - protein, 155 aa, Glycine max
  misc_feature (117)..(117): Xaa can be any naturally occurring amino acid
  Coding DNA Sequence Number=SeqID_2701
  Gene Ontology: Mol. function=protein binding
  Homolog annotation: Hit_ID=Q56B90; Match level="QueryCoverage=99%, HitCoverage=54%, E-value=9e-46, Identity=65%"; Hit description=Ice recrystallization inhibition protein 1 precursor
  Subcellular localization annotation: CTP_CleavageSite=78; ConfidenceScore=5.11e-01
LVGEVPKSLIELKGFATTGRSLGMAFTNMPLYVKRSRRTLQQQQPNIISGTNNKVRSGRTNVVSGNDNTVVSGNNNTVAGSNNTITTGSGNTVSGSNHVVSGTKHIVTDNNNVVSGXTIMYPGASTPYPGLSIPYPGATIPYLGATMSCLGATKL

SEQ ID NO: 6328 - protein, 120 aa, Glycine max
  Coding DNA Sequence Number=SeqID_2702
  Gene Ontology: Mol. function=structural constituent of ribosome; Cellular component=ribonucleoprotein complex; Biological process =translational elongation
  Homolog annotation: Hit_ID=Q9LVC9; Match level="QueryCoverage=100%, HitCoverage=100%, E-value=2e-29, Identity=60%"; Hit description=60S acidic ribosomal protein P3-2
  Pfam annotation: Domain name=Ribosomal_60s; Domain location=25-119; Score=24.6; E_value=0.00012; Accession=PF00428.9; Description=60s Acidic ribosomal protein
MGVFTFVCKSKGGEWSAKQHEGDLEASASSTYDLQRKVVQTALSADSSGGVQSSFSLVSPTSAVFQVIIGGGSGGGFAAGGGAAAGGGGGGEAAAATKEEEKKKEESEEEEGDFGFDLFG

SEQ ID NO: 6329 - protein, 135 aa, Glycine max
  misc_feature (8)..(8): Xaa can be any naturally occurring amino acid
  misc_feature (11)..(11): Xaa can be any naturally occurring amino acid
  misc_feature (14)..(16): Xaa can be any naturally occurring amino acid
  misc_feature (20)..(25): Xaa can be any naturally occurring amino acid
  misc_feature (29)..(29): Xaa can be any naturally occurring amino acid
  misc_feature (31)..(31): Xaa can be any naturally occurring amino acid
  misc_feature (36)..(37): Xaa can be any naturally occurring amino acid
  misc_feature (39)..(39): Xaa can be any naturally occurring amino acid
  misc_feature (41)..(41): Xaa can be any naturally occurring amino acid
  misc_feature (43)..(43): Xaa can be any naturally occurring amino acid
  misc_feature (47)..(47): Xaa can be any naturally occurring amino acid
  misc_feature (51)..(51): Xaa can be any naturally occurring amino acid
  misc_feature (57)..(57): Xaa can be any naturally occurring amino acid
  misc_feature (74)..(74): Xaa can be any naturally occurring amino acid
  misc_feature (82)..(83): Xaa can be any naturally occurring amino acid
  misc_feature (97)..(98): Xaa can be any naturally occurring amino acid
  misc_feature (101)..(101): Xaa can be any naturally occurring amino acid
  misc_feature (104)..(105): Xaa can be any naturally occurring amino acid
  misc_feature (133)..(133): Xaa can be any naturally occurring amino acid
  Coding DNA Sequence Number=SeqID_2703
  Gene Ontology: Mol. function=inorganic diphosphatase activity; Cellular component=cytoplasm; Biological process=phosphate metabolic process
  Homolog annotation: Hit_ID=Q6KBB0; Match level="QueryCoverage=73%, HitCoverage=45%, E-value=9e-12, Identity=42%"; Hit description =Putative inorganic pyrophosphatase
TPTKGASXQHXPNXXXNERXXXXXXRKQXAXHPGQXXEXGXEXPKNXNGGXEIVKGXKGKYELDKRTGLIMGDXILYSSGGXXHNEGRIPRTIGEEXXPKXGGXXRQEPEAPGGGGRGEARGRRARRGKGEKXEK

SEQ ID NO: 6330 - protein, 140 aa, Glycine max
  misc_feature (10)..(11): Xaa can be any naturally occurring amino acid
  misc_feature (18)..(18): Xaa can be any naturally occurring amino acid
  misc_feature (24)..(25): Xaa can be any naturally occurring amino acid
  misc_feature (39)..(39): Xaa can be any naturally occurring amino acid
  misc_feature (43)..(43): Xaa can be any naturally occurring amino acid
  misc_feature (67)..(67): Xaa can be any naturally occurring amino acid
  misc_feature (85)..(85): Xaa can be any naturally occurring amino acid
  misc_feature (130)..(130): Xaa can be any naturally occurring amino acid
  Coding DNA Sequence Number=SeqID_2704
FFFFWFVVFXXSEWRGAXNKTKPXXNSSTYNIYMVEGVXCLLXGLVWSFALQRVTCDIPSPPFLSAXFPSVSARAAPYRARSRTXVVRRASTVHSYYYSIFHYHFCSLTKRRPTTRPRRRTPASARTDNXHNTLNIVRIT

SEQ ID NO: 6331 - protein, 182 aa, Glycine max
  Coding DNA Sequence Number=SeqID_2706
APPPTNPTPGLVGSTYNKTFGEVTEIGPQSGQIAREEMISNTISTNNYVPMNNVVTERREVFTESIPQRREVIATETIPERREVYTTERIPVRESIPADHLNRDMASGTFLPEPVITEERLNVDRIPVATTNTSNISPVHENRPNIIERIEDKIEGRTHHISNEGLVQPTMETSNLPSLSER

SEQ ID NO: 6332 - protein, 134 aa, Glycine max
  misc_feature (7)..(7): Xaa can be any naturally occurring amino acid
  misc_feature (11)..(12): Xaa can be any naturally occurring amino acid
  misc_feature (15)..(16): Xaa can be any naturally occurring amino acid
  misc_feature (36)..(36): Xaa can be any naturally occurring amino acid
  misc_feature (60)..(60): Xaa can be any naturally occurring amino acid
  misc_feature (69)..(69): Xaa can be any naturally occurring amino acid
  misc_feature (88)..(88): Xaa can be any naturally occurring amino acid
  misc_feature (107)..(107): Xaa can be any naturally occurring amino acid
  misc_feature (115)..(115): Xaa can be any naturally occurring amino acid
  misc_feature (119)..(120): Xaa can be any naturally occurring amino acid
  Coding DNA Sequence Number=SeqID_2708
EKTGEDXMKKXXRKXXRRSTRRARRHGAARAFCSAXCYCSLVMCSINDSEAYHDMSIYTXYYVVYRWSXFVDVLSSDSSFFFTSMHHXCVVLCSYGRPLPCVYRWEXCLLIDVIXVYRXXCAASALIMSRALTE

SEQ ID NO: 6333 - protein, 132 aa, Glycine max
  Coding DNA Sequence Number=SeqID_2710
  Gene Ontology: Mol. function=vascular endothelial growth factor receptor activity; Cellular component=integral to membrane; Biological process=multicellular organismal development
  Homolog annotation: Hit_ID=Q589G5; Match level="QueryCoverage=81%, HitCoverage=9%, E-value=3e-43, Identity=76%"; Hit description =Protogenin precursor
  Pfam annotation: Domain name=I-set; Domain location=30-122; Score =47.8; E_value=3.8e-11; Accession=PF07679.6; Description =Immunoglobulin I-set domain
  Pfam annotation: Domain name=V-set; Domain location=31-123; Score= -0.1; E_value=0.055; Accession=PF07686.7; Description=Immunoglobulin V-set domain
  Pfam annotation: Domain name=ig; Domain location=44-106; Score=23.3; E_value=0.00089; Accession=PF00047.15; Description=Immunoglobulin domain
  Pfam module annotation: Pfam domain module=I-set::V-set::ig; Domain location=30-122::31-123::44-106
MAACRRRLPHGVLCWLTLLSLPGILCFSDLMFVKEPQDVIVSRKDSVILDCQTNGEAPITVTWMKNGIKISENERISTFHNGSLYIREVEGRKGEQSDEGFYQCLALNKFGAILSQRAHLSLASKLFGVWFQ

SEQ ID NO: 6334 - protein, 107 aa, Glycine max
  Coding DNA Sequence Number=SeqID_2711
QGMEWVNQRRTLTGSLMRSTAKLANAAKQKQHGHKQLSIVPMIQMTAPTRDRRRATSANGSPNKKPSGLHSPILLFPFSPPNLEADHKFCYARQRMRKRNKRLEVLN

SEQ ID NO: 6335 - protein, 84 aa, Glycine max
  misc_feature (6)..(6): Xaa can be any naturally occurring amino acid
  misc_feature (24)..(24): Xaa can be any naturally occurring amino acid
  misc_feature (26)..(29): Xaa can be any naturally occurring amino acid
  misc_feature (42)..(44): Xaa can be any naturally occurring amino acid
  misc_feature (47)..(48): Xaa can be any naturally occurring amino acid
  misc_feature (77)..(78): Xaa can be any naturally occurring amino acid
  Coding DNA Sequence Number=SeqID_2713
NPKVSXPYTIRETEGRGGTHQPSXAXXXXVIERRVMALTRTXXXLHXXPQPHPTTQNNRALGRAKEKRQKGARRKHXXPTTAPR

SEQ ID NO: 6336 - protein, 79 aa, Glycine max
  misc_feature (20)..(20): Xaa can be any naturally occurring amino acid
  misc_feature (79)..(79): Xaa can be any naturally occurring amino acid
  Coding DNA Sequence Number=SeqID_2715
LSKRNALQSDALNYLGEVHXDAHRTDSELCGVGPQDDTDYAIYCLRVWRVQIVFRARKSQEYITVYFICCNKNDILMIX

SEQ ID NO: 6337 - protein, 99 aa, Glycine max
  Coding DNA Sequence Number=SeqID_2717
SHVERDTQCESSVCSESSVVSSYNPYLMPIILHSPASTLPKQISLDVRTRSLSVVDTQLYYIDRIAAAASQNILSSPISRCRVFRRTRATKEGVDIVGR

SEQ ID NO: 6338 - protein, 129 aa, Glycine max
  Coding DNA Sequence Number=SeqID_2719
CFFQRRDGAIGCRRHVMLVVIGEMYRTQPTPAAIEQSHQNIYSRPALKPQLHLAFFTLHLCNRTSPRDADGLTLPSLSDTSATIRLHIHIYSCRILTHPRHDSDGIVLRVRTPPTCPALCLWLELRKQL

SEQ ID NO: 6339 - protein, 296 aa, Glycine max
  Coding DNA Sequence Number=SeqID_2721
  Gene Ontology: Mol. function=potassium ion transmembrane transporter activity; Cellular component=membrane; Biological process=potassium ion transport
  Homolog annotation: Hit_ID=A7PMD1; Match level="QueryCoverage=100%, HitCoverage=48%, E-value=1e-116, Identity=69%"; Hit description =Chromosome chr14 scaffold_21, whole genome shotgun sequence
  Pfam annotation: Domain name=K_trans; Domain location=1-296; Score= -169.9; E_value=6.9e-15; Accession=PF02705.7; Description=K+ potassium transporter
VPIALSLIFLIAMYVWHYGTLKKYEFDVHNKVPINWLLSLGPSLGIVRVKGIGLIHTELVSGIPAIFSHFVTNLPAFHQVVIFLCIKSVQVPHVRPEERFLVGRVGPKEYRLYRCIARYGYHDIHKDDIEFERDLICSIAEFIRSDASEYGLGFGSFEEDTKMTVVGTSASNLEGSIRMTEDDDQVDSQMEGPSELMEVKSSPEKVRKRVRFVVPDSPQIDLDAREELLELMEAKEAGMAFILSHSYVRAKSGSSWLKKVVINYGYDFLRRNSRGPSYALSIPHASTLEVGMIYHV

SEQ ID NO: 6340 - protein, 140 aa, Glycine max
  misc_feature (46)..(46): Xaa can be any naturally occurring amino acid
  Coding DNA Sequence Number=SeqID_2722
VQTTMTISDGRQTEIHEPDLIFHSYCINSDFLPSSSSEPERALNVXYNNSRGEPEHPAQLASPPRHASVYIHRDTVCPSRYVPSLASRGDALLIVWRDFLLFTSPLLLSHPSHFEKKEREKGEKTLSERGVALLPLCHVL

SEQ ID NO: 6341 - protein, 85 aa, Glycine max
  misc_feature (3)..(3): Xaa can be any naturally occurring amino acid
  misc_feature (60)..(60): Xaa can be any naturally occurring amino acid
  Coding DNA Sequence Number=SeqID_2724
  Subcellular localization annotation: CTP_CleavageSite=36; ConfidenceScore=5.39e-01
VGXQHPTPIIYNILFHTPSSVMSPLSSLTTPHRRARMEHTSHSIVALLLCTLSLYQIRSXSYLRRLAMTRDNKSDYSLLHTWLPR

SEQ ID NO: 6342 - protein, 132 aa, Glycine max
  misc_feature (45)..(45): Xaa can be any naturally occurring amino acid
  misc_feature (64)..(64): Xaa can be any naturally occurring amino acid
  misc_feature (78)..(78): Xaa can be any naturally occurring amino acid
  Coding DNA Sequence Number=SeqID_2725
  Gene Ontology: Mol. function=structural constituent of ribosome; Cellular component=ribonucleoprotein complex; Biological process =translation
  Homolog annotation: Hit_ID=Q9M3Z0; Match level="QueryCoverage=99%, HitCoverage=55%, E-value=3e-36, Identity=62%"; Hit description=60S ribosomal protein L6
  Pfam annotation: Domain name=Ribosomal_L6e; Domain location=46-133; Score=52.9; E_value=1.1e-12; Accession=PF01159.9; Description =Ribosomal protein L6e
LPELLQASFTPGTELILIAGLFKGKRVLFYNQFPSGLLFVSGSLXINGVPLRRVNQSYVIGTSXPKLNVLCMIIVEQXDDKYFTKEAQTTIIGEGEYYDAEKDEKSVLPHQKRDDQYTDDSALIKAIESVPD

SEQ ID NO: 6343 - protein, 138 aa, Glycine max
  Coding DNA Sequence Number=SeqID_2726
KAFSLFHAWNILKNEPKWAEDKGSKVGNSNGEAHSNVERPLGRKAEKEKAKGKKRVDDEPDPLLEEVKKIRESREQNQKERKERDDRIIELDKKIDLEQDQHDKIIMTTDASTMDEQAQQYFRLLKDEILVRRFGRQS

SEQ ID NO: 6344 - protein, 85 aa, Glycine max
  Coding DNA Sequence Number=SeqID_2728
  Gene Ontology: Mol. function=protein serine/threonine phosphatase activity; Cellular component=protein serine/threonine phosphatase complex; Biological process=protein amino acid dephosphorylation
  Homolog annotation: Hit_ID=Q8S8Z0; Match level="QueryCoverage=83%, HitCoverage=21%, E-value=1e-27, Identity=85%"; Hit description =Protein phosphatase 2C
MGYLNSVLSSSSQVHVADDAIVSGGGLSHNGKFSYGYASSPGKRSSMEDFYETRIDGVEGEIVGLFGVFDGMFIPSCLLHLQVVH

SEQ ID NO: 6345 - protein, 133 aa, Glycine max
  misc_feature (117)..(117): Xaa can be any naturally occurring amino acid
  Coding DNA Sequence Number=SeqID_2729
  Subcellular localization annotation: CTP_CleavageSite=76; ConfidenceScore=5.09e-01
LISHSDACHIPLLFISAEISDIPNNARNVTSTMTNLPQTRLLTSLSRSTHDHTHTRMPSTLSPRTNYTLSHDYATPAQRAPPPRRHHYRVGSGRLAPAPLHYRARYRLRKYDATPHXPLPIESPPHPPPRSEV

SEQ ID NO: 6346 - protein, 173 aa, Glycine max
  misc_feature (9)..(9): Xaa can be any naturally occurring amino acid
  misc_feature (18)..(18): Xaa can be any naturally occurring amino acid
  misc_feature (87)..(87): Xaa can be any naturally occurring amino acid
  Coding DNA Sequence Number=SeqID_2731
  Gene Ontology: Mol. function=plastoquinol-plastocyanin reductase activity; Cellular component=integral to membrane; Biological process=electron transport
  Homolog annotation: Hit_ID=A8Y7Z9; Match level="QueryCoverage=100%, HitCoverage=75%, E-value=1e-74, Identity=80%"; Hit description =Rieske iron-sulphur protein precursor
  Pfam annotation: Domain name=CytB6-F_Fe-S; Domain location=54-92; Score=74.2; E_value=4.2e-19; Accession=PF08802.1; Description =Cytochrome B6-F complex Fe-S subunit
  Subcellular localization annotation: CTP_CleavageSite=33; ConfidenceScore=5.05e-01
TTLSPTTPXKLCSRKRGXITNPNKRLLVKPVKRHMTGKSKGLRIACQATIISADRVPDMGKRQIMNLLLLGAISLPTAGMLMPYTYXGVPPGSCSSAGGPVAKDAAGNDVIVKNWRRAHGPGDRTLTQGLKGDPTYLVVDKDRTLATFALNAVCTHVGCVGPWNQAERQLICP

SEQ ID NO: 6347 - protein, 572 aa, Glycine max
  misc_feature (143)..(143): Xaa can be any naturally occurring amino acid
  misc_feature (162)..(162): Xaa can be any naturally occurring amino acid
  misc_feature (174)..(174): Xaa can be any naturally occurring amino acid
  misc_feature (192)..(192): Xaa can be any naturally occurring amino acid
  Coding DNA Sequence Number=SeqID_2732
  Gene Ontology: Mol. function=protein binding; Cellular component =intracellular; Biological process=intracellular protein transport
  Homolog annotation: Hit_ID=Q2V732; Match level="QueryCoverage=99%, HitCoverage=84%, E-value=0.0, Identity=83%"; Hit description=VHS and GAT domain protein
  Pfam annotation: Domain name=GAT; Domain location=175-279; Score =44.8; E_value=3e-10; Accession=PF03127.5; Description=GAT domain
  Pfam annotation: Domain name=VHS; Domain location=1-134; Score=113.6; E_value=6.1e-31; Accession=PF00790.9; Description=VHS domain
  Pfam module annotation: Pfam domain module=GAT::VHS; Domain location =175-279::1-134
MVNSMVERATSDMLIGPDWAMNIEICDMLNHDPGQAKDVVKGIKKRIGSKNSKVQLLALTLLETIIKNCGDIVHMHVAERDVLHEMVKIVKKKPDFHVKEKILVLVDTWQEAFGGPRARYPQYYAAYQELLRAGAVFPQRSEXQSAPVITPTQTQPLASYPXNILDTNVDWDTXEVVPSHAKEFHTLSIGKXESAFLQEIAELGNALDPSNKEGIRQEVIDYLVEQCLIYKQRVVHLVNSTLDESLLCQGLALNDDLQRVLAKHESISSGISTKNENHTENLNPSLAPAGALVDIDAPLVDTGDTSKQTDGRSSSNVEAGSQTLNQLLLPAPPTSNGSTIPAKVDPKWDLLSGDDYNSPKADSSNALVPLGEQPTASPVSQQNALVLFDMFSNGNNAPTSVNSQPPHPANVAGQTSPYAPQFQQQQTVTSQGGFYPNGNAPNAGSPQQYEQSLYTQNTGPAWNGQVAQQQQQQPPSPVYGTQSGSLPPPPWEAQPAADNGSPLAGAQYPHMQNSGHPMGPQTMGNDQFVCMYMKPYGNSKLSRMYNHCRSNQMGLQNKHMQGVTESYMLMLI

SEQ ID NO: 6348 - protein, 105 aa, Glycine max
  misc_feature (40)..(40): Xaa can be any naturally occurring amino acid
  misc_feature (66)..(66): Xaa can be any naturally occurring amino acid
  misc_feature (84)..(84): Xaa can be any naturally occurring amino acid
  Coding DNA Sequence Number=SeqID_2733
  Gene Ontology: Mol. function=structural constituent of ribosome; Cellular component=ribonucleoprotein complex; Biological process =translation
  Homolog annotation: Hit_ID=A2Y5F8; Match level="QueryCoverage=73%, HitCoverage=67%, E-value=6e-29, Identity=87%"; Hit description=60S ribosomal protein L36
  Pfam annotation: Domain name=Ribosomal_L36e; Domain location=5-94; Score=58.7; E_value=2.1e-14; Accession=PF01158.8; Description =Ribosomal protein L36e
MAPSQPKSGLFVGINKGHVVTKRELPPRPSDRKGKGTKRXVHFVRNLIREVAGFAPYDKRITELLXVGKATAPLNVAKPKVGTXHKKGKKKKKASPMSPPTRNFV

SEQ ID NO: 6349 - protein, 175 aa, Glycine max
  misc_feature (105)..(105): Xaa can be any naturally occurring amino acid
  misc_feature (127)..(127): Xaa can be any naturally occurring amino acid
  misc_feature (157)..(157): Xaa can be any naturally occurring amino acid
  Coding DNA Sequence Number=SeqID_2734
DTLPLPLLIHNTYLLLHHFLSQPPTPLPSLPHTPHTLSIHPPYNNHPNINIHSPLQQSPPHIIYPTPNPPSLSHATTYTTSPPQHLTPTFYSISFSSTSSLSSHXSIYSLPSAPSTTYTIHTPSPPXLFKYITTIFSTTSPFSLRSFSPNTPPLALXPPTTRITLSSPHIPQTNA

SEQ ID NO: 6350 - protein, 152 aa, Glycine max
  Coding DNA Sequence Number=SeqID_2736
  Gene Ontology: Mol. function=oxidoreductase activity; Cellular component=periplasmic space; Biological process=nitrogen compound metabolic process
  Homolog annotation: Hit_ID=Q1GQE2; Match level="QueryCoverage=77%, HitCoverage=19%, E-value=5e-52, Identity=77%"; Hit description =Copper-resistance protein CopA precursor
  Pfam annotation: Domain name=Cu-oxidase_2; Domain location=39-150; Score=-20.2; E_value=0.092; Accession=PF07731.4; Description =Multicopper oxidase
  Pfam annotation: Domain name=Cu-oxidase_3; Domain location=53-152; Score=118.4; E_value=2.1e-32; Accession=PF07732.5; Description =Multicopper oxidase
  Pfam module annotation: Pfam domain module=Cu-oxidase_2::Cu-oxidase _3; Domain location=39-150::53-152
MSPGLNRRDLFRGAALAGGGLALSAWLPAWAQPISSGIAKPLPTVSGNDITLKIAHQMMMIDGRQSHAIGINGTVPAPLIRLRQGQNVRLSVINDLEEDSSIHWHGLLLPFQFDGVPGISFPGIKPKSTFVYEFPIVQAGTYWYHSHSGRAG

SEQ ID NO: 6351 - protein, 161 aa, Glycine max
  misc_feature (16)..(16): Xaa can be any naturally occurring amino acid
  misc_feature (80)..(80): Xaa can be any naturally occurring amino acid
  misc_feature (105)..(105): Xaa can be any naturally occurring amino acid
  misc_feature (110)..(110): Xaa can be any naturally occurring amino acid
  misc_feature (137)..(137): Xaa can be any naturally occurring amino acid
  misc_feature (145)..(145): Xaa can be any naturally occurring amino acid
  Coding DNA Sequence Number=SeqID_2737
RSRHYCTKCGTSCSTXSVSLIRTNSPINYIYLHPARRSIQRGLTRDNSRKTGNGLPVTRSPWCCAASPNPRYTSTLTIIXSISSISRTGVAAAVSARRRVKCGAXRGTAXEGISRTLPLHTIIFSCISSNLAVDALXRLNSTRKXAGCESDTLRTTFFGAS

SEQ ID NO: 6352 - protein, 89 aa, Glycine max
  Coding DNA Sequence Number=SeqID_2739
  Gene Ontology: Mol. function=ligase activity, forming aminoacyl-tRNA and related compounds; Cellular component=cytoplasm; Biological process=alanyl-tRNA aminoacylation
  Homolog annotation: Hit_ID=Q1QZX1; Match level="QueryCoverage=85%, HitCoverage=8%, E-value=2e-28, Identity=77%"; Hit description=Alanyl- tRNA synthetase
FRPGLTNLNKPSYLSAADIRRAFLEFFREHGHAVVPSSSLVPGNDPTLLFTNAGMVQFKDVFLGKEKRDYVRATTSQRVVRAGGKHNDL

SEQ ID NO: 6353 - protein, 203 aa, Glycine max
  misc_feature (52)..(54): Xaa can be any naturally occurring amino acid
  misc_feature (79)..(79): Xaa can be any naturally occurring amino acid
  misc_feature (133)..(133): Xaa can be any naturally occurring amino acid
  Coding DNA Sequence Number=SeqID_2740
  Subcellular localization annotation: CTP_CleavageSite=63; ConfidenceScore=5.51e-01
FVCPRIPFSWSLCALPSRTLYNTSPSRVARAPSAWSPLYITTTRAACNPPNXXXTAAYITSSRARLRSHSPYNTHSDVXLGRCSSSCILGVVGDDVNRTRYKLYYPRRPTSVQCSSSAPPSDQVRLTQHHLIXRRCCRELRIHRERLLCRLSSPAFAAVHTHTHTTVPFSSPSTPSRAYIYNAWSGCVAITRRTLLVFVRPIH

SEQ ID NO: 6354 - protein, 135 aa, Glycine max
  misc_feature (16)..(16): Xaa can be any naturally occurring amino acid
  misc_feature (18)..(18): Xaa can be any naturally occurring amino acid
  misc_feature (22)..(22): Xaa can be any naturally occurring amino acid
  misc_feature (52)..(52): Xaa can be any naturally occurring amino acid
  misc_feature (88)..(88): Xaa can be any naturally occurring amino acid
  misc_feature (135)..(135): Xaa can be any naturally occurring amino acid
  Coding DNA Sequence Number=SeqID_2742
YIMLYRTRRRRYQRAXVXLRSXYHVSCLYDILSVRIGRYMYRLRALFYAELXRSLCRLVFIIVSCNLYVHYACVCSVSARHGSVSSSXLSHLSLSLSHSTPYITARHTVAISLLRLTLYRVFSHARGEHAFARRX

SEQ ID NO: 6355 - protein, 134 aa, Glycine max
  misc_feature (1)..(58): Xaa can be any naturally occurring amino acid
  misc_feature (128)..(128): Xaa can be any naturally occurring amino acid
  Coding DNA Sequence Number=SeqID_2744
XXXXXXXXXXXXXXXXXXXXXXXXXXXXXXXXXXXXXXXXXXXXXXXXXXXXXXXXXXERVHNIIAGGVGKGTPPRREVFFLCAIVRDGWGGGVDARGDPPYVRGNVFSVNETPTRFSFRGGGCGRPXGIFPFF

SEQ ID NO: 6356 - protein, 109 aa, Glycine max
  misc_feature (67)..(67): Xaa can be any naturally occurring amino acid
  misc_feature (107)..(107): Xaa can be any naturally occurring amino acid
  misc_feature (109)..(109): Xaa can be any naturally occurring amino acid
  Coding DNA Sequence Number=SeqID_2746
GEHIIHYILSTLWLMAYILNNKINAMFAICTIASGSIVVSQYRCLVIIMSTTAVRLFIQRRASLCEXCEYVRYSLDVQSIYTHSHMCERTKLVSRLSPSSSRYNQTXVX

SEQ ID NO: 6357 - protein, 116 aa, Glycine max
  misc_feature (5)..(5): Xaa can be any naturally occurring amino acid
  misc_feature (62)..(62): Xaa can be any naturally occurring amino acid
  misc_feature (78)..(78): Xaa can be any naturally occurring amino acid
  Coding DNA Sequence Number=SeqID_2748
AQRDXFDDRAERNLCDEIDDTHIICDSICRDSFFIAYTLFTQPQYACIYTSGHLYVVRVRAXIVASSRSVYMRYNQHXHRVEYDREARTAIVSGRRCLCIVCHLRIMLMTIMIHGV

SEQ ID NO: 6358 - protein, 76 aa, Glycine max
  misc_feature (18)..(18): Xaa can be any naturally occurring amino acid
  misc_feature (35)..(35): Xaa can be any naturally occurring amino acid
  misc_feature (53)..(53): Xaa can be any naturally occurring amino acid
  misc_feature (65)..(65): Xaa can be any naturally occurring amino acid
  Coding DNA Sequence Number=SeqID_265
  Gene Ontology: Mol. function=oxidoreductase activity; Biological process=electron transport
  Homolog annotation: Hit_ID=Q4AHX1; Match level="QueryCoverage=90%, HitCoverage=16%, E-value=5e-16, Identity=57%"; Hit description=FAD -dependent pyridine nucleotide-disulphide oxidoreductase
YDYLVLAIGARTNYFGNXNLRRHAISMKSLSEAIXLRNTILDNFEKALNEPDXEIAARLLNIVIXGGGPNSFFFFF

SEQ ID NO: 6359 - protein, 134 aa, Glycine max
  misc_feature (60)..(60): Xaa can be any naturally occurring amino acid
  misc_feature (66)..(66): Xaa can be any naturally occurring amino acid
  misc_feature (105)..(105): Xaa can be any naturally occurring amino acid
  misc_feature (127)..(127): Xaa can be any naturally occurring amino acid
  misc_feature (130)..(130): Xaa can be any naturally occurring amino acid
  Coding DNA Sequence Number=SeqID_266
LRCRFSIALLCYSSLVVGSRSIDCVSSHSSVASYMLSLLSSFDASMCAVCDERYHICACXTITVDXRSEAICWIMSKYTITHRQPRRHQTTILSHSHSYTICVSXTTCTCWRTSITATLRRICTISXVEXATRC

SEQ ID NO: 6360 - protein, 109 aa, Glycine max
  Coding DNA Sequence Number=SeqID_1320
  Gene Ontology: Mol. function=sequence-specific DNA binding; Cellular component=nucleus; Biological process=regulation of transcription, DNA-dependent
  Homolog annotation: Hit_ID=Q43455; Match level="QueryCoverage=98%, HitCoverage=34%, E-value=5e-18, Identity=52%"; Hit description=Heat shock transcription factor 29
AVGAPSATSGNAETVAVAEPAGRTASPTTCVDEQGLSYELICDRMEIMINDTSTLHTHDAPCAPELLDENARLTDKNTRLINERSLLHGLRNTILTLLTKYASGFTRAL

SEQ ID NO: 6361 - protein, 181 aa, Glycine max
  Coding DNA Sequence Number=SeqID_1321
  Homolog annotation: Hit_ID=A2Z6Q7; Match level="QueryCoverage=19%, HitCoverage=7%, E-value=7e-08, Identity=80%"; Hit description =Putative uncharacterized protein
MQYTDEFSASNPNNVRACYCYSSWLSSARKKWGDDLSVDGEGARALCMAPSSTRRNLLAVRLCGGGAHSAGRVGEAVQGGRAGCVVKKNAHGVQAHGGERLLALSRALGLQLDMDAGLVPLFLCATVGTTQIAAVDPVGELGAVASPHGVRAHADAACAVGAGARGGSPEAGRHPRWRRDR

SEQ ID NO: 6362 - protein, 220 aa, Glycine max
  misc_feature (88)..(88): Xaa can be any naturally occurring amino acid
  Coding DNA Sequence Number=SeqID_1322
  Gene Ontology: Mol. function=protein serine/threonine kinase activity; Cellular component=myosin complex; Biological process =regulation of transcription, DNA-dependent
  Homolog annotation: Hit_ID=A7QKI2; Match level="QueryCoverage=97%, HitCoverage=29%, E-value=3e-93, Identity=78%"; Hit description =Chromosome chr2 scaffold_112, whole genome shotgun sequence
  Pfam annotation: Domain name=Pkinase; Domain location=1-204; Score =96.6; E_value=7.6e-26; Accession=PF00069.15; Description=Protein kinase domain
  Pfam annotation: Domain name=Pkinase_Tyr; Domain location=1-203; Score=93.7; E_value=5.7e-25; Accession=PF07714.7; Description =Protein tyrosine kinase
  Pfam module annotation: Pfam domain module=Pkinase::Pkinase_Tyr; Domain location=1-204::1-203
PNVLLFMGAGSRQERLAIVTELLPRGSLFKNLHRNNQTLDIRRRLRMALDVARGMNYLHHRNPPIVHRDLKSSNLLVDKNWTVKFFVXVGDFGLSRLKDATLLTTKSGRGTPQWMAPEVLRNEPSNEKSDVYSFGVILWELMTQSIPWKNLNSLQVVGVVGFMDRRLDLPEGLDPHVASIIDDCWRSDPEQRPSFEELIQRTLFLVNRVTAVSIRRISES

SEQ ID NO: 6363 - protein, 188 aa, Glycine max
  Coding DNA Sequence Number=SeqID_1323
  Gene Ontology: Cellular component=integral to membrane
  Homolog annotation: Hit_ID=A0BV64; Match level="QueryCoverage=96%, HitCoverage=21%, E-value=2e-30, Identity=35%"; Hit description =Chromosome undetermined scaffold_13, whole genome shotgun sequence
MDIKGFWKTCKILFIIANIIVGLAAVFKTYVWSRFNPSRFYGENWTVVMVARFIIITMKTWSDAMFFFLFVMTGYWFIFYKMQNTVYFLVPDPSSNPSDYRPFVIVFVIMVIFQFLSALNMVREQVQMDFFFIDWEKPKLTFKREVNREVYFQSAWRMILIANEWNELQVERHYRVELLYIIFGFFAI

SEQ ID NO: 6364 - protein, 198 aa, Glycine max
  misc_feature (135)..(135): Xaa can be any naturally occurring amino acid
  misc_feature (179)..(180): Xaa can be any naturally occurring amino acid
  misc_feature (189)..(189): Xaa can be any naturally occurring amino acid
  misc_feature (193)..(193): Xaa can be any naturally occurring amino acid
  Coding DNA Sequence Number=SeqID_1324
  Homolog annotation: Hit_ID=Q22W16; Match level="QueryCoverage=96%, HitCoverage=47%, E-value=4e-20, Identity=26%"; Hit description =Putative uncharacterized protein
  Subcellular localization annotation: CTP_CleavageSite=49; ConfidenceScore=5.21e-01
APPPPDLNLTENITFIISASMKKQLYSSPTYSSHQKSTPGVNMRERLVRLTETVNELRTNVETEVQNQDNLEKVSSKNYTLMNTQIKALRKAFNTLADVIMEELDAIKSDVARDSQEANAAIFRKLDELGSQVNXLQNEKQDQREQMSNVEQSLRERIEALERKQDETSQDVQAVVENXXEDNRVLYEXLHSXIRSNT

SEQ ID NO: 6365 - protein, 65 aa, Glycine max
  Coding DNA Sequence Number=SeqID_1325
STLFIMEPMTISTSSPPLTAWVAPAHATQWFFAKGSPYWCTGAVDEGSGEDCPCEAARLMEPKVW

SEQ ID NO: 6366 - protein, 177 aa, Glycine max
  Coding DNA Sequence Number=SeqID_1327
  Gene Ontology: Mol. function=nucleotide binding; Cellular component =intracellular; Biological process=small GTPase mediated signal transduction
  Homolog annotation: Hit_ID=Q229S0; Match level="QueryCoverage=100%, HitCoverage=100%, E-value=1e-64, Identity=71%"; Hit description=ADP -ribosylation factor, arf
  Pfam annotation: Domain name=Arf; Domain location=3-175; Score=320.3; E_value=3.5e-93; Accession=PF00025.11; Description=ADP-ribosylation factor family
  Pfam annotation: Domain name=GTP_EFTU; Domain location=14-177; Score=- 72.1; E_value=0.0087; Accession=PF00009.17; Description=Elongation factor Tu GTP binding domain
  Pfam annotation: Domain name=MMR_HSR1; Domain location=17-127; Score =13.8; E_value=5.8e-05; Accession=PF01926.13; Description=GTPase of unknown function
  Pfam annotation: Domain name=Miro; Domain location=18-127; Score =13.4; E_value=0.00056; Accession=PF08477.3; Description=Miro-like protein
  Pfam annotation: Domain name=Ras; Domain location=18-177; Score= -67.4; E_value=0.00028; Accession=PF00071.12; Description=Ras family
  Pfam annotation: Domain name=SRPRB; Domain location=14-178; Score= -44.9; E_value=0.00027; Accession=PF00071.12; Description=Signal recognition particle receptor beta
  Pfam module annotation: Pfam domain module=Arf::GTP_EFTU::MMR _HSR1::Miro::Ras::SRPRB; Domain location=3-175::14-177::17-127::18 -127::18-177::14-178
MGLLSYIRKLRKQEKEARILVLGLDNAGKTTILKTLSEEDITHIMPTKGFNIKNLAHEDFKLTVWDVGGQKALRPYWANYFQGTDALVFVIDSADRKRLAESGSELQMLLDEDDLTGILLIFANKQDLLQALPADEISETLTLQNITKRQWSIVACSAKSKEGLQEGMEWLVSQIPK

SEQ ID NO: 6367 - protein, 117 aa, Glycine max
  Coding DNA Sequence Number=SeqID_1328
  Gene Ontology: Mol. function=protein kinase activity; Cellular component=centrosome; Biological process=protein amino acid phosphorylation
  Homolog annotation: Hit_ID=A7Q3Y1; Match level="QueryCoverage=97%, HitCoverage=17%, E-value=2e-44, Identity=74%"; Hit description =Chromosome chr13 scaffold_48, whole genome shotgun sequence
RTQLLCIIKNHFLSSNFQAFDVLSEFEGSNEASSGQMLQYAWLVGSQYKPMELAKSDWAAIKKSPPWAIDSWGMGSLIYELFSGMKLGKTEELRNTVSIPKSLLPDYQRLLSSVPSR

SEQ ID NO: 6368 - protein, 111 aa, Glycine max
  Coding DNA Sequence Number=SeqID_268
TIKVLSHWDIKKFKQHETKNQNLEKEEKIHPNNPLPLPKSPFEPKPRIPLHLRPLNHRHRPMQHYDFLTRDSSLASTQYLYEGHCIIGSQRTWLQLPPKRQQIWPHLQFRR

SEQ ID NO: 6369 - protein, 252 aa, Glycine max
  misc_feature (204)..(252): Xaa can be any naturally occurring amino acid
  Coding DNA Sequence Number=SeqID_270
YGFFGGEGEGAARRAVLLFLPPPPSQYYYFPLHFSSFPPPCPFIHPPFLPPPSLPIPPPPPRPYSFLSPPLFPHFPFPPPLLFLTHPPLPFFLTPPPPPPHFSPLPPPLPSFSPPLHLHSHTLTLLPHKPTYIYFPPYPPHPHLIFPTFFPPPPPIFTLSSSHPSFSLSLTQHPPLPPSLPRPHLLTPSLTQSPPPPPPPLTLXXXXXXXXXXXXXXXXXXXXXXXXXXXXXXXXXXXXXXXXXXXXXXXXX

SEQ ID NO: 6370 - protein, 58 aa, Glycine max
  Coding DNA Sequence Number=SeqID_272
KQNKTYLNIPHIISPLCHPTSHHNTTRLIHFHNIHNSRINTQYHQVNQYRSIHKHYAT

SEQ ID NO: 6371 - protein, 76 aa, Glycine max
  Coding DNA Sequence Number=SeqID_274
KFLRERLAKPLCKLRGRLCPNHHHPNDVGKISFMSVPPSSPKMPSPHGLGITPSPLFYLSLSSSSSEFGLVNCLIY

SEQ ID NO: 6372 - protein, 87 aa, Glycine max
  misc_feature (67)..(67): Xaa can be any naturally occurring amino acid
  Coding DNA Sequence Number=SeqID_276
VIPNELEYDLYVRPSRVSGSLLEYNITRLSPDLHIDILETKISDIPRHNSHPQMARCADAILIVDAXILILANYRATPPHFRYRHCV

SEQ ID NO: 6373 - protein, 56 aa, Glycine max
  Coding DNA Sequence Number=SeqID_2749
KSDTCPSLSLLLLRIINVIPILFRSSSAQCSFNCHILADQIQLALQTSTFRALLSD

SEQ ID NO: 6374 - protein, 173 aa, Glycine max
  misc_feature (5)..(5): Xaa can be any naturally occurring amino acid
  misc_feature (8)..(8): Xaa can be any naturally occurring amino acid
  Coding DNA Sequence Number=SeqID_2751
WAIFXTSXKHILEVCSDILYIYDQPKTEMKHVKEILDRSYTTNKLNKEYIIDSEQEFENQRKLQREQELKESKKVSPRRDDPSRRHSRSRDNRDRDYRDSRRYRDRRDSRDRRDRRSRDRSYERRKKRYSRSRSPRRHDDREDRHKKKRDRSRDKYSDSSASRSPDSKKKKKK

SEQ ID NO: 6375 - protein, 174 aa, Glycine max
  misc_feature (3)..(3): Xaa can be any naturally occurring amino acid
  misc_feature (20)..(20): Xaa can be any naturally occurring amino acid
  misc_feature (24)..(24): Xaa can be any naturally occurring amino acid
  misc_feature (40)..(40): Xaa can be any naturally occurring amino acid
  misc_feature (67)..(67): Xaa can be any naturally occurring amino acid
  misc_feature (83)..(83): Xaa can be any naturally occurring amino acid
  misc_feature (87)..(87): Xaa can be any naturally occurring amino acid
  misc_feature (95)..(95): Xaa can be any naturally occurring amino acid
  misc_feature (99)..(99): Xaa can be any naturally occurring amino acid
  misc_feature (110)..(110): Xaa can be any naturally occurring amino acid
  misc_feature (116)..(117): Xaa can be any naturally occurring amino acid
  misc_feature (124)..(124): Xaa can be any naturally occurring amino acid
  misc_feature (133)..(133): Xaa can be any naturally occurring amino acid
  misc_feature (139)..(139): Xaa can be any naturally occurring amino acid
  misc_feature (141)..(141): Xaa can be any naturally occurring amino acid
  misc_feature (144)..(146): Xaa can be any naturally occurring amino acid
  misc_feature (152)..(152): Xaa can be any naturally occurring amino acid
  misc_feature (154)..(154): Xaa can be any naturally occurring amino acid
  misc_feature (160)..(162): Xaa can be any naturally occurring amino acid
  misc_feature (170)..(170): Xaa can be any naturally occurring amino acid
  Coding DNA Sequence Number=SeqID_2753
SHXCSLGKYMANRIDARHDXRLAXCRVLTMTQHCMRSRTXGSNYCATMSHVGDAAHEYCRQRLPLLXARSCRRRRSTTIFIRXTYIXLTSLILTXSDEXQYAADRARLIXSDYNRXXRSRARVXSYVPLSVMXLRVLLXIXTTXXXTHDRHXSXYYLQMXXXVMSESEQXDTRC

SEQ ID NO: 6376 - protein, 121 aa, Glycine max
  misc_feature (24)..(24): Xaa can be any naturally occurring amino acid
  misc_feature (40)..(40): Xaa can be any naturally occurring amino acid
  misc_feature (72)..(72): Xaa can be any naturally occurring amino acid
  misc_feature (95)..(95): Xaa can be any naturally occurring amino acid
  misc_feature (113)..(114): Xaa can be any naturally occurring amino acid
  Coding DNA Sequence Number=SeqID_2755
NARVLPRCHTSSPHSLRDYTRRYXETQTTATSCDTVIYCXYYLSSNRYRASCVVTIFDCIRQPIRDSFNYHXFLLSHRHTHRWHSPRYPSDTMCXLTSRMQMTHDIITLLHVXXSSHPDLR

SEQ ID NO: 6377 - protein, 131 aa, Glycine max
  misc_feature (26)..(26): Xaa can be any naturally occurring amino acid
  Coding DNA Sequence Number=SeqID_2757
  Gene Ontology: Mol. function=aspartic-type endopeptidase activity; Cellular component=anchored to membrane; Biological process =proteolysis
  Homolog annotation: Hit_ID=A7Q9Q7; Match level="QueryCoverage=98%, HitCoverage=27%, E-value=1e-30, Identity=49%"; Hit description =Chromosome chr5 scaffold_67, whole genome shotgun sequence
GTPPKNYYLRADTGSKIMRVNCVQCXECPTRTNLGMDLTLYHINDSSSGKFVPCYPEYCEEIYVCLQTRYTANITCPYLEIYGDGSSTAGYSLEDLSLYEQVSVDPTTESLNGRIVCGRGATLSGDLNASN

SEQ ID NO: 6378 - protein, 60 aa, Glycine max
  Coding DNA Sequence Number=SeqID_2758
SDGEERRGRRKDTGGAWRARCAGGGAWRRRRGGAAGEGMVRDGGESGEGLRRCGVWSTLD

SEQ ID NO: 6379 - protein, 264 aa, Glycine max
  misc_feature (29)..(29): Xaa can be any naturally occurring amino acid
  misc_feature (87)..(87): Xaa can be any naturally occurring amino acid
  misc_feature (89)..(89): Xaa can be any naturally occurring amino acid
  misc_feature (96)..(96): Xaa can be any naturally occurring amino acid
  misc_feature (156)..(156): Xaa can be any naturally occurring amino acid
  misc_feature (165)..(165): Xaa can be any naturally occurring amino acid
  misc_feature (185)..(185): Xaa can be any naturally occurring amino acid
  misc_feature (191)..(191): Xaa can be any naturally occurring amino acid
  misc_feature (196)..(196): Xaa can be any naturally occurring amino acid
  misc_feature (200)..(203): Xaa can be any naturally occurring amino acid
  misc_feature (236)..(236): Xaa can be any naturally occurring amino acid
  misc_feature (241)..(241): Xaa can be any naturally occurring amino acid
  misc_feature (253)..(253): Xaa can be any naturally occurring amino acid
  misc_feature (258)..(258): Xaa can be any naturally occurring amino acid
  Coding DNA Sequence Number=SeqID_2760
LIICSCLHRAIDSSALIRESVVYSTHHVXLSALHTCTLTQRTYQSPSSPLIRSRYRRSTRIYIACLYCLIASRVLCHLVLICYYLPXLXDRPRSLXTRYHHTSNLLIVSRVVCDRIVRYHRTHLSSCRSSISHTVHPLSLAYSLRISPLHQLSSSXRLLIVSTSXSLFAAYLYHILSRRVRTHSXLTLSIXSRLYXRCYXXXXLSVTLTCDCVLVIIFIISMSVYCLDLRQQSISXMSLVXRELCVRSNRECXIRLFXHHHESI

SEQ ID NO: 6380 - protein, 87 aa, Glycine max
  Coding DNA Sequence Number=SeqID_2761
VSHPILLMAYMHACWSIWHVCNLSAFILDGPSTSPPATYILDGVCRLQSLASVNLHVLFHVVALACWCYLAICKPLAVPSPVTDGMM

SEQ ID NO: 6381 - protein, 105 aa, Glycine max
  Coding DNA Sequence Number=SeqID_2763
  Gene Ontology: Mol. function=serine-type endopeptidase inhibitor activity; Cellular component=extracellular region
  Homolog annotation: Hit_ID=O81217; Match level="QueryCoverage=58%, HitCoverage=33%, E-value=2e-12, Identity=52%"; Hit description =Trypsin inhibitor
  Pfam annotation: Domain name=Bowman-Birk_leg; Domain location=47-69; Score=2.6; E_value=2.6; Accession=PF00228.10; Description=Bowman -Birk serine protease inhibitor family
  Pfam annotation: Domain name=Bowman-Birk_leg; Domain location=71-99; Score=15.5; E_value=0.024; Accession=PF00228.10; Description=Bowman -Birk serine protease inhibitor family
  Pfam module annotation: Pfam domain module=Bowman-Birk_leg::Bowman -Birk_leg; Domain location=47-69::71-99
MKKGSSAAVLLMLSLAALLLVGAAVADDAIIRLHSDAGTGETRPWDCCDHPVCTKRSWCGCKDVVEQCFPACRSCKPAKRADESAPSGYMCRDAYHGSPGPKCML

SEQ ID NO: 6382 - protein, 158 aa, Glycine max
  misc_feature (5)..(6): Xaa can be any naturally occurring amino acid
  misc_feature (9)..(9): Xaa can be any naturally occurring amino acid
  misc_feature (31)..(31): Xaa can be any naturally occurring amino acid
  misc_feature (46)..(46): Xaa can be any naturally occurring amino acid
  misc_feature (56)..(56): Xaa can be any naturally occurring amino acid
  misc_feature (66)..(66): Xaa can be any naturally occurring amino acid
  misc_feature (75)..(75): Xaa can be any naturally occurring amino acid
  misc_feature (77)..(77): Xaa can be any naturally occurring amino acid
  misc_feature (80)..(80): Xaa can be any naturally occurring amino acid
  misc_feature (110)..(111): Xaa can be any naturally occurring amino acid
  misc_feature (115)..(115): Xaa can be any naturally occurring amino acid
  misc_feature (123)..(123): Xaa can be any naturally occurring amino acid
  misc_feature (125)..(125): Xaa can be any naturally occurring amino acid
  misc_feature (129)..(129): Xaa can be any naturally occurring amino acid
  misc_feature (134)..(134): Xaa can be any naturally occurring amino acid
  misc_feature (139)..(140): Xaa can be any naturally occurring amino acid
  misc_feature (147)..(150): Xaa can be any naturally occurring amino acid
  misc_feature (152)..(152): Xaa can be any naturally occurring amino acid
  Coding DNA Sequence Number=SeqID_2764
GRTTXXRMXSMSSILLYTAVVHCYTSLVSLXYIVVSLCFLCVDTFXYMLLVASALXARALTLSSYXHEPLSGPSXGXAPXLILPDMIVLMVVVDLIIPTTISSVSCLLGXXRITXLCALRGWXVXVLSXCEEEXGPVKXXTDRGRKXXXXKXEHHTHN

SEQ ID NO: 6383 - protein, 108 aa, Glycine max
  misc_feature (42)..(42): Xaa can be any naturally occurring amino acid
  misc_feature (92)..(92): Xaa can be any naturally occurring amino acid
  Coding DNA Sequence Number=SeqID_2766
  Gene Ontology: Mol. function=oxidoreductase activity, acting on the CH-OH group of donors, NAD or NADP as acceptor; Cellular component =cytoplasm; Biological process=tricarboxylic acid cycle intermediate metabolic process
  Homolog annotation: Hit_ID=A1IIE3; Match level="QueryCoverage=100%, HitCoverage=35%, E-value=7e-38, Identity=75%"; Hit description =Malate dehydrogenase
  Pfam annotation: Domain name=Ldh_1_N; Domain location=1-107; Score= -21.3; E_value=0.00013; Accession=PF00056.13; Description =lactatemalate dehydrogenase, NAD binding do
VGCSLVLMNAKRITMGPDQPCILHMLDIPPAEKPLNGVKMEXKDAAFPLLKGVAATTDVAEACTEVNIAEMVGGFPTKERMERKDVMTKNVXIYKCQASALEKHAAAN

SEQ ID NO: 6384 - protein, 89 aa, Glycine max
  misc_feature (1)..(1): Xaa can be any naturally occurring amino acid
  misc_feature (9)..(9): Xaa can be any naturally occurring amino acid
  misc_feature (21)..(21): Xaa can be any naturally occurring amino acid
  misc_feature (24)..(24): Xaa can be any naturally occurring amino acid
  misc_feature (27)..(27): Xaa can be any naturally occurring amino acid
  misc_feature (55)..(55): Xaa can be any naturally occurring amino acid
  Coding DNA Sequence Number=SeqID_2767
  Gene Ontology: Mol. function=cysteine-type endopeptidase activity; Cellular component=external side of plasma membrane; Biological process=proteolysis
  Homolog annotation: Hit_ID=Q8MTU2; Match level="QueryCoverage=82%, HitCoverage=12%, E-value=2e-21, Identity=58%"; Hit description =Cysteine proteinase
XYEDFMSYXGGIYTHQSGAAXGGXAVXIIGWGNENGTNYWIVANSWGPAWGENGXFRIAFGQCGIDGGVVTGQADLTRLSQTKVAARWW

SEQ ID NO: 6385 - protein, 278 aa, Glycine max
  misc_feature (183)..(183): Xaa can be any naturally occurring amino acid
  Coding DNA Sequence Number=SeqID_2768
  Subcellular localization annotation: CTP_CleavageSite=62; ConfidenceScore=5.75e-01
HSLLPSRSAPPSALTTPPSRTLCPPPTLSAPPSSVCYSRPPRARSHAVPLFVLHPPAQPAPRARSRPACPALDSPAPSCHDRPPALAQNARSALRTLHHPPLAWTYYSPPSVAGLPTLTSRPPTSPSLPPLALPPLLPHLRRSLLYARLSCSPSVTAPSYAIRSRPRLYSLAALQVLAPFSPXPPPLGLPDLLSPNLPPPLDHAHLRPTFHPLSPSSLHASLPVVSLPLARPSPPPRPTSLLSHSPQFLAPTTYTPTNPTPQQRKSALSLTLRGVTPP

SEQ ID NO: 6386 - protein, 418 aa, Glycine max
  Coding DNA Sequence Number=SeqID_2770
  Gene Ontology: Mol. function=metal ion binding; Biological process =metabolic process
  Homolog annotation: Hit_ID=A0DWM2; Match level="QueryCoverage=96%, HitCoverage=91%, E-value=3e-76, Identity=41%"; Hit description =Chromosome undetermined scaffold_67, whole genome shotgun sequence
  Pfam annotation: Domain name=FHA; Domain location=304-366; Score =37.8; E_value=3.8e-08; Accession=PF00498.16; Description=FHA domain
  Pfam annotation: Domain name=zf-C3HC4; Domain location=184-245; Score= 45.0; E_value=2.6e-10; Accession=PF00097.15; Description=Zinc finger, C3HC4 type (RING finger)
  Pfam module annotation: Pfam domain module=FHA::zf-C3HC4; Domain location=304-366::184-245
MNKEFVQAKNQASTYVEIKRVTWTKDSHGLFDYESKSVNFSKNKVDSSCKVYKEESDIKIRPAKGSEPQMELEEPNYLFSIVNEGSQKEKYVLKTLPIQNYESNKQNLFLIVRSLKNEEGIQRGYTLELGDIIRLGRIEYRVIEYQDASLNRFSLFDLGDDMLSGPFKLDVKKCEIDPTVKNQCRICLMDEHDTPEILINPCSCKGTGAYVHVECVQKWINSKVKNKSNQDSACSYWKHLICEVCKSTLPDLVEVDGNKIQLVPTVRPNAPYMLVERIFYDKSKGGENSRMMVLLSLTNQASQLKLGRGHDCDIRENDISVSRLHAYIKYENDKFVIVDNNSKFGTLILLRRDLEIEKKKIAVQVGRTVITFSLKQGTSNLAAQPEELQKLGNNQQWPLKNFNDVDKDTDDLNLNEGL

SEQ ID NO: 6387 - protein, 118 aa, Glycine max
  Coding DNA Sequence Number=SeqID_2771
  Gene Ontology: Cellular component=ribonucleoprotein complex
  Homolog annotation: Hit_ID=O80439; Match level="QueryCoverage=100%, HitCoverage=100%, E-value=4e-31, Identity=63%"; Hit description=30S ribosomal protein S31, chloroplast precursor
  Subcellular localization annotation: CTP_CleavageSite=54; ConfidenceScore=5.75e-01
MASLLIGAPPRVTVASSSRLSSSHSETVGVSLPCFTQQLSLSASSSSSSIPLVYCGRGDRKTARGKRFNHSFGNARPRNKDKGRGPQRVPVPPAPPRKDKFENDEKIKIDIDESLFSN

SEQ ID NO: 6388 - protein, 124 aa, Glycine max
  misc_feature (17)..(17): Xaa can be any naturally occurring amino acid
  misc_feature (65)..(65): Xaa can be any naturally occurring amino acid
  misc_feature (86)..(86): Xaa can be any naturally occurring amino acid
  misc_feature (92)..(92): Xaa can be any naturally occurring amino acid
  misc_feature (105)..(105): Xaa can be any naturally occurring amino acid
  misc_feature (118)..(118): Xaa can be any naturally occurring amino acid
  misc_feature (122)..(122): Xaa can be any naturally occurring amino acid
  Coding DNA Sequence Number=SeqID_2772
QHDITSHIPLYIMPFMXADSGGGVHSSNTTYIILNMLLYWVLLPWCTRTTKTQSPLACAAKAPKXSSHTRVRRVRFAHARDYKMRXVTRLRXRPRSQTTPRALPXLACAFTTVSYTLXVAGXYA

SEQ ID NO: 6389 - protein, 123 aa, Glycine max
  misc_feature (92)..(92): Xaa can be any naturally occurring amino acid
  Coding DNA Sequence Number=SeqID_2773
  Gene Ontology: Mol. function=oxidoreductase activity, acting on the CH-OH group of donors, NAD or NADP as acceptor; Cellular component =cytoplasm; Biological process=malate metabolic process
  Homolog annotation: Hit_ID=Q006Q0; Match level="QueryCoverage=91%, HitCoverage=18%, E-value=5e-38, Identity=73%"; Hit description =Cytosolic NADP-malic enzyme
  Pfam annotation: Domain name=malic; Domain location=1-118; Score =21.9; E_value=5.1e-11; Accession=PF00390.9; Description=Malic enzyme, N-terminal domain
VTDGERILGLGDLGCQGMGIPVGKLALYTALGGVRPLACLPITIDVGANNGELLIDEFYIGLKQKRAIGQELLYLIHGFFTGGEQNYREKIXLVQFKKFSNTRVFWSLLKLGNPFFFLWRIYG

SEQ ID NO: 6390 - protein, 186 aa, Glycine max
  misc_feature (24)..(24): Xaa can be any naturally occurring amino acid
  misc_feature (55)..(55): Xaa can be any naturally occurring amino acid
  misc_feature (84)..(84): Xaa can be any naturally occurring amino acid
  misc_feature (104)..(104): Xaa can be any naturally occurring amino acid
  misc_feature (118)..(118): Xaa can be any naturally occurring amino acid
  Coding DNA Sequence Number=SeqID_2774
  Gene Ontology: Mol. function=unfolded protein binding; Cellular component=mitochondrion; Biological process=protein folding
  Homolog annotation: Hit_ID=A2Z2B0; Match level="QueryCoverage=83%, HitCoverage=19%, E-value=2e-37, Identity=52%"; Hit description =Putative uncharacterized protein
DKQYMWEAEADSSSYVIKEETDPXKFLRRGTQITLYLREDDQYEFSEASRIPGLXVKDYSSVGSFPIYPWQKKSKTVEVGKEGXTPKRGENQEKGGKKKGEKTXTGEYWDWELAHETXLWMRHPRELKRGDPGFFRRLFWNFLTPVLIPSYARGGGFKEFLCSARDPFHEGNGTPKKKTPGWLAGS

SEQ ID NO: 6391 - protein, 82 aa, Glycine max
  misc_feature (30)..(30): Xaa can be any naturally occurring amino acid
  misc_feature (42)..(42): Xaa can be any naturally occurring amino acid
  misc_feature (48)..(48): Xaa can be any naturally occurring amino acid
  misc_feature (51)..(51): Xaa can be any naturally occurring amino acid
  misc_feature (58)..(58): Xaa can be any naturally occurring amino acid
  Coding DNA Sequence Number=SeqID_2775
RLHDDHIVNRLCTEQRVNSELIDSAELAAXTALTIAVPSHSXYDCVCXWEXDQSLMYXEDNDYICVIDIILSAVNITYTQRE

SEQ ID NO: 6392 - protein, 118 aa, Glycine max
  misc_feature (3)..(3): Xaa can be any naturally occurring amino acid
  misc_feature (70)..(70): Xaa can be any naturally occurring amino acid
  misc_feature (92)..(92): Xaa can be any naturally occurring amino acid
  Coding DNA Sequence Number=SeqID_2777
  Subcellular localization annotation: CTP_CleavageSite=48; ConfidenceScore=5.14e-01
EQXNKGKDDKYSPHNDARTHPPHPSSCTCVICHSFMQNLTPHPPSVSSCVMRYNSTLFTQYSPLSCARCXCHDLTTSIIQPITSISCEPHVXSVSSSYNYTSAPESQTIYVVAAFHST

SEQ ID NO: 6393 - protein, 186 aa, Glycine max
  misc_feature (1)..(1): Xaa can be any naturally occurring amino acid
  misc_feature (6)..(14): Xaa can be any naturally occurring amino acid
  misc_feature (16)..(16): Xaa can be any naturally occurring amino acid
  misc_feature (20)..(23): Xaa can be any naturally occurring amino acid
  misc_feature (25)..(25): Xaa can be any naturally occurring amino acid
  misc_feature (27)..(28): Xaa can be any naturally occurring amino acid
  misc_feature (30)..(30): Xaa can be any naturally occurring amino acid
  misc_feature (32)..(33): Xaa can be any naturally occurring amino acid
  misc_feature (52)..(52): Xaa can be any naturally occurring amino acid
  misc_feature (62)..(62): Xaa can be any naturally occurring amino acid
  misc_feature (75)..(81): Xaa can be any naturally occurring amino acid
  misc_feature (101)..(101): Xaa can be any naturally occurring amino acid
  misc_feature (137)..(137): Xaa can be any naturally occurring amino acid
  misc_feature (145)..(145): Xaa can be any naturally occurring amino acid
  misc_feature (149)..(149): Xaa can be any naturally occurring amino acid
  misc_feature (153)..(153): Xaa can be any naturally occurring amino acid
  misc_feature (163)..(163): Xaa can be any naturally occurring amino acid
  misc_feature (183)..(183): Xaa can be any naturally occurring amino acid
  Coding DNA Sequence Number=SeqID_2779
XGGRKXXXXXXXXXEXEKRXXXXEXDXXPXAXXAGRKQQTQRDRARRTHTHXHHAGKTQTHXNTTQTQTTTAQPXXXXXXXSTVYQCYAHISISTISSDLXVTPLHLSLLMSSSHMTNISSFINIVILGLNIRTPEXLTPTRRSXAWVXASVXGLSAYTWCVXLPIILYICTASILSSDIILXGHM

SEQ ID NO: 6394 - protein, 125 aa, Glycine max
  misc_feature (50)..(50): Xaa can be any naturally occurring amino acid
  misc_feature (56)..(56): Xaa can be any naturally occurring amino acid
  Coding DNA Sequence Number=SeqID_2781
RRKRVCGARCSAYRVSLRRHRVPSVASRSTHILIGLCQRPQKPICAAGVXYVLIRXYTTTRGLPFGMRATSYTSRFSVSAGIIPAAHVLAISTSPRADSLRIRISLSISAWRARTTVHQPSSPSI

SEQ ID NO: 6395 - protein, 157 aa, Glycine max
  Coding DNA Sequence Number=SeqID_2783
HSGITPDKAANAAELNNDVPKQDPLHELIKTLVEIYDKPVEFVWDLTKFGIPNVNSLLFLTYTNVSEITSGEKCLNIAILQFWTMYMNEWSNGLGHRSVYGFLEPQSIHNAKDRRGQCEEYIEKWLKESQRQLYIGAYLNDAHWQMVVLCPKDNVVV

SEQ ID NO: 6396 - protein, 113 aa, Glycine max
  Coding DNA Sequence Number=SeqID_2785
  Subcellular localization annotation: CTP_CleavageSite=71; ConfidenceScore=5.19e-01
FPLLLDPLSRLARSGRRSPLQHQPQESAGYAGPQFGSTSMPPALTCTPAGRRREPPCFPPLGPRPSSSVPSAATAAPRLSSSPNNSRDRDGLRVIRISSGPWTRSRGSLLLLP

SEQ ID NO: 6397 - protein, 125 aa, Glycine max
  misc_feature (17)..(17): Xaa can be any naturally occurring amino acid
  misc_feature (45)..(45): Xaa can be any naturally occurring amino acid
  Coding DNA Sequence Number=SeqID_2787
PANRHNGISLQHLIAHXSIPYSQWLLLEPNNSVCEGAYTPLQQKXTRYTLSRYDERGELGGARRWHPARVPLILFLPEVPSSMNGYGAHDVLLAEGAHTGAESEVSGVLVCAPYLSRLRQYTITC

SEQ ID NO: 6398 - protein, 108 aa, Glycine max
  Coding DNA Sequence Number=SeqID_2789
  Gene Ontology: Mol. function=heat shock protein binding; Cellular component=mitochondrial inner membrane; Biological process =intracellular protein transport across a membrane
  Homolog annotation: Hit_ID=Q9SF33; Match level="QueryCoverage=100%, HitCoverage=96%, E-value=5e-38, Identity=75%"; Hit description =Putative uncharacterized protein F11F8_29
  Pfam annotation: Domain name=DnaJ; Domain location=53-108; Score= -11.9; E_value=0.06; Accession=PF00226.21; Description=DnaJ domain
MVAPILAGVAVAAAAYAGKYGIEAWQAFKARPPRPKLRKFYEGGFQAAMTRREAALILDVRESVAAEKVKEAHRRVMVANHPDAGGSHYLASKINEAKDMMLGKSESS

SEQ ID NO: 6399 - protein, 58 aa, Glycine max
  Coding DNA Sequence Number=SeqID_2790
KVLLIITIILEQVLLLLTNLVPNSAPVVIKPLSVAPNNITCYPLLMLKISGNLSWYLE

SEQ ID NO: 6400 - protein, 120 aa, Glycine max
  misc_feature (107)..(107): Xaa can be any naturally occurring amino acid
  Coding DNA Sequence Number=SeqID_2792
  Homolog annotation: Hit_ID=A7PZD1; Match level="QueryCoverage=67%, HitCoverage=34%, E-value=1e-15, Identity=48%"; Hit description =Chromosome chr15 scaffold_40, whole genome shotgun sequence
  Subcellular localization annotation: CTP_CleavageSite=23; ConfidenceScore=5.30e-01
MEKLTSAATPPPPSATSSLPLPTAAAADQRSSPAMDLDNPPVPSRPHIGGAQVAPSDPSSRGRKRGLEGNLKVENSNYYKMRLLVKDLRPHVLEVLRAPDFRNCKAXVEIQEKMKLLLQL

SEQ ID NO: 6401 - protein, 117 aa, Glycine max
  Coding DNA Sequence Number=SeqID_2793
  Subcellular localization annotation: CTP_CleavageSite=42; ConfidenceScore=5.65e-01
ATHTPPPLPNSLRVDSILSLPRSTATTTALRRHRNPATLFLQCKTRRQFSPEPSPTLPFPSDFDFCFLAIPMRPFRSLLLFGPVFVVLQPLGATHGDTDAALAIVVGARSKNSQTEA

SEQ ID NO: 6402 - protein, 111 aa, Glycine max
  misc_feature (29)..(29): Xaa can be any naturally occurring amino acid
  Coding DNA Sequence Number=SeqID_2795
  Homolog annotation: Hit_ID=A0CHX2; Match level="QueryCoverage=96%, HitCoverage=47%, E-value=7e-14, Identity=37%"; Hit description =Chromosome undetermined scaffold_185, whole genome shotgun sequence
QNRPQTAAHPDAYETEDRKPVTFKPIYQXPIREPMIGKKVFNYSEKNFKTIAKKSDPVSRINAFKNEWNKTKFLKANQKMKEGRKLNLAERNQTNKPDFVFHKYKNKYGMD

SEQ ID NO: 6403 - protein, 140 aa, Glycine max
  Coding DNA Sequence Number=SeqID_2796
  Gene Ontology: Mol. function=structural molecule activity; Cellular component=chloroplast
  Homolog annotation: Hit_ID=A7QBC1; Match level="QueryCoverage=60%, HitCoverage=29%, E-value=3e-18, Identity=57%"; Hit description =Chromosome chr4 scaffold_73, whole genome shotgun sequence
  Pfam annotation: Domain name=PAP_fibrillin; Domain location=1-99; Score=-53.2; E_value=0.069; Accession=PF04755.3; Description=PAP _fibrillin
SSPCPTLELGLVAGCWRLVYSTISILGSNRTIFGLRYFISLDDFFQTIDISKSLAVTVIKFSAMGLCVLSAQLTVEASFRIASSTVKTPFLFGRLFLCKALICKRPCQGPSELIAVSDCRQVFMIIITRTLCPSTLMGKV

SEQ ID NO: 6404 - protein, 140 aa, Glycine max
  misc_feature (1)..(1): Xaa can be any naturally occurring amino acid
  misc_feature (4)..(4): Xaa can be any naturally occurring amino acid
  misc_feature (8)..(8): Xaa can be any naturally occurring amino acid
  misc_feature (30)..(32): Xaa can be any naturally occurring amino acid
  misc_feature (117)..(117): Xaa can be any naturally occurring amino acid
  misc_feature (120)..(120): Xaa can be any naturally occurring amino acid
  misc_feature (128)..(128): Xaa can be any naturally occurring amino acid
  Coding DNA Sequence Number=SeqID_2797
XKLXHTHXILTILHIHHTSPTHHLLTHHPXXXHNKISTFPSHTYTSQSTTLAYFILTLSSICSYISTLSILNPLLYLSLHLSLPHILLTLFNTHAPRQISILITITIDSAIYSTNLXHNXHHTTCYYXLTYITLLLLNSD

SEQ ID NO: 6405 - protein, 105 aa, Glycine max
  misc_feature (8)..(8): Xaa can be any naturally occurring amino acid
  misc_feature (11)..(11): Xaa can be any naturally occurring amino acid
  misc_feature (13)..(13): Xaa can be any naturally occurring amino acid
  misc_feature (27)..(27): Xaa can be any naturally occurring amino acid
  misc_feature (82)..(83): Xaa can be any naturally occurring amino acid
  misc_feature (100)..(100): Xaa can be any naturally occurring amino acid
  Coding DNA Sequence Number=SeqID_2799
  Subcellular localization annotation: CTP_CleavageSite=30; ConfidenceScore=5.12e-01
AGRVGVQXLRXVXSARCGVYFVLSGTXSLSCQRASSDVMLVGSAHGGVTGESQVWRARRVGDLISVTSICERRASRMIEEAXXLNGVATAVESERRALSXSYTYD

SEQ ID NO: 6406 - protein, 135 aa, Glycine max
  misc_feature (79)..(79): Xaa can be any naturally occurring amino acid
  Coding DNA Sequence Number=SeqID_2801
  Gene Ontology: Mol. function=oxidoreductase activity, acting on the CH-OH group of donors, NAD or NADP as acceptor; Cellular component =nucleus; Biological process=metabolic process
  Homolog annotation: Hit_ID=A5BY67; Match level="QueryCoverage=70%, HitCoverage=37%, E-value=8e-23, Identity=55%"; Hit description =Putative uncharacterized protein
LIYLKNSRYHYFINYFLVVTLNCVEDCSLKFESLIRLSNDKIETAAVVLLHSFAYLPHVTHRCLRPYHLLILCLGSSDXRLVHVDTSGTEEITDTVMALFFGLLRRTNLLNPSSICGDLTFVLSPDNDTIDEALE

SEQ ID NO: 6407 - protein, 138 aa, Glycine max
  misc_feature (8)..(8): Xaa can be any naturally occurring amino acid
  misc_feature (29)..(29): Xaa can be any naturally occurring amino acid
  misc_feature (71)..(71): Xaa can be any naturally occurring amino acid
  Coding DNA Sequence Number=SeqID_2802
  Subcellular localization annotation: CTP_CleavageSite=28; ConfidenceScore=5.12e-01
TRLLSVLXRTCVRCVSRYFRTLTRVCPSXATRRSLHRHRHLGQPTRSTPRRAQPTTPHYVAGSNCIKPHHXRAYVDRAATMTRARAEYIARCKQIKASYKNSSLSATTPAHAHTLYSSRAHARGTPVAYNNNQYVADR

SEQ ID NO: 6408 - protein, 122 aa, Glycine max
  misc_feature (7)..(8): Xaa can be any naturally occurring amino acid
  misc_feature (89)..(89): Xaa can be any naturally occurring amino acid
  Coding DNA Sequence Number=SeqID_2804
  Subcellular localization annotation: CTP_CleavageSite=36; ConfidenceScore=5.30e-01
CALPQLXXPHPHSHLTTRTINSVPHRHMCVTVGLARIASVATRYPLPRLSYICLSRFVVRYVNLCPTYHITRLRSTILSIVSDPITSSXAQHIDLIPALLRLFSTLLVFSSAYISPRTHSPR

SEQ ID NO: 6409 - protein, 168 aa, Glycine max
  misc_feature (27)..(27): Xaa can be any naturally occurring amino acid
  misc_feature (53)..(55): Xaa can be any naturally occurring amino acid
  misc_feature (65)..(65): Xaa can be any naturally occurring amino acid
  misc_feature (92)..(92): Xaa can be any naturally occurring amino acid
  misc_feature (97)..(98): Xaa can be any naturally occurring amino acid
  misc_feature (100)..(100): Xaa can be any naturally occurring amino acid
  misc_feature (103)..(103): Xaa can be any naturally occurring amino acid
  misc_feature (166)..(166): Xaa can be any naturally occurring amino acid
  Coding DNA Sequence Number=SeqID_2806
LLVTLTSIHVTLNTYYKSYSYVIISHXSDHESCSVSDSRDLTNTIRTVGRVVXXXIGVRVMSSLXYIVCACTKRVAAHILSAINACARYLYXRTLVXXYXGTXQHTVSPLRYSCLARSVAPHQRASFSSQSVPRAAYLCATISHAVHRSASPDGRVWACTPRATDXPA

SEQ ID NO: 6410 - protein, 161 aa, Glycine max
  misc_feature (8)..(8): Xaa can be any naturally occurring amino acid
  misc_feature (12)..(12): Xaa can be any naturally occurring amino acid
  misc_feature (49)..(49): Xaa can be any naturally occurring amino acid
  misc_feature (78)..(78): Xaa can be any naturally occurring amino acid
  misc_feature (130)..(130): Xaa can be any naturally occurring amino acid
  misc_feature (150)..(150): Xaa can be any naturally occurring amino acid
  misc_feature (161)..(161): Xaa can be any naturally occurring amino acid
  Coding DNA Sequence Number=SeqID_2808
ISCTCPTXQFGXSFSDRPSVTCTSDVSRLCGSIPLADALSYADLTRGYXYLSLRHSTHDAADASSHRYADTEVREVHXACAGGRHMVSPCAAREILGRCLSTRRQARVYYICALTRPLRRRCESVRVRDXTCTYVDCMECMMQDGLGECXVGRDMIVEIMX

SEQ ID NO: 6411 - protein, 134 aa, Glycine max
  misc_feature (9)..(9): Xaa can be any naturally occurring amino acid
  misc_feature (60)..(61): Xaa can be any naturally occurring amino acid
  misc_feature (63)..(64): Xaa can be any naturally occurring amino acid
  misc_feature (76)..(77): Xaa can be any naturally occurring amino acid
  misc_feature (91)..(91): Xaa can be any naturally occurring amino acid
  misc_feature (104)..(116): Xaa can be any naturally occurring amino acid
  misc_feature (118)..(119): Xaa can be any naturally occurring amino acid
  misc_feature (121)..(127): Xaa can be any naturally occurring amino acid
  Coding DNA Sequence Number=SeqID_2809
VYHLSTHHXHHSHIYTTTIKSHTTVPHIYTRHRIKCDDTRATCYTDQRQSHRITQRTPQXXLXXVLIFSTTTSVWXXLRRAIKLYVVSHRXVVTLLVMNLFGRXXXXXXXXXXXXXLXXGXXXXXXXGGGAGPP

SEQ ID NO: 6412 - protein, 140 aa, Glycine max
  misc_feature (6)..(6): Xaa can be any naturally occurring amino acid
  misc_feature (10)..(10): Xaa can be any naturally occurring amino acid
  misc_feature (22)..(22): Xaa can be any naturally occurring amino acid
  misc_feature (24)..(24): Xaa can be any naturally occurring amino acid
  misc_feature (26)..(27): Xaa can be any naturally occurring amino acid
  Coding DNA Sequence Number=SeqID_2811
VVCGPXLFFXNSMRFVSSIFIXLXYXXLPGRDGVAPPPARGEGYTIYNTEKPTPPRRCECNVRESGCTLIDRVDYAVRQRTSTRVTPHNLRQRDSMCLASKNHSSTTPCPRLGRKSEASRGRALTGMRQSGTILISSRDD

SEQ ID NO: 6413 - protein, 162 aa, Glycine max
  misc_feature (13)..(13): Xaa can be any naturally occurring amino acid
  misc_feature (19)..(19): Xaa can be any naturally occurring amino acid
  misc_feature (104)..(104): Xaa can be any naturally occurring amino acid
  Coding DNA Sequence Number=SeqID_2813
PTLILEVLFYHSXKLCISXVPSLQQIYRGVYRAIHPPYSTVRSLLHIRSYLSLSFYVNHTHLYCIYTSILSPLFYRSHLHPVVTLSIFRSVFIYSLLNSYNTFXSLLYASDYLFHTVSFFPLLSYHHVSPFSVAALYEPVAMGTPLLLTPLFYMRSPALLYS

SEQ ID NO: 6414 - protein, 121 aa, Glycine max
  misc_feature (83)..(83): Xaa can be any naturally occurring amino acid
  misc_feature (88)..(89): Xaa can be any naturally occurring amino acid
  misc_feature (107)..(107): Xaa can be any naturally occurring amino acid
  Coding DNA Sequence Number=SeqID_2815
  Gene Ontology: Cellular component=photosystem I; Biological process =photosynthesis
  Homolog annotation: Hit_ID=Q646H3; Match level="QueryCoverage=73%, HitCoverage=61%, E-value=2e-34, Identity=79%"; Hit description =Chloroplast photosystem I reaction center V
  Pfam annotation: Domain name=PSI_PSAK; Domain location=27-117; Score =106.4; E_value=8.8e-29; Accession=PF01241.9; Description=Photosystem I psaG  psaK
PGCRTGGGLPPKGLAPTGAAETNEEGGRHSPSSAGPTPFLGRVVFFNFQRENVAKQVPEQNGLTHLEAGDTRAKEYVSLLNSXDPGGXXHVDVLAWGSIGHVVAYYXLATTSNGYDPAFFG

SEQ ID NO: 6415 - protein, 229 aa, Glycine max
  misc_feature (47)..(47): Xaa can be any naturally occurring amino acid
  Coding DNA Sequence Number=SeqID_2816
  Subcellular localization annotation: CTP_CleavageSite=66; ConfidenceScore=5.82e-01
NPSASVHPFPPQISKSHNATSKSTRAHPPFTVLLRSRPWSLNSWVAXTPHTATRPMPINYFQEGAVAGVPRPSRSSSPPSPPEAAWAAPPGKRWANPGGAQGSPGGIKNLLTENGQSPVFPPSPPFGGLNPKYLKTPPPGGPPGPPPSQCGAPKTQNPVIIPPTRGPPQKKRKNPDIPKTLKNPHRGGHPFSPKKEKKKTLFSPPHEEGGGGRGPPPPPNKNMFFGAPE

SEQ ID NO: 6416 - protein, 175 aa, Glycine max
  misc_feature (110)..(110): Xaa can be any naturally occurring amino acid
  misc_feature (128)..(128): Xaa can be any naturally occurring amino acid
  misc_feature (134)..(135): Xaa can be any naturally occurring amino acid
  misc_feature (143)..(143): Xaa can be any naturally occurring amino acid
  misc_feature (149)..(150): Xaa can be any naturally occurring amino acid
  misc_feature (159)..(159): Xaa can be any naturally occurring amino acid
  misc_feature (163)..(164): Xaa can be any naturally occurring amino acid
  Coding DNA Sequence Number=SeqID_2818
  Gene Ontology: Mol. function=nucleoside-triphosphatase activity; Cellular component=integral to membrane; Biological process=transport
  Homolog annotation: Hit_ID=A7P5L9; Match level="QueryCoverage=97%, HitCoverage=26%, E-value=2e-47, Identity=61%"; Hit description =Chromosome chr4 scaffold_6, whole genome shotgun sequence
  Pfam annotation: Domain name=ABC_tran; Domain location=1-107; Score= -37.1; E_value=0.00083; Accession=PF00005.17; Description=ABC transporter
TRKMFIEEVMELVELNSIREALVGLPGENGLSTEQRKRLTIAVELVANPSIIFMDEPTSGLDARAAAIVMRTVRNTVNTGRTVVCTIHQPSIDIFDAFDELLLLKLGGEXIYAGPLGHHCSDLIQYFXGYSRSXXDQRRFNPXSWMLEXXSAGQKHLYXNFHXXYRTQTIPEQLS

SEQ ID NO: 6417 - protein, 90 aa, Glycine max
  misc_feature (5)..(5): Xaa can be any naturally occurring amino acid
  Coding DNA Sequence Number=SeqID_2819
HHEGXTSTLPDYRSRCVYSSLIARFAQQAPPQVAPHPTLHTRGIPHIERASHTSYIGVRRARYRYSLYQARELIGHIWRFPATILTVAYR

SEQ ID NO: 6418 - protein, 50 aa, Glycine max
  Coding DNA Sequence Number=SeqID_2821
  Homolog annotation: Hit_ID=A7PRI7; Match level="QueryCoverage=96%, HitCoverage=7%, E-value=4e-11, Identity=64%"; Hit description =Chromosome chr14 scaffold_27, whole genome shotgun sequence
MMQLLKWVNSLGGTPKQHSKETWDEIEKFLTTPAGRSALMGTQCKYEACI

SEQ ID NO: 6419 - protein, 56 aa, Glycine max
  Coding DNA Sequence Number=SeqID_2822
GLSCYTTSHKYLCLKKDFWRKKLLTKDLTLRGFLEKLIYWHVGFGSNLLPREHSYL

SEQ ID NO: 6420 - protein, 120 aa, Glycine max
  misc_feature (1)..(1): Xaa can be any naturally occurring amino acid
  misc_feature (4)..(4): Xaa can be any naturally occurring amino acid
  misc_feature (20)..(21): Xaa can be any naturally occurring amino acid
  misc_feature (24)..(24): Xaa can be any naturally occurring amino acid
  misc_feature (36)..(36): Xaa can be any naturally occurring amino acid
  misc_feature (55)..(55): Xaa can be any naturally occurring amino acid
  misc_feature (75)..(75): Xaa can be any naturally occurring amino acid
  misc_feature (83)..(83): Xaa can be any naturally occurring amino acid
  misc_feature (116)..(116): Xaa can be any naturally occurring amino acid
  Coding DNA Sequence Number=SeqID_2824
XYIXITGLLAADLDTAAHCXXIRXLVLIYTAVVDAXTHYIISILLRRCASLSRRXGTHIHVYRDKLIIVSRCSSXRQHRMRVXRHSRLYISQTRSHTYSRYIRHKCLSYSRRTTTXATHT

SEQ ID NO: 6421 - protein, 147 aa, Glycine max
  misc_feature (32)..(32): Xaa can be any naturally occurring amino acid
  misc_feature (69)..(69): Xaa can be any naturally occurring amino acid
  misc_feature (104)..(104): Xaa can be any naturally occurring amino acid
  misc_feature (109)..(109): Xaa can be any naturally occurring amino acid
  Coding DNA Sequence Number=SeqID_2826
  Gene Ontology: Mol. function=transporter activity; Cellular component= integral to membrane; Biological process=response to stress
  Homolog annotation: Hit_ID=O65356; Match level="QueryCoverage=97%, HitCoverage=49%, E-value=3e-53, Identity=69%"; Hit description =Aquaporin 1
  Pfam annotation: Domain name=MIP; Domain location=24-147; Score= -26.7; E_value=4.6e-08; Accession=PF00230.10; Description=Major intrinsic protein
AAQNQDNGKDYHEPAPAPLVDPTEFTSWSFYXAGIAEYVATFLFLYFTVLTVMGFVGAKSKCSTVGIQXIAWAFSGMIFALIYCTAGILRGHINPAATFVLFMXRSSRXPRAMFYIVMRCLGAICGAGVVNGYEGIAVYSALNGVAT

SEQ ID NO: 6422 - protein, 129 aa, Glycine max
  misc_feature (5)..(5): Xaa can be any naturally occurring amino acid
  misc_feature (35)..(35): Xaa can be any naturally occurring amino acid
  Coding DNA Sequence Number=SeqID_2827
NVRAXRNHIGGRCDQLLTRASKRSGVFVEHAYTMXDRRDGRTREKMSLMWSLLWRTLLHEETGGCRSAFNITKLRLLMDLEQSLSVLMRVSGCVVLIVITTYADDRRAYEHECRVITEARWAIDLWAIL

SEQ ID NO: 6423 - protein, 169 aa, Glycine max
  misc_feature (63)..(63): Xaa can be any naturally occurring amino acid
  misc_feature (83)..(83): Xaa can be any naturally occurring amino acid
  misc_feature (86)..(86): Xaa can be any naturally occurring amino acid
  Coding DNA Sequence Number=SeqID_2829
IDVIEYYMIKRMNRARTIYTIVTSARTCLHAPSSIDRIIHAICELASTHYTYPSYSLIVNIHXHHTLMMNSSSSPYNFVVVLXTSXRVGKITTHSVICAQMIVRCVRYSNVVSRSTLRKERRVNVECDDGAILSREMYCTYPFPMYGIHTGDHITPDLDRHTIHTSTYI

SEQ ID NO: 6424 - protein, 186 aa, Glycine max
  Coding DNA Sequence Number=SeqID_2831
FSYGWLRPPPPAVIDGGELTPGPQSSAPTFLGDGSPHPRGEIIFVVGRCTLRYRSGQRACLRLRFFMQERFISPILMFLLARFQCVAGCAVDHLFSFHVPVARGLPHHARRAVLALAHEEEAVREVHGLRFPGLWPRPVRRVPRHRRHERGALQEPGGELHGRHGRMDRWIQMQLSYLVGEAKCSS

SEQ ID NO: 6425 - protein, 71 aa, Glycine max
  Coding DNA Sequence Number=SeqID_2833
QCSFPFHFFTRMVLFSPPGACCTSLVCQTVGQAKCRGLLWDEISPVDWMPKCAFRAMRFLWTAYNSKKKKK

SEQ ID NO: 6426 - protein, 138 aa, Glycine max
  misc_feature (7)..(7): Xaa can be any naturally occurring amino acid
  misc_feature (24)..(24): Xaa can be any naturally occurring amino acid
  misc_feature (51)..(51): Xaa can be any naturally occurring amino acid
  misc_feature (132)..(132): Xaa can be any naturally occurring amino acid
  Coding DNA Sequence Number=SeqID_2835
TRVSTTXLSIIHTICVGRDGLGVXSIFHIREYRCGPRQTYGWCAPVDPHQXREGRQNACSSLDIERCACATTTLARRGKRHIRNAGVGRMDNSTSRMLIIHICRERRLHICGVRAESADTHTPRETHNTQAXCGRAHQ

SEQ ID NO: 6427 - protein, 252 aa, Glycine max
  misc_feature (206)..(206): Xaa can be any naturally occurring amino acid
  misc_feature (228)..(228): Xaa can be any naturally occurring amino acid
  misc_feature (249)..(249): Xaa can be any naturally occurring amino acid
  misc_feature (252)..(252): Xaa can be any naturally occurring amino acid
  Coding DNA Sequence Number=SeqID_2837
  Gene Ontology: Mol. function=DNA binding; Cellular component =chromosome; Biological process=regulation of transcription, DNA -dependent
  Homolog annotation: Hit_ID=O04235; Match level="QueryCoverage=58%, HitCoverage=23%, E-value=1e-58, Identity=76%"; Hit description=FACT complex subunit SSRP1
  Subcellular localization annotation: CTP_CleavageSite=38; ConfidenceScore=5.21e-01
MLSASGSLQHSNSFIAATLNTVFRWKPKFCGNFGKYFKSAFKSHKTVHWNTCQWIKTVKRTHPCYLDVEIHVRAPFYLGIAFVCVCNITQPNLIRSSVVLRRAMTDGHLFNNITLGGRGGTNPGQIKIYPGGIVWKRQGGGKLIEVDKSDIMGVTWMKVPRSNQLGVQIKDGLYYKFTGFRDQDVVTLTNFFQNTCGISVEEKQLXVSGRNWGEVDLNGICCFTVGQXQLLKCFTKCLSTALQGKIDVXLKX

SEQ ID NO: 6428 - protein, 99 aa, Glycine max
  Coding DNA Sequence Number=SeqID_2838
  Gene Ontology: Mol. function=phosphatidate cytidylyltransferase activity; Cellular component=membrane; Biological process =phospholipid biosynthetic process
  Homolog annotation: Hit_ID=A7PQT2; Match level="QueryCoverage=58%, HitCoverage=10%, E-value=2e-13, Identity=62%"; Hit description =Chromosome chr6 scaffold_25, whole genome shotgun sequence
CRILYSLTFSLLSHGLALSLLALASLSLDISFDSSNYRLIKFLFRPGASSGILLGAVTLPSLFLSKLVQLSREFSLAQLHLEEIQYLTLQYWATSASAC

SEQ ID NO: 6429 - protein, 71 aa, Glycine max
  misc_feature (22)..(22): Xaa can be any naturally occurring amino acid
  misc_feature (50)..(50): Xaa can be any naturally occurring amino acid
  misc_feature (59)..(59): Xaa can be any naturally occurring amino acid
  Coding DNA Sequence Number=SeqID_2839
  Gene Ontology: Mol. function=nucleoside-triphosphatase activity
  Homolog annotation: Hit_ID=A7R0N7; Match level="QueryCoverage=95%, HitCoverage=14%, E-value=2e-15, Identity=58%"; Hit description =Chromosome chr10 scaffold_312, whole genome shotgun sequence
LGRDSRKLHTQFAMQLLKPELXERARVTEGMSGRDIKYVCQLAERSWASXIIRGQVPKXGDKAPLPPLQEY

SEQ ID NO: 6430 - protein, 211 aa, Glycine max
  misc_feature (9)..(9): Xaa can be any naturally occurring amino acid
  misc_feature (18)..(18): Xaa can be any naturally occurring amino acid
  misc_feature (30)..(30): Xaa can be any naturally occurring amino acid
  misc_feature (48)..(48): Xaa can be any naturally occurring amino acid
  misc_feature (56)..(56): Xaa can be any naturally occurring amino acid
  misc_feature (59)..(59): Xaa can be any naturally occurring amino acid
  misc_feature (85)..(85): Xaa can be any naturally occurring amino acid
  misc_feature (99)..(99): Xaa can be any naturally occurring amino acid
  misc_feature (103)..(103): Xaa can be any naturally occurring amino acid
  misc_feature (109)..(109): Xaa can be any naturally occurring amino acid
  misc_feature (143)..(143): Xaa can be any naturally occurring amino acid
  misc_feature (148)..(148): Xaa can be any naturally occurring amino acid
  misc_feature (154)..(154): Xaa can be any naturally occurring amino acid
  misc_feature (157)..(157): Xaa can be any naturally occurring amino acid
  misc_feature (170)..(170): Xaa can be any naturally occurring amino acid
  misc_feature (173)..(173): Xaa can be any naturally occurring amino acid
  misc_feature (186)..(187): Xaa can be any naturally occurring amino acid
  misc_feature (191)..(191): Xaa can be any naturally occurring amino acid
  misc_feature (200)..(200): Xaa can be any naturally occurring amino acid
  misc_feature (204)..(204): Xaa can be any naturally occurring amino acid
  misc_feature (209)..(209): Xaa can be any naturally occurring amino acid
  Coding DNA Sequence Number=SeqID_2840
VRADRRVVXASSIACTIXSHLYARSRERRXHVATCRARMYDTVQQTRXHTRWQLDXTSXVFSSVLGGITYIVEYYVCGTMSWGYXASRRVHEMCITTTXLHRXDASRRXLMSYRSRMIHCSTCRLRATVVKRSSETARSASLXRYDAXHCTRIXAVXGCRARCTRSSGLXRTXPRMLVYVHTLFVXXSMLXSTRARTLHXARMXVILCXTR

SEQ ID NO: 6431 - protein, 134 aa, Glycine max
  misc_feature (23)..(23): Xaa can be any naturally occurring amino acid
  Coding DNA Sequence Number=SeqID_2842
  Gene Ontology: Cellular component=membrane; Biological process=plant -type hypersensitive response
  Homolog annotation: Hit_ID=Q8GYN5; Match level="QueryCoverage=97%, HitCoverage=61%, E-value=5e-44, Identity=68%"; Hit description=RPM1 -interacting protein 4
MAERSKVPKFGNWEHEEDVPYTXAYFENANRARAPGGSVVNPTDPEYYSDSQSQAPPPPPPPLSKTKPEEVEPLRRSRERLRTPEESELKQIGDAGGSSKEADNKRQGRASQNNGNDKSPLHKNSYDGIGRSKP

SEQ ID NO: 6432 - protein, 117 aa, Glycine max
  misc_feature (71)..(71): Xaa can be any naturally occurring amino acid
  misc_feature (107)..(107): Xaa can be any naturally occurring amino acid
  Coding DNA Sequence Number=SeqID_2843
  Gene Ontology: Mol. function=transferase activity, transferring glycosyl groups; Cellular component=cytoplasm; Biological process =nucleoside metabolic process
  Homolog annotation: Hit_ID=A5BI88; Match level="QueryCoverage=85%, HitCoverage=40%, E-value=4e-15, Identity=46%"; Hit description =Putative uncharacterized protein
MKQGGFHFGSSISFGLGAKFFSFRQPRELHGEVILEKLAFKFGTGCLEFPFGASQAGEPALINCGLVAPGXTSFTGVKLFKRCGAEVVEFAFFHGVPDFQGPFRSFXKPLFVFGEPR

SEQ ID NO: 6433 - protein, 101 aa, Glycine max
  Coding DNA Sequence Number=SeqID_2844
LVNIGNIYFTNTSPSEVYQAYLDQFSPYFRSGSKITRGGIIAWAKHASQHSLLSKPLVATGLATSSPRWRTYSWYHHHCYCHHCQLRLRHYPILRKQIKPT

SEQ ID NO: 6434 - protein, 80 aa, Glycine max
  misc_feature (4)..(4): Xaa can be any naturally occurring amino acid
  misc_feature (55)..(55): Xaa can be any naturally occurring amino acid
  misc_feature (69)..(69): Xaa can be any naturally occurring amino acid
  Coding DNA Sequence Number=SeqID_2845
IYHXRRRIRPAISTYCAGADMAIRQTCMIYDAAALVNVRSRDIMISSVIHVPTRXTQNTQRMKLRHRCXYIYRATSLSRL

SEQ ID NO: 6435 - protein, 123 aa, Glycine max
  Coding DNA Sequence Number=SeqID_2847
  Gene Ontology: Mol. function=nucleoside-triphosphatase activity; Cellular component=protein complex; Biological process=protein catabolic process
  Homolog annotation: Hit_ID=Q8W422; Match level="QueryCoverage=100%, HitCoverage=26%, E-value=5e-42, Identity=75%"; Hit description=26S proteasome regulatory particle triple-A ATPase subunit2b
  Pfam annotation: Domain name=AAA; Domain location=1-118; Score=0.9; E_ value=1.5e-05; Accession=PF00004.19; Description=ATPase family associated with various cellular activities (AAA)
GTKRYDAHSGGEREIQRTMLELLNQLDGFDSRGDVKGILATNRIERLDPALLRPGRIYRKIEFFFFDTKTGRRTRQIFTSRTRLADNANLEEFARTKEESEGADIEGICNESGLIDPRKAERR

SEQ ID NO: 6436 - protein, 138 aa, Glycine max
  Coding DNA Sequence Number=SeqID_2848
EYCTILTICTVVSTHMIYICVRSFFTDSCKMYSEAVETGGRTVKTRRRAIRCRRHNILDKQEAHKIQTKRVITRHSESSLLIQSISLTLSYILLRYYISFFFIVFTVHSCSDEYARLGRGVTHETCVSCEVESTRKWS

SEQ ID NO: 6437 - protein, 231 aa, Glycine max
  Coding DNA Sequence Number=SeqID_2850
  Gene Ontology: Cellular component=cytoplasm
  Homolog annotation: Hit_ID=Q9SHG8; Match level="QueryCoverage=85%, HitCoverage=84%, E-value=1e-94, Identity=82%"; Hit description =Similar to SOUL Protein
  Pfam annotation: Domain name=SOUL; Domain location=43-228; Score =374.7; E_value=1.5e-109; Accession=PF04832.3; Description=SOUL heme -binding protein
MELAGLSFLKLSFLLSLLSGGSDLLNPISEPSLLGKFPPTCNRIECPNYEVVHAGNGYEIRRYDTTVWISTEPIQDISLKDATRTAFFQLFAYIQGKNEYHQKIEMTAPVISQVSPSDGPLCESSFTVSFYVPKKNQPDPAPAENLHIQKWTPRHVAVRQFSGFVSDYNVGEEAAALSASLEGTAWANAIEKSKEDGGVGADSAYTVAQYNSPFEFIGRVNEIWLPFQMDD

SEQ ID NO: 6438 - protein, 155 aa, Glycine max
  misc_feature (62)..(62): Xaa can be any naturally occurring amino acid
  misc_feature (75)..(75): Xaa can be any naturally occurring amino acid
  misc_feature (124)..(124): Xaa can be any naturally occurring amino acid
  misc_feature (148)..(148): Xaa can be any naturally occurring amino acid
  Coding DNA Sequence Number=SeqID_2851
YSRVERIVTTRRVAELQCSIVRVAITISSVSIYWRDRQICRIREERYRTYARTDIEWRGSGXAVLCGLMLRLLVXSHITRYSTDIESHCTCSPSTHLSATLVAGVRHISRIRSHDPQSQRSRRXKERRDEERRVLYVRGIVSIHFVDXLRSEDVV

SEQ ID NO: 6439 - protein, 146 aa, Glycine max
  Coding DNA Sequence Number=SeqID_2853
  Pfam annotation: Domain name=Ribosomal_L39; Domain location=65-94; Score=10.2; E_value=0.0043; Accession=PF00832.10; Description =Ribosomal L39 protein
TAARRRQKGNNNKTHYLGIKEGELVHLRRVWLLGFSLPGAQSSPQKTKRKCRRTRHSESRRSWLKKMRQNRPIPYWIRMRTEHTIQVQREAPPLPSHQACILRRMLCLGPIYPINHCPIPLRPKQCLALFPTSHLPRRLYRARNLL

SEQ ID NO: 6440 - protein, 93 aa, Glycine max
  misc_feature (33)..(33): Xaa can be any naturally occurring amino acid
  misc_feature (82)..(82): Xaa can be any naturally occurring amino acid
  Coding DNA Sequence Number=SeqID_2854
CISGVISSSFIYPYAICVVTTFRTASRIFSKDXVVDFTAIFVVLSSISRTHHPHIPSLAQNKYPCYYLIVSDSDGLIYTITXLSLQPPARTQG

SEQ ID NO: 6441 - protein, 114 aa, Glycine max
  misc_feature (36)..(36): Xaa can be any naturally occurring amino acid
  misc_feature (51)..(51): Xaa can be any naturally occurring amino acid
  misc_feature (60)..(60): Xaa can be any naturally occurring amino acid
  misc_feature (81)..(81): Xaa can be any naturally occurring amino acid
  misc_feature (95)..(95): Xaa can be any naturally occurring amino acid
  Coding DNA Sequence Number=SeqID_2856
  Gene Ontology: Mol. function=solute:hydrogen antiporter activity; Cellular component=integral to membrane; Biological process =regulation of pH
  Homolog annotation: Hit_ID=A7QNE7; Match level="QueryCoverage=99%, HitCoverage=14%, E-value=7e-22, Identity=51%"; Hit description =Chromosome chr2 scaffold_132, whole genome shotgun sequence
FPEKSTLVLDALGNIGQVYLLSILGIELYMRTIRRXGRKAIGSPLCGFYVXYGLGQASSXAFRATESKGDDPVSMRVIMGXALSNSAFPVLARIXDEDKLLFTDVGRKAMSAAG

SEQ ID NO: 6442 - protein, 89 aa, Glycine max
  Coding DNA Sequence Number=SeqID_2857
  Homolog annotation: Hit_ID=Q9FEF9; Match level="QueryCoverage=91%, HitCoverage=90%, E-value=5e-36, Identity=89%"; Hit description =Putative uncharacterized protein At2g20820
MASFARRAMSLAQIPSARVPASVCQRRGLAGAADHHGSTKVDFWKQPTNPGNWKEEHFVLISLSGWGLLFYSGYKLFTGGKGDDEKPAQ

SEQ ID NO: 6443 - protein, 130 aa, Glycine max
  misc_feature (3)..(3): Xaa can be any naturally occurring amino acid
  misc_feature (37)..(37): Xaa can be any naturally occurring amino acid
  misc_feature (47)..(47): Xaa can be any naturally occurring amino acid
  misc_feature (99)..(99): Xaa can be any naturally occurring amino acid
  misc_feature (115)..(115): Xaa can be any naturally occurring amino acid
  Coding DNA Sequence Number=SeqID_2858
CEXWSKYRGGTMCLCLGAVGCDERCHDTLLVRRPASXLVYSMPMESXAAQRSYCRCSVCYILCIGTRLIHRRSSVQSSARVLSPSAAAKTGYTCLSAGXLSGLRGVVESYHVHHXIRIRPVFVRICRAAV

SEQ ID NO: 6444 - protein, 137 aa, Glycine max
  Coding DNA Sequence Number=SeqID_2860
YARHHLYAIAPKSTHHDAPLRTILLRLQHETRSIFAQLTGTECLNAVSHSLIHFYYVILSTSVSRSIHTVQLSQRHHTCFEPNGESATAAPECATTEYISCAFADSVRTNMMTVEAAHPHSISSAHRVFVRARPLSI

SEQ ID NO: 6445 - protein, 63 aa, Glycine max
  Coding DNA Sequence Number=SeqID_2862
EALHKSSQQLRRQPPRTISPSLLKRRREPNKPTATMGYCPILVYDFFVALFDGNKEEQASVAV

SEQ ID NO: 6446 - protein, 236 aa, Glycine max
  misc_feature (5)..(5): Xaa can be any naturally occurring amino acid
  misc_feature (11)..(12): Xaa can be any naturally occurring amino acid
  misc_feature (14)..(14): Xaa can be any naturally occurring amino acid
  misc_feature (31)..(31): Xaa can be any naturally occurring amino acid
  misc_feature (33)..(33): Xaa can be any naturally occurring amino acid
  misc_feature (55)..(55): Xaa can be any naturally occurring amino acid
  misc_feature (59)..(59): Xaa can be any naturally occurring amino acid
  misc_feature (66)..(66): Xaa can be any naturally occurring amino acid
  misc_feature (68)..(68): Xaa can be any naturally occurring amino acid
  misc_feature (70)..(70): Xaa can be any naturally occurring amino acid
  misc_feature (75)..(77): Xaa can be any naturally occurring amino acid
  misc_feature (84)..(86): Xaa can be any naturally occurring amino acid
  misc_feature (88)..(88): Xaa can be any naturally occurring amino acid
  misc_feature (91)..(91): Xaa can be any naturally occurring amino acid
  misc_feature (93)..(93): Xaa can be any naturally occurring amino acid
  misc_feature (170)..(171): Xaa can be any naturally occurring amino acid
  misc_feature (187)..(188): Xaa can be any naturally occurring amino acid
  misc_feature (193)..(193): Xaa can be any naturally occurring amino acid
  misc_feature (203)..(203): Xaa can be any naturally occurring amino acid
  misc_feature (209)..(209): Xaa can be any naturally occurring amino acid
  Coding DNA Sequence Number=SeqID_2864
FGVFXWPLLFXXFXLCVSFVLVCVVVLCVLXAXVSWRALFLPPLPVFALLGVVVXAFAXLVPCGMXVXYXPFSTXXXGAGHKIXXXPXSLXLXITSIFFHSASLVLLASPLRLSKLSSGCMRLVVRPSSVRSVSVLCGSLLSHSVLCWCCIACLLLCCGRGRPRAWSCGXXPAGRGLRHTPVQPSPXXTHPAXLHHRPQHTRXRNNETXIYTEPRHALIRRNCYSTVRTVIDDANT

SEQ ID NO: 6447 - protein, 91 aa, Glycine max
  misc_feature (7)..(7): Xaa can be any naturally occurring amino acid
  misc_feature (30)..(30): Xaa can be any naturally occurring amino acid
  misc_feature (32)..(32): Xaa can be any naturally occurring amino acid
  misc_feature (35)..(35): Xaa can be any naturally occurring amino acid
  misc_feature (47)..(47): Xaa can be any naturally occurring amino acid
  misc_feature (59)..(59): Xaa can be any naturally occurring amino acid
  misc_feature (65)..(65): Xaa can be any naturally occurring amino acid
  misc_feature (69)..(69): Xaa can be any naturally occurring amino acid
  misc_feature (82)..(83): Xaa can be any naturally occurring amino acid
  misc_feature (88)..(88): Xaa can be any naturally occurring amino acid
  Coding DNA Sequence Number=SeqID_2866
  Subcellular localization annotation: CTP_CleavageSite=61; ConfidenceScore=5.10e-01
SSDLRVXQYSFTLCHVSALSILASTRSYPXHXPLXCYYTRSSPLCIXRNTSRVYTLLCXCRSVSXSKIXHLHYTLSRLPRIXXDTIMXRTQ

SEQ ID NO: 6448 - protein, 112 aa, Glycine max
  misc_feature (10)..(10): Xaa can be any naturally occurring amino acid
  misc_feature (12)..(12): Xaa can be any naturally occurring amino acid
  Coding DNA Sequence Number=SeqID_1329
LCISDNHMLXSXGWVCSRDINISYRTSESREGSAPRTSAPRTRRGGAPLTEKRHAARRDRGEYTAGGLERRGYKEKHNGRQTRTSNSIHYRSDRKTVTYHTMERIHKIDNKQ

SEQ ID NO: 6449 - protein, 101 aa, Glycine max
  misc_feature (1)..(1): Xaa can be any naturally occurring amino acid
  misc_feature (10)..(10): Xaa can be any naturally occurring amino acid
  misc_feature (67)..(67): Xaa can be any naturally occurring amino acid
  misc_feature (93)..(93): Xaa can be any naturally occurring amino acid
  misc_feature (99)..(99): Xaa can be any naturally occurring amino acid
  misc_feature (101)..(101): Xaa can be any naturally occurring amino acid
  Coding DNA Sequence Number=SeqID_1331
  Subcellular localization annotation: CTP_CleavageSite=58; ConfidenceScore=5.44e-01
XEHSRMIKNXSVSSYAQLPETSAHCANRRSATRSARAHRISSTHDVRHTSSGYSSSSSCAAGCEFSXSSRVYERSTHRRTDTRYSVGLHRSHXDASTHXSX

SEQ ID NO: 6450 - protein, 127 aa, Glycine max
  misc_feature (107)..(107): Xaa can be any naturally occurring amino acid
  Coding DNA Sequence Number=SeqID_1333
  Gene Ontology: Mol. function=nucleic acid binding
  Homolog annotation: Hit_ID=Q9FX45; Match level="QueryCoverage=100%, HitCoverage=65%, E-value=1e-22, Identity=51%"; Hit description=RNA -binding glycine-rich protein, putative
  Subcellular localization annotation: CTP_CleavageSite=46; ConfidenceScore=5.63e-01
MASSLGIVAVNPSCSGDRFLRPNFSVTTCCCFSSSVCFRSWRGRINVGTVVNPAPRRHDVGGLLVSGCLSSPDSSSPPSSISGPKTKLYVSGLSFRTTEDNLRNVFXQFGKLTLVNLVMDKVANRPR

SEQ ID NO: 6451 - protein, 103 aa, Glycine max
  misc_feature (3)..(3): Xaa can be any naturally occurring amino acid
  misc_feature (9)..(9): Xaa can be any naturally occurring amino acid
  misc_feature (12)..(12): Xaa can be any naturally occurring amino acid
  misc_feature (26)..(27): Xaa can be any naturally occurring amino acid
  misc_feature (34)..(34): Xaa can be any naturally occurring amino acid
  misc_feature (41)..(41): Xaa can be any naturally occurring amino acid
  misc_feature (57)..(57): Xaa can be any naturally occurring amino acid
  misc_feature (59)..(59): Xaa can be any naturally occurring amino acid
  misc_feature (72)..(75): Xaa can be any naturally occurring amino acid
  misc_feature (88)..(88): Xaa can be any naturally occurring amino acid
  Coding DNA Sequence Number=SeqID_1334
  Subcellular localization annotation: CTP_CleavageSite=22; ConfidenceScore=5.18e-01
CTXTMMSRXFMXYDVSFSRRCRVVVXXSRHTSSXKALRRCXVVERYIEREMRRAVEXPXACILYNNIHNVVXXXXLDDGSMTSQCDEXSCYVDISTILCGLML

SEQ ID NO: 6452 - protein, 90 aa, Glycine max
  Coding DNA Sequence Number=SeqID_1336
  Gene Ontology: Mol. function=gamma-glutamyl hydrolase activity; Cellular component=extracellular region; Biological process =glutamine metabolic process
  Homolog annotation: Hit_ID=P93164; Match level="QueryCoverage=96%, HitCoverage=24%, E-value=5e-29, Identity=80%"; Hit description=Gamma- glutamyl hydrolase precursor
PTLGDGALWLGSDNATWGLITYAVSYVKFVESGGARVIPLIYNESPENLNMNLDLVNGLLFTGGWAASGPYLDTLENIFKKALEINDAGD

SEQ ID NO: 6453 - protein, 117 aa, Glycine max
  misc_feature (3)..(3): Xaa can be any naturally occurring amino acid
  misc_feature (16)..(16): Xaa can be any naturally occurring amino acid
  misc_feature (20)..(20): Xaa can be any naturally occurring amino acid
  misc_feature (35)..(36): Xaa can be any naturally occurring amino acid
  misc_feature (61)..(64): Xaa can be any naturally occurring amino acid
  misc_feature (73)..(73): Xaa can be any naturally occurring amino acid
  misc_feature (85)..(85): Xaa can be any naturally occurring amino acid
  misc_feature (92)..(92): Xaa can be any naturally occurring amino acid
  misc_feature (94)..(94): Xaa can be any naturally occurring amino acid
  misc_feature (96)..(96): Xaa can be any naturally occurring amino acid
  misc_feature (98)..(99): Xaa can be any naturally occurring amino acid
  misc_feature (101)..(104): Xaa can be any naturally occurring amino acid
  misc_feature (106)..(112): Xaa can be any naturally occurring amino acid
  Coding DNA Sequence Number=SeqID_1337
YLXIASSYSFLYCIYXSSWXWSASKLILYVVLCVXXYRRNADAPLCHHIRIIVCLAGGGGXXXXQITIGCVLXGGVVCSLYLREXCRARGGXNXVXLXXRXXXXGXXXXXXXRPQPQ

SEQ ID NO: 6454 - protein, 125 aa, Glycine max
  misc_feature (8)..(8): Xaa can be any naturally occurring amino acid
  misc_feature (89)..(89): Xaa can be any naturally occurring amino acid
  Coding DNA Sequence Number=SeqID_1339
GSLVDRCXVLDICAAGTPADVHRHAARTSLRRATSRSWVVDHVHPDTVSTAPCWFESGTRRSFFCDEHAGRCEIGATHTLSSTSPSAPXRARRALARDSAPMTARLYYTLRRSEIDLVTRAHTAR

SEQ ID NO: 6455 - protein, 307 aa, Glycine max
  misc_feature (41)..(41): Xaa can be any naturally occurring amino acid
  misc_feature (221)..(221): Xaa can be any naturally occurring amino acid
  misc_feature (224)..(224): Xaa can be any naturally occurring amino acid
  misc_feature (302)..(302): Xaa can be any naturally occurring amino acid
  misc_feature (305)..(305): Xaa can be any naturally occurring amino acid
  Coding DNA Sequence Number=SeqID_1341
NSEKRTAERQERRQQVGGAARTASERQQRERAAHTVREPQXQHAARDVTTRGSRERGEDRRRGNDQEKQTERAAAATRTRTREARRDSREWEERTGRRHSQRRQRGQREARDTASQLPHREHNADSNEHGCTPTQTHTPPEAHKTHSYTNTTNTHPQTQQTKPPTHEAPHASPAPAQAPRVRGGTRRRHAAPPRARTPTTARRTARPPPTPPTSNATPRTXAPXPARPKDEPGAAGAAAWTGRGRGATTGPATPGRDEQHPRRTHRNPPAPTTHARRSAPHEDGATSSESTTAEETSPTQPXQTXGN

SEQ ID NO: 6456 - protein, 93 aa, Glycine max
  misc_feature (1)..(3): Xaa can be any naturally occurring amino acid
  misc_feature (20)..(21): Xaa can be any naturally occurring amino acid
  misc_feature (28)..(29): Xaa can be any naturally occurring amino acid
  misc_feature (37)..(39): Xaa can be any naturally occurring amino acid
  misc_feature (42)..(42): Xaa can be any naturally occurring amino acid
  misc_feature (62)..(62): Xaa can be any naturally occurring amino acid
  misc_feature (87)..(87): Xaa can be any naturally occurring amino acid
  misc_feature (91)..(92): Xaa can be any naturally occurring amino acid
  Coding DNA Sequence Number=SeqID_2868
XXXITYHSLVRCSPGTLHHXXITTVTIXXCALRSSSXXXTDXISHDIEMMYAVHAHMHLSHXSLISPSHITRDIRQRHISRCRTSRXAFCXXH

SEQ ID NO: 6457 - protein, 146 aa, Glycine max
  misc_feature (55)..(55): Xaa can be any naturally occurring amino acid
  misc_feature (73)..(73): Xaa can be any naturally occurring amino acid
  misc_feature (83)..(83): Xaa can be any naturally occurring amino acid
  misc_feature (116)..(116): Xaa can be any naturally occurring amino acid
  Coding DNA Sequence Number=SeqID_277
  Gene Ontology: Mol. function=transferase activity; Biological process= metabolic process
  Homolog annotation: Hit_ID=A5C6M5; Match level="QueryCoverage=100%, HitCoverage=100%, E-value=3e-31, Identity=55%"; Hit description =Putative uncharacterized protein
MDSIVDSLNNAYQDFVAAAANEVEAKESAGSIKTMAADTALENFNQKWELIIGSXDQDEELVESVKTRIGSEXLVHEATRPVXGKPEQATMTGLPRISAARYAQMSTADGRLATEXSTVSGAGTANSTLTHPSAPMDARLSDDAAQ

SEQ ID NO: 6458 - protein, 192 aa, Glycine max
  misc_feature (11)..(11): Xaa can be any naturally occurring amino acid
  misc_feature (13)..(13): Xaa can be any naturally occurring amino acid
  misc_feature (15)..(16): Xaa can be any naturally occurring amino acid
  misc_feature (19)..(20): Xaa can be any naturally occurring amino acid
  misc_feature (26)..(26): Xaa can be any naturally occurring amino acid
  misc_feature (30)..(30): Xaa can be any naturally occurring amino acid
  misc_feature (33)..(33): Xaa can be any naturally occurring amino acid
  misc_feature (37)..(37): Xaa can be any naturally occurring amino acid
  misc_feature (70)..(70): Xaa can be any naturally occurring amino acid
  misc_feature (99)..(99): Xaa can be any naturally occurring amino acid
  misc_feature (117)..(118): Xaa can be any naturally occurring amino acid
  misc_feature (161)..(161): Xaa can be any naturally occurring amino acid
  misc_feature (163)..(163): Xaa can be any naturally occurring amino acid
  misc_feature (170)..(170): Xaa can be any naturally occurring amino acid
  misc_feature (178)..(178): Xaa can be any naturally occurring amino acid
  misc_feature (184)..(184): Xaa can be any naturally occurring amino acid
  Coding DNA Sequence Number=SeqID_278
WWVSMFSMLRXDXDXXSTXXTVARDXRAEXPGXREAXGMTEGVCILPTTTLSLVSPSRARVHHMSSPARXRPALLDLSCDLSLHCAYCRLLSIPRCHTXMTLSPFSPLSHLTAPPPXXRPPPPSSSLSPPLLSLSRLSAATLPTPSLSPARSVRCAPRESXDXPAYLYTXYTHTITYXPSTFRXTTPTTPLA

SEQ ID NO: 6459 - protein, 99 aa, Glycine max
  Coding DNA Sequence Number=SeqID_280
  Subcellular localization annotation: CTP_CleavageSite=64; ConfidenceScore=5.43e-01
NHGFLSVLLCAAPPLRTAHISRERGFSGVRPAMALTNLLPSSISSPPPHPLPVLCFSKTAAWCSAAAKEPMMREQNSSTEAVARGSGSSGIMEAIIKDT

SEQ ID NO: 6460 - protein, 118 aa, Glycine max
  misc_feature (15)..(15): Xaa can be any naturally occurring amino acid
  misc_feature (18)..(18): Xaa can be any naturally occurring amino acid
  misc_feature (38)..(38): Xaa can be any naturally occurring amino acid
  misc_feature (42)..(42): Xaa can be any naturally occurring amino acid
  misc_feature (74)..(74): Xaa can be any naturally occurring amino acid
  misc_feature (96)..(96): Xaa can be any naturally occurring amino acid
  misc_feature (98)..(98): Xaa can be any naturally occurring amino acid
  misc_feature (106)..(106): Xaa can be any naturally occurring amino acid
  Coding DNA Sequence Number=SeqID_282
QTPHVLVSCVCQCSXTTXMHLLRRRSARIIQHQTSGSXSTVXRPRDIYQLHYITLERAMLIQLTLCTRTVMLMXRCDVVRAIVCGCSIDIYLHHTXVXRRAIAVSXVLTSLSGAPRHT

SEQ ID NO: 6461 - protein, 83 aa, Glycine max
  Coding DNA Sequence Number=SeqID_284
PVWDLRKFYWETFPGWGGGKKNFPGFLKFYPPFKYLGAPQGGGKLFLIFGHFKKGRKKKGGGLKRGGRKKTKGPLKDLWTTFW

SEQ ID NO: 6462 - protein, 252 aa, Glycine max
  misc_feature (44)..(44): Xaa can be any naturally occurring amino acid
  misc_feature (110)..(110): Xaa can be any naturally occurring amino acid
  misc_feature (112)..(112): Xaa can be any naturally occurring amino acid
  misc_feature (123)..(123): Xaa can be any naturally occurring amino acid
  misc_feature (148)..(148): Xaa can be any naturally occurring amino acid
  misc_feature (236)..(236): Xaa can be any naturally occurring amino acid
  Coding DNA Sequence Number=SeqID_286
FARRNPHALRVLFPTPADPPPALHLFIFFPPHTTLLPEYLSYPXPRPRARNIWFTLLRWRGYWTPRPYSRRHFPPNILHYSAAYHPSIVTTRGHLLMFFYLLPRLRPRYXVXIILLPRCDNPXKTPPSLLPSLPLTHVAPPAQPGQLXRDHATLLYLHTAYLLTPTSHCIPPSFRLHTIRSPPPRLSSSLTDSHARPAHHALYCMRPIVRYSHLYSYPNMPLYFMTPPRPGYHNLXILTIHHIISAITRHAL

SEQ ID NO: 6463 - protein, 97 aa, Glycine max
  misc_feature (10)..(10): Xaa can be any naturally occurring amino acid
  misc_feature (33)..(33): Xaa can be any naturally occurring amino acid
  misc_feature (77)..(77): Xaa can be any naturally occurring amino acid
  Coding DNA Sequence Number=SeqID_288
MIRRYPRRGXVSVPAEEYMLLTCHTNDAHAHTXSLIKFKLGCTWDDEAKCSGYLVRSDAVLCEGGSGGEVWCLGVRXLVSGQSITPRSIRREDTSVV

SEQ ID NO: 6464 - protein, 105 aa, Glycine max
  Coding DNA Sequence Number=SeqID_2869
SKTPSTEIGLVHTLPPLPAPRTGERGRHRRRDEGQREEEEDEEAQEEAPKDEAAIQVGALEAGEASSCIQAARHRGMTAWSSDSWRVCCDGCGSCFTCVLSNLAV

SEQ ID NO: 6465 - protein, 217 aa, Glycine max
  misc_feature (200)..(217): Xaa can be any naturally occurring amino acid
  Coding DNA Sequence Number=SeqID_2871
HITLILSPKKEHITMEYGRLGPSDPGGSSRLNPPRSSGRKNIVFLSLFAVLLIAASAVTGVAVRSRTKNTGGDGTSLGEFTQAKSRTCSKDRGGGGGTLKSFTGTSRGVSREDPEKGPRPTFSFQGPRLAALSPRGPLVLSANHSPTPGVGFPRGPRRPTSELASKLPRTTSVRRRSARSPQQGAPSGGAGRPKHKRWLXXXXXXXXXXXXXXXXXX

SEQ ID NO: 6466 - protein, 78 aa, Glycine max
  misc_feature (6)..(6): Xaa can be any naturally occurring amino acid
  misc_feature (20)..(20): Xaa can be any naturally occurring amino acid
  misc_feature (22)..(22): Xaa can be any naturally occurring amino acid
  misc_feature (48)..(48): Xaa can be any naturally occurring amino acid
  Coding DNA Sequence Number=SeqID_2873
VLLARXFCGTTLIATVSCGXAXPSACGSAYDCCVIYMATSHSMSIIAXLCVDSRERPSMHHVTPCMYRDTEDANGRTN

SEQ ID NO: 6467 - protein, 77 aa, Glycine max
  Coding DNA Sequence Number=SeqID_2875
  Subcellular localization annotation: CTP_CleavageSite=4; ConfidenceScore=5.09e-01
KWAKSASVSKNRQKLLSSKKYLHVSPKKLERQNFSCIIGVFSQAVAAHSNPELKNHRAFALNSCSNHFKLESSYLNH

SEQ ID NO: 6468 - protein, 157 aa, Glycine max
  misc_feature (93)..(93): Xaa can be any naturally occurring amino acid
  misc_feature (99)..(99): Xaa can be any naturally occurring amino acid
  misc_feature (108)..(108): Xaa can be any naturally occurring amino acid
  misc_feature (110)..(110): Xaa can be any naturally occurring amino acid
  misc_feature (118)..(118): Xaa can be any naturally occurring amino acid
  misc_feature (141)..(141): Xaa can be any naturally occurring amino acid
  Coding DNA Sequence Number=SeqID_2877
ARVLIVISLEYRHRTPLSVCRILVLYLNSLETRASAWQRISLSLYYLYYSNPVTTAHISLRHRSYRRQSRVCVLSSTTRCFASRLACRAPLVXSHARMXTRARCLRGXSXNIRRSHWXSIDIYLDSRALSQRYRDISTHSXEYRRARRARRVGAHID

SEQ ID NO: 6469 - protein, 326 aa, Glycine max
  Coding DNA Sequence Number=SeqID_2879
  Gene Ontology: Mol. function=nucleic acid binding; Cellular component= cytoplasm; Biological process=actin cytoskeleton organization and biogenesis
  Homolog annotation: Hit_ID=UPI0000DB7838; Match level="QueryCoverage =53%, HitCoverage=49%, E-value=8e-79, Identity=79%"; Hit description =PREDICTED: similar to lark CG8597-PA, isoform A isoform 1
  Pfam annotation: Domain name=RRM_1; Domain location=12-75; Score =69.9; E_value=8.3e-18; Accession=PF00076.12; Description=RNA recognition motif. (a.k.a. RRM, R
  Pfam annotation: Domain name=RRM_1; Domain location=91-153; Score =38.9; E_value=1.8e-08; Accession=PF00076.12; Description=RNA recognition motif. (a.k.a. RRM, R
  Pfam module annotation: Pfam domain module=RRM_1::RRM_1; Domain location=12-75::91-153
MPGFSSVGTFKIFVGNLAEKTVSADIRPLFEKYGKVIECDVVKDFGFVHMENEESGRDAIQNLNGYLVHGSAMKVEAATSRKGPNTPTTKIFVGNLSDNTRAPQVRSLFTKYGTVVECDIVRNYGFVHIDCPDVNKMVEELNGQVVDGQPMKVQISTSKVRQRPGMGNPEQCYRMGPDRFRGRMGFGRDPYPPPPPPPFLRDRMLSGGFGGKDSYYDRYYDRPAARFDDRDSFDRRLPPLPPRDLGPRRDFMPPPPIPPREPLPPLGLRGPPSSLRDSFERSMYSRRSPPPPSARYGRLYDDYSRDSYDDRRIGLRGASPRRFTPY

SEQ ID NO: 6470 - protein, 92 aa, Glycine max
  Coding DNA Sequence Number=SeqID_2880
  Homolog annotation: Hit_ID=Q5QLQ3; Match level="QueryCoverage=75%, HitCoverage=35%, E-value=5e-07, Identity=47%"; Hit description=60S ribosomal protein L18A-like
MGGEMPGTDGKGHPAPASASASGFPPSAPPYHQQQHHQYGTFGAPSASGEFPQPAVGFPQPAPPLGFQNYPPPRPPPSYAVYPPLQAYSAAA

SEQ ID NO: 6471 - protein, 82 aa, Glycine max
  Coding DNA Sequence Number=SeqID_2881
DQRDSIHGCSRCVLVSIVNIHYIHGNFICVFCIVTICQQRYVRSGRRNLYFLSCSVCRLFLLLSCAFLVLRSRPSLCILAMR

SEQ ID NO: 6472 - protein, 153 aa, Glycine max
  Coding DNA Sequence Number=SeqID_2883
  Homolog annotation: Hit_ID=Q9SVS3; Match level="QueryCoverage=74%, HitCoverage=76%, E-value=1e-25, Identity=57%"; Hit description =Putative uncharacterized protein F17L22.200
  Subcellular localization annotation: CTP_CleavageSite=84; ConfidenceScore=5.56e-01
IKKKNSLPHMALPLNRVRSSSIFTFTVSFVFIFAGKSFSQGLRPSDHGLQYQSSSPPTESHSPPGIVMSFFGDSHSPPPQLLPKASEADGDDDSWWRDDGAANRHGHVMRHVFLAASIICGVSGVALLVVFTLVYFFRFRKKYPSNLPCNDLR

SEQ ID NO: 6473 - protein, 72 aa, Glycine max
  Coding DNA Sequence Number=SeqID_2884
KWRRELLGVAKERCRSKVVPAKCRESKHKCTVTVDDVNQPLSSLITTWNFQTLPHNSRTTPMNERNIIEQQH

SEQ ID NO: 6474 - protein, 92 aa, Glycine max
  misc_feature (22)..(22): Xaa can be any naturally occurring amino acid
  misc_feature (36)..(36): Xaa can be any naturally occurring amino acid
  Coding DNA Sequence Number=SeqID_2886
  Gene Ontology: Mol. function=glutamate decarboxylase activity; Biological process=carboxylic acid metabolic process
  Homolog annotation: Hit_ID=A8C8H3; Match level="QueryCoverage=96%, HitCoverage=17%, E-value=3e-21, Identity=57%"; Hit description =Glutamate decarboxylase
DGWSCKREWHNRRNHEGNPLDXHPTLVTGANVQIFXEKEVKGFDVEVKEAKLHDEYYKIDPLKAYKQIDENTFCVNAILETILNREFEDVVF

SEQ ID NO: 6475 - protein, 158 aa, Glycine max
  misc_feature (119)..(119): Xaa can be any naturally occurring amino acid
  Coding DNA Sequence Number=SeqID_2887
  Gene Ontology: Mol. function=transporter activity; Cellular component= mitochondrial inner membrane; Biological process=transport
  Homolog annotation: Hit_ID=A7PZS6; Match level="QueryCoverage=98%, HitCoverage=44%, E-value=1e-28, Identity=43%"; Hit description =Chromosome chr15 scaffold_40, whole genome shotgun sequence
  Pfam annotation: Domain name=Mito_carr; Domain location=28-119; Score= 27.6; E_value=8.4e-06; Accession=PF00153.17; Description =Mitochondrial carrier protein
SETKVVNLAEEAMLARKRVTAPCYDFTTICKSIVAGGVSGGVSLTETAPLVLLKMLLSVQISYTLDYNGTMQGLHTLWRTDRCCGLFNCNGANSARVVPNSAVNVLRYELASQDVLHYXYEQTWNKGAQLTLSRSMWSGCISSMIGMFVMYARDLLAG

SEQ ID NO: 6476 - protein, 166 aa, Glycine max
  Coding DNA Sequence Number=SeqID_2888
VSFRSNLMRSLKKTASDLGSGNLKKEVSEISERPRHSRCNSEELVDCSDSVLFGSVGSRAPRVPNPPPKPTSSSSPSSPSSVSSGETERRIPPPPPPPPRKPASNAAAAPPPPPPPPPAKAVRVAPAKVRRVPEVVEFVPLPVPGGLACPVRLCLRCRYAGDGERS

SEQ ID NO: 6477 - protein, 148 aa, Glycine max
  misc_feature (86)..(86): Xaa can be any naturally occurring amino acid
  misc_feature (95)..(95): Xaa can be any naturally occurring amino acid
  misc_feature (123)..(123): Xaa can be any naturally occurring amino acid
  Coding DNA Sequence Number=SeqID_2890
  Subcellular localization annotation: CTP_CleavageSite=49; ConfidenceScore=5.40e-01
PKHVSLMSLQRTLSALPCALSFSRTHNRNTYLPTHPAYSHFLSCALPARAAALQVAPRRPPRGACIFHSPVGAHYIARARLHITNXHAATTAIQXPYHCFLTRYILPYNKTCIRCSHSTRLLXSVEQKRENIDALLLRHPSFSPLAER

SEQ ID NO: 6478 - protein, 247 aa, Glycine max
  Coding DNA Sequence Number=SeqID_2892
DCKPEYNMKVIICFLLSFLAVYAAPANDGDGTNEKLEKLFTNVFLISGKNRYENRTVREPDERVLNLKKDNVDVTLSIKERKFFTRKVLMNVTSEMKGNTFFVNATSIYLDAQENGIVQVNGTVDQKPLNETGRISINWKRLKETGIMEKGKFNQIYVTVLSKVPENEGSKPTIKVSGLEELVKHVTDEDIAEALNSQMMKKRQMQEDKFDELDSDSIPRLASEKSYNKHLFIGSFPTFDLNVSINS

SEQ ID NO: 6479 - protein, 425 aa, Glycine max
  misc_feature (67)..(67): Xaa can be any naturally occurring amino acid
  misc_feature (101)..(101): Xaa can be any naturally occurring amino acid
  misc_feature (137)..(137): Xaa can be any naturally occurring amino acid
  misc_feature (146)..(146): Xaa can be any naturally occurring amino acid
  misc_feature (180)..(180): Xaa can be any naturally occurring amino acid
  misc_feature (182)..(182): Xaa can be any naturally occurring amino acid
  misc_feature (190)..(190): Xaa can be any naturally occurring amino acid
  Coding DNA Sequence Number=SeqID_2893
  Homolog annotation: Hit_ID=UPI0001662AB6; Match level="QueryCoverage =25%, HitCoverage=48%, E-value=3e-08, Identity=27%"; Hit description =UPI0001662AB6 related cluster
LNSRSTHCLGRSLSVYIYLYLCLYISLCVCVRVYVYISLLSLSMCLSLYVSLCLSLCAVLCVYIYIXLSLSLSLSLYLCIYICVCLSLSVYIYVSVCRSIXMARDVCIYMYLCVEIYICMEIYIYIYSSLSLCEYSXICTPVYIAXCICITLSVHISVWISVYVCTSLHLGVSLWGCGSXCXAVCEWWCXRVAREGSAPRASAARRRRGRARARAARRAARAAPALARRARPAPRARQGSGASPRARARWLGHGCTGGDREAGGRRGGHCVEAKRKGGRAKPPRREGPRAGTGTRGARAARGEPPGSRPAAGRKLSGPRSAARARPGRASGDYRRRSGESEREEHAQPDHTPPRRGGKRGEPRARRGHTEGQAGERSGAPHQARARGEGRERRRPRTRRARGTEKSGAETQPQRNKTAHADPTRG

SEQ ID NO: 6480 - protein, 41 aa, Glycine max
  Coding DNA Sequence Number=SeqID_2894
LLIQFHAIINLILNHLCIWRRIRTCANRVVCIVYFFFCPSI

SEQ ID NO: 6481 - protein, 105 aa, Glycine max
  misc_feature (29)..(29): Xaa can be any naturally occurring amino acid
  misc_feature (42)..(42): Xaa can be any naturally occurring amino acid
  misc_feature (75)..(75): Xaa can be any naturally occurring amino acid
  Coding DNA Sequence Number=SeqID_2896
  Gene Ontology: Mol. function=histone-lysine N-methyltransferase activity; Cellular component=chromatin; Biological process=chromatin assembly or disassembly
  Homolog annotation: Hit_ID=UPI0000F2E53B; Match level="QueryCoverage =79%, HitCoverage=22%, E-value=4e-14, Identity=44%"; Hit description =PREDICTED: similar to Suppressor of variegation 3-9 homolog 2
  Pfam annotation: Domain name=SET; Domain location=1-77; Score=-6.7; E_ value=0.0081; Accession=PF00856.18; Description=SET domain
MKKLKDIAANFPLVIDAFFYGNHSRFVNXSCWPNMVALAVHXENRDMLLPRIIFFALRDIQPGEELTIDYNCAPXKDLKNTDVLVCLCGAVNCRGYVYEEAREND

SEQ ID NO: 6482 - protein, 48 aa, Glycine max
  Coding DNA Sequence Number=SeqID_2897
  Gene Ontology: Mol. function=hydrogen ion transporting ATP synthase activity, rotational mechanism; Cellular component=proton -transporting two-sector ATPase complex; Biological process=ATP synthesis coupled proton transport
  Homolog annotation: Hit_ID=O23654; Match level="QueryCoverage=100%, HitCoverage=7%, E-value=2e-17, Identity=89%"; Hit description =Vacuolar ATP synthase catalytic subunit A
HRLGDLFYRLVSQKFEDPAEGEAALVAKFKKLYEDLSAGFRALEDETR

SEQ ID NO: 6483 - protein, 61 aa, Glycine max
  Coding DNA Sequence Number=SeqID_2898
LVLGSPLLLHLDLLLCCNYVLLLDVCFLLSSYMLILSSHMHVFLLLWEIVQLYLSVASLCL

SEQ ID NO: 6484 - protein, 151 aa, Glycine max
  misc_feature (2)..(2): Xaa can be any naturally occurring amino acid
  misc_feature (24)..(24): Xaa can be any naturally occurring amino acid
  misc_feature (29)..(29): Xaa can be any naturally occurring amino acid
  misc_feature (107)..(107): Xaa can be any naturally occurring amino acid
  misc_feature (114)..(115): Xaa can be any naturally occurring amino acid
  misc_feature (129)..(129): Xaa can be any naturally occurring amino acid
  misc_feature (141)..(141): Xaa can be any naturally occurring amino acid
  Coding DNA Sequence Number=SeqID_2900
RXSINTSVLYCARMRRGSDIYIVXMYARXRLRVILYADFVSIITSASTYTPRARAMICVCDLYRIRGTTLIRLDDHFLSVDTYTAARARRSVICVSRAACLVYSHLXLRGAPGXXYAALYAIHYMSISXLGTPPHIYYTAXPRFVYLYDSQ

SEQ ID NO: 6485 - protein, 126 aa, Glycine max
  misc_feature (86)..(86): Xaa can be any naturally occurring amino acid
  Coding DNA Sequence Number=SeqID_2902
LTALIILSTDYYSDTRICHRSSSPNIIAYILPLRDRTQSPLSISRLGDNIVRICMQLLLYYAVLRSLTEILKIVIRSRRIATEYTXYSLLSLIYICKCEPLLYPRNCRDVYIAYSHIDRLYRKTIS

SEQ ID NO: 6486 - protein, 120 aa, Glycine max
  misc_feature (21)..(21): Xaa can be any naturally occurring amino acid
  misc_feature (86)..(86): Xaa can be any naturally occurring amino acid
  misc_feature (101)..(101): Xaa can be any naturally occurring amino acid
  Coding DNA Sequence Number=SeqID_2904
  Gene Ontology: Cellular component=chloroplast inner membrane
  Homolog annotation: Hit_ID=A5AZW4; Match level="QueryCoverage=91%, HitCoverage=12%, E-value=4e-11, Identity=40%"; Hit description =Putative uncharacterized protein
  Subcellular localization annotation: CTP_CleavageSite=53; ConfidenceScore=5.73e-01
MAAKISQLACFSSTNRQFHFXNRSFPSLRFRPESFVVRSVVDGNSSETPASLRYAAEVSKPFVEKTSTVDETTTGKEVITESVEEXLASSQCKRAEKIHDXCFRIPYGGLAHERRIAPNV

SEQ ID NO: 6487 - protein, 224 aa, Glycine max
  misc_feature (131)..(131): Xaa can be any naturally occurring amino acid
  misc_feature (166)..(166): Xaa can be any naturally occurring amino acid
  misc_feature (185)..(185): Xaa can be any naturally occurring amino acid
  misc_feature (206)..(206): Xaa can be any naturally occurring amino acid
  misc_feature (208)..(209): Xaa can be any naturally occurring amino acid
  Coding DNA Sequence Number=SeqID_2905
  Gene Ontology: Mol. function=phenylalanine-tRNA ligase activity; Cellular component=cytoplasm; Biological process=tRNA aminoacylation for protein translation
  Homolog annotation: Hit_ID=A7QLE2; Match level="QueryCoverage=93%, HitCoverage=61%, E-value=2e-96, Identity=80%"; Hit description =Chromosome chr11 scaffold_118, whole genome shotgun sequence
  Pfam annotation: Domain name=tRNA-synt_2d; Domain location=1-178; Score=44.4; E_value=4.7e-18; Accession=PF01409.10; Description=tRNA synthetases class II core domain (F)
DTYYIDPHTVLRCHTSAHQAELLRSEYTHFLVTGDVYRRDSIDSTHYPVFHQMEGFRVFVPEEWEGSGMDATLFAATDLKQCLEGLARHLFGAVEMRWVDTYFPFTNPSFELEIYFKEKWLEVLGCGVTEXEILKRNGKPNKVAWAFGLGLERLALVLFDIPDIRXFWSNDERFTSPVSKGQLGXVKFKPFPEASSWYKDMSLWIXDXXTAPLPDGRPRRPRRG

SEQ ID NO: 6488 - protein, 154 aa, Glycine max
  misc_feature (16)..(16): Xaa can be any naturally occurring amino acid
  misc_feature (27)..(27): Xaa can be any naturally occurring amino acid
  misc_feature (51)..(52): Xaa can be any naturally occurring amino acid
  misc_feature (74)..(74): Xaa can be any naturally occurring amino acid
  misc_feature (106)..(107): Xaa can be any naturally occurring amino acid
  misc_feature (114)..(114): Xaa can be any naturally occurring amino acid
  misc_feature (124)..(124): Xaa can be any naturally occurring amino acid
  Coding DNA Sequence Number=SeqID_2906
YMLLYIIYDLLSRSSXPDILFIISTSXTLTRHTDTHHHTPYYPISHTHTHXXSTLASPPLPTPPDTLNTIVLLXTHNTSAIHTILDNYNNVSTNNIHYILKFILPXXTYYLLLXYCTYSIIYSXLYYYHNIYILIFSYYYYHYSYSFTSSIYIY

SEQ ID NO: 6489 - protein, 110 aa, Glycine max
  misc_feature (1)..(51): Xaa can be any naturally occurring amino acid
  Coding DNA Sequence Number=SeqID_2908
XXXXXXXXXXXXXXXXXXXXXXXXXXXXXXXXXXXXXXXXXXXXXXXXXXXRGTKAGSTLGGKDFFLFRRGPSIWKGSSNRAKGFLVFGVSAFVRVPLGVFTDIGGFFKF

SEQ ID NO: 6490 - protein, 135 aa, Glycine max
  Coding DNA Sequence Number=SeqID_2910
KASWSYLSMDVPELQHQTIAFLWALLNGDDIKYRVKLRREIKFFILRFNEYKDHWKNQTLELFVAFLASVLFHQGKVMFEGLQESEKEEVRGCKEYLEDHKTTLSDKGKYFAERITSFLEPLLLERREVEDQDEA

SEQ ID NO: 6491 - protein, 144 aa, Glycine max
  misc_feature (33)..(33): Xaa can be any naturally occurring amino acid
  misc_feature (71)..(71): Xaa can be any naturally occurring amino acid
  misc_feature (96)..(96): Xaa can be any naturally occurring amino acid
  misc_feature (99)..(99): Xaa can be any naturally occurring amino acid
  misc_feature (138)..(138): Xaa can be any naturally occurring amino acid
  Coding DNA Sequence Number=SeqID_2912
SLYTCTYVASHTRLSQHRGSLQGLERIVSTLPXNVIYEHTHTTLSKTCHMSDKLTITSPDLYPPYVYYCMXSYISSLVFCYSSYLLTRSLYAIHCXDYXIMAISADRLLIRLRRDLLFYSIYICILSQCLRRYSTHVXVCIIRA

SEQ ID NO: 6492 - protein, 210 aa, Glycine max
  Coding DNA Sequence Number=SeqID_2914
KNDTPDAINLNPISALFAQIERPMSLFPILTASLLFLFCVPAPTAAADGDLPTASNLLHTLQLPRPDSSPTGLLSHRSGPHPRGSFPPPISDQVAVASPSTPPPLITPNRPTPAPSPSPTVLASPPRTPKVLTGGPQPSSFPGTPSRPRPPPPARRPSLRTANHTKPSHLFPPHIETITHNTTIKTLLKFILSARHFSTTQSHHPHTSGT

SEQ ID NO: 6493 - protein, 145 aa, Glycine max
  misc_feature (51)..(145): Xaa can be any naturally occurring amino acid
  Coding DNA Sequence Number=SeqID_2916
LRDRQAPVYKGGNLCGPQWFLWIPRRRGGTQFYIMGSPRGVFYFPRERGEXXXXXXXXXXXXXXXXXXXXXXXXXXXXXXXXXXXXXXXXXXXXXXXXXXXXXXXXXXXXXXXXXXXXXXXXXXXXXXXXXXXXXXXXXXXXXXX

SEQ ID NO: 6494 - protein, 62 aa, Glycine max
  Coding DNA Sequence Number=SeqID_2917
LILSTAYVLALLVCLNQFIFSNTSQECQHTNQLLGYHGNHSCLFHHHSKPLMGLIPNLKLRH

SEQ ID NO: 6495 - protein, 96 aa, Glycine max
  misc_feature (91)..(91): Xaa can be any naturally occurring amino acid
  Coding DNA Sequence Number=SeqID_2919
HPSKHPTSSGAWALLRGYAPFSSAYIYHPIISIRNSEYIRHWRVSRATYYHYTQYYKEENETSKITNSRSDETQQIRIHKTREYNVEGTAXIWFLF

SEQ ID NO: 6496 - protein, 120 aa, Glycine max
  misc_feature (10)..(10): Xaa can be any naturally occurring amino acid
  misc_feature (26)..(27): Xaa can be any naturally occurring amino acid
  misc_feature (37)..(38): Xaa can be any naturally occurring amino acid
  misc_feature (40)..(40): Xaa can be any naturally occurring amino acid
  misc_feature (42)..(42): Xaa can be any naturally occurring amino acid
  misc_feature (45)..(45): Xaa can be any naturally occurring amino acid
  misc_feature (52)..(52): Xaa can be any naturally occurring amino acid
  misc_feature (83)..(83): Xaa can be any naturally occurring amino acid
  misc_feature (88)..(89): Xaa can be any naturally occurring amino acid
  misc_feature (92)..(92): Xaa can be any naturally occurring amino acid
  misc_feature (98)..(98): Xaa can be any naturally occurring amino acid
  misc_feature (107)..(110): Xaa can be any naturally occurring amino acid
  misc_feature (112)..(115): Xaa can be any naturally occurring amino acid
  Coding DNA Sequence Number=SeqID_2921
FVSIPATGRXDTNRVMLWAFCGISGXXSCCPDLCVLXXVXLXYLXGGDIQPXPLSCLLLSIRTILTIQYLSLCERGVSSAQSXHTIRXXHSXLRCVCXGCEVDIIIXXXXKXXXXGAHTT

SEQ ID NO: 6497 - protein, 65 aa, Glycine max
  Coding DNA Sequence Number=SeqID_2923
FTLYNSRLYGRICSVYLQEYIYIQFKTKIICDNQTSNNNNNNNKTNLPPHKKKKKKKENSSKVTL

SEQ ID NO: 6498 - protein, 185 aa, Glycine max
  misc_feature (50)..(50): Xaa can be any naturally occurring amino acid
  misc_feature (114)..(114): Xaa can be any naturally occurring amino acid
  misc_feature (151)..(151): Xaa can be any naturally occurring amino acid
  misc_feature (154)..(154): Xaa can be any naturally occurring amino acid
  Coding DNA Sequence Number=SeqID_2925
PFHFSLSVLLWLDSNLELISGHMKCYRSVPKTHPALPYNLMSLVRINPPXTATQLYHKQISLAGITQQRSNSTHPNFCIANSKGNTLPSHSGCLCHTVERIPYNAKYRSKTATXVGSSWDTHETHSGRLIERQLDQVVYASHIIYSECVYXLVXSAPCISYIINPLLGQTATTQYSILHSSSLRA

SEQ ID NO: 6499 - protein, 104 aa, Glycine max
  misc_feature (10)..(10): Xaa can be any naturally occurring amino acid
  misc_feature (20)..(20): Xaa can be any naturally occurring amino acid
  misc_feature (31)..(31): Xaa can be any naturally occurring amino acid
  misc_feature (34)..(34): Xaa can be any naturally occurring amino acid
  misc_feature (47)..(47): Xaa can be any naturally occurring amino acid
  misc_feature (56)..(56): Xaa can be any naturally occurring amino acid
  misc_feature (65)..(65): Xaa can be any naturally occurring amino acid
  misc_feature (79)..(80): Xaa can be any naturally occurring amino acid
  misc_feature (86)..(86): Xaa can be any naturally occurring amino acid
  misc_feature (90)..(90): Xaa can be any naturally occurring amino acid
  misc_feature (97)..(98): Xaa can be any naturally occurring amino acid
  misc_feature (100)..(100): Xaa can be any naturally occurring amino acid
  misc_feature (102)..(104): Xaa can be any naturally occurring amino acid
  Coding DNA Sequence Number=SeqID_2927
CFSSVALLSXYCSHAPFSTXYCAALGDRRAXECXTRRERCRPSLGSXAYTLLYNLXGIRRIHMYXLISIRRMSRYIYYXXHQNVIXSTSXLTARSYXXHXAXXX

SEQ ID NO: 6500 - protein, 203 aa, Glycine max
  misc_feature (35)..(35): Xaa can be any naturally occurring amino acid
  misc_feature (68)..(68): Xaa can be any naturally occurring amino acid
  misc_feature (83)..(83): Xaa can be any naturally occurring amino acid
  Coding DNA Sequence Number=SeqID_2929
  Gene Ontology: Mol. function=alpha,alpha-trehalose-phosphate synthase (UDP-forming) activity; Cellular component=alpha,alpha-trehalose -phosphate synthase complex (UDP-forming); Biological process =trehalose biosynthetic process
  Homolog annotation: Hit_ID=A7PC59; Match level="QueryCoverage=90%, HitCoverage=22%, E-value=5e-67, Identity=68%"; Hit description =Chromosome chr2 scaffold_11, whole genome shotgun sequence
LLRNVNRRRRREKINNILRTHPFTQKKSMLPESEXIWCSPSLIGAIQVNPWNIDSVTKAMDSALMGPXAEKQMPTDKHYRYVXTHQVAYWARTFLQDLERACREHLMRRCWGIGYGLGLLVIALDPNFRKLSVEHIDSTYKRTNHRALLLDYDGTMEHPVSMSTTPNAEAVSILNILCRDTKNHVFIVSVRERKTLTDWISSC

SEQ ID NO: 6501 - protein, 315 aa, Glycine max
  Coding DNA Sequence Number=SeqID_2930
  Gene Ontology: Mol. function=6'-deoxychalcone synthase activity; Cellular component=apical plasma membrane; Biological process =flavonoid biosynthetic process
  Homolog annotation: Hit_ID=P26690; Match level="QueryCoverage=100%, HitCoverage=100%, E-value=1e-180, Identity=100%"; Hit description =NAD(P)H-dependent 6'-deoxychalcone synthase
  Pfam annotation: Domain name=Aldo_ket_red; Domain location=14-295; Score=432.8; E_value=4.8e-127; Accession=PF00248.11; Description =Aldoketo reductase family
MAAAIEIPTIVFPNSSAQQRMPVVGMGSAPDFTCKKDTKEAIIEAVKQGYRHFDTAAAYGSEQALGEALKEAIHLGLVSRQDLFVTSKLWVTENHPHLVLPALRKSLKTLQLEYLDLYLIHWPLSSQPGKFSFPIEVEDLLPFDVKGVWESMEECQKLGLTKAIGVSNFSVKKLQNLLSVATIRPVVDQVEMNLAWQQKKLREFCKENGIIVTAFSPLRKGASRGPNEVMENDVLKEIAEAHGKSIAQVSLRWLYEQGVTFVPKSYDKERMNQNLHIFDWALTEQDHHKISQISQSRLISGPTKPQLADLWDDQI

SEQ ID NO: 6502 - protein, 118 aa, Glycine max
  misc_feature (64)..(64): Xaa can be any naturally occurring amino acid
  Coding DNA Sequence Number=SeqID_2931
  Gene Ontology: Cellular component=ribonucleoprotein complex
  Homolog annotation: Hit_ID=Q9SIK2; Match level="QueryCoverage=87%, HitCoverage=95%, E-value=2e-12, Identity=42%"; Hit description=40S ribosomal protein S25-2
  Pfam annotation: Domain name=Ribosomal_S25; Domain location=12-117; Score=77.3; E_value=5e-20; Accession=PF03297.5; Description=S25 ribosomal protein
  Subcellular localization annotation: CTP_CleavageSite=38; ConfidenceScore=5.12e-01
RCSSSQQSFSTTAKKKNIVPPSSYNANYCGGGQQKKKKCSKGQQEEKVNIMVFVDQASYDNLFXDANKFIIITSFIFYGRRSINGSLSRNISRDMMNKGIIRMFSPHSKQQIYSRTHH

SEQ ID NO: 6503 - protein, 112 aa, Glycine max
  Coding DNA Sequence Number=SeqID_2932
INIPRVPRGHAISPLILEYKCITCLSIESGRNTAQNNQYDYQLAVLRMSREEYKQASALNGLWSHARRLTITITTTRRSIRRGRAHRGAREGGRKQRTKICTHPLSFPLVGR

SEQ ID NO: 6504 - protein, 108 aa, Glycine max
  misc_feature (66)..(66): Xaa can be any naturally occurring amino acid
  Coding DNA Sequence Number=SeqID_2934
  Gene Ontology: Mol. function=1-deoxy-D-xylulose-5-phosphate synthase activity; Biological process=terpenoid biosynthetic process
  Homolog annotation: Hit_ID=Q6EJC9; Match level="QueryCoverage=99%, HitCoverage=14%, E-value=5e-28, Identity=66%"; Hit description=1 -deoxy-D-xylulose 5-phosphate synthase
SLLEHHGLRATVADARFCKTLYRSLIRSLAQSHEVLITVQDGSIGGLRSLVAQLMALDGLLDGTSXRWPNVPPDCYIVPGTPADQLSASEGTPFDITYTGWNLLRPTC

SEQ ID NO: 6505 - protein, 135 aa, Glycine max
  misc_feature (6)..(6): Xaa can be any naturally occurring amino acid
  misc_feature (20)..(20): Xaa can be any naturally occurring amino acid
  misc_feature (37)..(37): Xaa can be any naturally occurring amino acid
  misc_feature (104)..(104): Xaa can be any naturally occurring amino acid
  Coding DNA Sequence Number=SeqID_2935
QLRNTXEASHKPLHHHVKIXDRNPHRAQPIVLNLQHXRHYRTPTKTSNTRININFPPLHVSFTSNIMQTYAERHEPPYKYNRKSSTRLGGSLAALSNTRSGAKXFIAAYLTEYACCHSSLSHDKLISYLTQHKHR

SEQ ID NO: 6506 - protein, 135 aa, Glycine max
  misc_feature (7)..(7): Xaa can be any naturally occurring amino acid
  misc_feature (112)..(112): Xaa can be any naturally occurring amino acid
  misc_feature (123)..(123): Xaa can be any naturally occurring amino acid
  Coding DNA Sequence Number=SeqID_2937
VTSEAEXGRMRTIVVPLIIINQHSDTCTCTCDVLHSTHRERAVIYVSDSLIYTAHCVSGWWSQCRLSVYYIRMYYTDGQSLYLLLQHTYHSRHYHLSTCVWLGMYGLSGITXFSITSDSSMRXPHRDTHTVIHIE

SEQ ID NO: 6507 - protein, 185 aa, Glycine max
  misc_feature (21)..(21): Xaa can be any naturally occurring amino acid
  misc_feature (82)..(83): Xaa can be any naturally occurring amino acid
  misc_feature (87)..(87): Xaa can be any naturally occurring amino acid
  misc_feature (102)..(103): Xaa can be any naturally occurring amino acid
  misc_feature (113)..(113): Xaa can be any naturally occurring amino acid
  misc_feature (127)..(128): Xaa can be any naturally occurring amino acid
  misc_feature (138)..(138): Xaa can be any naturally occurring amino acid
  misc_feature (157)..(157): Xaa can be any naturally occurring amino acid
  misc_feature (159)..(159): Xaa can be any naturally occurring amino acid
  misc_feature (167)..(167): Xaa can be any naturally occurring amino acid
  misc_feature (170)..(170): Xaa can be any naturally occurring amino acid
  misc_feature (176)..(178): Xaa can be any naturally occurring amino acid
  misc_feature (182)..(182): Xaa can be any naturally occurring amino acid
  Coding DNA Sequence Number=SeqID_2939
SAPRQHREHRHGARGALLTFXHEMYDESDDASHSARVRLLTSYRMFCICCRYHARTYSADAMLHRAKASGDARRLTRDQESXXGKKXVARAPRQTCDGHCRXXLRGRGSYSLXTYRLPLLPLQLSLXXLGGTERRLSXSAVVCGARPLRAVRVVCVXSXGSCVVAGXRRXAVRGRXXXRGVXGAT

SEQ ID NO: 6508 - protein, 96 aa, Glycine max
  Coding DNA Sequence Number=SeqID_2941
  Gene Ontology: Mol. function=nucleic acid binding; Biological process= DNA integration
  Homolog annotation: Hit_ID=Q2R2J2; Match level="QueryCoverage=88%, HitCoverage=10%, E-value=6e-13, Identity=45%"; Hit description =Retrotransposon protein, putative, unclassified
MSEPTGLAEAFEKLAKILEESKSGAIVPRQEVAQKIELSPMDMKLEGATNYLSWSRRALLAVEQKELDGHLLGAVAEPGDKTTVEGNEMVCWLKKK

SEQ ID NO: 6509 - protein, 107 aa, Glycine max
  misc_feature (57)..(57): Xaa can be any naturally occurring amino acid
  Coding DNA Sequence Number=SeqID_2942
ISIIVRTTPPFYTSINHDSIRICTVSSYPILSTYPTSALSARSPIVGHDGGSRGRGXLRGVIHGHLQILITSLLQTEYVAALLGERWNLYVLLKYTLDFSCIDTRCV

SEQ ID NO: 6510 - protein, 96 aa, Glycine max
  Coding DNA Sequence Number=SeqID_2944
  Subcellular localization annotation: CTP_CleavageSite=57; ConfidenceScore=5.13e-01
EGWGGPFLLTLKLCFNRVLLNLPWGKTRDWPKNWFKGTFLVFFSNSGPPVGNFFSPRLFYTRPPWGGLKESFWVIGVKIFPVLFGFLPRGPPSLGN

SEQ ID NO: 6511 - protein, 130 aa, Glycine max
  misc_feature (5)..(5): Xaa can be any naturally occurring amino acid
  misc_feature (12)..(12): Xaa can be any naturally occurring amino acid
  Coding DNA Sequence Number=SeqID_2945
  Subcellular localization annotation: CTP_CleavageSite=39; ConfidenceScore=5.32e-01
RFLIXVPGGRKXRTHIVASRTIDNSSRTRNAFGRPTLVPAALSNEGISCLRVGVRLPEEALFDCFEQPNLHGKVFLLVDVGLSFPGQCRKDLIPKQCPAHQVEFRADEAGKFRLAPKQLNHRWTGTDAPG

SEQ ID NO: 6512 - protein, 158 aa, Glycine max
  misc_feature (16)..(16): Xaa can be any naturally occurring amino acid
  misc_feature (63)..(63): Xaa can be any naturally occurring amino acid
  misc_feature (76)..(76): Xaa can be any naturally occurring amino acid
  misc_feature (98)..(98): Xaa can be any naturally occurring amino acid
  Coding DNA Sequence Number=SeqID_2946
LIHDVQILLVLCAPRXHPTILLSSTPLPYNRLCAAHSQHTTINRPQTTYQQHDAIITRRNPDXTTHSWGKLHTHYXMYRCSRVCLFLLIYCSDSACRXRSLDPLRVALTQAGQSSLPRRTYRSSFYKYIHPTLSSHNYSLYLITTCYEREHPPHTHAI

SEQ ID NO: 6513 - protein, 108 aa, Glycine max
  Coding DNA Sequence Number=SeqID_2948
  Subcellular localization annotation: CTP_CleavageSite=44; ConfidenceScore=5.36e-01
TIRTTFSPPNPANRQSPSSSLSPPASHRNPLRPRTEERRDGRVPASGEGADHGGEGGGAQGRQVRRRLRQEDVEQGQGHPALIDPFIASPRLFVSLRSSTLVASCTTA

SEQ ID NO: 6514 - protein, 151 aa, Glycine max
  misc_feature (142)..(142): Xaa can be any naturally occurring amino acid
  Coding DNA Sequence Number=SeqID_2950
  Gene Ontology: Cellular component=chloroplast
  Homolog annotation: Hit_ID=A9PJV2; Match level="QueryCoverage=41%, HitCoverage=28%, E-value=2e-22, Identity=82%"; Hit description =Putative uncharacterized protein
  Subcellular localization annotation: CTP_CleavageSite=51; ConfidenceScore=5.56e-01
MVLLVLSTLPRAPYGAAASTSSPTPSIHPRPRRHPLAVARCSARLTPPPTAAATGREAAASWAGKLAGAVPWKAAVSSALALTLSFSCFVGLANAKAGVNKPELLPKEFTTVIDVAGFLSSGQENRLRQEIEDLEKDTGYKXRVLAQNYPD

SEQ ID NO: 6515 - protein, 146 aa, Glycine max
  misc_feature (41)..(41): Xaa can be any naturally occurring amino acid
  misc_feature (49)..(49): Xaa can be any naturally occurring amino acid
  misc_feature (59)..(59): Xaa can be any naturally occurring amino acid
  misc_feature (63)..(63): Xaa can be any naturally occurring amino acid
  misc_feature (79)..(79): Xaa can be any naturally occurring amino acid
  Coding DNA Sequence Number=SeqID_2951
  Gene Ontology: Mol. function=structural constituent of ribosome; Cellular component=intracellular; Biological process=translation
  Homolog annotation: Hit_ID=A9P9G9; Match level="QueryCoverage=87%, HitCoverage=80%, E-value=3e-25, Identity=55%"; Hit description =Putative uncharacterized protein
  Pfam annotation: Domain name=Ribosomal_L28e; Domain location=5-139; Score=56.7; E_value=7.8e-14; Accession=PF01778.7; Description =Ribosomal L28e protein family
MSTVPGQLIWEIVKKNNSFLVKEFGRGTQSVQFSREPNNLXNLNTFKYXPGLANPENCXLFNXAGKAPSGFLATARPKXRSSGPAALLHKSVMKKGVSVRMGKRLVPKIKGEGSQRHNYYRPDSSKGAAFWQGLEAAVQIGEPLRG

SEQ ID NO: 6516 - protein, 122 aa, Glycine max
  misc_feature (34)..(40): Xaa can be any naturally occurring amino acid
  misc_feature (42)..(44): Xaa can be any naturally occurring amino acid
  misc_feature (92)..(92): Xaa can be any naturally occurring amino acid
  Coding DNA Sequence Number=SeqID_2952
RRAGDVTLTRGADWPAYLYLSDINLIECGRPHQXXXXXXXTXXXNTTNIPTHLLMKITPHPMHHKAVTALTPPLHPCACTDHAPTPDPPISXKVNKLNQNKRSGPVRGTAMSRRDAYREVCR

SEQ ID NO: 6517 - protein, 103 aa, Glycine max
  misc_feature (3)..(3): Xaa can be any naturally occurring amino acid
  misc_feature (5)..(5): Xaa can be any naturally occurring amino acid
  misc_feature (19)..(19): Xaa can be any naturally occurring amino acid
  misc_feature (27)..(27): Xaa can be any naturally occurring amino acid
  misc_feature (50)..(50): Xaa can be any naturally occurring amino acid
  misc_feature (55)..(56): Xaa can be any naturally occurring amino acid
  misc_feature (61)..(62): Xaa can be any naturally occurring amino acid
  misc_feature (75)..(75): Xaa can be any naturally occurring amino acid
  Coding DNA Sequence Number=SeqID_2953
LEXCXVCLCTTFLELKLLXPQQFMSPXLPFSVRCGVGGKVLPPSLVYHLXLPLKXXVKGIXXENIGHKFDYEKDXASHSYAALSVLIRNLACCLCLLIIFEKP

SEQ ID NO: 6518 - protein, 193 aa, Glycine max
  misc_feature (1)..(1): Xaa can be any naturally occurring amino acid
  Coding DNA Sequence Number=SeqID_2955
XCQFITLLLAPSFESRERERERCWVQLVARSKQADPGGAERSGDGGLGAGRGRDGALRAADAGAAVPAAGAGPDRGLRQHAHRRPRHPHPRRHLLRPHHHLPHRHRGPHLRRLDPTPTPLRRTSPPCVPMKLCCPGGGFSYYYRLYCTYCVVGTFYYCLLHLGGQRNKYGLLFAWLGFRLRWLPVAWRSPSLG

SEQ ID NO: 6519 - protein, 188 aa, Glycine max
  misc_feature (123)..(123): Xaa can be any naturally occurring amino acid
  misc_feature (125)..(127): Xaa can be any naturally occurring amino acid
  Coding DNA Sequence Number=SeqID_2956
  Gene Ontology: Mol. function=sulfuric ester hydrolase activity; Biological process=metabolic process
  Homolog annotation: Hit_ID=Q0UNW7; Match level="QueryCoverage=91%, HitCoverage=27%, E-value=3e-68, Identity=72%"; Hit description =Putative uncharacterized protein
FVDLAGGQVDERLPLDGSSLHDYLVSDKPGKDEVFGEYMGEGTVTPTYMIRRNQWKFTYSLVDGPQLYNLVEDPQELQDLATSTEPQNQKMLAKFEAEAREKWDFKTIHNDVVRSQRMRHSCXAXXXKIGRKESWDYQPPANDKDRFIRSHIPLDELERRARFPIVDYLGREKSASASHHGLAGAKGQ

SEQ ID NO: 6520 - protein, 176 aa, Glycine max
  Coding DNA Sequence Number=SeqID_2957
IYISMQSNSTKIQGFEVLSFEGVELTRTKGDNNFFVDVGTLFVLYFQESVRFILNLNEWSYCLLKRLPVTSSSRTNMKQRTYTLPAEDGFYMLKVSKIPHPEAIQNFETILEHCTSFSYQGEEEFGVQKDMSSRERIGEYLEDAGYHQLSASERIKRKFAQMTDKISRPFTKGYQG

SEQ ID NO: 6521 - protein, 118 aa, Glycine max
  misc_feature (5)..(5): Xaa can be any naturally occurring amino acid
  misc_feature (10)..(10): Xaa can be any naturally occurring amino acid
  misc_feature (17)..(17): Xaa can be any naturally occurring amino acid
  misc_feature (34)..(34): Xaa can be any naturally occurring amino acid
  misc_feature (70)..(70): Xaa can be any naturally occurring amino acid
  misc_feature (74)..(76): Xaa can be any naturally occurring amino acid
  misc_feature (81)..(81): Xaa can be any naturally occurring amino acid
  misc_feature (102)..(102): Xaa can be any naturally occurring amino acid
  Coding DNA Sequence Number=SeqID_2959
  Subcellular localization annotation: CTP_CleavageSite=82; ConfidenceScore=5.15e-01
PRPRXLSSIXRSSPHLXYSHRVSVIYLSHSCRFXIYTHPNLFSADYTVSNSCNAVTTTISTTPLTTLPAXMRMXXXSLYGXCVAYIPSVDLSDTLHGAVQKXVYDGVVALSHILALVS

SEQ ID NO: 6522 - protein, 189 aa, Glycine max
  misc_feature (72)..(72): Xaa can be any naturally occurring amino acid
  misc_feature (122)..(122): Xaa can be any naturally occurring amino acid
  misc_feature (140)..(140): Xaa can be any naturally occurring amino acid
  misc_feature (187)..(187): Xaa can be any naturally occurring amino acid
  Coding DNA Sequence Number=SeqID_2961
LRAATIHVLLLFSLSPACCSLCLCYVVVFYVREPDANAPAHYERHNRARDRIDAIFAILDRSIPTTVYYVLXAYAPRAYDARYSHASARIDLRAYRAVAGIPFTSLLGDTVSRTARLRPSLXTRISTNIRQLPISTLTLXCVTHYIAPIPHSISYSVCTAARIAVLATAACISNILDLTHIHSLLAXTQ

SEQ ID NO: 6523 - protein, 139 aa, Glycine max
  misc_feature (5)..(5): Xaa can be any naturally occurring amino acid
  misc_feature (7)..(7): Xaa can be any naturally occurring amino acid
  misc_feature (9)..(11): Xaa can be any naturally occurring amino acid
  misc_feature (13)..(14): Xaa can be any naturally occurring amino acid
  misc_feature (16)..(16): Xaa can be any naturally occurring amino acid
  misc_feature (18)..(18): Xaa can be any naturally occurring amino acid
  misc_feature (23)..(23): Xaa can be any naturally occurring amino acid
  misc_feature (25)..(25): Xaa can be any naturally occurring amino acid
  misc_feature (28)..(28): Xaa can be any naturally occurring amino acid
  misc_feature (30)..(30): Xaa can be any naturally occurring amino acid
  misc_feature (40)..(40): Xaa can be any naturally occurring amino acid
  misc_feature (47)..(48): Xaa can be any naturally occurring amino acid
  misc_feature (52)..(55): Xaa can be any naturally occurring amino acid
  misc_feature (57)..(57): Xaa can be any naturally occurring amino acid
  misc_feature (62)..(65): Xaa can be any naturally occurring amino acid
  misc_feature (67)..(67): Xaa can be any naturally occurring amino acid
  misc_feature (69)..(70): Xaa can be any naturally occurring amino acid
  misc_feature (75)..(77): Xaa can be any naturally occurring amino acid
  misc_feature (85)..(85): Xaa can be any naturally occurring amino acid
  misc_feature (91)..(91): Xaa can be any naturally occurring amino acid
  misc_feature (98)..(98): Xaa can be any naturally occurring amino acid
  misc_feature (100)..(100): Xaa can be any naturally occurring amino acid
  misc_feature (105)..(105): Xaa can be any naturally occurring amino acid
  misc_feature (108)..(108): Xaa can be any naturally occurring amino acid
  misc_feature (110)..(110): Xaa can be any naturally occurring amino acid
  misc_feature (112)..(113): Xaa can be any naturally occurring amino acid
  misc_feature (117)..(118): Xaa can be any naturally occurring amino acid
  misc_feature (128)..(128): Xaa can be any naturally occurring amino acid
  misc_feature (132)..(134): Xaa can be any naturally occurring amino acid
  misc_feature (138)..(138): Xaa can be any naturally occurring amino acid
  Coding DNA Sequence Number=SeqID_2963
ALSLXHXTXXXQXXHXSXRSTFXLXVVXVXCHDSYDSCTXHTIVDSXXLHDXXXXSXRVSSXXXXLXLXXLSIRXXXNALLTSRXRLSLLXSTHISHXSXRLTMXSAXLXTXXALSXXSLHTISSSHXSCNXXXAVKXD

SEQ ID NO: 6524 - protein, 144 aa, Glycine max
  misc_feature (22)..(22): Xaa can be any naturally occurring amino acid
  misc_feature (43)..(43): Xaa can be any naturally occurring amino acid
  misc_feature (100)..(102): Xaa can be any naturally occurring amino acid
  misc_feature (122)..(122): Xaa can be any naturally occurring amino acid
  misc_feature (127)..(127): Xaa can be any naturally occurring amino acid
  misc_feature (130)..(131): Xaa can be any naturally occurring amino acid
  Coding DNA Sequence Number=SeqID_2965
TNPHPISSPIDPRLVEPFFPTXSDADLREDLTGQNITLEVESXGTMNNGRQDQEQGGFPRNRKALSSLEKTWGKGHLLGIKFEGTPPPPGGSPRGGGGGXXXENNLPPGEKKKTPPLPPRGXREKKXHPXXPPPGGGGNSPPPF

SEQ ID NO: 6525 - protein, 136 aa, Glycine max
  misc_feature (119)..(119): Xaa can be any naturally occurring amino acid
  Coding DNA Sequence Number=SeqID_2967
  Gene Ontology: Mol. function=protein serine/threonine kinase activity; Cellular component=intrinsic to membrane; Biological process=regulation of transcription, DNA-dependent
  Homolog annotation: Hit_ID=A7QNF6; Match level="QueryCoverage=100%, HitCoverage=41%, E-value=8e-47, Identity=44%"; Hit description =Chromosome chr2 scaffold_132, whole genome shotgun sequence
GKGARSASGRFICHVFFRRRQKPVCQEGSEGRAVYCKAHGGGRRCEFLGCTKSAQGRTDYCIAHGGGLRCSHECYTPAAIRKSGLCIPHCRRNRSSIENCSKSAQSPSCLWISHGGWRXCQVPVCTKEAHGITMFC

SEQ ID NO: 6526 - protein, 71 aa, Glycine max
  Coding DNA Sequence Number=SeqID_2968
QLLLTVTLIGLLSPAYSNPWRNIVSLDSASSTTQIVFFYVDTSGDSYSQAMLAFYISKDTCLLLSITDSRN

SEQ ID NO: 6527 - protein, 142 aa, Glycine max
  misc_feature (4)..(5): Xaa can be any naturally occurring amino acid
  misc_feature (112)..(112): Xaa can be any naturally occurring amino acid
  Coding DNA Sequence Number=SeqID_2970
  Subcellular localization annotation: CTP_CleavageSite=74; ConfidenceScore=5.40e-01
TRRXXRTAPPQLTLASRATRRSDDDVSSCSVCSMRVVSLCQRCRFSTALRDAVYRVCYSLYPPSGSSSQHYLTRLVMISNDAQYIVYCRVTHVRISYIHINTDTLAYCSPRXFMTSIEAFMHTLYEFISHLDHTEYADQHEP

SEQ ID NO: 6528 - protein, 127 aa, Glycine max
  Coding DNA Sequence Number=SeqID_2972
HHITKKSKINTINLIYAPFPLQPTLIVPVMFFLLPPPAYPILSHTFLQTPPPTRSLYPPLHHGQINPAHFPRRLPGFHSRLTYDPARQHPPARRNIHQTAAHTRAPAVAAHDWPRLWIASLPFTISP

SEQ ID NO: 6529 - protein, 88 aa, Glycine max
  misc_feature (11)..(11): Xaa can be any naturally occurring amino acid
  misc_feature (13)..(13): Xaa can be any naturally occurring amino acid
  misc_feature (63)..(63): Xaa can be any naturally occurring amino acid
  Coding DNA Sequence Number=SeqID_2974
WSDSVHAAPTXTXTPVLLYIRHFLIYHSVTSISDHRILVRAPSIRYIITDLIPTPSTHNYCLXISPHAALLSCSSLFPALLQHHYIVV

SEQ ID NO: 6530 - protein, 128 aa, Glycine max
  misc_feature (1)..(4): Xaa can be any naturally occurring amino acid
  misc_feature (6)..(14): Xaa can be any naturally occurring amino acid
  misc_feature (17)..(17): Xaa can be any naturally occurring amino acid
  misc_feature (19)..(23): Xaa can be any naturally occurring amino acid
  misc_feature (25)..(25): Xaa can be any naturally occurring amino acid
  misc_feature (27)..(27): Xaa can be any naturally occurring amino acid
  misc_feature (29)..(29): Xaa can be any naturally occurring amino acid
  misc_feature (31)..(31): Xaa can be any naturally occurring amino acid
  misc_feature (33)..(33): Xaa can be any naturally occurring amino acid
  misc_feature (36)..(36): Xaa can be any naturally occurring amino acid
  misc_feature (45)..(45): Xaa can be any naturally occurring amino acid
  misc_feature (48)..(48): Xaa can be any naturally occurring amino acid
  misc_feature (53)..(53): Xaa can be any naturally occurring amino acid
  misc_feature (105)..(106): Xaa can be any naturally occurring amino acid
  misc_feature (109)..(109): Xaa can be any naturally occurring amino acid
  misc_feature (111)..(113): Xaa can be any naturally occurring amino acid
  misc_feature (117)..(117): Xaa can be any naturally occurring amino acid
  Coding DNA Sequence Number=SeqID_2976
  Subcellular localization annotation: CTP_CleavageSite=63; ConfidenceScore=5.05e-01
XXXXFXXXXXXXXXFFXLXXXXXNXNXKXQXNXTPXPQAPRDGRXPGXRRADXQRGSRETRRRVETRRGRRIGEIDGIQGRFVIARRLSPVSPKEEKLKAHTTSXXYIXVXXXLRCXLQTDPTHRQHA

SEQ ID NO: 6531 - protein, 152 aa, Glycine max
  misc_feature (11)..(11): Xaa can be any naturally occurring amino acid
  misc_feature (80)..(80): Xaa can be any naturally occurring amino acid
  misc_feature (112)..(112): Xaa can be any naturally occurring amino acid
  Coding DNA Sequence Number=SeqID_2977
YTLHQYTLVAXLFGFESSDVTISRISVILYNSYISFSPLRSGSSLPRVILNTPPDNADGDCQPSPFIFSDPPILKLNALXEDIRRTEINVLCHHMLGLPSHLILVTDSRPFXITTHNLTDAPLSLHDTDPPPTIAHHALRCAPRAVWRPMLV

SEQ ID NO: 6532 - protein, 166 aa, Glycine max
  misc_feature (74)..(74): Xaa can be any naturally occurring amino acid
  misc_feature (106)..(106): Xaa can be any naturally occurring amino acid
  misc_feature (116)..(116): Xaa can be any naturally occurring amino acid
  misc_feature (125)..(125): Xaa can be any naturally occurring amino acid
  misc_feature (165)..(165): Xaa can be any naturally occurring amino acid
  Coding DNA Sequence Number=SeqID_2979
LDLYIDQHGSRRITLIHCEREHTAARKRFDSACVRAPAVDSIRCALQAVSIDRRSIGDRRAAAVPTAHSDRRSXRYLDSIITVADCSTHYPLLSPSHVYQYNRTIXRHIIAICSAXVYLCLTRRXRASVTIDVYSVCVVQQLIIDTLVSCLRDTQSVYVSASYYXM

SEQ ID NO: 6533 - protein, 92 aa, Glycine max
  misc_feature (5)..(5): Xaa can be any naturally occurring amino acid
  misc_feature (7)..(12): Xaa can be any naturally occurring amino acid
  misc_feature (63)..(65): Xaa can be any naturally occurring amino acid
  Coding DNA Sequence Number=SeqID_2981
SNSIXIXXXXXXLVTHPPTFINTTHTHPIPHRIHHRSAFSSPIISRDYLYPAKRVIITRGDKXXXISDVFYCALLIFREHLANTTYIYNTTH

SEQ ID NO: 6534 - protein, 126 aa, Glycine max
  misc_feature (36)..(36): Xaa can be any naturally occurring amino acid
  misc_feature (49)..(49): Xaa can be any naturally occurring amino acid
  misc_feature (59)..(59): Xaa can be any naturally occurring amino acid
  misc_feature (67)..(67): Xaa can be any naturally occurring amino acid
  misc_feature (74)..(74): Xaa can be any naturally occurring amino acid
  misc_feature (79)..(80): Xaa can be any naturally occurring amino acid
  misc_feature (88)..(88): Xaa can be any naturally occurring amino acid
  misc_feature (111)..(111): Xaa can be any naturally occurring amino acid
  misc_feature (123)..(123): Xaa can be any naturally occurring amino acid
  Coding DNA Sequence Number=SeqID_2983
RRLTSLLSYATPHYLRPTLPSINSSHYDYVFVIQYXSIYDTNSDITRSXPRYTRRRRRXPGLAGRAXCTGLTRXAVDAXXHYSMITLXRDICCTHVTHHDDLTLLYSVQYXAIHHFSTSVYHXYTR

SEQ ID NO: 6535 - protein, 121 aa, Glycine max
  misc_feature (12)..(12): Xaa can be any naturally occurring amino acid
  misc_feature (20)..(20): Xaa can be any naturally occurring amino acid
  misc_feature (26)..(26): Xaa can be any naturally occurring amino acid
  misc_feature (73)..(73): Xaa can be any naturally occurring amino acid
  misc_feature (85)..(85): Xaa can be any naturally occurring amino acid
  misc_feature (97)..(98): Xaa can be any naturally occurring amino acid
  misc_feature (113)..(113): Xaa can be any naturally occurring amino acid
  Coding DNA Sequence Number=SeqID_2985
RCKILCDICYYXHDTERRIXSYEFRXLLTCLMCVVPMCSSSTWCRRSLILLLIGMYAYPVSASLVTTVLTFLXYYITYTLVTLSXLTYHYDTPCYCXXVYRCRVSTISRRVRXNTRDTEIS

SEQ ID NO: 6536 - protein, 162 aa, Glycine max
  misc_feature (121)..(121): Xaa can be any naturally occurring amino acid
  Coding DNA Sequence Number=SeqID_1343
  Gene Ontology: Mol. function=structural constituent of ribosome; Cellular component=ribonucleoprotein complex; Biological process =translation
  Homolog annotation: Hit_ID=A9NU91; Match level="QueryCoverage=78%, HitCoverage=49%, E-value=4e-21, Identity=46%"; Hit description =Putative uncharacterized protein
  Pfam annotation: Domain name=Ribosomal_S6e; Domain location=34-162; Score=85.4; E_value=1.9e-22; Accession=PF01092.9; Description =Ribosomal protein S6e
  Subcellular localization annotation: CTP_CleavageSite=44; ConfidenceScore=5.16e-01
LSSPPHPTAPAAPPPAAPPLPIARPATVRRDSPLKFKIAHPTPRCEKKVESDDDMRLRDPYDKRISQEVVGDLLCEGFESYIFKIIGGGEMRGAPMKQEVRTPGSWSPFCFTWRRPSFLGXGRRVGGRGRKSVRGCFASQALSVINLVIVRRGRMSLLALLT

SEQ ID NO: 6537 - protein, 187 aa, Glycine max
  misc_feature (2)..(2): Xaa can be any naturally occurring amino acid
  misc_feature (6)..(7): Xaa can be any naturally occurring amino acid
  misc_feature (11)..(12): Xaa can be any naturally occurring amino acid
  misc_feature (16)..(17): Xaa can be any naturally occurring amino acid
  misc_feature (30)..(30): Xaa can be any naturally occurring amino acid
  misc_feature (32)..(32): Xaa can be any naturally occurring amino acid
  misc_feature (34)..(34): Xaa can be any naturally occurring amino acid
  misc_feature (68)..(68): Xaa can be any naturally occurring amino acid
  misc_feature (96)..(97): Xaa can be any naturally occurring amino acid
  misc_feature (108)..(108): Xaa can be any naturally occurring amino acid
  misc_feature (113)..(114): Xaa can be any naturally occurring amino acid
  misc_feature (128)..(128): Xaa can be any naturally occurring amino acid
  misc_feature (135)..(135): Xaa can be any naturally occurring amino acid
  misc_feature (145)..(145): Xaa can be any naturally occurring amino acid
  misc_feature (148)..(148): Xaa can be any naturally occurring amino acid
  misc_feature (159)..(159): Xaa can be any naturally occurring amino acid
  misc_feature (163)..(163): Xaa can be any naturally occurring amino acid
  misc_feature (173)..(173): Xaa can be any naturally occurring amino acid
  misc_feature (175)..(176): Xaa can be any naturally occurring amino acid
  misc_feature (186)..(186): Xaa can be any naturally occurring amino acid
  Coding DNA Sequence Number=SeqID_1344
SXSRSXXLFSXXPGCXXRRCGRPLIYSTRXVXEXIGVGRLLCRRGEAMQTSTPSLHAPTRGRGGCALXYSYHRHRHYTLVPYVLSVLLHRTGLRRXXLSGVLTSVVFXVVWWXXLVRSAGAPRVRHVXAFAHIGXSIARGTRRAXVAXAHHRLSQYARXDTRXSADVRRCSVXAXXDAMRGGVGEXT

SEQ ID NO: 6538 - protein, 257 aa, Glycine max
  misc_feature (204)..(204): Xaa can be any naturally occurring amino acid
  Coding DNA Sequence Number=SeqID_1345
  Homolog annotation: Hit_ID=Q9C5N4; Match level="QueryCoverage=95%, HitCoverage=54%, E-value=3e-89, Identity=65%"; Hit description =Putative uncharacterized protein At1g55680
MAQQQEDEMEYVADDNEMAEVEDDMYFRGRVFGDSESESDDDDEYDSMENRMTDTSAAEARKGKDIQGIPWDRLSISREKYRQTRLEQYKNYENIPQSGEQSEKECTPTHRGGKYYDFWQNTRSVKSTILHFQLRNLVWATSKHDAYLVSSYSIIHWSSLNSKRSEILNVSGHVAPCEKHPGSLLEGFTQTQISTLAVRDKLLXAGGFQGELICKYVDRPGVSFCSRTTYEDNAITNAVEIYEHPRYFFSSFLLSFC

SEQ ID NO: 6539 - protein, 144 aa, Glycine max
  misc_feature (135)..(135): Xaa can be any naturally occurring amino acid
  Coding DNA Sequence Number=SeqID_1346
  Homolog annotation: Hit_ID=A0MDY3; Match level="QueryCoverage=97%, HitCoverage=97%, E-value=9e-14, Identity=33%"; Hit description =Putative uncharacterized protein
  Pfam annotation: Domain name=Self-incomp_S1; Domain location=24-142; Score=12.1; E_value=8e-05; Accession=PF05938.2; Description=Plant self-incompatibility protein S1
MNNFLAFLLVITMCYGLNEACKTSRIVISNGIWEGIPLEIHCYSWGRETRDWGTQTIPYNSSVSFEFVAVLNKKRRTKYVCDLWYQDAIEPYLKIKHYPMLEVFRAGHTRKCGQFREWGTGKHGIYFRRKYSQRXGWALYWFTL

SEQ ID NO: 6540 - protein, 77 aa, Glycine max
  misc_feature (2)..(2): Xaa can be any naturally occurring amino acid
  misc_feature (6)..(6): Xaa can be any naturally occurring amino acid
  misc_feature (17)..(17): Xaa can be any naturally occurring amino acid
  misc_feature (21)..(21): Xaa can be any naturally occurring amino acid
  misc_feature (27)..(27): Xaa can be any naturally occurring amino acid
  Coding DNA Sequence Number=SeqID_1347
VXERSXYQYVRDDVRTXITHXSRDVTXSIILVRRISVLWRTVDSSRTRTRLVYFFSVASSCISYICDEYISAHSRLS

SEQ ID NO: 6541 - protein, 86 aa, Glycine max
  misc_feature (53)..(54): Xaa can be any naturally occurring amino acid
  misc_feature (85)..(85): Xaa can be any naturally occurring amino acid
  Coding DNA Sequence Number=SeqID_1349
DHHEPTQTHHESATRRRETTSRTSDTQQSHHQPYRYISSKHGDIIGSGRMGVXXCEKYYVVRVCCWLCVCVYFLSLTLCRFLFVXS

SEQ ID NO: 6542 - protein, 142 aa, Glycine max
  misc_feature (5)..(5): Xaa can be any naturally occurring amino acid
  misc_feature (73)..(73): Xaa can be any naturally occurring amino acid
  misc_feature (84)..(84): Xaa can be any naturally occurring amino acid
  misc_feature (100)..(100): Xaa can be any naturally occurring amino acid
  misc_feature (117)..(117): Xaa can be any naturally occurring amino acid
  misc_feature (119)..(120): Xaa can be any naturally occurring amino acid
  misc_feature (126)..(126): Xaa can be any naturally occurring amino acid
  misc_feature (129)..(129): Xaa can be any naturally occurring amino acid
  misc_feature (139)..(140): Xaa can be any naturally occurring amino acid
  Coding DNA Sequence Number=SeqID_1351
  Subcellular localization annotation: CTP_CleavageSite=95; ConfidenceScore=5.08e-01
HQHAXYSPSAPLSYVRITMVLFCSAHTGCARLVLWLRNSHCHVGFTRDTSIICLTRRVASSSSSYLSPPTTLXLRYRVVDSDTXPHSLLILTPIRCSERXVPRQQCSLIVCSHLRRXRXXSHPRPXSSXYSCRECLPCXXWL

SEQ ID NO: 6543 - protein, 157 aa, Glycine max
  misc_feature (14)..(15): Xaa can be any naturally occurring amino acid
  misc_feature (122)..(123): Xaa can be any naturally occurring amino acid
  Coding DNA Sequence Number=SeqID_1353
  Homolog annotation: Hit_ID=Q1RSI3; Match level="QueryCoverage=98%, HitCoverage=14%, E-value=3e-55, Identity=66%"; Hit description =Contains similarity to Chlamydia outer membrane protein , related
NAIEQVIMEIQNIXXSEPPALLDKCKPHLAQFLAGLVHMEISESDDDAKSCAVWELYHLLLKERHWALSHLAITAFGYFASHTRCNKLWRFVPEDAALSYDTVSGVESDQQRFMVEFGKFLXXEIALLTLEPSPEQLDLLGREGFVLKQMVQKISAT

SEQ ID NO: 6544 - protein, 114 aa, Glycine max
  misc_feature (41)..(41): Xaa can be any naturally occurring amino acid
  misc_feature (48)..(48): Xaa can be any naturally occurring amino acid
  misc_feature (69)..(69): Xaa can be any naturally occurring amino acid
  misc_feature (76)..(76): Xaa can be any naturally occurring amino acid
  misc_feature (90)..(90): Xaa can be any naturally occurring amino acid
  misc_feature (109)..(109): Xaa can be any naturally occurring amino acid
  Coding DNA Sequence Number=SeqID_2987
DECRASQKSNIIQIEIDAHYDKYELMNAVRLDVFLFALRDXNTTPRHXATTHRWKALLTRRVTTHNDTXRDIYAFXLLLRYALSLFRCVXLDMQHNMYHLTHTLTTRVXNRNRD

SEQ ID NO: 6545 - protein, 109 aa, Glycine max
  Coding DNA Sequence Number=SeqID_289
  Gene Ontology: Mol. function=cysteine-type peptidase activity; Cellular component=cytoplasm; Biological process=ubiquitin-dependent protein catabolic process
  Homolog annotation: Hit_ID=Q6ZIC7; Match level="QueryCoverage=99%, HitCoverage=14%, E-value=4e-31, Identity=63%"; Hit description =Ubiquitin carboxyl-terminal hydrolase
  Pfam annotation: Domain name=UCH; Domain location=2-104; Score=-80.8; E_value=0.044; Accession=PF00443.19; Description=Ubiquitin carboxyl -terminal hydrolase
IPFKRYSNDLSKLRGHVSFKEILHLGPFMDPRSEDKDNCSYRLVGVIEHEGHQINGGHYIAYVRGAGHNHQSSGSSSWVRASDLDIKEVSLEKVLGREAYMLFYERMED

SEQ ID NO: 6546 - protein, 89 aa, Glycine max
  Coding DNA Sequence Number=SeqID_290
LLMAFKYHYYYFSSEGQSGLKQTETEFLKIIRKKEKHKKKTETTFQQKNNLMGRMRLAGISYEASTKQKPKWCPNSNKVQTKLHFSLTN

SEQ ID NO: 6547 - protein, 55 aa, Glycine max
  Coding DNA Sequence Number=SeqID_292
  Homolog annotation: Hit_ID=A7UQT0; Match level="QueryCoverage=49%, HitCoverage=3%, E-value=4e-07, Identity=88%"; Hit description =Peptidase aspartic, active site; Oligopeptide transporter OPT superfamily
MANCESKDLKFSSYNLFNLMLCLLIPGLNIITEYLFGIIYPGRSIANVCFKTLVI

SEQ ID NO: 6548 - protein, 69 aa, Glycine max [sequence omitted]

SEQ ID NO: 6549 - protein, 142 aa, Glycine max
  misc_feature (20)..(20): Xaa can be any naturally occurring amino acid
  misc_feature (26)..(27): Xaa can be any naturally occurring amino acid
  misc_feature (39)..(39): Xaa can be any naturally occurring amino acid
  misc_feature (44)..(44): Xaa can be any naturally occurring amino acid
  misc_feature (125)..(125): Xaa can be any naturally occurring amino acid
  misc_feature (138)..(138): Xaa can be any naturally occurring amino acid
  Coding DNA Sequence Number=SeqID_294
GLFMYWSLFNFLILISSCSXVREEVXXSGRGGIEVGREXVVTEXGKERGRKASGWSVGVHARHVVDGSTVRRGPPMSLTPMRCSPYLACLTIRTVVGRDAEPNYHTYSCTQGTQHSHASPHRDLXCAVDMILRGTSHXHDES

SEQ ID NO: 6550 - protein, 112 aa, Glycine max
  misc_feature (2)..(3): Xaa can be any naturally occurring amino acid
  misc_feature (6)..(7): Xaa can be any naturally occurring amino acid
  misc_feature (31)..(31): Xaa can be any naturally occurring amino acid
  misc_feature (33)..(35): Xaa can be any naturally occurring amino acid
  misc_feature (82)..(82): Xaa can be any naturally occurring amino acid
  misc_feature (104)..(104): Xaa can be any naturally occurring amino acid
  Coding DNA Sequence Number=SeqID_296
FXXGCXXVIVGGDEGRWALFALKPSRTRLVXEXXXSRVGEYKGAAPASHRAGVHAARATMINVCCVIRSRWSVRRGNPRTFXLLSLLLRLCLGGEVCCEIILIXSVFCGAPR

SEQ ID NO: 6551 - protein, 166 aa, Glycine max
  misc_feature (89)..(89): Xaa can be any naturally occurring amino acid
  misc_feature (162)..(162): Xaa can be any naturally occurring amino acid
  Coding DNA Sequence Number=SeqID_298
  Gene Ontology: Mol. function=isopentenyl-diphosphate delta-isomerase activity; Cellular component=peroxisome; Biological process =chlorophyll biosynthetic process
  Homolog annotation: Hit_ID=Q42553; Match level="QueryCoverage=90%, HitCoverage=52%, E-value=2e-75, Identity=92%"; Hit description =Isopentenyl-diphosphate Delta-isomerase II
LPLSSLRSVSVPISQRKLPTFRAFSGTAMTADAKDAGMDAVQRRLMFEDECILVDETDRVVGHDSKYNCHLMENIEAKNLLHRAFSVFXFNSNYELLLQQRSKAKVTFPLVWTNTCCSHPLYRESELIEENTLGVRNAAQRKLLDELGIVAEDVPVDEFTPXGRML

SEQ ID NO: 6552 - protein, 153 aa, Glycine max
  misc_feature (4)..(5): Xaa can be any naturally occurring amino acid
  misc_feature (12)..(12): Xaa can be any naturally occurring amino acid
  misc_feature (35)..(36): Xaa can be any naturally occurring amino acid
  misc_feature (41)..(41): Xaa can be any naturally occurring amino acid
  misc_feature (62)..(62): Xaa can be any naturally occurring amino acid
  misc_feature (64)..(65): Xaa can be any naturally occurring amino acid
  misc_feature (70)..(70): Xaa can be any naturally occurring amino acid
  misc_feature (72)..(72): Xaa can be any naturally occurring amino acid
  misc_feature (88)..(88): Xaa can be any naturally occurring amino acid
  misc_feature (98)..(98): Xaa can be any naturally occurring amino acid
  misc_feature (101)..(101): Xaa can be any naturally occurring amino acid
  misc_feature (104)..(104): Xaa can be any naturally occurring amino acid
  misc_feature (109)..(109): Xaa can be any naturally occurring amino acid
  misc_feature (123)..(124): Xaa can be any naturally occurring amino acid
  misc_feature (141)..(141): Xaa can be any naturally occurring amino acid
  Coding DNA Sequence Number=SeqID_299
YTTXXLDIYTRXISITHRTINHTTDSASAPHIRIXXQSTPXYADIDDSNETQHHRLSTTRMXIXXHHTVXLXQYMTRLHNDDHTYNDXYDDLSNCVRXTTXTSXYIIDXTEPTERDVAVTIEXXTRISMTYIQISHLYSMXRSSFVIQITIIY

SEQ ID NO: 6553 - protein, 134 aa, Glycine max
  misc_feature (4)..(4): Xaa can be any naturally occurring amino acid
  misc_feature (37)..(37): Xaa can be any naturally occurring amino acid
  misc_feature (43)..(43): Xaa can be any naturally occurring amino acid
  misc_feature (50)..(50): Xaa can be any naturally occurring amino acid
  misc_feature (62)..(62): Xaa can be any naturally occurring amino acid
  misc_feature (71)..(71): Xaa can be any naturally occurring amino acid
  misc_feature (126)..(126): Xaa can be any naturally occurring amino acid
  Coding DNA Sequence Number=SeqID_2989
RDEXGQYHRHHLAHRGADRADQDTHKHRMQERRICIXHLIVTXCASHNVXRARRRRHDARRXSANRLITLXNSHSAITARAWRYVITVCTTRSSNPPMPHRRSIVHCIHCVSPLHILIIEHIWVWXEVGDREEI

SEQ ID NO: 6554 - protein, 146 aa, Glycine max
  misc_feature (2)..(2): Xaa can be any naturally occurring amino acid
  misc_feature (9)..(9): Xaa can be any naturally occurring amino acid
  misc_feature (11)..(11): Xaa can be any naturally occurring amino acid
  misc_feature (18)..(20): Xaa can be any naturally occurring amino acid
  misc_feature (29)..(31): Xaa can be any naturally occurring amino acid
  misc_feature (42)..(42): Xaa can be any naturally occurring amino acid
  misc_feature (54)..(54): Xaa can be any naturally occurring amino acid
  misc_feature (56)..(56): Xaa can be any naturally occurring amino acid
  misc_feature (58)..(58): Xaa can be any naturally occurring amino acid
  misc_feature (62)..(62): Xaa can be any naturally occurring amino acid
  misc_feature (64)..(64): Xaa can be any naturally occurring amino acid
  misc_feature (71)..(72): Xaa can be any naturally occurring amino acid
  misc_feature (75)..(75): Xaa can be any naturally occurring amino acid
  misc_feature (79)..(79): Xaa can be any naturally occurring amino acid
  misc_feature (81)..(81): Xaa can be any naturally occurring amino acid
  misc_feature (84)..(84): Xaa can be any naturally occurring amino acid
  misc_feature (91)..(91): Xaa can be any naturally occurring amino acid
  misc_feature (99)..(99): Xaa can be any naturally occurring amino acid
  misc_feature (102)..(102): Xaa can be any naturally occurring amino acid
  misc_feature (104)..(104): Xaa can be any naturally occurring amino acid
  misc_feature (107)..(107): Xaa can be any naturally occurring amino acid
  misc_feature (113)..(114): Xaa can be any naturally occurring amino acid
  misc_feature (119)..(121): Xaa can be any naturally occurring amino acid
  misc_feature (124)..(124): Xaa can be any naturally occurring amino acid
  misc_feature (133)..(133): Xaa can be any naturally occurring amino acid
  misc_feature (139)..(139): Xaa can be any naturally occurring amino acid
  misc_feature (143)..(143): Xaa can be any naturally occurring amino acid
  misc_feature (146)..(146): Xaa can be any naturally occurring amino acid
  Coding DNA Sequence Number=SeqID_2991
  Subcellular localization annotation: CTP_CleavageSite=21; ConfidenceScore=5.12e-01
AXRRWLQYXSXLYLSRAXXXSVSRRACSXXXFLRMSSHQRLXYIITRRCVVVSXSXPXAQQXPXICDCRVXXCGXIRHXYXTSXVYQRSRXDVDRLISXASXSXSVXSCIITXXSRPHXXXRAXTFVECSAEXSSTMSXRWGXVSX

SEQ ID NO: 6555 - protein, 97 aa, Glycine max
  misc_feature (2)..(2): Xaa can be any naturally occurring amino acid
  misc_feature (10)..(10): Xaa can be any naturally occurring amino acid
  misc_feature (14)..(14): Xaa can be any naturally occurring amino acid
  misc_feature (34)..(34): Xaa can be any naturally occurring amino acid
  misc_feature (52)..(52): Xaa can be any naturally occurring amino acid
  misc_feature (91)..(91): Xaa can be any naturally occurring amino acid
  Coding DNA Sequence Number=SeqID_2993
AXSKTDTADXLISXSMGAKRYMIYMMLYLIYASXARCGLPSSPLRLRLANVXVVHALCVPLSCICLCGSLHCRCAWPHSRAVSCARVAWWXWWVGRR

SEQ ID NO: 6556 - protein, 62 aa, Glycine max
  Coding DNA Sequence Number=SeqID_2995
LVPGNTMTWPRLAKPCFTQLNRLEPHACLNNWRNTKKALARSSFLTHMQHQWPMPPDAAFSN

SEQ ID NO: 6557 - protein, 84 aa, Glycine max
  Coding DNA Sequence Number=SeqID_2997
PKYSVNLLCLISLSLCLLHLQVVPETLEPSLQLAAAVLAQVTIMLFEQIYCPNELFNVLAFYYYSHLMITTPFIVVKYYVRFLL

SEQ ID NO: 6558 - protein, 184 aa, Glycine max
  misc_feature (2)..(2): Xaa can be any naturally occurring amino acid
  misc_feature (11)..(11): Xaa can be any naturally occurring amino acid
  misc_feature (30)..(30): Xaa can be any naturally occurring amino acid
  misc_feature (49)..(49): Xaa can be any naturally occurring amino acid
  misc_feature (51)..(53): Xaa can be any naturally occurring amino acid
  misc_feature (56)..(57): Xaa can be any naturally occurring amino acid
  misc_feature (59)..(59): Xaa can be any naturally occurring amino acid
  misc_feature (62)..(63): Xaa can be any naturally occurring amino acid
  misc_feature (66)..(66): Xaa can be any naturally occurring amino acid
  misc_feature (75)..(77): Xaa can be any naturally occurring amino acid
  misc_feature (81)..(81): Xaa can be any naturally occurring amino acid
  misc_feature (91)..(91): Xaa can be any naturally occurring amino acid
  misc_feature (95)..(97): Xaa can be any naturally occurring amino acid
  misc_feature (101)..(101): Xaa can be any naturally occurring amino acid
  misc_feature (103)..(103): Xaa can be any naturally occurring amino acid
  misc_feature (107)..(107): Xaa can be any naturally occurring amino acid
  misc_feature (112)..(112): Xaa can be any naturally occurring amino acid
  misc_feature (114)..(114): Xaa can be any naturally occurring amino acid
  misc_feature (117)..(117): Xaa can be any naturally occurring amino acid
  misc_feature (121)..(122): Xaa can be any naturally occurring amino acid
  misc_feature (128)..(128): Xaa can be any naturally occurring amino acid
  misc_feature (130)..(130): Xaa can be any naturally occurring amino acid
  misc_feature (132)..(133): Xaa can be any naturally occurring amino acid
  misc_feature (139)..(140): Xaa can be any naturally occurring amino acid
  misc_feature (142)..(145): Xaa can be any naturally occurring amino acid
  misc_feature (152)..(153): Xaa can be any naturally occurring amino acid
  misc_feature (157)..(159): Xaa can be any naturally occurring amino acid
  misc_feature (161)..(162): Xaa can be any naturally occurring amino acid
  misc_feature (176)..(177): Xaa can be any naturally occurring amino acid
  misc_feature (180)..(180): Xaa can be any naturally occurring amino acid
  misc_feature (182)..(182): Xaa can be any naturally occurring amino acid
  misc_feature (184)..(184): Xaa can be any naturally occurring amino acid
  Coding DNA Sequence Number=SeqID_2999
AXDATARRARXALCCRRTDAGGGGALISAXWVWVLGVVLCVVLRSSPPXPXXXMYXXSXSAXXGVXPLCAAPLSXXXYTSXSFWPTRHTTXRAAXXXANHXGXTPPXCSTFXFXLLXDGAXXACALLXSXTXXSQRGAXXPXXXXESHAAIXXVIIXXXLXXRAKRRGSVNKAHRXXACXRXVX

SEQ ID NO: 6559 - protein, 138 aa, Glycine max
  misc_feature (23)..(23): Xaa can be any naturally occurring amino acid
  misc_feature (37)..(37): Xaa can be any naturally occurring amino acid
  misc_feature (78)..(78): Xaa can be any naturally occurring amino acid
  misc_feature (109)..(109): Xaa can be any naturally occurring amino acid
  misc_feature (119)..(119): Xaa can be any naturally occurring amino acid
  misc_feature (134)..(134): Xaa can be any naturally occurring amino acid
  Coding DNA Sequence Number=SeqID_3001
ADNACTQHDRNTDMLGETTEYAXLYSFASALSILLFXLLLSRPRFCLMLAAVVSPSSSPLSTTISIYIIRLTLTYEYXCRYERRTFTETERLERSVAILVCREHVYELXTDMMGVTTRXLALLYRVGECYSLDXARGY

SEQ ID NO: 6560 - protein, 101 aa, Glycine max
  misc_feature (18)..(18): Xaa can be any naturally occurring amino acid
  misc_feature (51)..(51): Xaa can be any naturally occurring amino acid
  misc_feature (56)..(56): Xaa can be any naturally occurring amino acid
  misc_feature (63)..(63): Xaa can be any naturally occurring amino acid
  misc_feature (95)..(95): Xaa can be any naturally occurring amino acid
  Coding DNA Sequence Number=SeqID_3003
  Subcellular localization annotation: CTP_CleavageSite=88; ConfidenceScore=5.02e-01
SSLDAQDRDTATYIAHYXPALRVRRMRTLLLSSYPSSIRLHRSVRFYIVTXARVLXFLSALYXSHSSHLYSLVPRAPRLVCLVPFIVRLSSPRRXIAVGLK

SEQ ID NO: 6561 - protein, 101 aa, Glycine max
  Coding DNA Sequence Number=SeqID_3005
SSFLIMCARAAYTQIGNRSVEERGWLSIMCNYPEQRAVTQTRHTLAPQHRSWTLIIYRSACLHSRPTPPNTRRRRHTRATTPRSAPTPSKLTHHSSSHLRI

SEQ ID NO: 6562 - protein, 144 aa, Glycine max
  misc_feature (19)..(19): Xaa can be any naturally occurring amino acid
  misc_feature (78)..(79): Xaa can be any naturally occurring amino acid
  misc_feature (83)..(84): Xaa can be any naturally occurring amino acid
  misc_feature (94)..(94): Xaa can be any naturally occurring amino acid
  misc_feature (112)..(112): Xaa can be any naturally occurring amino acid
  Coding DNA Sequence Number=SeqID_3007
KIDNVCDDTHIQTYSSNNXHIFTYCSIVRHLPLSFDVACSHTSSQRYTNACAQTNMPRTLLYRSPSPPIHCLISILLXXTDFXXDYPSFAYLSXCLFSRTTVLTRLTRSAHXMSIDRTDVHTIPTIANTLLLLITLHLRQTLLS

SEQ ID NO: 6563 - protein, 115 aa, Glycine max
  misc_feature (11)..(11): Xaa can be any naturally occurring amino acid
  misc_feature (27)..(27): Xaa can be any naturally occurring amino acid
  misc_feature (33)..(33): Xaa can be any naturally occurring amino acid
  misc_feature (38)..(38): Xaa can be any naturally occurring amino acid
  misc_feature (48)..(48): Xaa can be any naturally occurring amino acid
  misc_feature (58)..(58): Xaa can be any naturally occurring amino acid
  misc_feature (75)..(75): Xaa can be any naturally occurring amino acid
  Coding DNA Sequence Number=SeqID_3009
HKRHQTHHRMXGRGSLRVVRQHKGNLXKDNVRXPLSTXDRAHPIPIQXICWALRGEPXHKARVDRTTLQKTKQTXPCCRTIQSERDATLEYKNIYLVCRSASRNNREVGHLLVFP

SEQ ID NO: 6564 - protein, 243 aa, Glycine max
  misc_feature (23)..(23): Xaa can be any naturally occurring amino acid
  misc_feature (237)..(237): Xaa can be any naturally occurring amino acid
  Coding DNA Sequence Number=SeqID_3011
PALFFLLSLPTSCLMCVCLIYLXSITIFLYIQYLYLICLLTLSFLLPLIFSSLISLSLFFYFLLQIKHLPHLLTSTLHTHYHTTTHNRRLQPHPTLTAIVLHLSTPPHTTHRTLHLPCSIFAVVPTPLLTTIPAYPSTTSTPFCVLFHCAPYSTLPAFPRSLLLLFSPLSFFLSLSLYPYLASHYSIHQYFISPENISLFPFSNLPRATPPWAVRSSTSPLPSYPSPFLAISDSPPXGGHNIS

SEQ ID NO: 6565 - protein, 141 aa, Glycine max
  misc_feature (37)..(37): Xaa can be any naturally occurring amino acid
  Coding DNA Sequence Number=SeqID_3013
  Gene Ontology: Mol. function=metal ion binding; Cellular component =nucleus; Biological process=ubiquitin-dependent protein catabolic process
  Homolog annotation: Hit_ID=Q84JL3; Match level="QueryCoverage=97%, HitCoverage=42%, E-value=4e-43, Identity=65%"; Hit description=E3 ubiquitin-protein ligase SINAT3
  Pfam annotation: Domain name=Sina; Domain location=44-141; Score= -32.6; E_value=9.4e-05; Accession=PF03145.7; Description=Seven in absentia protein family
ARGTNSMYPPIHLCHNSAHTILHAGVQRGAPGRCPPXNKNLIFFRCRPLKKGITYVNSPELLSLMAEIFFFYIKLKHETTCYFISYSCPYAGSECSVVGDIPFLVAHLRDDHKVDMHTGCTFNHRYVKSNPREVKNATWML

SEQ ID NO: 6566 - protein, 100 aa, Glycine max
  Coding DNA Sequence Number=SeqID_3014
  Gene Ontology: Mol. function=U6 snRNA binding; Cellular component =ribonucleoprotein complex; Biological process=mRNA metabolic process
  Homolog annotation: Hit_ID=A2YRT3; Match level="QueryCoverage=93%, HitCoverage=95%, E-value=4e-41, Identity=89%"; Hit description =Putative uncharacterized protein
  Pfam annotation: Domain name=LSM; Domain location=9-82; Score=89.3; E_ value=1.2e-23; Accession=PF01423.12; Description=LSM domain
MAGRKETALDLAKFVDKGVQVKLTGGRQVTGTLKGYDQLLNLVLDEAVESEREQDDPLKLSTKTRQLGLIVCRGTAVMLVSPTDGTDEIANPFLAAEGAS

SEQ ID NO: 6567 - protein, 122 aa, Glycine max
  misc_feature (7)..(7): Xaa can be any naturally occurring amino acid
  misc_feature (27)..(27): Xaa can be any naturally occurring amino acid
  misc_feature (100)..(100): Xaa can be any naturally occurring amino acid
  misc_feature (113)..(113): Xaa can be any naturally occurring amino acid
  Coding DNA Sequence Number=SeqID_3015
CVCSFVXVCCCCRSARSMRASIDNSMXSTHHTLFLYCRVLCLLYMLFYINDQTFSSLQFVATGGVSYAVHASSLLLIFSLSLLIHLCISATLCRLSFITXHADTRRSRTHVHXLVMLCCCCV

SEQ ID NO: 6568 - protein, 77 aa, Glycine max
  misc_feature (21)..(21): Xaa can be any naturally occurring amino acid
  misc_feature (23)..(23): Xaa can be any naturally occurring amino acid
  misc_feature (32)..(32): Xaa can be any naturally occurring amino acid
  misc_feature (34)..(34): Xaa can be any naturally occurring amino acid
  misc_feature (36)..(36): Xaa can be any naturally occurring amino acid
  misc_feature (47)..(47): Xaa can be any naturally occurring amino acid
  misc_feature (56)..(56): Xaa can be any naturally occurring amino acid
  misc_feature (64)..(64): Xaa can be any naturally occurring amino acid
  Coding DNA Sequence Number=SeqID_3017
HRERYYRRSTADKTTRGPTDXPXLSVQTLAAXEXYXGSSLSLHPLRXQQRAAKHRXEDIWSTIXCGCGCAATVFSIG

SEQ ID NO: 6569 - protein, 72 aa, Glycine max
  Coding DNA Sequence Number=SeqID_3019
  Gene Ontology: Mol. function=metal ion binding; Cellular component =nucleus; Biological process=regulation of transcription, DNA -dependent
  Homolog annotation: Hit_ID=A5BHU8; Match level="QueryCoverage=94%, HitCoverage=7%, E-value=2e-11, Identity=50%"; Hit description =Putative uncharacterized protein
GKLKQLSRQCRASQQKEAYAGLQTAMFYSPVILSMVSTAIVCMWVTSLFKSSPRVFYIFPPFIWESLEYGAR

SEQ ID NO: 6570 - protein, 133 aa, Glycine max
  Coding DNA Sequence Number=SeqID_3020
GRYDSASRDGHTDDHVMPYPSDRNKISKDLRLLSHTVVCAPRTSTWSHTRYITCCCNSSRAAYVSPLCFLSMPQFLSVRQGCVEVIYRSDALHACVPHGRCAGIDSGRGIVGRLLCSVTTRARGSGVDAVVMM

SEQ ID NO: 6571 - protein, 248 aa, Glycine max
  misc_feature (55)..(55): Xaa can be any naturally occurring amino acid
  misc_feature (184)..(185): Xaa can be any naturally occurring amino acid
  misc_feature (228)..(228): Xaa can be any naturally occurring amino acid
  Coding DNA Sequence Number=SeqID_3022
  Gene Ontology: Mol. function=transferase activity; Cellular component= endoplasmic reticulum; Biological process=attachment of GPI anchor to protein
  Homolog annotation: Hit_ID=A7QN57; Match level="QueryCoverage=97%, HitCoverage=41%, E-value=8e-91, Identity=67%"; Hit description =Chromosome undetermined scaffold_130, whole genome shotgun sequence
DVEGSVRSEFMRDGAGGRIVLSFSLLNADPRDWIYDWNFREIDETLLRPVIEALXPIANITVESQVLYHTPKSSFSNWDDKHGSHMFRTEDLPFFVNSNEWHLDTSVAAGGRSKVLQLVVYIPSAKECPLQLELPSGEISKTNGFISPMWGGVVVWNPRSCIKDLESRDPVRHTIPSQESPEAXXEVLMGQLRQLLGLKSDNLYVGKSGASILLGRGKSFTKWEWDCXSTKPICLKLQAFASTLGMRF

SEQ ID NO: 6572 - protein, 97 aa, Glycine max
  misc_feature (52)..(52): Xaa can be any naturally occurring amino acid
  misc_feature (54)..(54): Xaa can be any naturally occurring amino acid
  misc_feature (69)..(69): Xaa can be any naturally occurring amino acid
  misc_feature (72)..(72): Xaa can be any naturally occurring amino acid
  misc_feature (74)..(74): Xaa can be any naturally occurring amino acid
  Coding DNA Sequence Number=SeqID_3023
  Subcellular localization annotation: CTP_CleavageSite=55; ConfidenceScore=5.67e-01
SSRCRLTVTRHGCSFGAATTLVTMICSAPSTMLGTSLVGASCFFISTCTSRXFXFCFVFVCVFLFLFFXFFXFXFFLISHHRPLIDLNDLRCACRKQ

SEQ ID NO: 6573 - protein, 143 aa, Glycine max
  misc_feature (2)..(2): Xaa can be any naturally occurring amino acid
  misc_feature (4)..(4): Xaa can be any naturally occurring amino acid
  misc_feature (6)..(6): Xaa can be any naturally occurring amino acid
  misc_feature (23)..(23): Xaa can be any naturally occurring amino acid
  misc_feature (25)..(25): Xaa can be any naturally occurring amino acid
  misc_feature (38)..(38): Xaa can be any naturally occurring amino acid
  misc_feature (54)..(54): Xaa can be any naturally occurring amino acid
  misc_feature (65)..(65): Xaa can be any naturally occurring amino acid
  misc_feature (79)..(79): Xaa can be any naturally occurring amino acid
  misc_feature (113)..(113): Xaa can be any naturally occurring amino acid
  Coding DNA Sequence Number=SeqID_3025
VXVXSXNGGEMWWMCALDPLQSXLXMCDRSSSLPMSRXREVRSLVSMVLAPCSXHTRVALRHNIXDGFVASSHRTSIYXSPLVCAQRELLCWCYYPGLHRTLRLGYMRFVDCXYVRRVGVVVSIECRYRVIWIEYSRVMREYA

SEQ ID NO: 6574 - protein, 111 aa, Glycine max
  misc_feature (19)..(19): Xaa can be any naturally occurring amino acid
  misc_feature (28)..(29): Xaa can be any naturally occurring amino acid
  misc_feature (31)..(31): Xaa can be any naturally occurring amino acid
  misc_feature (37)..(39): Xaa can be any naturally occurring amino acid
  misc_feature (47)..(47): Xaa can be any naturally occurring amino acid
  misc_feature (50)..(51): Xaa can be any naturally occurring amino acid
  misc_feature (54)..(54): Xaa can be any naturally occurring amino acid
  misc_feature (63)..(63): Xaa can be any naturally occurring amino acid
  misc_feature (65)..(65): Xaa can be any naturally occurring amino acid
  misc_feature (82)..(83): Xaa can be any naturally occurring amino acid
  misc_feature (87)..(87): Xaa can be any naturally occurring amino acid
  misc_feature (91)..(91): Xaa can be any naturally occurring amino acid
  misc_feature (96)..(96): Xaa can be any naturally occurring amino acid
  misc_feature (106)..(109): Xaa can be any naturally occurring amino acid
  Coding DNA Sequence Number=SeqID_3027
PTSSIIHARCTNDMRYRPXPDLEYHRTXXYXSYLILXXXQCLHVVIXLTXXRAXMDDMSYNVXVXAGSVESELSLRSVLTRXXVSAXPYHXCTDRXAVIGVWSTRXXXXQE

SEQ ID NO: 6575 - protein, 149 aa, Glycine max
  misc_feature (26)..(26): Xaa can be any naturally occurring amino acid
  Coding DNA Sequence Number=SeqID_3029
  Subcellular localization annotation: CTP_CleavageSite=26; ConfidenceScore=5.50e-01
KKNHFFLTFLSPLTLLPFLFFFLFPXATTSTNSPLPLSLSFLPLLHCTPYPYFPSIVPPLSSLHPSFPFHRNPLRDTIYLSLSLKPVAFKGTTAANASAVASDSMFLAATLEPRSAFKMFQEHNRKYEHGSNLRSVIFLFFFLFFFYWS

SEQ ID NO: 6576 - protein, 86 aa, Glycine max
  misc_feature (30)..(30): Xaa can be any naturally occurring amino acid
  misc_feature (32)..(32): Xaa can be any naturally occurring amino acid
  misc_feature (41)..(41): Xaa can be any naturally occurring amino acid
  misc_feature (43)..(43): Xaa can be any naturally occurring amino acid
  Coding DNA Sequence Number=SeqID_3031
SWMRALYTRYDRHKMVIPRYNTSAYLLYHXHXLSCSCVISXRXSHLIHSYNIQFIYIPILAYGRYTPRAIVRARVVRGGGRNIVYI

SEQ ID NO: 6577 - protein, 228 aa, Glycine max
  misc_feature (221)..(221): Xaa can be any naturally occurring amino acid
  misc_feature (226)..(226): Xaa can be any naturally occurring amino acid
  misc_feature (228)..(228): Xaa can be any naturally occurring amino acid
  Coding DNA Sequence Number=SeqID_3033
  Gene Ontology: Mol. function=nucleic acid binding; Biological process= mRNA metabolic process
  Homolog annotation: Hit_ID=Q9M6E4; Match level="QueryCoverage=94%, HitCoverage=45%, E-value=3e-47, Identity=47%"; Hit description =Poly(A)-binding protein
  Pfam annotation: Domain name=PABP; Domain location=171-227; Score= -1.8; E_value=0.0061; Accession=PF00658.8; Description=Poly-adenylate binding protein, unique domain
ANENVFRIPIITAFFQAQFSQMRPVARTPSVAPRMPLYPPGAPGLGQQFLYGQGPPAMMPPQAGFGYQQQLVPGMRPGGGPMPSFFVPMVQQGQQGQRPVGRRGTGPVQQPQQPMPMMQQQMLPRGRVYRYPPGRNMQDVPLQVAAGGMLSVPYDMGGLPMRNAVGQPMPIQALTTALTNAPPEHQKTILDEPVYPLINQLKHNSSYKVTYILAKIDQRKXLHLMXSX

SEQ ID NO: 6578 - protein, 126 aa, Glycine max
  misc_feature (19)..(19): Xaa can be any naturally occurring amino acid
  misc_feature (22)..(22): Xaa can be any naturally occurring amino acid
  misc_feature (34)..(34): Xaa can be any naturally occurring amino acid
  misc_feature (40)..(40): Xaa can be any naturally occurring amino acid
  misc_feature (57)..(57): Xaa can be any naturally occurring amino acid
  misc_feature (79)..(80): Xaa can be any naturally occurring amino acid
  misc_feature (86)..(86): Xaa can be any naturally occurring amino acid
  misc_feature (110)..(110): Xaa can be any naturally occurring amino acid
  misc_feature (121)..(121): Xaa can be any naturally occurring amino acid
  Coding DNA Sequence Number=SeqID_3034
CVVSLAVYNRPSCSTPMVXPCXLPRLAYSPIRDXPTHTQXITHYMNVRHAVDAAGAXQSAVLHVAHYHAVALAELLRPXXLLARSXSHHRVPLTSSSALTSHVSSRSVVXNCCRVCVAHDXRLSRA

SEQ ID NO: 6579 - protein, 288 aa, Glycine max; identical to SEQ ID NO: 6279
  misc_feature (7)..(7): Xaa can be any naturally occurring amino acid
  misc_feature (10)..(15): Xaa can be any naturally occurring amino acid
  misc_feature (23)..(23): Xaa can be any naturally occurring amino acid
  misc_feature (45)..(48): Xaa can be any naturally occurring amino acid
  misc_feature (144)..(144): Xaa can be any naturally occurring amino acid
  misc_feature (212)..(212): Xaa can be any naturally occurring amino acid
  misc_feature (242)..(242): Xaa can be any naturally occurring amino acid
  Coding DNA Sequence Number=SeqID_3036

SEQ ID NO: 6580 - protein, 87 aa, Glycine max
  misc_feature (4)..(4): Xaa can be any naturally occurring amino acid
  misc_feature (76)..(76): Xaa can be any naturally occurring amino acid
  misc_feature (81)..(81): Xaa can be any naturally occurring amino acid
  Coding DNA Sequence Number=SeqID_3037
  Subcellular localization annotation: CTP_CleavageSite=44; ConfidenceScore=5.55e-01
STSXYILRPATSAVIAAPTASLMFTFVSCLCAASSSLITNHTMFAQYVRRVTRIIYRLLVYCYWFNVDDRAARSFXIFLPXTPLKHI

SEQ ID NO: 6581 - protein, 319 aa, Glycine max
  misc_feature (202)..(202): Xaa can be any naturally occurring amino acid
  misc_feature (252)..(252): Xaa can be any naturally occurring amino acid
  Coding DNA Sequence Number=SeqID_3039
  Gene Ontology: Mol. function=sugar:hydrogen symporter activity; Cellular component=integral to membrane; Biological process =carbohydrate transport
  Homolog annotation: Hit_ID=O48537; Match level="QueryCoverage=69%, HitCoverage=46%, E-value=2e-68, Identity=62%"; Hit description =Putative sugar transporter
  Pfam annotation: Domain name=Sugar_tr; Domain location=1-319; Score= -72.2; E_value=3.7e-06; Accession=PF00083.14; Description=Sugar (and other) transporter
IFLIPSYLILLPLKKNDWVRCPPRVATKEPPHKGCSHNALLDGATVGSFTGGALAPKFGRTRTFQLHAIPLAIGGFLCATAHSVQTMIIGRLLAGIRIGITSAGVPLYISEISPTEIRCALVSVNPLFICIGILAALLAGLPLVGNPIWWRTMFGITVAPSVLLALGMTISPDRPRWFFHQGKISEAEEAVKTLYGKERVPXVMHDLTASSEGPSETETRRFDLFNSRHKKVAAVGATLFLLPPLAGINGAXYYSTFCFPQCLELLLTLQTSGLALWLLMVLGTRWSLRALEGHIKARNQFLLYTTPLGANRPGFNGCL

SEQ ID NO: 6582 - protein, 60 aa, Glycine max
  Coding DNA Sequence Number=SeqID_3040
AIRFGALYYQLELRDQKAGDGSTSVRINNFSEVHVEAVKKCGEENKGDYVKCRTESEAVT

SEQ ID NO: 6583 - protein, 87 aa, Glycine max
  Coding DNA Sequence Number=SeqID_3042
YERHVQSDPPSSSLHLLRMRAPPSYVRHCAYTHKHHLVPHVQHSKLLTHIDDIMMISTDYCHLNARMNAYHHRITEARTLLSLPRLL

SEQ ID NO: 6584 - protein, 112 aa, Glycine max; identical to SEQ ID NO: 6448
  misc_feature (10)..(10): Xaa can be any naturally occurring amino acid
  misc_feature (12)..(12): Xaa can be any naturally occurring amino acid
  Coding DNA Sequence Number=SeqID_3044

SEQ ID NO: 6585 - protein, 140 aa, Glycine max
  misc_feature (19)..(19): Xaa can be any naturally occurring amino acid
  misc_feature (22)..(22): Xaa can be any naturally occurring amino acid
  misc_feature (30)..(30): Xaa can be any naturally occurring amino acid
  misc_feature (38)..(38): Xaa can be any naturally occurring amino acid
  misc_feature (44)..(44): Xaa can be any naturally occurring amino acid
  misc_feature (55)..(55): Xaa can be any naturally occurring amino acid
  misc_feature (67)..(67): Xaa can be any naturally occurring amino acid
  misc_feature (73)..(73): Xaa can be any naturally occurring amino acid
  misc_feature (75)..(75): Xaa can be any naturally occurring amino acid
  misc_feature (83)..(83): Xaa can be any naturally occurring amino acid
  misc_feature (89)..(89): Xaa can be any naturally occurring amino acid
  misc_feature (95)..(95): Xaa can be any naturally occurring amino acid
  misc_feature (102)..(102): Xaa can be any naturally occurring amino acid
  misc_feature (108)..(108): Xaa can be any naturally occurring amino acid
  misc_feature (112)..(112): Xaa can be any naturally occurring amino acid
  misc_feature (123)..(123): Xaa can be any naturally occurring amino acid
  misc_feature (132)..(132): Xaa can be any naturally occurring amino acid
  misc_feature (139)..(139): Xaa can be any naturally occurring amino acid
  Coding DNA Sequence Number=SeqID_3046
SALACAHAPRQPSEGGRPXRAXKRAHHLQXRRGRQHRXLRESWXDRTYQWGRCAXSSQSPLARGARXTIVSCXRXVLIRVLVXRARHAXTCAREXRERRYAXRTSADXKHYXASVGERVGDMXRACGADRDXRQTLVSXL

SEQ ID NO: 6586 - protein, 127 aa, Glycine max
  misc_feature (19)..(19): Xaa can be any naturally occurring amino acid
  misc_feature (33)..(33): Xaa can be any naturally occurring amino acid
  misc_feature (36)..(36): Xaa can be any naturally occurring amino acid
  misc_feature (50)..(50): Xaa can be any naturally occurring amino acid
  misc_feature (86)..(86): Xaa can be any naturally occurring amino acid
  misc_feature (100)..(100): Xaa can be any naturally occurring amino acid
  Coding DNA Sequence Number=SeqID_3048
  Gene Ontology: Mol. function=translation elongation factor activity; Cellular component=cytoplasm; Biological process=translational elongation
  Homolog annotation: Hit_ID=P13905; Match level="QueryCoverage=100%, HitCoverage=28%, E-value=8e-31, Identity=57%"; Hit description =Elongation factor 1-alpha
MGKEKTHINIVVIGHVDSXKVTTTGHLIYKLGXIDXRVNEKFQKEAAEMXKRSFQDCWVLTNSKVDREKGLHLYFFVGILNHQYYXASIDCPPNLGFFRXMITGDSPAEWGGLIIEPPTVGVEAGIS

SEQ ID NO: 6587 - protein, 103 aa, Glycine max; identical to SEQ ID NO: 6451
  misc_feature (3)..(3): Xaa can be any naturally occurring amino acid
  misc_feature (9)..(9): Xaa can be any naturally occurring amino acid
  misc_feature (12)..(12): Xaa can be any naturally occurring amino acid
  misc_feature (26)..(27): Xaa can be any naturally occurring amino acid
  misc_feature (34)..(34): Xaa can be any naturally occurring amino acid
  misc_feature (41)..(41): Xaa can be any naturally occurring amino acid
  misc_feature (57)..(57): Xaa can be any naturally occurring amino acid
  misc_feature (59)..(59): Xaa can be any naturally occurring amino acid
  misc_feature (72)..(75): Xaa can be any naturally occurring amino acid
  misc_feature (88)..(88): Xaa can be any naturally occurring amino acid
  Coding DNA Sequence Number=SeqID_3049
  Subcellular localization annotation: CTP_CleavageSite=22; ConfidenceScore=5.18e-01

SEQ ID NO: 6588 - protein, 134 aa, Glycine max
  Coding DNA Sequence Number=SeqID_3051
NILRRAAPPRPFRRPPPRKTETAAESAAARRAKWKKRRMREEENEGAQEKAPTDEAAIQVGTFGRGKGSILQPGRGTSREDGRVWLLLVCLLFWVWYRCFILFLLFCCSLFYVLCVMYVFYVVCDCMCLIFNFI

SEQ ID NO: 6589 - protein, 65 aa, Glycine max
  misc_feature (32)..(32): Xaa can be any naturally occurring amino acid
  Coding DNA Sequence Number=SeqID_3053
QVQRSKRSCILYCNTSQRFHLLSNDVVIKCNXAGHELLIGDMLYYKLNLSNKLQTTCRSIDLRLF

SEQ ID NO: 6590 - protein, 117 aa, Glycine max; identical to SEQ ID NO: 6453
  misc_feature (3)..(3): Xaa can be any naturally occurring amino acid
  misc_feature (16)..(16): Xaa can be any naturally occurring amino acid
  misc_feature (20)..(20): Xaa can be any naturally occurring amino acid
  misc_feature (35)..(36): Xaa can be any naturally occurring amino acid
  misc_feature (61)..(64): Xaa can be any naturally occurring amino acid
  misc_feature (73)..(73): Xaa can be any naturally occurring amino acid
  misc_feature (85)..(85): Xaa can be any naturally occurring amino acid
  misc_feature (92)..(92): Xaa can be any naturally occurring amino acid
  misc_feature (94)..(94): Xaa can be any naturally occurring amino acid
  misc_feature (96)..(96): Xaa can be any naturally occurring amino acid
  misc_feature (98)..(99): Xaa can be any naturally occurring amino acid
  misc_feature (101)..(104): Xaa can be any naturally occurring amino acid
  misc_feature (106)..(112): Xaa can be any naturally occurring amino acid
  Coding DNA Sequence Number=SeqID_3055

SEQ ID NO: 6591 - protein, 132 aa, Glycine max
  misc_feature (123)..(123): Xaa can be any naturally occurring amino acid
  Coding DNA Sequence Number=SeqID_3057
  Gene Ontology: Mol. function=structural constituent of ribosome; Cellular component=ribonucleoprotein complex; Biological process =translation
  Homolog annotation: Hit_ID=Q9SS17; Match level="QueryCoverage=100%, HitCoverage=99%, E-value=7e-67, Identity=97%"; Hit description=40S ribosomal protein S24-1
  Pfam annotation: Domain name=Ribosomal_S24e; Domain location=24-107; Score=147.1; E_value=4.8e-41; Accession=PF01282.9; Description =Ribosomal protein S24e
MAEKAVTIRTRKFMTNRLLSRKQFVIDVLHPGRANVSKAELKEKLARMYEVKDPNAIFVFKFRTHFGGGKSSGFGLIYDNVESAKKFEPKYRLIRNGLDTKIEKSRKQIKERKNRAKKIRGVXKTKAGDPKK

SEQ ID NO: 6592 - protein, 168 aa, Glycine max
  misc_feature (4)..(4): Xaa can be any naturally occurring amino acid
  misc_feature (14)..(14): Xaa can be any naturally occurring amino acid
  misc_feature (31)..(31): Xaa can be any naturally occurring amino acid
  misc_feature (42)..(42): Xaa can be any naturally occurring amino acid
  misc_feature (64)..(64): Xaa can be any naturally occurring amino acid
  misc_feature (77)..(77): Xaa can be any naturally occurring amino acid
  misc_feature (94)..(94): Xaa can be any naturally occurring amino acid
  misc_feature (152)..(152): Xaa can be any naturally occurring amino acid
  misc_feature (159)..(159): Xaa can be any naturally occurring amino acid
  misc_feature (162)..(163): Xaa can be any naturally occurring amino acid
  Coding DNA Sequence Number=SeqID_3058
DRQXCMLVYRVAYXQNDHAVASELLRFYIGXRLRGLTPCLCXYNSVHPLCITSDTIDERVACMXTSDGDMTSVIDLXSFVMTHTAAISTTALRXYSLRRLRKHCIRADRESREQMRQRRDTCARRYWQIDCLVYRRVYGISALALIVHTRTXRLTSQVXCTXXRRACA

SEQ ID NO: 6593 - protein, 155 aa, Glycine max
  misc_feature (44)..(44): Xaa can be any naturally occurring amino acid
  misc_feature (85)..(85): Xaa can be any naturally occurring amino acid
  Coding DNA Sequence Number=SeqID_3060
HMIIDLSRALHLTHTSSYAIKNIYIHMSLSPHMIYISAGLSLNXTKSTTLQSLLITYLSTSHHLIGSLSALYRINNPSELLSSDXITSPIPQFISPRVIDIIIIINILMILFTYISLNCSTSSLIILYLTIYIIIYITYYPTPDHQRFIYNSMIQ

SEQ ID NO: 6594 - protein, 94 aa, Glycine max
  misc_feature (12)..(12): Xaa can be any naturally occurring amino acid
  misc_feature (28)..(28): Xaa can be any naturally occurring amino acid
  misc_feature (32)..(32): Xaa can be any naturally occurring amino acid
  misc_feature (46)..(46): Xaa can be any naturally occurring amino acid
  misc_feature (49)..(49): Xaa can be any naturally occurring amino acid
  misc_feature (53)..(54): Xaa can be any naturally occurring amino acid
  misc_feature (56)..(56): Xaa can be any naturally occurring amino acid
  misc_feature (79)..(79): Xaa can be any naturally occurring amino acid
  Coding DNA Sequence Number=SeqID_3061
IVNLVTYILPCXTTRRNQRLSRYYIYIXNIIXDKARMYNVLLPHIXTAXLHIXXIXRRSHIQSRGLLYIFIEFCVSTLXLPLTFYHTNRLSALL

SEQ ID NO: 6595 - protein, 264 aa, Glycine max
  Coding DNA Sequence Number=SeqID_3063
  Gene Ontology: Mol. function=protein kinase activity; Cellular component=integral to membrane; Biological process=protein amino acid phosphorylation
  Homolog annotation: Hit_ID=A5B6X8; Match level="QueryCoverage=71%, HitCoverage=27%, E-value=7e-51, Identity=56%"; Hit description =Putative uncharacterized protein
  Pfam annotation: Domain name=LRR_1; Domain location=136-157; Score =18.5; E_value=0.025; Accession=PF00560.23; Description=Leucine Rich Repeat
  Pfam annotation: Domain name=LRR_1; Domain location=159-181; Score =10.3; E_value=3.8; Accession=PF00560.23; Description=Leucine Rich Repeat
  Pfam annotation: Domain name=LRR_1; Domain location=183-205; Score =15.6; E_value=0.19; Accession=PF00560.23; Description=Leucine Rich Repeat
  Pfam module annotation: Pfam domain module=LRR_1::LRR_1::LRR_1; Domain location=136-157::159-181::183-205
MNSYFPCIVAYAMDKSTFGSVIPTHENHLSSEVGPRMAIDPHLLLFLLLAPSNAHCSKLQRRHLPPFVFTDATALLVFKLKADVNNHLDFSPLTRGLRFCAWHGVECNGPKVLRLVLQNLDLGGAWAPKTLTRLDQLRVLSLQNNSLTGPIPDLTGLFNLKSLFLDNNHFNASLHPSLFSLHRLRNLDFSHNNFSGPIPAAFTTIDRHLSLLISFNSFNGSIPPYNQSSQIIVRAKDNNLSGAVLVTPPVVRLAPSPLALKPPL

SEQ ID NO: 6596 - protein, 141 aa, Glycine max
  misc_feature (2)..(2): Xaa can be any naturally occurring amino acid
  misc_feature (5)..(6): Xaa can be any naturally occurring amino acid
  misc_feature (15)..(15): Xaa can be any naturally occurring amino acid
  misc_feature (19)..(20): Xaa can be any naturally occurring amino acid
  misc_feature (22)..(22): Xaa can be any naturally occurring amino acid
  misc_feature (27)..(28): Xaa can be any naturally occurring amino acid
  misc_feature (43)..(43): Xaa can be any naturally occurring amino acid
  misc_feature (61)..(61): Xaa can be any naturally occurring amino acid
  misc_feature (90)..(91): Xaa can be any naturally occurring amino acid
  misc_feature (95)..(96): Xaa can be any naturally occurring amino acid
  misc_feature (107)..(107): Xaa can be any naturally occurring amino acid
  misc_feature (124)..(124): Xaa can be any naturally occurring amino acid
  misc_feature (134)..(134): Xaa can be any naturally occurring amino acid
  Coding DNA Sequence Number=SeqID_3064
GXGVXXLLFLLCVWXGAVXXLXLPSLXXHLVCDSPHRCVDARXSLAKSGGVPPAGGGAGRXASCLSLPLLFDRTDEPLRPCFFFFFILCXXSWWXXGAGPPSSERRXAMRAWCSISSYYSAVLXVTVSWCVCLXVPHNTRE

SEQ ID NO: 6597 - protein, 152 aa, Glycine max
  Coding DNA Sequence Number=SeqID_3066
  Subcellular localization annotation: CTP_CleavageSite=28; ConfidenceScore=5.17e-01
ISLAGARAMSPTDPRLLFILFVVFAPVPARAVDPTVLATFAGMGIRVSTMEFVIDLDDLNMRQDMLITVATARSMKSVEGLKVALKQTDITELPTEVVLLNLVVPERGSCTLAIRADNFYLLAYTNDRLEWQAFLGREHLVPTSTPLPFTSE

SEQ ID NO: 6598 - protein, 151 aa, Glycine max
  misc_feature (11)..(11): Xaa can be any naturally occurring amino acid
  misc_feature (74)..(74): Xaa can be any naturally occurring amino acid
  misc_feature (78)..(78): Xaa can be any naturally occurring amino acid
  Coding DNA Sequence Number=SeqID_3068
  Subcellular localization annotation: CTP_CleavageSite=59; ConfidenceScore=5.59e-01
ANINTNITHIXNTTTTNNIILGQSTNPNQSTNHNATNNTYSTNPAASNSSNNIVSSTFAGSSIGGGISHLGQSXTTTXGQSTTHLYHPTNANSSLPLPLSHHPLPHPLPLHPRPLASISDSSLQTNNHHTSSDATSSSASIHATSVSLSNL

SEQ ID NO: 6599 - protein, 196 aa, Glycine max
  misc_feature (17)..(17): Xaa can be any naturally occurring amino acid
  misc_feature (51)..(51): Xaa can be any naturally occurring amino acid
  misc_feature (55)..(55): Xaa can be any naturally occurring amino acid
  misc_feature (64)..(64): Xaa can be any naturally occurring amino acid
  misc_feature (116)..(116): Xaa can be any naturally occurring amino acid
  misc_feature (150)..(150): Xaa can be any naturally occurring amino acid
  misc_feature (165)..(165): Xaa can be any naturally occurring amino acid
  misc_feature (172)..(173): Xaa can be any naturally occurring amino acid
  misc_feature (175)..(176): Xaa can be any naturally occurring amino acid
  misc_feature (179)..(180): Xaa can be any naturally occurring amino acid
  misc_feature (186)..(190): Xaa can be any naturally occurring amino acid
  Coding DNA Sequence Number=SeqID_3070
WCQTQIASTTARRCLTXYNIQSLLLYRDTQRLHRARRARRSINAQRPSNAXAAHXLPAPRARCXGRGPEPLARRSGQEDATKTPHNGLRRACRTYHRPTPRRRTHTRTTRRPSARXVSEDPHSDHNDTHARSTHSAGASWRGHFFHQIQXPLRSSHAHPGTAAPXPASHQQXXQXXEGXXEDKREXXXXXRGGEGG

SEQ ID NO: 6600 - protein, 180 aa, Glycine max
  misc_feature (1)..(97): Xaa can be any naturally occurring amino acid
  Coding DNA Sequence Number=SeqID_3072
XXXXXXXXXXXXXXXXXXXXXXXXXXXXXXXXXXXXXXXXXXXXXXXXXXXXXXXXXXXXXXXXXXXXXXXXXXXXXXXXXXXXXXXXXXXXXXXXXRIYVICSATPKHKQRQGLASFAREGPSLSVSSNKSNCETMNKPAQISRESQNYSLPSKASIVYVVWMEGGNGPLFCLLSCINN

SEQ ID NO: 6601 - protein, 142 aa, Glycine max; identical to SEQ ID NO: 6542
  misc_feature (5)..(5): Xaa can be any naturally occurring amino acid
  misc_feature (73)..(73): Xaa can be any naturally occurring amino acid
  misc_feature (84)..(84): Xaa can be any naturally occurring amino acid
  misc_feature (100)..(100): Xaa can be any naturally occurring amino acid
  misc_feature (117)..(117): Xaa can be any naturally occurring amino acid
  misc_feature (119)..(120): Xaa can be any naturally occurring amino acid
  misc_feature (126)..(126): Xaa can be any naturally occurring amino acid
  misc_feature (129)..(129): Xaa can be any naturally occurring amino acid
  misc_feature (139)..(140): Xaa can be any naturally occurring amino acid
  Coding DNA Sequence Number=SeqID_3073
  Subcellular localization annotation: CTP_CleavageSite=95; ConfidenceScore=5.08e-01

SEQ ID NO: 6602 - protein, 103 aa, Glycine max
  misc_feature (65)..(65): Xaa can be any naturally occurring amino acid
  misc_feature (69)..(69): Xaa can be any naturally occurring amino acid
  misc_feature (73)..(73): Xaa can be any naturally occurring amino acid
  misc_feature (82)..(82): Xaa can be any naturally occurring amino acid
  misc_feature (84)..(84): Xaa can be any naturally occurring amino acid
  misc_feature (86)..(86): Xaa can be any naturally occurring amino acid
  misc_feature (94)..(96): Xaa can be any naturally occurring amino acid
  misc_feature (100)..(100): Xaa can be any naturally occurring amino acid
  Coding DNA Sequence Number=SeqID_3075
  Gene Ontology: Mol. function=DNA-directed RNA polymerase activity; Biological process=regulation of transcription
  Homolog annotation: Hit_ID=Q9LNK0; Match level="QueryCoverage=100%, HitCoverage=100%, E-value=5e-39, Identity=74%"; Hit description=DNA -directed RNA polymerase subunit
  Pfam annotation: Domain name=RNA_POL_M_15KD; Domain location=1-50; Score=31.2; E_value=3.7e-06; Accession=PF02150.7; Description=RNA polymerases M15 Kd subunit
  Pfam annotation: Domain name=TFIIS_C; Domain location=63-101; Score =4.6; E_value=0.043; Accession=PF01096.9; Description=Transcription factor S-II (TFIIS)
  Pfam module annotation: Pfam domain module=RNA_POL_M_15KD::TFIIS_C; Domain location=1-50::63-101
MEFCPTCGNLLRYGQSQFFCSTCPYIARIERQVEIKKKQLLVKKSIDPVVKKDDIPKGPETEAPXPRCXHDKXYFKTMQIRXAXEXQSRFYRCXXXEQTXREE

SEQ ID NO: 6603 - protein, 97 aa, Glycine max
  misc_feature (2)..(2): Xaa can be any naturally occurring amino acid
  misc_feature (24)..(24): Xaa can be any naturally occurring amino acid
  misc_feature (40)..(40): Xaa can be any naturally occurring amino acid
  Coding DNA Sequence Number=SeqID_3076
LXLLVLLAASPQCVLYIYYLESMXVRRRDLRDMYSSMHDXRAETTLFSMFYDCRLVYSPTSCVHIAPSDASCGQTSTPPRGMVCAVGLVVRDARESL

SEQ ID NO: 6604 - protein, 172 aa, Glycine max
  Coding DNA Sequence Number=SeqID_3078
  Gene Ontology: Mol. function=nucleic acid binding; Cellular component= intracellular
  Homolog annotation: Hit_ID=A0E3N7; Match level="QueryCoverage=95%, HitCoverage=41%, E-value=8e-32, Identity=41%"; Hit description =Chromosome undetermined scaffold_77, whole genome shotgun sequence
MTSSYKKYFDPAQIESDQKDLVVSQLKAELFELRQNERDYNELHSKLNNLEHRYNLLQEEKSLNEREFKNRNELNLRTINNLKSDIDALKQELNVLSADAQDLRFDNQSINEIVNNRSSEIAQLKAELGDLADNNAHLSMEKKDLETQISRVELKQRTHLEWKNYQSGSEEE

SEQ ID NO: 6605 - protein, 139 aa, Glycine max
  Coding DNA Sequence Number=SeqID_3079
VNLNYRGILLATLRTLPRTNITPAHVNEWITALRCSQRPALATMNDRSKRYPCQSLLHICSSRCSASFTREPPVRSGTTRITTISTMTRSSPTQTPLTILSTHRTVTRRQKNYDALHVPASDPDAPCACGRSTRRPCIL

SEQ ID NO: 6606 - protein, 106 aa, Glycine max
  misc_feature (88)..(88): Xaa can be any naturally occurring amino acid
  Coding DNA Sequence Number=SeqID_3081
ADDIAHDCQPRFSRISCYALSPYAAHFCSRLCSSYFSRGVLIVDTCVRLIMRPRAATPRLADTQCDDSQYHCAFSAIRVFTPSFPPLXYTPHCRMLLYSCSSECTS

SEQ ID NO: 6607 - protein, 168 aa, Glycine max
  misc_feature (14)..(14): Xaa can be any naturally occurring amino acid
  misc_feature (83)..(83): Xaa can be any naturally occurring amino acid
  Coding DNA Sequence Number=SeqID_3083
  Gene Ontology: Mol. function=serine-type endopeptidase inhibitor activity; Cellular component=apoplast; Biological process=defense response
  Homolog annotation: Hit_ID=Q8GT65; Match level="QueryCoverage=100%, HitCoverage=43%, E-value=8e-44, Identity=55%"; Hit description =Serpin-like protein
AWNEKCDSSITKDXEYHLHDGRPIRAAIMTSRKNQVNRAFDGIKDLGLPYKQGEDKRQITMYFFLPETKEGMLALAEKPASEXGYLERKLPNNKLEGGDFRIPRSKISFGSEASNALKELGEAMPFTVGGGTEMVETAVEQNSFESDILHKAFKEGKEERNEAAAATA

SEQ ID NO: 6608 - protein, 104 aa, Glycine max
  misc_feature (18)..(18): Xaa can be any naturally occurring amino acid
  misc_feature (40)..(40): Xaa can be any naturally occurring amino acid
  misc_feature (68)..(68): Xaa can be any naturally occurring amino acid
  misc_feature (79)..(79): Xaa can be any naturally occurring amino acid
  Coding DNA Sequence Number=SeqID_3084
  Gene Ontology: Mol. function=threonine endopeptidase activity; Cellular component=proteasome core complex; Biological process =ubiquitin-dependent protein catabolic process
  Homolog annotation: Hit_ID=A3CDD6; Match level="QueryCoverage=94%, HitCoverage=35%, E-value=4e-34, Identity=78%"; Hit description =Proteasome subunit alpha type
VNTFSPEGRLFQVVYAIXAIKLGSTAIGLKTKDGAVLAGXKRITSSLLEPNSVEIIMVFDEHIGCAMXGLIADARTLVXEHARLVTHNHKVCYGGPITRGAHHP

SEQ ID NO: 6609 - protein, 104 aa, Glycine max
  Coding DNA Sequence Number=SeqID_3085
  Gene Ontology: Mol. function=transcription factor activity; Cellular component=nucleus; Biological process=regulation of transcription, DNA-dependent
  Homolog annotation: Hit_ID=Q6ZDW4; Match level="QueryCoverage=100%, HitCoverage=44%, E-value=6e-24, Identity=58%"; Hit description=AP2 domain transcription factor EREBP
MCGGAIISDFIPERDHRGGSKRSLCTADFWPHAAAAAFDDPTDHHDLYPADLTGAGAFPPQHQAEEEPSRKRERKTMYRGIRRRPWGKWAAEIRDPAKGARVWL

SEQ ID NO: 6610 - protein, 49 aa, Glycine max
  Coding DNA Sequence Number=SeqID_3086
  Gene Ontology: Mol. function=peptidyl-prolyl cis-trans isomerase activity; Cellular component=cytoplasm; Biological process=protein folding
  Homolog annotation: Hit_ID=Q39613; Match level="QueryCoverage=95%, HitCoverage=27%, E-value=2e-16, Identity=89%"; Hit description =Peptidyl-prolyl cis-trans isomerase
  Pfam annotation: Domain name=Pro_isomerase; Domain location=1-48; Score=-61.2; E_value=0.0082; Accession=PF00160.11; Description =Cyclophilin type peptidyl-prolyl cis-tr
TKTEWLDGKHVVFGQVVKGMDVVKEIKKVGSSSGRTAKPVVVPDCGQLF

SEQ ID NO: 6611 - protein, 70 aa, Glycine max
  Coding DNA Sequence Number=SeqID_3087
  Homolog annotation: Hit_ID=P51137; Match level="QueryCoverage=57%, HitCoverage=9%, E-value=9e-09, Identity=72%"; Hit description =Glycogen synthase kinase-3 homolog MsK-1
PLGSYLAHCFTTAIDVWSVGCVLAELLLGQPLFPGVCGVVEVVAFFMVIFVLSPSLCSCLLPSFCSFVVC

SEQ ID NO: 6612 - protein, 325 aa, Glycine max
  misc_feature (197)..(197): Xaa can be any naturally occurring amino acid
  misc_feature (222)..(222): Xaa can be any naturally occurring amino acid
  misc_feature (287)..(287): Xaa can be any naturally occurring amino acid
  misc_feature (301)..(301): Xaa can be any naturally occurring amino acid
  misc_feature (303)..(303): Xaa can be any naturally occurring amino acid
  misc_feature (306)..(307): Xaa can be any naturally occurring amino acid
  misc_feature (309)..(309): Xaa can be any naturally occurring amino acid
  misc_feature (313)..(313): Xaa can be any naturally occurring amino acid
  misc_feature (315)..(317): Xaa can be any naturally occurring amino acid
  Coding DNA Sequence Number=SeqID_3088
  Gene Ontology: Mol. function=nucleoside-triphosphatase activity; Cellular component=myosin complex; Biological process=regulation of transcription
  Homolog annotation: Hit_ID=A7P4U3; Match level="QueryCoverage=93%, HitCoverage=20%, E-value=1e-102, Identity=65%"; Hit description =Chromosome chr4 scaffold_6, whole genome shotgun sequence
LEGTPARLEVPTRGRRQKALSVSPKSNHRGLTKSLSEKYSSAIAPRTEQKPTFESPAPTKLISHITHGGLSDSRRSKLTAEKHQDNYELLSRCIKEDLGFKNGKPLAASIIYKCLHHWHAFESERTAIFDYIVDGINDVLKVRDNDIVLPYWLSNTSALLCLLQRNLHPNGFLTTTAQRYARSSGLTSRIGNGLRSXPLKLIVYDDNTSQVEARYPAILFKXQQLTACVEKIFGLIRDNLKKELSPLLGSCIQAPKAKMGRVQGGKSSRSPGGLPQQSPVAQWTTSXQFLDSLMTAMSNHXPXFHXXLXLRFXFXXXFFTTFVAE

SEQ ID NO: 6613 - protein, 127 aa, Glycine max
  misc_feature (20)..(20): Xaa can be any naturally occurring amino acid
  misc_feature (26)..(26): Xaa can be any naturally occurring amino acid
  misc_feature (37)..(37): Xaa can be any naturally occurring amino acid
  misc_feature (54)..(54): Xaa can be any naturally occurring amino acid
  misc_feature (61)..(61): Xaa can be any naturally occurring amino acid
  misc_feature (63)..(63): Xaa can be any naturally occurring amino acid
  misc_feature (72)..(72): Xaa can be any naturally occurring amino acid
  misc_feature (74)..(74): Xaa can be any naturally occurring amino acid
  misc_feature (95)..(95): Xaa can be any naturally occurring amino acid
  misc_feature (104)..(104): Xaa can be any naturally occurring amino acid
  misc_feature (108)..(108): Xaa can be any naturally occurring amino acid
  misc_feature (111)..(111): Xaa can be any naturally occurring amino acid
  Coding DNA Sequence Number=SeqID_3089
SCLMISHIHTRCYQGADTHXEHRATXRRVECVCSAAXTCTYIYQFAYIHNDERXRGIVCCXVXCFICILACXPXHLYVVSYIYHQPLCVLSTHHXIARHHATLXYCSXSNXYPERSRATHLIADHHI

SEQ ID NO: 6614 - protein, 154 aa, Glycine max
  misc_feature (1)..(1): Xaa can be any naturally occurring amino acid
  misc_feature (3)..(3): Xaa can be any naturally occurring amino acid
  misc_feature (27)..(27): Xaa can be any naturally occurring amino acid
  misc_feature (29)..(29): Xaa can be any naturally occurring amino acid
  misc_feature (49)..(49): Xaa can be any naturally occurring amino acid
  misc_feature (78)..(78): Xaa can be any naturally occurring amino acid
  misc_feature (91)..(91): Xaa can be any naturally occurring amino acid
  misc_feature (93)..(94): Xaa can be any naturally occurring amino acid
  misc_feature (111)..(111): Xaa can be any naturally occurring amino acid
  misc_feature (137)..(137): Xaa can be any naturally occurring amino acid
  misc_feature (141)..(141): Xaa can be any naturally occurring amino acid
  Coding DNA Sequence Number=SeqID_3091
XAXGSRVSESRSLMMYMDPRISISTYXSXSRVMHSSSLSLILCALCTQXARVCADLSQILLHRDTCNYDLLLDGSCHXETCDSVMRADVCXDXXTCRASSCCLYVSQISYXLPASTAIGTTMCISIMLLSLDIVGVXAHGXYNTRLTCGVVSYI

SEQ ID NO: 6615 - protein, 68 aa, Glycine max
  Coding DNA Sequence Number=SeqID_3093
QQYQKDPHPVKYNELLPKMAHGHPWLQSFEQGTSTTRISTSIHGYSLLNKAPSPQASVPETFGTLSRR

SEQ ID NO: 6616 - protein, 90 aa, Glycine max
  Coding DNA Sequence Number=SeqID_3095
  Subcellular localization annotation: CTP_CleavageSite=48; ConfidenceScore=5.15e-01
KFLFSPLIFYIPTRYRISSSIPAFIRSRGWFPPPPPQTTNNLFYHLLCCLNFSPPAIETARVRINIIICQRISRFSAHTDLFFFFPPPSY

SEQ ID NO: 6617 - protein, 166 aa, Glycine max
  misc_feature (96)..(96): Xaa can be any naturally occurring amino acid
  misc_feature (134)..(134): Xaa can be any naturally occurring amino acid
  misc_feature (154)..(154): Xaa can be any naturally occurring amino acid
  misc_feature (156)..(156): Xaa can be any naturally occurring amino acid
  misc_feature (158)..(159): Xaa can be any naturally occurring amino acid
  Coding DNA Sequence Number=SeqID_3097
RSATLAPAGTACVDYCNINRMDVPICAPLSSANHQRRGERRSRVRMSEPLPRNPTIRTHTLLSQQHVHHRSVCSSRVCAVRPSIITLERLIYSATXHSGLSCYLYLVVVTHALMRLAGRLSGGACRLCRPSRRXDLIVLCVSGRCTLLEYYTAXSXEXXLPSKSHS

SEQ ID NO: 6618 - protein, 98 aa, Glycine max
  misc_feature (65)..(65): Xaa can be any naturally occurring amino acid
  Coding DNA Sequence Number=SeqID_3099
TLASYSLEPSAVQTSRPGSASRSLSPALYHPATCPIRNLAKVHQLPAASYRYRYHSPHADDEKTXDSLIPLCGPTESMLVLSGATCRAKPRTTRRLPY

SEQ ID NO: 6619 - protein, 127 aa, Glycine max
  Coding DNA Sequence Number=SeqID_3101
INGYSPPRSWSSEPSRRACQCPPRHFCPRVSHFTAACLGRRECAGGEVIAAAIVALNPRAPWPVPSVPPLLPDIASAHNADAPPAGLHPRSAIPGGWTPRSYVWGLLCHRAARKIFCLVRVEESLLG

SEQ ID NO: 6620 - protein, 153 aa, Glycine max
  misc_feature (2)..(3): Xaa can be any naturally occurring amino acid
  misc_feature (17)..(17): Xaa can be any naturally occurring amino acid
  misc_feature (23)..(25): Xaa can be any naturally occurring amino acid
  misc_feature (53)..(53): Xaa can be any naturally occurring amino acid
  misc_feature (57)..(57): Xaa can be any naturally occurring amino acid
  misc_feature (77)..(78): Xaa can be any naturally occurring amino acid
  misc_feature (80)..(80): Xaa can be any naturally occurring amino acid
  misc_feature (114)..(114): Xaa can be any naturally occurring amino acid
  misc_feature (120)..(121): Xaa can be any naturally occurring amino acid
  misc_feature (131)..(131): Xaa can be any naturally occurring amino acid
  Coding DNA Sequence Number=SeqID_3103
QXXLTQQNVKYTGEIRXKFVYIXXXPYLLFAQHIIGARLRAGLLLIAQQGAAXAPRXAAALVPFSASALCREAASAXXPXCSSRQDAANAEERVAVGLSPPRHLSGTAAEQQSXHKHSYXXTQTSWTGDSXSEYAMALHLRMCHVSGPHTLYH

SEQ ID NO: 6621 - protein, 106 aa, Glycine max
  misc_feature (13)..(13): Xaa can be any naturally occurring amino acid
  misc_feature (50)..(50): Xaa can be any naturally occurring amino acid
  misc_feature (72)..(72): Xaa can be any naturally occurring amino acid
  Coding DNA Sequence Number=SeqID_3105
IRAGRIRPCFYDXCILDSYTKPSGTSHTRIDLMNLIAAHVDHTATLMVYXSLATYSQMDTRNSEITSLNTCXSASVCFITDMRLRADMAYRIPPRDIRKNIRLLDV

SEQ ID NO: 6622 - protein, 195 aa, Glycine max
  misc_feature (11)..(11): Xaa can be any naturally occurring amino acid
  misc_feature (13)..(13): Xaa can be any naturally occurring amino acid
  misc_feature (41)..(41): Xaa can be any naturally occurring amino acid
  misc_feature (45)..(45): Xaa can be any naturally occurring amino acid
  misc_feature (76)..(76): Xaa can be any naturally occurring amino acid
  misc_feature (82)..(82): Xaa can be any naturally occurring amino acid
  misc_feature (88)..(89): Xaa can be any naturally occurring amino acid
  misc_feature (147)..(147): Xaa can be any naturally occurring amino acid
  misc_feature (156)..(156): Xaa can be any naturally occurring amino acid
  misc_feature (171)..(171): Xaa can be any naturally occurring amino acid
  Coding DNA Sequence Number=SeqID_3107
  Subcellular localization annotation: CTP_CleavageSite=25; ConfidenceScore=5.34e-01
TQTRAQISLAXCXSRSGSIATMRIRCARQSSTVSLRSIAVXCNEXYVGRVDSITSSALYDAEHERRLCSHTVRVVXCRYRHXLRYLDXXVMFVVHTQNIVLCDTYYNPLYVSTLSYHAASSSIHRARAARATRTHQSTTYIVPHSRXPLGDSLWLXFVDRLSPYNLDTACXYTHIQHRVTSRVVRECTDSSCSCV

SEQ ID NO: 6623 - protein, 140 aa, Glycine max
  misc_feature (1)..(1): Xaa can be any naturally occurring amino acid
  misc_feature (54)..(54): Xaa can be any naturally occurring amino acid
  misc_feature (92)..(93): Xaa can be any naturally occurring amino acid
  misc_feature (107)..(107): Xaa can be any naturally occurring amino acid
  Coding DNA Sequence Number=SeqID_301
XSCTLVILDVYLYLCCVFHARAGAARRGRPRHHRAYVILCHAQRARATARQVEXSTIRPETGKGHSITRTRRDCNWPDYSSAVVHRRGYAHXXPAHARSAPAAAWNXSASSPDYIWRSCVVQLREERSVDTGRESHAGRE

SEQ ID NO: 6624 - protein, 205 aa, Glycine max
  misc_feature (2)..(2): Xaa can be any naturally occurring amino acid
  misc_feature (13)..(13): Xaa can be any naturally occurring amino acid
  misc_feature (79)..(80): Xaa can be any naturally occurring amino acid
  misc_feature (87)..(87): Xaa can be any naturally occurring amino acid
  misc_feature (100)..(100): Xaa can be any naturally occurring amino acid
  misc_feature (103)..(103): Xaa can be any naturally occurring amino acid
  misc_feature (109)..(109): Xaa can be any naturally occurring amino acid
  misc_feature (111)..(132): Xaa can be any naturally occurring amino acid
  misc_feature (134)..(135): Xaa can be any naturally occurring amino acid
  misc_feature (140)..(140): Xaa can be any naturally occurring amino acid
  Coding DNA Sequence Number=SeqID_1354
AXGGGAGARGGGXRGGGAGGGGGGGGGGGGGGGGGGGGGGGGGGGAGGGGGGGARGGAGGGGGGGGGGGGGGGGGGGGXXGGRAPGXGRGGGGAGAGGAXGGXGGGGGXGXXXXXXXXXXXXXXXXXXXXXXGXXAGGEXGGGGAGALPIHENFATTNITSTMEKVSFPNKNGSLSPSSDLSSLSSAWPILGRWVNTIKLELERV

SEQ ID NO: 6625 - protein, 106 aa, Glycine max; identical to SEQ ID NO: 6606
  misc_feature (88)..(88): Xaa can be any naturally occurring amino acid
  Coding DNA Sequence Number=SeqID_1356

SEQ ID NO: 6626 - protein, 94 aa, Glycine max
  Coding DNA Sequence Number=SeqID_1357
  Homolog annotation: Hit_ID=A2XME5; Match level="QueryCoverage=57%, HitCoverage=7%, E-value=3e-08, Identity=51%"; Hit description =Putative uncharacterized protein
  Pfam annotation: Domain name=Ribosomal_S14; Domain location=3-56; Score=5.3; E_value=0.095; Accession=PF00253.11; Description =Ribosomal protein S14pS29e
  Subcellular localization annotation: CTP_CleavageSite=41; ConfidenceScore=5.18e-01
MGHSNVRNTHPKNYGPGSRVCRVCGLSRRQMRMCGRMCCSRCSHNNANDMDFIEYRYYSYPGLRNVKLIGVDHLEQFIECILSIRVLFSLSFMF

SEQ ID NO: 6627 - protein, 97 aa, Glycine max
  misc_feature (1)..(1): Xaa can be any naturally occurring amino acid
  misc_feature (5)..(5): Xaa can be any naturally occurring amino acid
  misc_feature (7)..(7): Xaa can be any naturally occurring amino acid
  misc_feature (12)..(12): Xaa can be any naturally occurring amino acid
  misc_feature (19)..(23): Xaa can be any naturally occurring amino acid
  misc_feature (61)..(61): Xaa can be any naturally occurring amino acid
  misc_feature (64)..(64): Xaa can be any naturally occurring amino acid
  misc_feature (84)..(89): Xaa can be any naturally occurring amino acid
  Coding DNA Sequence Number=SeqID_1358
XSKSXLXHLPLXSPPYITXXXXXFLIYIALPTYYLYCVFCVSTHIKYIYSFCLHALPSPLXLCXVGGRGGWGPTSPPYLSISFXXXXXXSGGGAIFF

SEQ ID NO: 6628 - protein, 92 aa, Glycine max
  misc_feature (41)..(41): Xaa can be any naturally occurring amino acid
  misc_feature (45)..(45): Xaa can be any naturally occurring amino acid
  misc_feature (55)..(56): Xaa can be any naturally occurring amino acid
  misc_feature (58)..(58): Xaa can be any naturally occurring amino acid
  misc_feature (62)..(62): Xaa can be any naturally occurring amino acid
  Coding DNA Sequence Number=SeqID_1360
INSTFRHHPHPPSLDFPLNIFCFSLHPNYRHLLFLSIFISXDGWXRIVFDGELRXXGXAVEXGEYQLVEDPSLAGYLETKSNISVTIRSKGP

SEQ ID NO: 6629 - protein, 105 aa, Glycine max
  Coding DNA Sequence Number=SeqID_1362
  Gene Ontology: Mol. function=glutathione transferase activity; Biological process=response to stress
  Homolog annotation: Hit_ID=Q9FQE7; Match level="QueryCoverage=86%, HitCoverage=40%, E-value=3e-29, Identity=69%"; Hit description =Glutathione S-transferase GST 11
EFFVALNYLDNDLEGMFSGGDEFGFVDIAAVIIPLILEIAGLQLFPSEKLPKLFKWSQDFYNLSLVNQVVPSKVQLFAYFKGRAHSLAAKRMSEQRLPIPRGIFF

SEQ ID NO: 6630 - protein, 145 aa, Glycine max
  misc_feature (36)..(37): Xaa can be any naturally occurring amino acid
  misc_feature (53)..(54): Xaa can be any naturally occurring amino acid
  misc_feature (68)..(69): Xaa can be any naturally occurring amino acid
  misc_feature (86)..(88): Xaa can be any naturally occurring amino acid
  misc_feature (113)..(114): Xaa can be any naturally occurring amino acid
  Coding DNA Sequence Number=SeqID_1363
  Gene Ontology: Mol. function=protein serine/threonine kinase activity; Cellular component=integral to membrane; Biological process=protein amino acid phosphorylation
  Homolog annotation: Hit_ID=A7QP19; Match level="QueryCoverage=94%, HitCoverage=20%, E-value=4e-40, Identity=62%"; Hit description =Chromosome chr1 scaffold_135, whole genome shotgun sequence
LQHLLPWLLLIVATMIFFVRTKLLKRRRERRQFGAXXDTVNKSKLNVPYEILXXATDYFSDSNKLGEXXSGSVYKGALPDGTTMAXXXLSFNTSQWAYHFFNEVNLISGIHHXXLVKLLGCSITGPESLLVYEFVPNHSLYDHLS

SEQ ID NO: 6631 - protein, 430 aa, Glycine max
  Coding DNA Sequence Number=SeqID_1364
  Gene Ontology: Mol. function=protein serine/threonine kinase activity; Cellular component=extracellular region; Biological process=protein amino acid phosphorylation
  Homolog annotation: Hit_ID=A0CDF0; Match level="QueryCoverage=81%, HitCoverage=84%, E-value=4e-90, Identity=47%"; Hit description =Chromosome undetermined scaffold_17, whole genome shotgun sequence
  Pfam annotation: Domain name=Pkinase; Domain location=94-346; Score =321.2; E_value=1.9e-93; Accession=PF00069.15; Description=Protein kinase domain
  Pfam annotation: Domain name=Pkinase_C; Domain location=366-412; Score=37.8; E_value=4e-08; Accession=PF00433.14; Description=Protein kinase C terminal domain
  Pfam annotation: Domain name=Pkinase_Tyr; Domain location=94-346; Score=39.7; E_value=7.9e-15; Accession=PF07714.7; Description =Protein tyrosine kinase
  Pfam module annotation: Pfam domain module=Pkinase::Pkinase _C::Pkinase_Tyr; Domain location=94-346::366-412::94-346
MGAVSSACEGCFNDKSDQKPHGNQKGQDDKRKNDVKYDKLDDSSEGKNISDRAKNPSNAKDKGQDGGSHKNSAKQSKNEEAGLDKNKKLTIKDFDLIRVLGRGSFGKVFLVQKKANKKYYALKTLKKEEILNRGHIDNAMTEKNVLQNALHPFVVRLRYSFQNQTTLYLVMDFCPGGELFMQLKKKGRFDEETTRFYTAEVVLALQYLHEKLDIIYRDLKPENILLDANGHIKLTDFGLSKATKRSFSFCGTPEYLAPEILLGQGHDQSVDWWSLGCLIYEMLAGYPPFSSKNKTQLYQDILKTKPVMPSHFSENAKDLLSRLLVRNPSKRLGFNGTEEIKKHSFFENVQWEELVNLKKKPPIVPTLTKPDDLRNFDRIYLNEPVIETPNNNPKILTDPKNNFQDFTYVPKDIGNQSYIEDPKSILDSTK

SEQ ID NO: 6632 - protein, 101 aa, Glycine max
  misc_feature (34)..(34): Xaa can be any naturally occurring amino acid
  misc_feature (39)..(39): Xaa can be any naturally occurring amino acid
  misc_feature (74)..(74): Xaa can be any naturally occurring amino acid
  misc_feature (94)..(94): Xaa can be any naturally occurring amino acid
  Coding DNA Sequence Number=SeqID_303
YIQRYNLHDSIHALSHHSPTHSLPALCRDVITLXGSSDXICIISSHTATVVDPPTVSREYISLYWHLCISVSSXTPLLMLWSLCCIMTRFYLCXILLRYIK

SEQ ID NO: 6633 - protein, 146 aa, Glycine max
  misc_feature (4)..(4): Xaa can be any naturally occurring amino acid
  misc_feature (7)..(7): Xaa can be any naturally occurring amino acid
  misc_feature (15)..(15): Xaa can be any naturally occurring amino acid
  misc_feature (18)..(18): Xaa can be any naturally occurring amino acid
  misc_feature (29)..(29): Xaa can be any naturally occurring amino acid
  misc_feature (31)..(31): Xaa can be any naturally occurring amino acid
  Coding DNA Sequence Number=SeqID_305
SFFXPLXILYLFYKXTKXHAERAAGVAAXAXYALCRARRGVKRIYIRVGQVGSEGRGGLTLDYRSEFCSFVSVWDVVGVVLHYSSIPSFLLPAFLFPTSCSSYVQSIARYSYLLLHCSRVATASVATSQDTTHINLPIIITDIDRI

SEQ ID NO: 6634 - protein, 102 aa, Glycine max
  misc_feature (1)..(1): Xaa can be any naturally occurring amino acid
  misc_feature (8)..(8): Xaa can be any naturally occurring amino acid
  misc_feature (10)..(10): Xaa can be any naturally occurring amino acid
  misc_feature (16)..(16): Xaa can be any naturally occurring amino acid
  misc_feature (53)..(53): Xaa can be any naturally occurring amino acid
  Coding DNA Sequence Number=SeqID_307
XYMQHALXVXTCLSSXAAVLNRRKHIHITCINSTQFIDAASVYKLDVARDAYXSDAGIRRSINLASESSTQCMRACISSAYAWYFIADILPVLIYNATFTCA

SEQ ID NO: 6635 - protein, 99 aa, Glycine max
  Coding DNA Sequence Number=SeqID_309
LPKFIYKLNFLKESNLLHMTMFLVKIWWESIKLKKKWVGELNLGKGEKVNWGGKKKKEKGKRVPILSFWRKKIKIKFLPGKKKKGKRGEKIPGVGGSNI

SEQ ID NO: 6636 - protein, 89 aa, Glycine max
  misc_feature (45)..(45): Xaa can be any naturally occurring amino acid
  Coding DNA Sequence Number=SeqID_311
  Gene Ontology: Mol. function=phosphotransferase activity, alcohol group as acceptor
  Homolog annotation: Hit_ID=A5B9G7; Match level="QueryCoverage=95%, HitCoverage=13%, E-value=2e-18, Identity=52%"; Hit description =Putative uncharacterized protein
LQRDPTGPPEVNFCSKMCARTKRLDRDIVKAIKVDMEPIPIHRAXRRAHHCTNSTGENDTFAKPTDEKPYSPKIPKGWVGKALGHPIPE

SEQ ID NO: 6637 - protein, 152 aa, Glycine max
  misc_feature (5)..(5): Xaa can be any naturally occurring amino acid
  Coding DNA Sequence Number=SeqID_312
LRIPXVELVRFVLTFKCLLTIESYSINSSIEMPSPAMPISYARDLNHDARRNRSRAPSEDPSMEREGRRAARAGCAVEDLGARPRSCGGARRAGDGAAAPVRLRKRRPMGGGRSDRRAGEGEAAPVRLRRRLPGREAAAGGGRKMKNAREVK

SEQ ID NO: 6638 - protein, 127 aa, Glycine max
  misc_feature (67)..(67): Xaa can be any naturally occurring amino acid
  misc_feature (110)..(110): Xaa can be any naturally occurring amino acid
  Coding DNA Sequence Number=SeqID_3109
YHYDSSIQLDIRELAPLSDDAYVRVVDRVMIVVRAVRVHDVLRVVSCRCHTLALASYWTTLIKQPRXRLVYRVAAAPRLVRMDGRVVHPSSQSTAVAVSVCSACLDNLVXRRHALFMYRCTTRHVYV

SEQ ID NO: 6639 - protein, 121 aa, Glycine max
  Coding DNA Sequence Number=SeqID_3111
  Subcellular localization annotation: CTP_CleavageSite=20; ConfidenceScore=5.64e-01
HGRVSTRSAYCFRTPSKLMMAAAAAAARASPSSSSRWGPARVASRALSGPSAGRLPHPASSSHVASTAPTGYPAHPRRRRHPVAALEENAAAAASTWPAAPGGRRQRGPRGRPSGDASVEL

SEQ ID NO: 6640 - protein, 94 aa, Glycine max
  misc_feature (4)..(4): Xaa can be any naturally occurring amino acid
  misc_feature (27)..(28): Xaa can be any naturally occurring amino acid
  misc_feature (35)..(36): Xaa can be any naturally occurring amino acid
  misc_feature (51)..(51): Xaa can be any naturally occurring amino acid
  Coding DNA Sequence Number=SeqID_3113
TICXVVICEHYARTTSHAVPDHQYTVXXAARRATXXLVRSYARLRAAVLVXIYITHDNTPVSCTLLSHTNRRICSCIVDTDLPRVRLQDNIHHA

SEQ ID NO: 6641 - protein, 129 aa, Glycine max
  misc_feature (30)..(30): Xaa can be any naturally occurring amino acid
  misc_feature (41)..(42): Xaa can be any naturally occurring amino acid
  misc_feature (51)..(51): Xaa can be any naturally occurring amino acid
  misc_feature (72)..(72): Xaa can be any naturally occurring amino acid
  misc_feature (114)..(114): Xaa can be any naturally occurring amino acid
  Coding DNA Sequence Number=SeqID_3115
  Subcellular localization annotation: CTP_CleavageSite=36; ConfidenceScore=5.09e-01
ARVRTERYMPRSLRLISDVRSLCLFSTSMXTGCSTRMSSRXXGTRMYAPIXHTATTTPHVVVMPLIFLSTLXHFRSEVVCMIDRQLATLDTHLTTRAAPSARVCADTSSVYLIXLYNVCAGCPCGQVIS

SEQ ID NO: 6642 - protein, 121 aa, Glycine max
  Coding DNA Sequence Number=SeqID_3117
  Subcellular localization annotation: CTP_CleavageSite=31; ConfidenceScore=5.26e-01
RPSLHGARPTSTSLFQHLPWPPQLLPWTPIAAAHSFFCSPWMKAQASASPLGFCTIAAAPLNSHSSVARCYVQQATRHHSRVWTTPVPASSILGESPRYFSTCFFTGRCALLIISVYVWIL

SEQ ID NO: 6643 - protein, 200 aa, Glycine max
  misc_feature (200)..(200): Xaa can be any naturally occurring amino acid
  Coding DNA Sequence Number=SeqID_3119
  Gene Ontology: Mol. function=protein transporter activity; Cellular component=clathrin coat of trans-Golgi network vesicle; Biological process=intracellular protein transport
  Homolog annotation: Hit_ID=P25870; Match level="QueryCoverage=95%, HitCoverage=11%, E-value=2e-46, Identity=46%"; Hit description =Clathrin heavy chain
  Pfam annotation: Domain name=Clathrin; Domain location=1-145; Score =93.2; E_value=8.1e-25; Accession=PF00637.10; Description=Region in Clathrin and VPS
SYVGPPPHLIFYYESRGHFEELIELLEKGLGLERAHTGIFTELGVLYAKYKPENLMKHIQMYYRRSNIPKLLNACEMAHLWAEMRFLYCHHDEYDNAIKLMIEHSPEAWDHAIFIDTITKESLINIELYYKAIQFYLDEQPSHITDLLTHLTPKLDHERVAREVKNRDRDNLPLIKKYLENVQENDLTQVNEVLNQLYIX

SEQ ID NO: 6644 - protein, 99 aa, Glycine max
  misc_feature (81)..(81): Xaa can be any naturally occurring amino acid
  Coding DNA Sequence Number=SeqID_3120
GKTSIPSAVLLLIGFVSISVFFLCNDNIVYCYSLLGFGPTTYRRRYTSPHCFTRERDGRRRYASIIHIYLQRREPHTLSTXLSHTRISVIRTRLPTEGY

SEQ ID NO: 6645 - protein, 169 aa, Glycine max
  misc_feature (122)..(123): Xaa can be any naturally occurring amino acid
  misc_feature (163)..(163): Xaa can be any naturally occurring amino acid
  Coding DNA Sequence Number=SeqID_3121
  Gene Ontology: Mol. function=serine-type endopeptidase activity; Cellular component=intracellular; Biological process=protein modification process
  Homolog annotation: Hit_ID=Q0WRN6; Match level="QueryCoverage=91%, HitCoverage=99%, E-value=4e-63, Identity=76%"; Hit description =Polyubiquitin 4 UBQ4
  Pfam annotation: Domain name=ubiquitin; Domain location=6-74; Score =124.4; E_value=3.4e-34; Accession=PF00240.13; Description=Ubiquitin family
  Pfam annotation: Domain name=ubiquitin; Domain location=82-150; Score= 58.8; E_value=1.9e-14; Accession=PF00240.13; Description=Ubiquitin family
  Pfam module annotation: Pfam domain module=ubiquitin::ubiquitin; Domain location=6-74::82-150
MQIFVKTLTGKTITLEVESSNTIDNVKSKIQDKERIPPDQQRLIFAGKQLDDGRTLADYNIQKESTLHLVLHLHGGMQIFVKTLTGKTITLKVESSNTIDNVNAKMQDKEDMPPDQQKLICXXNQVKDDITVANDNMQKESTLHLVLRLGNIIQICSNTLTIXTITLEL

SEQ ID NO: 6646 - protein, 217 aa, Glycine max
  Coding DNA Sequence Number=SeqID_3122
  Gene Ontology: Mol. function=oxidoreductase activity; Cellular component=extracellular region; Biological process=lignin catabolic process
  Homolog annotation: Hit_ID=A7QTK0; Match level="QueryCoverage=98%, HitCoverage=45%, E-value=2e-52, Identity=46%"; Hit description =Chromosome undetermined scaffold_169, whole genome shotgun sequence
  Pfam annotation: Domain name=Cu-oxidase_2; Domain location=79-202; Score=57.4; E_value=4.8e-14; Accession=PF07731.4; Description =Multicopper oxidase
KRLNEADTYQVPTNISTHILSTLSINTLPRPENHTCAEPNGARLYSRVSTISFENPLTVILEAYFSHIKGVYLTGLSKFPPLKYDSKAEYLPLELQIPKKGATGAVIKYGSPQDLVFQGANLVIGIDHLMHMHGTRFFAVGYGVGNFDIHKGRKTYNLIDPLLMNTILVSTNGWGTIRYRGFNPERHLSWGTETVFIVTNGEGDIEIFPLPPDIPQC

SEQ ID NO: 6647 - protein, 141 aa, Glycine max
  misc_feature (10)..(10): Xaa can be any naturally occurring amino acid
  misc_feature (21)..(21): Xaa can be any naturally occurring amino acid
  misc_feature (74)..(74): Xaa can be any naturally occurring amino acid
  misc_feature (136)..(136): Xaa can be any naturally occurring amino acid
  Coding DNA Sequence Number=SeqID_3123
TSSTYSSRVXRSFLLTSFPLXDRRDVGVIVGLPGARWSSLEEKAPPRAPLPLGGGLQRGWTDVPAVILTGTSTXGRKLRLWSAACAARSQNKTSPPRTQRIWKCPSSRSPLLIHTDLNSRPDWLVLVPLMYSMPSXVLLAQ

SEQ ID NO: 6648 - protein, 135 aa, Glycine max
  misc_feature (33)..(34): Xaa can be any naturally occurring amino acid
  Coding DNA Sequence Number=SeqID_3125
IILISKINDLDIFLIFIFLFNFLYFFPKINPPXXMLSVLCLFPTLTIKPCRHRTSVKPAPQGGGAVAHHCDGPPLPLMGILDEEQEREGEQSTVMRSRLVALVGVIDWFYDALRDWSLFQALEGKVVFRCGSQRR

SEQ ID NO: 6649 - protein, 145 aa, Glycine max
  misc_feature (11)..(11): Xaa can be any naturally occurring amino acid
  misc_feature (33)..(33): Xaa can be any naturally occurring amino acid
  misc_feature (38)..(38): Xaa can be any naturally occurring amino acid
  misc_feature (42)..(42): Xaa can be any naturally occurring amino acid
  misc_feature (44)..(44): Xaa can be any naturally occurring amino acid
  misc_feature (72)..(72): Xaa can be any naturally occurring amino acid
  misc_feature (89)..(89): Xaa can be any naturally occurring amino acid
  misc_feature (110)..(110): Xaa can be any naturally occurring amino acid
  Coding DNA Sequence Number=SeqID_3127
SDLSYDTTLQXHYIRALIRRSRHCETQRVLQTXQYARXRYRXLXCYIHTRLDIYLSTISRSSRDAHISPHLXRCTPTDTPHSFSHDAPXPTLSPTLFCSALSHTRTDKTXISDYTRHEILYICRRSVVRARTLHVHALPFMIFSS

SEQ ID NO: 6650 - protein, 74 aa, Glycine max
  Coding DNA Sequence Number=SeqID_3129
  Subcellular localization annotation: CTP_CleavageSite=69; ConfidenceScore=5.04e-01
VRALNGIMPFSVVGSIQNPGSISNVAAWKRKPIFKSISSLNDPSKIGAARYTGRLSPAPCYIQFSKLVPCMLSW

SEQ ID NO: 6651 - protein, 107 aa, Glycine max
  misc_feature (2)..(2): Xaa can be any naturally occurring amino acid
  misc_feature (10)..(10): Xaa can be any naturally occurring amino acid
  misc_feature (38)..(38): Xaa can be any naturally occurring amino acid
  misc_feature (44)..(44): Xaa can be any naturally occurring amino acid
  misc_feature (61)..(62): Xaa can be any naturally occurring amino acid
  misc_feature (69)..(69): Xaa can be any naturally occurring amino acid
  misc_feature (84)..(84): Xaa can be any naturally occurring amino acid
  misc_feature (88)..(88): Xaa can be any naturally occurring amino acid
  misc_feature (90)..(92): Xaa can be any naturally occurring amino acid
  misc_feature (94)..(94): Xaa can be any naturally occurring amino acid
  misc_feature (96)..(96): Xaa can be any naturally occurring amino acid
  Coding DNA Sequence Number=SeqID_3131
RXCDYICSTXTAHYVAAYCVFTLTSFALTSNDHHMHFXITVCTXYVCYANTSYYYNTSESXXSELNVDXYDILLFTYTCSIVSXRASXLXXXTXSXVDISLIYIYIV

SEQ ID NO: 6652 - protein, 66 aa, Glycine max
  misc_feature (16)..(16): Xaa can be any naturally occurring amino acid
  Coding DNA Sequence Number=SeqID_3133
  Homolog annotation: Hit_ID=A7PB81; Match level="QueryCoverage=98%, HitCoverage=7%, E-value=9e-09, Identity=52%"; Hit description =Chromosome chr16 scaffold_10, whole genome shotgun sequence
SSVHALLEESTRLISXVENSRDEDGHSKKAMESLGFALHVVYAEVTEAKENLQRIPPGSERYHAQS

SEQ ID NO: 6653 - protein, 183 aa, Glycine max
  misc_feature (160)..(160): Xaa can be any naturally occurring amino acid
  Coding DNA Sequence Number=SeqID_3134
  Gene Ontology: Mol. function=gamma-glutamyl hydrolase activity; Cellular component=extracellular region; Biological process =glutamine metabolic process
  Homolog annotation: Hit_ID=P93164; Match level="QueryCoverage=100%, HitCoverage=53%, E-value=2e-79, Identity=82%"; Hit description=Gamma- glutamyl hydrolase precursor
  Pfam annotation: Domain name=Peptidase_C26; Domain location=27-183; Score=-18.1; E_value=7.3e-09; Accession=PF07722.3; Description =Peptidase C26
HIFLPRQLHDDDSVSCTATDPNLNYKPVIGILTHPGDGASGPFSNTTGVSYFAASYNKFREARGARVIPLIYHESPENLNKKLDLYNGVLFTGGGAASGPYLETLGNIFNIALYNNDAGDHFPPIAFNLGANLVIMIESEQTAIPEPFTASRLPSSLILXKEANAKGSLLQRLPSDLVTQLKT

SEQ ID NO: 6654 - protein, 113 aa, Glycine max
  misc_feature (11)..(11): Xaa can be any naturally occurring amino acid
  misc_feature (32)..(32): Xaa can be any naturally occurring amino acid
  misc_feature (52)..(52): Xaa can be any naturally occurring amino acid
  Coding DNA Sequence Number=SeqID_3135
YLLARCSSCMXCIDVIQDVQNAYQAAVVYGTXADRCRLAITSVPNTHNRSTXTCEMSRMKLYTGNYNTHASVTDYITMRITEYATYRLPVYAISIVMSCHTCLVSICHSLCLI

SEQ ID NO: 6655 - protein, 123 aa, Glycine max
  misc_feature (19)..(19): Xaa can be any naturally occurring amino acid
  misc_feature (60)..(60): Xaa can be any naturally occurring amino acid
  misc_feature (92)..(92): Xaa can be any naturally occurring amino acid
  misc_feature (110)..(111): Xaa can be any naturally occurring amino acid
  misc_feature (116)..(116): Xaa can be any naturally occurring amino acid
  Coding DNA Sequence Number=SeqID_3137
NDHTTPQHATPYWVKRRRXTHLCHDRDTYRSNIQSDKRTQLARVISRIIVGLILPNSRPXGGVGRPVVPARGGDYKSPYVFATEQNQELCRXGHDKQREKIYISNEDVEXXGREEXEERKKKE

SEQ ID NO: 6656 - protein, 165 aa, Glycine max
  misc_feature (140)..(140): Xaa can be any naturally occurring amino acid
  Coding DNA Sequence Number=SeqID_3139
  Gene Ontology: Mol. function=cellulose synthase (UDP-forming) activity; Cellular component=membrane; Biological process=cellulose biosynthetic process
  Homolog annotation: Hit_ID=Q2IB43; Match level="QueryCoverage=100%, HitCoverage=16%, E-value=5e-51, Identity=61%"; Hit description =Cellulose synthase 1
SLPINVSDRLHQVLRCALGSHDFVYRRHCPLWHGIAGCHLRWLHIQLHINTFVYPFTSLSLDAYGTLHAICLLTGELIIPSLYNLASALFRGLFLHLPATSVLQLLWSGVTIEAWWRHDHLRMIETASAHLFAAIQRFLXMLVGVDTNFTVTDKAAEELSVVRLY

SEQ ID NO: 6657 - protein, 121 aa, Glycine max
  misc_feature (6)..(6): Xaa can be any naturally occurring amino acid
  Coding DNA Sequence Number=SeqID_3140
AHRVRXGCWAGVWLHMRQGMEGDFSRSHSTHTHIIHTHQIHTHQENRTARPRCPRHARGAPPRLLLTAQLHYRQHAERAVRGRRIRGVSLCDRTNNTPHKNPAALPAGQEVRWVGVGWTCR

SEQ ID NO: 6658 - protein, 67 aa, Glycine max
  misc_feature (2)..(2): Xaa can be any naturally occurring amino acid
  Coding DNA Sequence Number=SeqID_3142
EXARRPPPPVNYRLSIVERPSQLLRHPLASLHFSLEIHRSLINTIPINTSQHQQTTKQDNIVATMSF

SEQ ID NO: 6659 - protein, 231 aa, Glycine max
  misc_feature (28)..(28): Xaa can be any naturally occurring amino acid
  misc_feature (33)..(34): Xaa can be any naturally occurring amino acid
  misc_feature (47)..(47): Xaa can be any naturally occurring amino acid
  misc_feature (59)..(59): Xaa can be any naturally occurring amino acid
  misc_feature (74)..(74): Xaa can be any naturally occurring amino acid
  misc_feature (93)..(93): Xaa can be any naturally occurring amino acid
  misc_feature (126)..(126): Xaa can be any naturally occurring amino acid
  misc_feature (193)..(193): Xaa can be any naturally occurring amino acid
  misc_feature (198)..(199): Xaa can be any naturally occurring amino acid
  misc_feature (202)..(202): Xaa can be any naturally occurring amino acid
  Coding DNA Sequence Number=SeqID_3144
SGETRSRRHTWGVTNITSTRARTRHREXDTTRXXRENRETRHGRRSXRARDQSRGESRXESARDRHAERDGSHXIQKNECRLRRRPVHELPRXRTPYKHSGEATTDTHEQRTAPTNGTTRSRTAEXRRSDDDETPTHRQPLNTRPEARGAPRAASAAMPRTASRNETARREKDTEKRHTTTNKSGRARGARTXARGRXXAYXVRHNTTTIGEASDAQTTPTSTHELRAGER

SEQ ID NO: 6660 - protein, 65 aa, Glycine max
  misc_feature (15)..(15): Xaa can be any naturally occurring amino acid
  misc_feature (43)..(43): Xaa can be any naturally occurring amino acid
  Coding DNA Sequence Number=SeqID_3145
  Gene Ontology: Mol. function=helicase activity; Biological process =protein amino acid phosphorylation
  Homolog annotation: Hit_ID=Q2R1R7; Match level="QueryCoverage=81%, HitCoverage=3%, E-value=2e-12, Identity=73%"; Hit description=AT hook motif-containing protein, putative
IFVDGYGGICKTYLXEAITAKLCSEGKIVLAVVSSHIAALLLXGAHSRFHIPLSLQKSQHVKVPT

SEQ ID NO: 6661 - protein, 162 aa, Glycine max
  misc_feature (143)..(143): Xaa can be any naturally occurring amino acid
  Coding DNA Sequence Number=SeqID_3146
  Gene Ontology: Mol. function=ribonuclease H activity; Cellular component=chromatin; Biological process=RNA-dependent DNA replication
  Homolog annotation: Hit_ID=A7Q2I1; Match level="QueryCoverage=83%, HitCoverage=47%, E-value=4e-37, Identity=58%"; Hit description =Chromosome chr1 scaffold_46, whole genome shotgun sequence
  Pfam annotation: Domain name=RnaseH; Domain location=17-141; Score =26.3; E_value=7.7e-08; Accession=PF00075.14; Description=RNase H
MARRDSPPNFAQDSCTIEFDGASRGNPGRAGAGAVLRAPDNTVLFRSREGLGSATNNVAEYRALNLGLETALNNGFRNVRVQGDSQLVCKQVQGEWRTHHPKMAELCGQAQGLMSQFDSCDIQHVPREFNSEADAQASRATNXAQGESQYDNAGRGYGRRGY

SEQ ID NO: 6662 - protein, 111 aa, Glycine max
  misc_feature (13)..(15): Xaa can be any naturally occurring amino acid
  misc_feature (26)..(27): Xaa can be any naturally occurring amino acid
  misc_feature (32)..(32): Xaa can be any naturally occurring amino acid
  misc_feature (35)..(35): Xaa can be any naturally occurring amino acid
  misc_feature (43)..(43): Xaa can be any naturally occurring amino acid
  misc_feature (45)..(45): Xaa can be any naturally occurring amino acid
  misc_feature (48)..(48): Xaa can be any naturally occurring amino acid
  misc_feature (52)..(52): Xaa can be any naturally occurring amino acid
  misc_feature (73)..(75): Xaa can be any naturally occurring amino acid
  misc_feature (77)..(79): Xaa can be any naturally occurring amino acid
  misc_feature (110)..(110): Xaa can be any naturally occurring amino acid
  Coding DNA Sequence Number=SeqID_3147
  Subcellular localization annotation: CTP_CleavageSite=31; ConfidenceScore=5.20e-01
YTLYSTGKRMSKXXXSDARSVLLSQXXSRIRXRRXAARVVCYXPXRHXLAAXARIPIVSRCADIRASDTCDIXXXWXXXSFIIQCSLSLVCFSLSSKIIYINTVSYEYIXS

SEQ ID NO: 6663 - protein, 131 aa, Glycine max
  misc_feature (6)..(6): Xaa can be any naturally occurring amino acid
  misc_feature (16)..(16): Xaa can be any naturally occurring amino acid
  misc_feature (80)..(80): Xaa can be any naturally occurring amino acid
  misc_feature (99)..(99): Xaa can be any naturally occurring amino acid
  Coding DNA Sequence Number=SeqID_3149
  Subcellular localization annotation: CTP_CleavageSite=83; ConfidenceScore=5.11e-01
YAPRPXSTLSIAMPLXYSAHALSINHSQPLPNMMPHLSTTPTTSTKLYTTSYCLHSLIKLYTLKYCIGLLTALSTIHRAXYLRCFHTSTSLLRTIFDRXYMSEIYDHIIVIILYMRDTRSPCSFLCVLSHR

SEQ ID NO: 6664 - protein, 46 aa, Glycine max
  Coding DNA Sequence Number=SeqID_3151
YWPHSLKQPKKLNYMHSTLNRCQNDQTPAKTLGKSKYLQLFSNTII

SEQ ID NO: 6665 - protein, 96 aa, Glycine max
  Coding DNA Sequence Number=SeqID_3153
GVFSFSIKKKFCGPAFLSFLVYRPLGGNDFNCQKYSISSHFLHQRGGQLIWRRRGSSQFLFGGARPRVAKLQFLKGSQPVSRPLESNPSMSRFRGV

SEQ ID NO: 6666 - protein, 151 aa, Glycine max
  misc_feature (2)..(2): Xaa can be any naturally occurring amino acid
  misc_feature (7)..(8): Xaa can be any naturally occurring amino acid
  misc_feature (11)..(11): Xaa can be any naturally occurring amino acid
  misc_feature (20)..(20): Xaa can be any naturally occurring amino acid
  misc_feature (30)..(30): Xaa can be any naturally occurring amino acid
  misc_feature (33)..(33): Xaa can be any naturally occurring amino acid
  misc_feature (35)..(35): Xaa can be any naturally occurring amino acid
  misc_feature (41)..(42): Xaa can be any naturally occurring amino acid
  misc_feature (49)..(50): Xaa can be any naturally occurring amino acid
  misc_feature (52)..(52): Xaa can be any naturally occurring amino acid
  misc_feature (54)..(54): Xaa can be any naturally occurring amino acid
  misc_feature (56)..(56): Xaa can be any naturally occurring amino acid
  misc_feature (58)..(58): Xaa can be any naturally occurring amino acid
  misc_feature (63)..(64): Xaa can be any naturally occurring amino acid
  misc_feature (66)..(66): Xaa can be any naturally occurring amino acid
  misc_feature (69)..(69): Xaa can be any naturally occurring amino acid
  misc_feature (81)..(81): Xaa can be any naturally occurring amino acid
  misc_feature (84)..(85): Xaa can be any naturally occurring amino acid
  misc_feature (89)..(89): Xaa can be any naturally occurring amino acid
  misc_feature (94)..(94): Xaa can be any naturally occurring amino acid
  misc_feature (98)..(98): Xaa can be any naturally occurring amino acid
  misc_feature (101)..(102): Xaa can be any naturally occurring amino acid
  misc_feature (109)..(109): Xaa can be any naturally occurring amino acid
  misc_feature (113)..(113): Xaa can be any naturally occurring amino acid
  misc_feature (122)..(122): Xaa can be any naturally occurring amino acid
  misc_feature (126)..(126): Xaa can be any naturally occurring amino acid
  misc_feature (130)..(132): Xaa can be any naturally occurring amino acid
  misc_feature (137)..(137): Xaa can be any naturally occurring amino acid
  misc_feature (149)..(149): Xaa can be any naturally occurring amino acid
  Coding DNA Sequence Number=SeqID_3155
  Subcellular localization annotation: CTP_CleavageSite=62; ConfidenceScore=5.32e-01
FXYLTDXXLDXVTASSSSLXATLTYDGSAXTNXSXRRTTLXXHAVTILXXSXIXSXSXIRVDXXMXTAXSISVDGARLLIXTNXXCATXRVHLXRSAXPVXXRDTVMVXHCSXHESLLRCIXRADXDVTXXXTSWRXTPTSAHYVERRXQS

SEQ ID NO: 6667 - protein, 180 aa, Glycine max
  misc_feature (52)..(52): Xaa can be any naturally occurring amino acid
  misc_feature (63)..(63): Xaa can be any naturally occurring amino acid
  misc_feature (83)..(83): Xaa can be any naturally occurring amino acid
  Coding DNA Sequence Number=SeqID_3157
  Homolog annotation: Hit_ID=Q9AXJ7; Match level="QueryCoverage=93%, HitCoverage=40%, E-value=2e-20, Identity=40%"; Hit description =Phosphatase-like protein Mtc923
MEGEKENPDCNATLVNSFCEITSSSKEEALFFLESHNFDLDAAVSTFLDNAXNPLIPQNDDVXVAANQTPTPVPLRPDLTPRXFNLFRSPFRVSVANRTPYEGRIPEGSSERNPSTSRQGKNPISRGISNAPSGEENPDSRSQFPNRRVNNLGGKKKGEVWSGPPPGGNRHTPKGGGEIF

SEQ ID NO: 6668 - protein, 161 aa, Glycine max
  misc_feature (3)..(3): Xaa can be any naturally occurring amino acid
  misc_feature (7)..(7): Xaa can be any naturally occurring amino acid
  misc_feature (17)..(17): Xaa can be any naturally occurring amino acid
  misc_feature (47)..(47): Xaa can be any naturally occurring amino acid
  misc_feature (50)..(50): Xaa can be any naturally occurring amino acid
  misc_feature (52)..(52): Xaa can be any naturally occurring amino acid
  misc_feature (60)..(60): Xaa can be any naturally occurring amino acid
  misc_feature (67)..(67): Xaa can be any naturally occurring amino acid
  misc_feature (69)..(69): Xaa can be any naturally occurring amino acid
  misc_feature (77)..(77): Xaa can be any naturally occurring amino acid
  misc_feature (79)..(79): Xaa can be any naturally occurring amino acid
  misc_feature (87)..(89): Xaa can be any naturally occurring amino acid
  misc_feature (115)..(115): Xaa can be any naturally occurring amino acid
  misc_feature (118)..(119): Xaa can be any naturally occurring amino acid
  misc_feature (136)..(136): Xaa can be any naturally occurring amino acid
  misc_feature (139)..(139): Xaa can be any naturally occurring amino acid
  misc_feature (142)..(142): Xaa can be any naturally occurring amino acid
  misc_feature (151)..(151): Xaa can be any naturally occurring amino acid
  misc_feature (160)..(160): Xaa can be any naturally occurring amino acid
  Coding DNA Sequence Number=SeqID_3158
VWXLSTXIRARASIYSXHIVAPTIESHRADFRSFLFVYDHDDYRIHXRMXVXVVVVVLRXRHLALAXYXILYILSIXIXMTRSFLHXXXRHARSCSVRHSRARYTYRSADHIIVXRSXXPVIRRCARVPRDRASDXRHXLRXLAYVIICAXMQISRIELXR

SEQ ID NO: 6669 - protein, 123 aa, Glycine max
  misc_feature (3)..(6): Xaa can be any naturally occurring amino acid
  misc_feature (8)..(10): Xaa can be any naturally occurring amino acid
  misc_feature (12)..(12): Xaa can be any naturally occurring amino acid
  misc_feature (23)..(26): Xaa can be any naturally occurring amino acid
  misc_feature (29)..(31): Xaa can be any naturally occurring amino acid
  misc_feature (34)..(34): Xaa can be any naturally occurring amino acid
  misc_feature (38)..(38): Xaa can be any naturally occurring amino acid
  misc_feature (50)..(50): Xaa can be any naturally occurring amino acid
  misc_feature (56)..(58): Xaa can be any naturally occurring amino acid
  misc_feature (60)..(61): Xaa can be any naturally occurring amino acid
  misc_feature (64)..(65): Xaa can be any naturally occurring amino acid
  misc_feature (68)..(69): Xaa can be any naturally occurring amino acid
  misc_feature (78)..(78): Xaa can be any naturally occurring amino acid
  misc_feature (83)..(87): Xaa can be any naturally occurring amino acid
  misc_feature (118)..(118): Xaa can be any naturally occurring amino acid
  Coding DNA Sequence Number=SeqID_3160
LVXXXXSXXXAXPPGGARWRGGXXXXAWXXXVVXSAWXLSLCGLRACGVXVWSAGXXXRXXRGXXGRXXGAPRARAAXAVGAXXXXXTALVPSRASIRRHSHPLRDTMPGPVAIHTDXTSHDL

SEQ ID NO: 6670 - protein, 177 aa, Glycine max
  misc_feature (6)..(6): Xaa can be any naturally occurring amino acid
  misc_feature (9)..(9): Xaa can be any naturally occurring amino acid
  misc_feature (12)..(14): Xaa can be any naturally occurring amino acid
  misc_feature (19)..(19): Xaa can be any naturally occurring amino acid
  misc_feature (24)..(26): Xaa can be any naturally occurring amino acid
  misc_feature (28)..(28): Xaa can be any naturally occurring amino acid
  misc_feature (33)..(33): Xaa can be any naturally occurring amino acid
  misc_feature (35)..(35): Xaa can be any naturally occurring amino acid
  misc_feature (38)..(39): Xaa can be any naturally occurring amino acid
  misc_feature (44)..(44): Xaa can be any naturally occurring amino acid
  misc_feature (48)..(48): Xaa can be any naturally occurring amino acid
  misc_feature (51)..(51): Xaa can be any naturally occurring amino acid
  misc_feature (55)..(56): Xaa can be any naturally occurring amino acid
  misc_feature (58)..(59): Xaa can be any naturally occurring amino acid
  misc_feature (71)..(71): Xaa can be any naturally occurring amino acid
  Coding DNA Sequence Number=SeqID_3162
  Gene Ontology: Mol. function=glycylpeptide N-tetradecanoyltransferase activity; Cellular component=cytoplasm; Biological process=N-terminal protein myristoylation
  Homolog annotation: Hit_ID=Q9LTR9; Match level="QueryCoverage=100%, HitCoverage=40%, E-value=6e-46, Identity=54%"; Hit description =Glycylpeptide N-tetradecanoyltransferase 1
  Pfam annotation: Domain name=NMT; Domain location=16-177; Score=95.0; E_value=2.4e-25; Accession=PF01233.10; Description=Myristoyl -CoA:protein N-myristoyltransferase, N-terminal domain
QPGGQXKEXGDXXXPEGPXEPPTXXXEXKQEPXNXPRXXEWTTXDKDXEEXGDEXXAXXKNFFFFDEENMXRFNYFTHPPRRALRVPGYYQSWHIGVRAKTSKKLVAFIRGIPARIRANEEGVTMAEDNFLGVHKTIRSERLGPRMIPAAPRSGHVEQFWAAGLYGWGLVIPRAVAT

SEQ ID NO: 6671 - protein, 74 aa, Glycine max
  Coding DNA Sequence Number=SeqID_3163
AAILTRIPILNAQCCIMKNCVSVFLGSMQAYRMEARKYVFRLALVVRKLRGQRRLCFKLGIVGLFKSLYLCPYF

SEQ ID NO: 6672 - protein, 146 aa, Glycine max
  misc_feature (12)..(12): Xaa can be any naturally occurring amino acid
  Coding DNA Sequence Number=SeqID_3165
LFTSVLVPFVFXVGARHTSYLSRHTADLDSSRSSFVVALVSATCLDRIYMNIYLINNINRYTSIYSMKKKERRRGAAQRHVYYRRNLVVCVESVLFPNSFLIYIDILNKNIKHVLDHINNKIKNLLYIPPHTISLARSCHICNHRA

SEQ ID NO: 6673 - protein, 60 aa, Glycine max
  Coding DNA Sequence Number=SeqID_3167
KMKKWKLSEANRRTQKNKLEKLLTRPRKFWVNTPIKVKKKKWKRQRKANKKDYNNKKGAS

SEQ ID NO: 6674 - protein, 147 aa, Glycine max
  misc_feature (8)..(8): Xaa can be any naturally occurring amino acid
  misc_feature (13)..(13): Xaa can be any naturally occurring amino acid
  misc_feature (32)..(33): Xaa can be any naturally occurring amino acid
  misc_feature (47)..(47): Xaa can be any naturally occurring amino acid
  misc_feature (49)..(50): Xaa can be any naturally occurring amino acid
  misc_feature (53)..(54): Xaa can be any naturally occurring amino acid
  misc_feature (74)..(74): Xaa can be any naturally occurring amino acid
  misc_feature (84)..(84): Xaa can be any naturally occurring amino acid
  misc_feature (87)..(87): Xaa can be any naturally occurring amino acid
  misc_feature (108)..(108): Xaa can be any naturally occurring amino acid
  Coding DNA Sequence Number=SeqID_3169
IAEARLSXSVCCXTLIMSLRIVSSCCFRQLSXXALKVKLLPCQIRLXSXXPVXXALVDVSPLRTATTNLQPCRXKSKKSRKKDXKGXDEEEEEDDDEKDEVDEHEDGXLPGEKERVLKVGQVRTDKVLKLATHSARMVDEAFLEGRL

SEQ ID NO: 6675 - protein, 128 aa, Glycine max
  Coding DNA Sequence Number=SeqID_3171
YLQRLYTTIRRPLHPTKRSTRPPKSEEQRTGEYGSDHLPHPIEYEITVYASAETILMGRCDVRVNSPILVDRHLPPPRLHGPRYRARDHRRETHAPLAPTLCRCCIIVTSFLARPLRPRAHPPSPRVR

SEQ ID NO: 6676 - protein, 57 aa, Glycine max
  Coding DNA Sequence Number=SeqID_3173
ACLQYFFYTNLLQYLNHHTSYIEEKPACKKIILKVLKVIYRYLSSTMMLMIRTQLAG

SEQ ID NO: 6677 - protein, 330 aa, Glycine max
  Coding DNA Sequence Number=SeqID_3175
  Homolog annotation: Hit_ID=A0DZ70; Match level="QueryCoverage=38%, HitCoverage=46%, E-value=7e-09, Identity=37%"; Hit description =Chromosome undetermined scaffold_7, whole genome shotgun sequence
MRRPSAINTKVQDDIYAFSSTAPDSSNTNLDEGSSPYPLYDNNLSDSDSFSDNSKKIRKKRNTYQKISDDIRVDLLESVKNGETLKAAAKRHRINYSSAKSILHTYRKEGRILKKSAQERSIKKKVVSTPEKVPRSARKENEHSTYGTRKAVQSLAPLAERKKFQTDNHQYDEEVSPMKPVKELNSNYANMMKMEHPENNIKASVEAPKPLKEMTVMTETSGMNYPGHVEGMHPNHMVYRQETPKQKEGKLFENFFMNYSDSHVNEAGYGQTYTEGPECTNYMYFPREFDSFNDMVTSLQGNSSHVDDLTQEELICLSEQTIDISRWNME

SEQ ID NO: 6678 - protein, 100 aa, Glycine max
  misc_feature (36)..(36): Xaa can be any naturally occurring amino acid
  Coding DNA Sequence Number=SeqID_3176
EIMKYINRTRRVDYRGIRIYLMTLAYNCVRARRLSXPTAATTSTSPDPHGSQRALVNKNLGILRTENTRQPKEKGSHGRERCDGDVTGVVRACHYAACGL

SEQ ID NO: 6679 - protein, 104 aa, Glycine max
  Coding DNA Sequence Number=SeqID_3178
  Homolog annotation: Hit_ID=O81841; Match level="QueryCoverage=57%, HitCoverage=37%, E-value=3e-13, Identity=66%"; Hit description =Putative uncharacterized protein AT4g27380
MTKSRNKKKRDDDTVSMDVSETKSVVSESAPQAMDTSETGDAKLAARNRNLTSAKKGKPMKRTKNARKVKAVAKAIAKNDKYEEKASKNVSKKQRTLSAKKLYE

SEQ ID NO: 6680 - protein, 116 aa, Glycine max
  misc_feature (43)..(43): Xaa can be any naturally occurring amino acid
  Coding DNA Sequence Number=SeqID_3179
TYSQLLSQLYTNTYHYSQHHSTLQLTPYSSHSAPSPLSHNDIXTHITNKHTIRTTNTHHIISHCSPLYPPTPPPPIHFTQFCRLLYLSSSIHYCLAPSLSPLLSIFATPTHHPSLF

SEQ ID NO: 6681 - protein, 178 aa, Glycine max
  misc_feature (161)..(161): Xaa can be any naturally occurring amino acid
  Coding DNA Sequence Number=SeqID_3181
  Subcellular localization annotation: CTP_CleavageSite=61; ConfidenceScore=5.65e-01
QRRASSSHYCRHRPSLYCSLWSTMQRLTRRRPSPYSYASTPFATCVRASLSVTSRSYSYCVCSASAVCYRCCIYCYSCPSVLSRPTTPVTFSDSGDLLHDLHYCLTYPSTSPSHMLTPRSICVRFTLQHLQSRSSQGIYERQSVLSSSRSSLVYSAAHTSXFWRIYLPHHLTSCYLNI

SEQ ID NO: 6682 - protein, 132 aa, Glycine max
  misc_feature (81)..(81): Xaa can be any naturally occurring amino acid
  misc_feature (116)..(116): Xaa can be any naturally occurring amino acid
  Coding DNA Sequence Number=SeqID_3183
  Gene Ontology: Mol. function=protein serine/threonine kinase activity; Biological process=protein amino acid phosphorylation
  Homolog annotation: Hit_ID=UPI000034F553; Match level="QueryCoverage =96%, HitCoverage=16%, E-value=5e-30, Identity=56%"; Hit description =protein kinase family protein
TRWALVKVAEPGDLVIALHVLDSITEGTASLLSLVKTFDSVLGVYEGFCNLKQVGLRLKVCRGGSVRKALVQEAKAFGGSXVILEPSKIYYTNPSFPGVANYCPKKCPNCISVCSXENGKIGFRREADGSGR

SEQ ID NO: 6683 - protein, 116 aa, Glycine max
  misc_feature (1)..(1): Xaa can be any naturally occurring amino acid
  misc_feature (99)..(99): Xaa can be any naturally occurring amino acid
  Coding DNA Sequence Number=SeqID_3184
XNKLNILLTPLLAIRPQRYRVLLLSCDFLCYMLPLLHLVAVDFDHEPLCAIITNCASASDTYLPNRASACWCHSVHVFCSLYSIYFPLSSRSRTESRSXYHYTLVTLRTRALTPLA

SEQ ID NO: 6684 - protein, 302 aa, Glycine max
  misc_feature (96)..(96): Xaa can be any naturally occurring amino acid
  misc_feature (111)..(111): Xaa can be any naturally occurring amino acid
  misc_feature (137)..(137): Xaa can be any naturally occurring amino acid
  misc_feature (165)..(165): Xaa can be any naturally occurring amino acid
  misc_feature (196)..(197): Xaa can be any naturally occurring amino acid
  misc_feature (285)..(285): Xaa can be any naturally occurring amino acid
  misc_feature (292)..(292): Xaa can be any naturally occurring amino acid
  Coding DNA Sequence Number=SeqID_3186
GGHHSHTHIHSPIPCYTQTETTPHIPQSVRNNKTETKDALKQRTKYKIVITNINQYLVTLLLYKSDIQIIFYLPLVIISYVGVLSTNIYCVLSVCXVVVHGSVCMVGWLRXRSRCDGSSLLVVVDLLVTPRAWRAPXGLGSAASRRRPRRLGPRSVATAQAGARXLLRSLLGVSPPCLFVVVLGSSCDSHVICCLXXVAPALCAASSCTRALVACSYLLCQPHFTNLHTVLSLRAAAAWCRGAVRACPRASCVNAILPILSCAVAWGNTNNTTTHLTNKPEEAQXHRRGIPXTLTHHTHITH

SEQ ID NO: 6685 - protein, 90 aa, Glycine max
  Coding DNA Sequence Number=SeqID_3188
  Subcellular localization annotation: CTP_CleavageSite=76; ConfidenceScore=5.47e-01
PSEWDDCSKGSKSTLPGFKQPRHQQEWNNPQTKLNGQATLQSSFFVTQQASRNSATFNSSNPLHSALGSSSGLPLLQSEGTNVNVGRRVS

SEQ ID NO: 6686 - protein, 112 aa, Glycine max
  misc_feature (13)..(13): Xaa can be any naturally occurring amino acid
  misc_feature (111)..(111): Xaa can be any naturally occurring amino acid
  Coding DNA Sequence Number=SeqID_3190
PSDESNRLKLEIXRRGHDRYRTLVLYTCACNHADSLVDTLHTHRSIHITHVQRSTSMPDITQYICSRNVHAVEILDSRRYNYADARRTPSTSYALTNRLLSMECTSTELSXQ

SEQ ID NO: 6687 - protein, 183 aa, Glycine max
  misc_feature (3)..(3): Xaa can be any naturally occurring amino acid
  misc_feature (18)..(18): Xaa can be any naturally occurring amino acid
  misc_feature (36)..(36): Xaa can be any naturally occurring amino acid
  misc_feature (43)..(43): Xaa can be any naturally occurring amino acid
  misc_feature (52)..(52): Xaa can be any naturally occurring amino acid
  misc_feature (55)..(55): Xaa can be any naturally occurring amino acid
  misc_feature (57)..(58): Xaa can be any naturally occurring amino acid
  misc_feature (61)..(63): Xaa can be any naturally occurring amino acid
  misc_feature (65)..(65): Xaa can be any naturally occurring amino acid
  misc_feature (76)..(77): Xaa can be any naturally occurring amino acid
  misc_feature (79)..(79): Xaa can be any naturally occurring amino acid
  misc_feature (97)..(97): Xaa can be any naturally occurring amino acid
  misc_feature (112)..(112): Xaa can be any naturally occurring amino acid
  misc_feature (126)..(126): Xaa can be any naturally occurring amino acid
  misc_feature (138)..(138): Xaa can be any naturally occurring amino acid
  misc_feature (157)..(157): Xaa can be any naturally occurring amino acid
  misc_feature (159)..(159): Xaa can be any naturally occurring amino acid
  misc_feature (166)..(166): Xaa can be any naturally occurring amino acid
  misc_feature (168)..(168): Xaa can be any naturally occurring amino acid
  misc_feature (171)..(172): Xaa can be any naturally occurring amino acid
  misc_feature (180)..(180): Xaa can be any naturally occurring amino acid
  Coding DNA Sequence Number=SeqID_3192
LEXGAHQDRLYDKHYTIXTTPRNVLTHNMAALPYTXTLNEWVXLLLSLWVCXYGXRXXQKXXXLXYMCVESASVCXXLXRLVVIVIFCVSRSPCALXCVFVFLDRRGASCLXATTSITQHTHSTTXRSIRLIPPTHLXERRTHRSIMIYISYPLYRXIXTASHDNXAXTRXXHAQARWGXTAR

SEQ ID NO: 6688 - protein, 117 aa, Glycine max
  Coding DNA Sequence Number=SeqID_3193
SILGQITGSTSSVSDCTLSHVLQEDAHFTAHGGPPLVLLRHVRRQIALHRWHERRSQGVKRGAIGGGGSPWWPQNCSEGSEVSGAEGAGEGAPSAEGQASAAAAAGVTSAVYSGGRW

SEQ ID NO: 6689 - protein, 216 aa, Glycine max
  misc_feature (117)..(117): Xaa can be any naturally occurring amino acid
  misc_feature (147)..(148): Xaa can be any naturally occurring amino acid
  misc_feature (152)..(152): Xaa can be any naturally occurring amino acid
  misc_feature (167)..(167): Xaa can be any naturally occurring amino acid
  misc_feature (181)..(181): Xaa can be any naturally occurring amino acid
  misc_feature (187)..(187): Xaa can be any naturally occurring amino acid
  misc_feature (206)..(206): Xaa can be any naturally occurring amino acid
  misc_feature (214)..(214): Xaa can be any naturally occurring amino acid
  Coding DNA Sequence Number=SeqID_3195
  Subcellular localization annotation: CTP_CleavageSite=41; ConfidenceScore=5.28e-01
RYIHSLGQLPASQLSSILYSSNCRPSSSLDDHPARSLQSYSSFAAWPNNSSLCFLVHDSPAAPSSLLSGGRVPSTRKSLEMRTKNTSCAPRVSCVLSRRVRSVAAREPSEYVLTASXVSSRPRHTRYNSLRVGFCAIALAYPRPRRXXGSAXRLVVRGSVLLRPPPXVASRRPGRGHARLXSVCVCXRPCCQPHYSARRREAAEAXTASPSDTXRR

SEQ ID NO: 6690 - protein, 59 aa, Glycine max
  Coding DNA Sequence Number=SeqID_3197
ALLLEHYKISRGTLYSLSTRMLAWNWTLIDNEKDWENPYDTQVNQLPGDPPIATCRHSK

SEQ ID NO: 6691 - protein, 119 aa, Glycine max
  misc_feature (7)..(7): Xaa can be any naturally occurring amino acid
  misc_feature (9)..(9): Xaa can be any naturally occurring amino acid
  misc_feature (23)..(23): Xaa can be any naturally occurring amino acid
  misc_feature (29)..(29): Xaa can be any naturally occurring amino acid
  misc_feature (41)..(41): Xaa can be any naturally occurring amino acid
  misc_feature (64)..(66): Xaa can be any naturally occurring amino acid
  misc_feature (68)..(68): Xaa can be any naturally occurring amino acid
  misc_feature (70)..(73): Xaa can be any naturally occurring amino acid
  misc_feature (79)..(80): Xaa can be any naturally occurring amino acid
  misc_feature (107)..(107): Xaa can be any naturally occurring amino acid
  misc_feature (114)..(114): Xaa can be any naturally occurring amino acid
  Coding DNA Sequence Number=SeqID_3199
CSEYAVXEXEYNRFISSARDIIXQRLYIXYYTRQNVTLRAXAVDVHVSRNDVIVYIYISMRVYXXXYXKXXXXIYIKPXXRKTNKPHTPLHTPPHAHTTHKIRRLAXMMRISCXISSVI

SEQ ID NO: 6692 - protein, 142 aa, Glycine max
  misc_feature (27)..(27): Xaa can be any naturally occurring amino acid
  misc_feature (58)..(58): Xaa can be any naturally occurring amino acid
  misc_feature (100)..(100): Xaa can be any naturally occurring amino acid
  Coding DNA Sequence Number=SeqID_3201
  Subcellular localization annotation: CTP_CleavageSite=80; ConfidenceScore=5.13e-01
YILASLIYYRSVSLSVRLSSLMLSSSXLLDMPPTPRSTLPSSTHCHPHSHRLHFISSXSHLQLRAQQSTITSLPHLLLTCLSHSQSLHPLHHLAHSLQPXLHAASTFYTLTHSTRSSSHTRLLLIYNIVLPTHTSLNSYAVK

SEQ ID NO: 6693 - protein, 71 aa, Glycine max
  misc_feature (22)..(22): Xaa can be any naturally occurring amino acid
  misc_feature (47)..(47): Xaa can be any naturally occurring amino acid
  Coding DNA Sequence Number=SeqID_3203
  Gene Ontology: Mol. function=protein serine/threonine kinase activity; Cellular component=plasma membrane; Biological process =protein amino acid phosphorylation
  Homolog annotation: Hit_ID=Q94KE9; Match level="QueryCoverage=77%, HitCoverage=17%, E-value=2e-15, Identity=70%"; Hit description=Pto -like kinase SG5-3c
SVIPPLDSQSYVSTGVKGTFGXVDPEYFRSRQLPEKCDVYSFGVVMXEVMCTRAQSVPSASTGSHYLERHG

SEQ ID NO: 6694 - protein, 212 aa, Glycine max
  Coding DNA Sequence Number=SeqID_3204
  Gene Ontology: Mol. function=intramolecular transferase activity, phosphotransferases; Cellular component=cellular_component; Biological process=carbohydrate metabolic process
  Homolog annotation: Hit_ID=Q16PT5; Match level="QueryCoverage=96%, HitCoverage=37%, E-value=9e-76, Identity=64%"; Hit description =Phosphoglucomutase
QLRRPPPPNLLKAVSDGVVALKGNVKSFGIVTTPMLHYMVVCANTNGAYGTPTEEGYYQKLITAFRALRGTECERGNYKNKLLFDGSNGVGARKMIQFLKRMNGELNVEVYNQGEGKINENCGADYVKINQTVPIGTPATEPYTRCVSIDGDADRIVYFFTDENNKFYLLDGDRIATLYAGYLMDLVTKCGIDLKLGIVQTAYANGGSTDYI

SEQ ID NO: 6695 - protein, 121 aa, Glycine max
  misc_feature (89)..(89): Xaa can be any naturally occurring amino acid
  Coding DNA Sequence Number=SeqID_3205
TLAMHHRSVYVPARLSIRRGPQLTLVVTTLIILNHNTTPSKSGNAPTQHNIIFYLHIIIYYYTSIRMMCTMSTVCVGHGHALVDPPSHXHPLQDDRGRRPRRDHPSCAVRAPPITNTRVIT

SEQ ID NO: 6696 - protein, 169 aa, Glycine max
  misc_feature (5)..(5): Xaa can be any naturally occurring amino acid
  misc_feature (143)..(143): Xaa can be any naturally occurring amino acid
  misc_feature (148)..(149): Xaa can be any naturally occurring amino acid
  misc_feature (151)..(151): Xaa can be any naturally occurring amino acid
  misc_feature (157)..(158): Xaa can be any naturally occurring amino acid
  misc_feature (162)..(162): Xaa can be any naturally occurring amino acid
  Coding DNA Sequence Number=SeqID_3207
ESATXGPPPPKKVNVDIIVNVEDENNSDMESKVNVKEIKSKKSLLTRTKNQNEMSDRLEKAEESDLNKSESVGQATEQYMNICINNEVDSDGGEGFSFFYVNKNVYNKTKHYFETKTDLNEVCSCVGGCTDPAICPCARYNFXNCGKXXCXIYDPKXXKKKXFNQLLSK

SEQ ID NO: 6697 - protein, 125 aa, Glycine max
  misc_feature (49)..(49): Xaa can be any naturally occurring amino acid
  Coding DNA Sequence Number=SeqID_3209
  Gene Ontology: Mol. function=transferase activity, transferring glycosyl groups; Biological process=metabolic process
  Homolog annotation: Hit_ID=Q8S9A5; Match level="QueryCoverage=72%, HitCoverage=20%, E-value=4e-28, Identity=63%"; Hit description =Glucosyltransferase like protein
QPKRDQWLYWGQNPHNRGGLLPLLDLIHHLTLRGLTVTIIITPKNVAIXNPVLYSHSNTDQTLILPFPTHPNRLSGADNGREVGNRRHYPFINALCKLQPEIIHWVATHSNPTVTLVIDFFLGWT

SEQ ID NO: 6698 - protein, 113 aa, Glycine max
  misc_feature (19)..(19): Xaa can be any naturally occurring amino acid
  misc_feature (48)..(48): Xaa can be any naturally occurring amino acid
  misc_feature (65)..(65): Xaa can be any naturally occurring amino acid
  misc_feature (73)..(73): Xaa can be any naturally occurring amino acid
  Coding DNA Sequence Number=SeqID_3210
SIITPTHLDLNLFTILYVXSAQLHVVEYIVYVTLSSLHSTIDVIRDQXVRYQSVGYPLSNHDRFXPITSHSSXGSLSTCESLLTRPYFHSSLTYQLGSSYYNTRQRSPSLSVT

SEQ ID NO: 6699 - protein, 167 aa, Glycine max
  misc_feature (2)..(2): Xaa can be any naturally occurring amino acid
  Coding DNA Sequence Number=SeqID_3212
LXTPRERSAKRPGAAHTIKERCEGSNHDVRIHTLSLRVQRAARSDSHMATRAVSIASDSPNPWMGLGGGGLTEWGEEWAERRRTCHTLPAHRADSRLKRVRSVSVMASAPRAGWTRRSVTWTLRVSAMSAAPHTTSVRMKCDRDRSHSLTSAAARARTHQRHLLTRG

SEQ ID NO: 6700 - protein, 37 aa, Glycine max
  Coding DNA Sequence Number=SeqID_3214
  Gene Ontology: Biological process=response to stress
  Homolog annotation: Hit_ID=A9X5B5; Match level="QueryCoverage=100%, HitCoverage=18%, E-value=4e-13, Identity=100%"; Hit description =Dehydrin
MAEETKNVVHEQEVPKVTTEESSAEVTDRGLFDFLGK

SEQ ID NO: 6701 - protein, 190 aa, Glycine max
  misc_feature (93)..(93): Xaa can be any naturally occurring amino acid
  Coding DNA Sequence Number=SeqID_3215
  Gene Ontology: Mol. function=hydrolase activity, acting on acid anhydrides, catalyzing transmembrane movement of substances; Cellular component=integral to membrane; Biological process =metabolic process
  Homolog annotation: Hit_ID=Q03194; Match level="QueryCoverage=97%, HitCoverage=19%, E-value=1e-81, Identity=82%"; Hit description =Plasma membrane ATPase 4
  Pfam annotation: Domain name=E1-E2_ATPase; Domain location=1-181; Score=101.3; E_value=3.1e-27; Accession=PF00122.10; Description=E1 -E2 ATPase
YLQSHTKVLRDGKWTEEEAAILVPGDIISIKLGDIIPADARLLEGDPLKVDQSALTGESLPVTRGPGEEVFSGSTCKQGEIEAVVIATGVHTXFGKAAHLVDSTNQVGHFQKVLTAIGNFCICSIAVGMLAEIIVMYPIQHRKYRDGIDNQLVLKYGGRSIAIPTALSVSRSIGSQRLYQLSGTPKGIPC

SEQ ID NO: 6702 - protein, 109 aa, Glycine max
  misc_feature (2)..(3): Xaa can be any naturally occurring amino acid
  misc_feature (5)..(15): Xaa can be any naturally occurring amino acid
  misc_feature (19)..(25): Xaa can be any naturally occurring amino acid
  misc_feature (27)..(27): Xaa can be any naturally occurring amino acid
  misc_feature (40)..(40): Xaa can be any naturally occurring amino acid
  misc_feature (46)..(46): Xaa can be any naturally occurring amino acid
  misc_feature (49)..(50): Xaa can be any naturally occurring amino acid
  misc_feature (62)..(62): Xaa can be any naturally occurring amino acid
  misc_feature (70)..(70): Xaa can be any naturally occurring amino acid
  misc_feature (87)..(89): Xaa can be any naturally occurring amino acid
  misc_feature (103)..(103): Xaa can be any naturally occurring amino acid
  Coding DNA Sequence Number=SeqID_3216
  Subcellular localization annotation: CTP_CleavageSite=30; ConfidenceScore=5.53e-01
FXXFXXXXXXXXXXXAAAXXXXXXXPXPSRSSGRHSSLSXKMCLFXEKXXRRGRLYCSSRNXLDSACDSXALLFSSPPPYWRTQFSXXXYSTPDTYHSAERQXVSRDSP

SEQ ID NO: 6703 - protein, 62 aa, Glycine max
  Coding DNA Sequence Number=SeqID_3217
  Homolog annotation: Hit_ID=A7QFP1; Match level="QueryCoverage=100%, HitCoverage=29%, E-value=8e-10, Identity=56%"; Hit description =Chromosome chr8 scaffold_88, whole genome shotgun sequence
FGVILGGVLLALSILSLKSYKKGRTSPLALKGQAAIASILFLREISSIGKVRLYIEYLSKLI

SEQ ID NO: 6704 - protein, 157 aa, Glycine max
  misc_feature (35)..(35): Xaa can be any naturally occurring amino acid
  misc_feature (37)..(37): Xaa can be any naturally occurring amino acid
  misc_feature (55)..(56): Xaa can be any naturally occurring amino acid
  misc_feature (58)..(58): Xaa can be any naturally occurring amino acid
  misc_feature (61)..(62): Xaa can be any naturally occurring amino acid
  Coding DNA Sequence Number=SeqID_3218
  Subcellular localization annotation: CTP_CleavageSite=85; ConfidenceScore=5.60e-01
SLLSLSPNSDHGSHGLRNELRPSLNKSPSPSPTPXPXHNPFTFPSRSPGPRPPAXXPXHRXXISRTKKESTWRLCGAARELVPPRRNNYKGFTGTSSRRSKEPPKNTELIWAKKTLVYTAGKEPLGEPENLNKGMNCGSSSPPRDTFSPKALREFPK

SEQ ID NO: 6705 - protein, 130 aa, Glycine max
  misc_feature (3)..(4): Xaa can be any naturally occurring amino acid
  misc_feature (92)..(92): Xaa can be any naturally occurring amino acid
  misc_feature (110)..(110): Xaa can be any naturally occurring amino acid
  Coding DNA Sequence Number=SeqID_3220
RRXXIIDTVLVVDDRCVRGSVIYSVESCLFVCLCRDAISIVVVRRCQTTRSIVSLTCVLEANMLFQSLAHVVSQCVMSSHMLRLDDFYYYAXSPVPSTAQDRVQWLIFDXVIAYIVVRSYVFMSVGSCRR

SEQ ID NO: 6706 - protein, 73 aa, Glycine max
  misc_feature (2)..(2): Xaa can be any naturally occurring amino acid
  misc_feature (9)..(9): Xaa can be any naturally occurring amino acid
  misc_feature (17)..(18): Xaa can be any naturally occurring amino acid
  misc_feature (33)..(33): Xaa can be any naturally occurring amino acid
  misc_feature (41)..(41): Xaa can be any naturally occurring amino acid
  misc_feature (46)..(46): Xaa can be any naturally occurring amino acid
  misc_feature (54)..(54): Xaa can be any naturally occurring amino acid
  Coding DNA Sequence Number=SeqID_3222
KXIVGNGSXPRLKGIKXXQYGNGYNNRKPNWFXGPGEKKMXGGICXYNICPSMXTEVLTRGGGWGYYPVNMLL

SEQ ID NO: 6707 - protein, 47 aa, Glycine max
  Coding DNA Sequence Number=SeqID_3224
TLNQKGERTKTLIRKHHCSLLSTRSTILHMIVFCQLREMRLRRERLH

SEQ ID NO: 6708 - protein, 115 aa, Glycine max
  misc_feature (45)..(45): Xaa can be any naturally occurring amino acid
  misc_feature (59)..(59): Xaa can be any naturally occurring amino acid
  misc_feature (71)..(71): Xaa can be any naturally occurring amino acid
  misc_feature (96)..(96): Xaa can be any naturally occurring amino acid
  misc_feature (108)..(108): Xaa can be any naturally occurring amino acid
  Coding DNA Sequence Number=SeqID_3226
YRDHRTLFRYILYTIHYQCLLSSRIDNQVSSIPLITNITVYTLQXLSSHHFFYYRHHIXPTTVFLLGPLSXSNTYHLGSSSYYYHYNGSDYHESLXHVNLSVYIIMLXYSCTRHH

SEQ ID NO: 6709 - protein, 120 aa, Glycine max
  misc_feature (1)..(1): Xaa can be any naturally occurring amino acid
  misc_feature (62)..(62): Xaa can be any naturally occurring amino acid
  misc_feature (91)..(91): Xaa can be any naturally occurring amino acid
  misc_feature (110)..(110): Xaa can be any naturally occurring amino acid
  Coding DNA Sequence Number=SeqID_3228
  Gene Ontology: Mol. function=receptor signaling protein activity; Cellular component=endomembrane system; Biological process=small GTPase mediated signal transduction
  Homolog annotation: Hit_ID=P84077; Match level="QueryCoverage=84%, HitCoverage=55%, E-value=6e-48, Identity=90%"; Hit description=ADP -ribosylation factor 1
  Pfam annotation: Domain name=Arf; Domain location=1-115; Score=148.0; E_value=2.6e-41; Accession=PF00025.11; Description=ADP-ribosylation factor family
XSLLGCGGQDKIRPLWRHYFQNTQGLIFVIDSNDRERIGEAREELMRMLGEDELRDAILLIXANKQDLPNAMNCAEITDKLGLHSLRSRNXYIQATCATSGDGLYEGLDXLSLQLKSLKS

SEQ ID NO: 6710 - protein, 120 aa, Glycine max
  Coding DNA Sequence Number=SeqID_313
  Subcellular localization annotation: CTP_CleavageSite=81; ConfidenceScore=5.04e-01
HISLIVLLIRSAWRSRGGGGRCARAVAGGRRWWGGRCGSCGGWSPGRRLCPPTGCSSARPTTSRSSGPGWSSSGRSRSSAKAMAMATPLASSQPLLLWYGEYIRAYIARIDGWYILNDYG

SEQ ID NO: 6711 - protein, 107 aa, Glycine max
  misc_feature (10)..(10): Xaa can be any naturally occurring amino acid
  misc_feature (27)..(27): Xaa can be any naturally occurring amino acid
  misc_feature (31)..(31): Xaa can be any naturally occurring amino acid
  misc_feature (35)..(35): Xaa can be any naturally occurring amino acid
  misc_feature (103)..(103): Xaa can be any naturally occurring amino acid
  Coding DNA Sequence Number=SeqID_314
ASEGSEMCFXVVSRQLHTHTPEIKISXTQYXSLSXRQMYVICDTAHPATPMHFHSVPVYCRRSGRSSASTLCWRRRPAVSHSSAARAWLDGIRNSRTQIHLYXTIFI

SEQ ID NO: 6712 - protein, 127 aa, Glycine max; identical to SEQ ID NO: 6613
  misc_feature (20)..(20): Xaa can be any naturally occurring amino acid
  misc_feature (26)..(26): Xaa can be any naturally occurring amino acid
  misc_feature (37)..(37): Xaa can be any naturally occurring amino acid
  misc_feature (54)..(54): Xaa can be any naturally occurring amino acid
  misc_feature (61)..(61): Xaa can be any naturally occurring amino acid
  misc_feature (63)..(63): Xaa can be any naturally occurring amino acid
  misc_feature (72)..(72): Xaa can be any naturally occurring amino acid
  misc_feature (74)..(74): Xaa can be any naturally occurring amino acid
  misc_feature (95)..(95): Xaa can be any naturally occurring amino acid
  misc_feature (104)..(104): Xaa can be any naturally occurring amino acid
  misc_feature (108)..(108): Xaa can be any naturally occurring amino acid
  misc_feature (111)..(111): Xaa can be any naturally occurring amino acid
  Coding DNA Sequence Number=SeqID_1365

SEQ ID NO: 6713 - protein, 154 aa, Glycine max; identical to SEQ ID NO: 6614
  misc_feature (1)..(1): Xaa can be any naturally occurring amino acid
  misc_feature (3)..(3): Xaa can be any naturally occurring amino acid
  misc_feature (27)..(27): Xaa can be any naturally occurring amino acid
  misc_feature (29)..(29): Xaa can be any naturally occurring amino acid
  misc_feature (49)..(49): Xaa can be any naturally occurring amino acid
  misc_feature (78)..(78): Xaa can be any naturally occurring amino acid
  misc_feature (91)..(91): Xaa can be any naturally occurring amino acid
  misc_feature (93)..(94): Xaa can be any naturally occurring amino acid
  misc_feature (111)..(111): Xaa can be any naturally occurring amino acid
  misc_feature (137)..(137): Xaa can be any naturally occurring amino acid
  misc_feature (141)..(141): Xaa can be any naturally occurring amino acid
  Coding DNA Sequence Number=SeqID_1367

SEQ ID NO: 6714 - protein, 118 aa, Glycine max
  misc_feature (79)..(79): Xaa can be any naturally occurring amino acid
  Coding DNA Sequence Number=SeqID_1369
  Subcellular localization annotation: CTP_CleavageSite=52; ConfidenceScore=5.62e-01
SFRRAPRTHPRTAKTSRGAPVPPFVRSRRPHTRTLGSIILTGRARSSRSIIPMSAGEGYRTPTYCPGGPKNPRAPAGGXKRGSPPEWGGGPLGPAFPRGVKNRVGSKRGEKKKMGPPL

SEQ ID NO: 6715 - protein, 122 aa, Glycine max
  Coding DNA Sequence Number=SeqID_1371
  Gene Ontology: Mol. function=heat shock protein binding
  Homolog annotation: Hit_ID=Q5NBJ6; Match level="QueryCoverage=60%, HitCoverage=35%, E-value=2e-18, Identity=64%"; Hit description=DnaJ protein-like
  Pfam annotation: Domain name=DnaJ; Domain location=3-71; Score=88.8; E_value=1.7e-23; Accession=PF00226.21; Description=DnaJ domain
MGDHYGTLGVRPDATKAEVKAAFRRRALRDHPDRHAQSGDAGARAEAARRFRQASDAYHVLSDDRRRAEYDLRLRSSSYVRTSSSTWASSSGSHGYGYGHRESSWRRPPPGGGGASVGYDWG

SEQ ID NO: 6716 - protein, 56 aa, Glycine max
  Coding DNA Sequence Number=SeqID_1372
NLKRPGRINGQYLLVRLYELRKQHEGKGRICHVQTVSHGAIRVSLEATVCFSFLLW

SEQ ID NO: 6717 - protein, 41 aa, Glycine max
  Coding DNA Sequence Number=SeqID_1374
YRDNRKHKSSMICFGEVNKFEPISYDTILPLVSQSPTIRLS

SEQ ID NO: 6718 - protein, 221 aa, Glycine max
  misc_feature (202)..(203): Xaa can be any naturally occurring amino acid
  Coding DNA Sequence Number=SeqID_1376
  Subcellular localization annotation: CTP_CleavageSite=55; ConfidenceScore=5.50e-01
KPPQPGAFFGVLGLFWGFFFPIFFFGFFPVFWGKPFSPLLGGVFPFPPPKPRGPRVFVGGKGKRALIANTFFPAVCRFFYTIGPPVFSSGKRALAPPKLWEFGPSLAPPGFSLFVSGWFFLGIFCGIQISPGNQFFPCFAQLGIYPPLRGPKVGVPPGGGPFLNCGFPGVPGIFFFFFLGFFFFFFFFFFFFFFFFFFFFFXXVHIQANFFIYHILICIIF

SEQ ID NO: 6719 - protein, 101 aa, Glycine max
  Coding DNA Sequence Number=SeqID_1378
QKYREYTPRTKKNMRGHPTEPKQYTYHTPININFTNSLSPSSTDRLIFINLYKVSYNPHHTYKIIPLLTIQYTQYLLSSPPSQDRHPKKNRAHHTTQSHTQ

SEQ ID NO: 6720 - protein, 146 aa, Glycine max
  misc_feature (34)..(34): Xaa can be any naturally occurring amino acid
  Coding DNA Sequence Number=SeqID_316
  Subcellular localization annotation: CTP_CleavageSite=18; ConfidenceScore=5.68e-01
FNCISLAPRTFPLLPPTSLASPPNSSPSTNPPHXHSFSSSIIITHFSIPSDSFHFSTALMKTTGPIVVASSGLRCHCEDFILVSSLSSGSRSGKLTTSPRSTRTSVPVIEGGAKGPTRRKSGRQKRSDLKSSASRKKRERVRREKS

SEQ ID NO: 6721 - protein, 116 aa, Glycine max
  misc_feature (7)..(8): Xaa can be any naturally occurring amino acid
  misc_feature (12)..(12): Xaa can be any naturally occurring amino acid
  misc_feature (39)..(39): Xaa can be any naturally occurring amino acid
  misc_feature (71)..(71): Xaa can be any naturally occurring amino acid
  misc_feature (73)..(73): Xaa can be any naturally occurring amino acid
  misc_feature (84)..(85): Xaa can be any naturally occurring amino acid
  misc_feature (91)..(91): Xaa can be any naturally occurring amino acid
  misc_feature (114)..(114): Xaa can be any naturally occurring amino acid
  Coding DNA Sequence Number=SeqID_318
WSSVVIXXYSRXHSVVQSIVTYSPDTIILSATSSSHISXVLWSTVSYMYCVRLRVDYMHSIEYHARSTSLXAXKSSARMLCVAXXSRRCRXTSLRFISSDCVVIKRCDACNEDXYD

SEQ ID NO: 6722 - protein, 100 aa, Glycine max
  Coding DNA Sequence Number=SeqID_320
  Subcellular localization annotation: CTP_CleavageSite=42; ConfidenceScore=5.49e-01
NMNFLKISSRLSRLSYSSLRTFASGESSSKTTTIGGVPRNTRSDAGTGFPPREASKYLKEEDTRGAGGGTARGETVTNRNTVLDTDHGKVSPHNRDTERR

SEQ ID NO: 6723 - protein, 205 aa, Glycine max
  Coding DNA Sequence Number=SeqID_322
  Homolog annotation: Hit_ID=A9PGP3; Match level="QueryCoverage=69%, HitCoverage=63%, E-value=2e-58, Identity=78%"; Hit description =Putative uncharacterized protein
  Subcellular localization annotation: CTP_CleavageSite=47; ConfidenceScore=5.62e-01
MALQMQTSTTIFKNPTPSTAADALTGRFFPGTVAVRRETLTAWRGVRCSSGGVGDAGKKKAVPNSNYVVPLDKFSSSSSITRPLIEILRDLNKKIPDNIVKSHDPGSSAASSGFIPWFHANRMLSFYAPGWCGEVRDVIFSENGNVTVVYRLTIRGSDGEAHRESTGTVTITDDHIEDPVAAAEEIAFCRACARFGLGLYLYHEE

SEQ ID NO: 6724 - protein, 137 aa, Glycine max
  misc_feature (46)..(46): Xaa can be any naturally occurring amino acid
  misc_feature (118)..(118): Xaa can be any naturally occurring amino acid
  Coding DNA Sequence Number=SeqID_323
  Gene Ontology: Mol. function=oxidoreductase activity; Cellular component=chloroplast; Biological process=metabolic process
  Homolog annotation: Hit_ID=A9NUF0; Match level="QueryCoverage=100%, HitCoverage=27%, E-value=1e-42, Identity=64%"; Hit description =Putative uncharacterized protein
GIPLDETAWDRDYVGGGGEFYADLADKRVAQQKAHVSLAMDTFKNXVLKEPHEVDALITTWKDSLLMATCESSTALASGCATILKPYELASVTCWELAEICKEVGLPPGDVNILTGLXPEAGAPLATHPDVDKIAFT

SEQ ID NO: 6725 - protein, 133 aa, Glycine max
  misc_feature (54)..(54): Xaa can be any naturally occurring amino acid
  misc_feature (69)..(69): Xaa can be any naturally occurring amino acid
  misc_feature (103)..(103): Xaa can be any naturally occurring amino acid
  misc_feature (113)..(113): Xaa can be any naturally occurring amino acid
  Coding DNA Sequence Number=SeqID_324
  Homolog annotation: Hit_ID=Q41387; Match level="QueryCoverage=100%, HitCoverage=100%, E-value=2e-07, Identity=29%"; Hit description =Photosystem II reaction center W protein, chloroplast precursor
  Pfam annotation: Domain name=PsbW; Domain location=1-133; Score =147.2; E_value=4.6e-41; Accession=PF03912.4; Description=Photosystem II reaction centre W protein, PsbW
  Subcellular localization annotation: CTP_CleavageSite=40; ConfidenceScore=5.62e-01
MATISAAITTPSISRATLVQKQVSSPVLGLPAMGKVGRVSCSMEEKPYSVKESXSSMLGMGASLITATXTTAISSPAITLINKRLSTKRTRLPFNLSNNLLNXILFDIFNLIXTLYCIYTSTLKENKKSKLSL

SEQ ID NO: 6726 - protein, 60 aa, Glycine max
  Coding DNA Sequence Number=SeqID_3229
GWASSPVARARLCALADPSSKPVGGIYFTEVKLGVSHLPFFNNNAAGLLPRWSIFQKKKK

SEQ ID NO: 6727 - protein, 133 aa, Glycine max
  misc_feature (43)..(43): Xaa can be any naturally occurring amino acid
  misc_feature (105)..(105): Xaa can be any naturally occurring amino acid
  Coding DNA Sequence Number=SeqID_3231
SRIIDLTARRSSLAPTPRKIYRHTYVPHRPITLSCERQATTRXTSPRHPCGQVRHRLMQGLRVTDMICLAFLPQQRTDTITYQCRTTLKRHEQLKTCTHASHALXLMYNITRYSPEYRLTKVSYSSTTTGSRA

SEQ ID NO: 6728 - protein, 126 aa, Glycine max
  misc_feature (96)..(96): Xaa can be any naturally occurring amino acid
  misc_feature (98)..(98): Xaa can be any naturally occurring amino acid
  Coding DNA Sequence Number=SeqID_3233
IMINRNQLKDFNGNVLTHERNMYVLMHEVTHGLGFSSSLYSYFLDSNGNKRSGHIKSVKVNGKTRSFIDVEPLTSKLRNHYGCSSLQGALMENGGXSXTASSHFERKVSFTKLWDLVVSPEEESLT

SEQ ID NO: 6729 - protein, 102 aa, Glycine max
  misc_feature (24)..(24): Xaa can be any naturally occurring amino acid
  misc_feature (80)..(80): Xaa can be any naturally occurring amino acid
  Coding DNA Sequence Number=SeqID_3235
  Gene Ontology: Mol. function=oxidoreductase activity; Cellular component=integral to membrane; Biological process=electron transport
  Homolog annotation: Hit_ID=Q2LAL3; Match level="QueryCoverage=97%, HitCoverage=19%, E-value=4e-39, Identity=77%"; Hit description =Cytochrome P450 monooxygenase CYP84A16
SQLEEPESFKPARFLKPFVPDFIXSYYKFIPLGGGLRSWPGMVFLLYSLELTVAHLLHCFTWELPDWMKPIEMDMGDMFXLTVPRSTRLIAIPTKRVVCPFF

SEQ ID NO: 6730 - protein, 211 aa, Glycine max
  misc_feature (175)..(211): Xaa can be any naturally occurring amino acid
  Coding DNA Sequence Number=SeqID_3236
APPPIYGSLLILAACFFFASIWYLFRLKTDSELFMTMLFRVSQKEAEQIKSLLNNFLASLDSSVDQIQISEENREVTDAAKLQHKSTLSFHKASTKKLFTAQILLLARLCPYYLLLIVWNTIYFYISFQSLTKIQLEQQQIQASLSGLVEGSMMVNELIELVLANSTTTIGGEPXXXXXXXXXXXXXXXXXXXXXXXXXXXXXXXXXXXXX

SEQ ID NO: 6731 - protein, 126 aa, Glycine max
  misc_feature (33)..(33): Xaa can be any naturally occurring amino acid
  misc_feature (123)..(123): Xaa can be any naturally occurring amino acid
  Coding DNA Sequence Number=SeqID_3238
YAPVARRMILVYDRPGLGNAHASHASKHHCCYXLEWRTRDIVWRVKTRSPSRASAWLSASWRAPRRPARRGASAACAYRSCSVTFASHRPPAPPPRLYVCPSFGRVVHTTICYLCIYCNICLXDYV

SEQ ID NO: 6732 - protein, 131 aa, Glycine max
  Coding DNA Sequence Number=SeqID_3240
  Gene Ontology: Mol. function=DNA binding; Cellular component =chromosome; Biological process=DNA mediated transformation
  Homolog annotation: Hit_ID=Q9LD28; Match level="QueryCoverage=100%, HitCoverage=100%, E-value=2e-50, Identity=82%"; Hit description =Histone H2A.6
  Pfam annotation: Domain name=CBFD_NFYB_HMF; Domain location=25-89; Score=21.9; E_value=0.0015; Accession=PF00808.13; Description =Histone-like transcription factor (CBFNF-Y) and archaeal histone
  Pfam annotation: Domain name=Histone; Domain location=19-92; Score =113.8; E_value=5.3e-31; Accession=PF00125.14; Description=Core histone H2AH2BH3H4
  Pfam module annotation: Pfam domain module=CBFD_NFYB_HMF::Histone; Domain location=25-89::19-92
  Subcellular localization annotation: CTP_CleavageSite=41; ConfidenceScore=5.22e-01
MAGRGKTLGSGVAKKATSRSSKAGLQFPVGRIARFLKNGKYAERVGAGAPVYLAAVLEYLAAEVLELAGNAARDNKKTRIVPRHIQLAVRNDEELSKLLGDVTIANGGVMPNIHNLLLPKKAGGASKPSGD

SEQ ID NO: 6733 - protein, 395 aa, Glycine max
  Coding DNA Sequence Number=SeqID_3241
  Gene Ontology: Mol. function=ubiquitin-protein ligase activity; Cellular component=intracellular; Biological process=protein modification process
  Homolog annotation: Hit_ID=A7PAN3; Match level="QueryCoverage=98%, HitCoverage=96%, E-value=0.0, Identity=86%"; Hit description =Chromosome chr14 scaffold_9, whole genome shotgun sequence
  Pfam annotation: Domain name=RCC1; Domain location=113-170; Score =25.0; E_value=0.00028; Accession=PF00415.9; Description=Regulator of chromosome condensation (RCC1)
  Pfam annotation: Domain name=RCC1; Domain location=173-216; Score =3.7; E_value=0.29; Accession=PF00415.9; Description=Regulator of chromosome condensation (RCC1)
  Pfam annotation: Domain name=RCC1; Domain location=219-268; Score =27.2; E_value=5.9e-05; Accession=PF00415.9; Description=Regulator of chromosome condensation (RCC1)
  Pfam annotation: Domain name=RCC1; Domain location=271-322; Score =57.5; E_value=4.5e-14; Accession=PF00415.9; Description=Regulator of chromosome condensation (RCC1)
  Pfam annotation: Domain name=RCC1; Domain location=325-387; Score =20.1; E_value=0.005; Accession=PF00415.9; Description=Regulator of chromosome condensation (RCC1)
  Pfam annotation: Domain name=RCC1; Domain location=56-110; Score =15.6; E_value=0.015; Accession=PF00415.9; Description=Regulator of chromosome condensation (RCC1)
  Pfam annotation: Domain name=RCC1; Domain location=6-53; Score=6.9; E_ value=0.13; Accession=PF00415.9; Description=Regulator of chromosome condensation (RCC1)
  Pfam module annotation: Pfam domain module=RCC1::RCC1::RCC1::RCC1::RCC 1::RCC1::RCC1; Domain location=113-170::173-216::219-268::271 -322::325-387::56-110::6-53
MDSHSHIIAWGSGEDGQLGIGSNEEKEWVCLVKALQPHRIRSVVAGSRNSLAIADDGKLFTWGWNQRATLGHPAETKSENKTENTPSQVKALSSVKIVQAAIGGWHCLAVDDQGRAYAWGGNEYGQCGEEPERKDGTGRPLRRDIEIPQRCAPKLVVRQVAAGGTHSVVLTREGHVWTWGQPWPPGDIKQISVPVRVQGLENVRLIAVGAFHNLALQEDGTLWAWGNNEYGQLGTGDTQPRSQPIRVQGLSDLTLVDIAAGGWHSTALTDEGEVYGWGRGEHGRLGFGDSDKSSKMVPQKVQLLAGEDIVQVSCGGTHSVALTRDGHMFSFGRGDHGRLGYGRKVTTGQPMEVPIDLPPPQDPSGTATEGHWIAKLVACGGRHTLAIVEWKSNES

SEQ ID NO: 6734 - protein, 90 aa, Glycine max
  misc_feature (2)..(2): Xaa can be any naturally occurring amino acid
  misc_feature (4)..(4): Xaa can be any naturally occurring amino acid
  misc_feature (7)..(14): Xaa can be any naturally occurring amino acid
  misc_feature (16)..(16): Xaa can be any naturally occurring amino acid
  misc_feature (33)..(34): Xaa can be any naturally occurring amino acid
  misc_feature (41)..(41): Xaa can be any naturally occurring amino acid
  misc_feature (52)..(52): Xaa can be any naturally occurring amino acid
  misc_feature (88)..(88): Xaa can be any naturally occurring amino acid
  misc_feature (90)..(90): Xaa can be any naturally occurring amino acid
  Coding DNA Sequence Number=SeqID_3242
FXFXVFXXXXXXXXFXCCVVCLALCERCVVCAXXQLSALRXVGVLSDVLCVXRPACFSHLMSMSRPLSYALLYKNVLLSSAVLDRVYXGX

SEQ ID NO: 6735 - protein, 214 aa, Glycine max
  misc_feature (3)..(3): Xaa can be any naturally occurring amino acid
  misc_feature (89)..(89): Xaa can be any naturally occurring amino acid
  misc_feature (131)..(131): Xaa can be any naturally occurring amino acid
  misc_feature (203)..(203): Xaa can be any naturally occurring amino acid
  Coding DNA Sequence Number=SeqID_3244
SRXLAVYTLLPIVYFVLRCDSQTYHRSQHHLPISHPPRGTRPAHARPRDNETGRSTLLHLYSITRCHNLRHARAALRHHPLDRDVVRSXVRVCVAGGRLYLYQSYVIESDINRVGRAVGVELINSKRVSEXASEARASQSRVRYINIYHITRHSFAVTARDCSRARYFSSTFLDASPYVAVLTSSNHARVCVGDAPPRQVREXGLEREERGGPP

SEQ ID NO: 6736 - protein, 128 aa, Glycine max
  Coding DNA Sequence Number=SeqID_3246
RVVTVESCGVASDRSSSSFDMYAILALDSYYFVHVWRNRMMNVVYVAFMLCVLVIGSLSRRVSLLQTLYRYTLDAVVRRAEHIRDRIINIYVYRMYRHHLTRLEQIHNTTTICIDVITRCNVRYYSVA

SEQ ID NO: 6737 - protein, 505 aa, Glycine max
  Coding DNA Sequence Number=SeqID_3248
  Gene Ontology: Mol. function=metalloendopeptidase activity; Cellular component=membrane; Biological process=cell adhesion
  Homolog annotation: Hit_ID=A0CXP9; Match level="QueryCoverage=82%, HitCoverage=79%, E-value=8e-48, Identity=30%"; Hit description =Chromosome undetermined scaffold_30, whole genome shotgun sequence
  Pfam annotation: Domain name=EGF; Domain location=475-501; Score =21.2; E_value=0.004; Accession=PF00008.17; Description=EGF-like domain
  Pfam annotation: Domain name=EGF_2; Domain location=475-501; Score =27.5; E_value=5.1e-05; Accession=PF07974.3; Description=EGF-like domain
  Pfam annotation: Domain name=Peptidase_M8; Domain location=6-488; Score=-115.2; E_value=1.4e-08; Accession=PF01457.7; Description =Leishmanolysin
  Pfam module annotation: Pfam domain module=EGF::EGF_2::Peptidase_M8; Domain location=475-501::475-501::6-488
MASLKAFCILFALVCVSYAFTEHECKHDEQDHDLQFIDVEEDMRLLGEQDGGRVLASASSMRIYPYYEFLKSSASSSYASYISTELIPPIVSYFESALKVKYPVAGKLVLGSSVSKICERSTPSILKSGGVSADYFVYFDSEAASGTELASTKYCYLASGSKRPLVSRIMINRNQLKDSNGNVLTHERNMYVLMHEVTHGLGFSSSLYSYFLDSNGNKRSGHIKSVKVNGKTRSFIDVEPLTSKLRNHYGCSSLQGALMENGGGSGTASSHFERKVFLYEFMASGSIHGRRVSELSLAMLEGSGWYVVNYDYAEPYFFGKGQGCSFVTGSSCTNYDEFCSGSSRGCSPTGRGGGYCSSDSISDGCKYYSPNEDYDCENPDGEDYARLPSAEVYGRSAGSKCFTGTLNTRSSNSATSFCFRYSCSGSGSNTQVQVQIGSKSVTCTDEGTKTVDGYYGTINCPDPLTFCNTVGKKYCPRNCMGRGTCSNGTCRCNSGFSGVDCALRS

SEQ ID NO: 6738 - protein, 67 aa, Glycine max
  Coding DNA Sequence Number=SeqID_3249
  Subcellular localization annotation: CTP_CleavageSite=42; ConfidenceScore=5.20e-01
LQGRTTRTSSNLSVFGLLTRVSPPVLSCPQSPHACHMLVDLACVRNWSAFTLDWQIGSPPAGLPSIY

SEQ ID NO: 6739 - protein, 113 aa, Glycine max
  misc_feature (21)..(21): Xaa can be any naturally occurring amino acid
  misc_feature (48)..(48): Xaa can be any naturally occurring amino acid
  misc_feature (88)..(88): Xaa can be any naturally occurring amino acid
  Coding DNA Sequence Number=SeqID_3251
LIRNTRTYHIIYHKTSRIVHXRYTSHRNEHTEFRTTREYGHASRFPCXCSRDLLLSLLCIYSTLVLLYVYSAGRVVVWCVAPSHIVIXWPCCCVCECRLCICLYRHPLTSYQY

SEQ ID NO: 6740 - protein, 98 aa, Glycine max
  Coding DNA Sequence Number=SeqID_3253
  Homolog annotation: Hit_ID=Q3EBX9; Match level="QueryCoverage=69%, HitCoverage=68%, E-value=4e-26, Identity=82%"; Hit description =Uncharacterized protein At2g20585.2
  Subcellular localization annotation: CTP_CleavageSite=71; ConfidenceScore=5.90e-01
MAASAVARSILRAASSRGAAAGSTGRFASQAKSVPPMFRASAKRSSLLSPLRNPVEMSFCVESMLPYHTATASALMTSMLSISGHTYGWLSDACIDDV

SEQ ID NO: 6741 - protein, 101 aa, Glycine max
  Coding DNA Sequence Number=SeqID_3254
  Gene Ontology: Mol. function=structural constituent of ribosome; Cellular component=intracellular; Biological process=translation
  Homolog annotation: Hit_ID=A2XME5; Match level="QueryCoverage=54%, HitCoverage=7%, E-value=3e-13, Identity=65%"; Hit description =Putative uncharacterized protein
  Pfam annotation: Domain name=Ribosomal_S14; Domain location=25-78; Score=28.5; E_value=2.4e-05; Accession=PF00253.11; Description =Ribosomal protein S14pS29e
  Subcellular localization annotation: CTP_CleavageSite=18; ConfidenceScore=5.13e-01
LLFSQGREKGGVSSGARPAAAAWGHRTFGTRNLKNYGPGSRVCRVCGNSHGLIRKYRVMGCRAGFRSNAKDTGSFTYPYKCKNQKKKGREDYQRTVVLYRG

SEQ ID NO: 6742 - protein, 123 aa, Glycine max
  misc_feature (8)..(8): Xaa can be any naturally occurring amino acid
  misc_feature (14)..(14): Xaa can be any naturally occurring amino acid
  misc_feature (28)..(28): Xaa can be any naturally occurring amino acid
  misc_feature (62)..(62): Xaa can be any naturally occurring amino acid
  misc_feature (65)..(65): Xaa can be any naturally occurring amino acid
  misc_feature (90)..(91): Xaa can be any naturally occurring amino acid
  misc_feature (95)..(95): Xaa can be any naturally occurring amino acid
  misc_feature (104)..(104): Xaa can be any naturally occurring amino acid
  Coding DNA Sequence Number=SeqID_3255
SRSIRCSXTVDRAXGRCTLIYAYQCNEXRLAAGAYVVCVSVDMHYLSARGAPHEYDVCVMTXAMXDTRTQISIIIYVVAARYVSRQRYAXXMQQXPASSIRQYXLYPSVHYLPYDVEYIRRHL

SEQ ID NO: 6743 - protein, 138 aa, Glycine max
  misc_feature (16)..(16): Xaa can be any naturally occurring amino acid
  misc_feature (79)..(79): Xaa can be any naturally occurring amino acid
  misc_feature (121)..(121): Xaa can be any naturally occurring amino acid
  misc_feature (135)..(135): Xaa can be any naturally occurring amino acid
  Coding DNA Sequence Number=SeqID_3257
LCCVGSFSSHHLPLRXRSICVATICCSRLYFCECDACCAVPLSRVVRCALSCVSVILSRSPAVVVIASAPRLLYRAHRXLIHDYHRASLHLTIAAPYHLYISYVWIHLFIGCARHMMCACXHVRVYSPLCATQTXYTC

SEQ ID NO: 6744 - protein, 178 aa, Glycine max
  misc_feature (148)..(148): Xaa can be any naturally occurring amino acid
  Coding DNA Sequence Number=SeqID_3259
  Gene Ontology: Mol. function=structural constituent of ribosome; Cellular component=ribonucleoprotein complex; Biological process =translation
  Homolog annotation: Hit_ID=UPI0000D9FBA7; Match level="QueryCoverage =99%, HitCoverage=56%, E-value=2e-59, Identity=62%"; Hit description =PREDICTED: similar to 60S ribosomal protein L5, partial
  Pfam annotation: Domain name=Ribosomal_L18p; Domain location=26-175; Score=181.3; E_value=2.4e-51; Accession=PF00861.12; Description =Ribosomal L18pL5e family
MAFVKVYKTRAYFKRYQTRFRRRREGKTDYHARKALIIQDKNKYNTPKYRLVARVTCSRVIAQVIYATIQGDRIVAAADFRELKRYGLEAGLTNYAACYATGLLVARRLLNKTGLDKVYTGAKKTDGEDYDVVNDHKGTEKRPFKAVXDAGLIRTTTGNRVFGVLKGACDGGLNVPHS

SEQ ID NO: 6745 - protein, 104 aa, Glycine max
  misc_feature (21)..(21): Xaa can be any naturally occurring amino acid
  misc_feature (33)..(33): Xaa can be any naturally occurring amino acid
  Coding DNA Sequence Number=SeqID_3260
  Gene Ontology: Mol. function=calmodulin binding; Cellular component =intracellular; Biological process=RNA metabolic process
  Homolog annotation: Hit_ID=A7PME4; Match level="QueryCoverage=82%, HitCoverage=45%, E-value=8e-18, Identity=58%"; Hit description =Chromosome chr14 scaffold_21, whole genome shotgun sequence
MSQQLGFAIELYLDPALENQXLKAWNVLARRQXSTHLIEMESSAHITLFSGAFLEPRKFDLSLKGPNRKKILLLLTFSSLAIFPKEPRKLLFLAPTPFPLFLQF

SEQ ID NO: 6746 - protein, 209 aa, Glycine max
  misc_feature (93)..(93): Xaa can be any naturally occurring amino acid
  misc_feature (118)..(118): Xaa can be any naturally occurring amino acid
  misc_feature (151)..(151): Xaa can be any naturally occurring amino acid
  misc_feature (199)..(199): Xaa can be any naturally occurring amino acid
  misc_feature (208)..(208): Xaa can be any naturally occurring amino acid
  Coding DNA Sequence Number=SeqID_3261
RSFIWCGSAPIPAGGNVDFDLKSTRQYNGAGEVYIIINHRSLHLRSTYLLSTSQQIHTGTHLWVGTFTPPRVTGSPLILLLAAQTLPTPYMVXRVEYAHRSTSNLRRCHYRMMYCLSXYTAWMPIITHLYLFAPIPHTYSSHCRTRSLATXHSALTARIFRAALNYLLRAHSPPLYYLTHTSHHLANARPPHNDPTPHXIHPRERLVXN

SEQ ID NO: 6747 - protein, 166 aa, Glycine max
  misc_feature (97)..(97): Xaa can be any naturally occurring amino acid
  misc_feature (110)..(110): Xaa can be any naturally occurring amino acid
  misc_feature (127)..(127): Xaa can be any naturally occurring amino acid
  misc_feature (133)..(134): Xaa can be any naturally occurring amino acid
  misc_feature (145)..(145): Xaa can be any naturally occurring amino acid
  misc_feature (151)..(151): Xaa can be any naturally occurring amino acid
  misc_feature (164)..(164): Xaa can be any naturally occurring amino acid
  Coding DNA Sequence Number=SeqID_3263
RVSYVGPPPPPVASCNDEHVASYVKHQKVGFHCLNKSNPIAKQFQREADQGQKLPLEHKTQDIQAYVEVPVRCERVNTEEKRLRKETEKTAEQKIHXVQNQDGEEESFLXEHKPWTTEQEEQQQKQXQSSRHXXRKSHQKQNQMXGSQQSXDESDDEDSFSEQXLD

SEQ ID NO: 6748 - protein, 163 aa, Glycine max
  misc_feature (4)..(4): Xaa can be any naturally occurring amino acid
  misc_feature (10)..(10): Xaa can be any naturally occurring amino acid
  misc_feature (75)..(75): Xaa can be any naturally occurring amino acid
  misc_feature (148)..(148): Xaa can be any naturally occurring amino acid
  misc_feature (156)..(156): Xaa can be any naturally occurring amino acid
  Coding DNA Sequence Number=SeqID_3265
PRSXSGNMRXYICADNRTHSRTDVGCGAHAATMPRSSRSSSARGPRVIIYRHTLLNTDDDIRSLVPHISDLYYTXPRVQYPARVYISLPTNTYGRDARLLLHTQYLICYNICRDASAASAPTMTHSTRVPARTAACIRSPADALSIYXTSNAHAGXLPVMCYK

SEQ ID NO: 6749 - protein, 164 aa, Glycine max
  misc_feature (10)..(10): Xaa can be any naturally occurring amino acid
  misc_feature (22)..(23): Xaa can be any naturally occurring amino acid
  misc_feature (33)..(33): Xaa can be any naturally occurring amino acid
  misc_feature (41)..(41): Xaa can be any naturally occurring amino acid
  misc_feature (43)..(43): Xaa can be any naturally occurring amino acid
  misc_feature (45)..(45): Xaa can be any naturally occurring amino acid
  misc_feature (47)..(48): Xaa can be any naturally occurring amino acid
  misc_feature (51)..(53): Xaa can be any naturally occurring amino acid
  misc_feature (55)..(55): Xaa can be any naturally occurring amino acid
  misc_feature (57)..(62): Xaa can be any naturally occurring amino acid
  misc_feature (64)..(68): Xaa can be any naturally occurring amino acid
  misc_feature (71)..(79): Xaa can be any naturally occurring amino acid
  misc_feature (81)..(81): Xaa can be any naturally occurring amino acid
  misc_feature (83)..(83): Xaa can be any naturally occurring amino acid
  misc_feature (86)..(86): Xaa can be any naturally occurring amino acid
  misc_feature (89)..(91): Xaa can be any naturally occurring amino acid
  misc_feature (94)..(97): Xaa can be any naturally occurring amino acid
  misc_feature (99)..(117): Xaa can be any naturally occurring amino acid
  misc_feature (119)..(123): Xaa can be any naturally occurring amino acid
  misc_feature (126)..(133): Xaa can be any naturally occurring amino acid
  misc_feature (139)..(164): Xaa can be any naturally occurring amino acid
  Coding DNA Sequence Number=SeqID_3267
LLYMHSAIRXLHACRDGVSHSXXVIYEYRSCSXTRVRYIAXEXEXTXXPYXXXRXRXXXXXXLXXXXXHTXXXXXXXXXVXHXTHXPAXXXDAXXXXQXXXXXXXXXXXXXXXXXXXHXXXXXTTXXXXXXXXTPQNPXXXXXXXXXXXXXXXXXXXXXXXXXX

SEQ ID NO: 6750 - protein, 170 aa, Glycine max
  misc_feature (130)..(130): Xaa can be any naturally occurring amino acid
  Coding DNA Sequence Number=SeqID_3269
  Gene Ontology: Mol. function=protein transporter activity; Cellular component=mitochondrial inner membrane; Biological process =intracellular protein transport across a membrane
  Homolog annotation: Hit_ID=Q9SP35; Match level="QueryCoverage=80%, HitCoverage=55%, E-value=9e-44, Identity=66%"; Hit description =Mitochondrial import inner membrane translocase subunit Tim17
  Pfam annotation: Domain name=Tim17; Domain location=4-133; Score =176.6; E_value=6.4e-50; Accession=PF02466.9; Description =Tim17Tim22Tim23 family
METQKKTREHSLHHIVDDIGAAFGMGAIGGSVVHFIKGTQNSPKGRRFVGGAQAVSMNAPRIGGSFAVFGGLFSAFDYTMVYIRKKEDPWNSIVAGAATGGFLSMRQGLAAASRSALMGGLLLALIKGVXLMLNKLAYWIVFIELSLLSLGTYILFCLNHSTVIHVLVVY

SEQ ID NO: 6751 - protein, 124 aa, Glycine max
  misc_feature (1)..(1): Xaa can be any naturally occurring amino acid
  misc_feature (8)..(8): Xaa can be any naturally occurring amino acid
  misc_feature (94)..(94): Xaa can be any naturally occurring amino acid
  misc_feature (103)..(103): Xaa can be any naturally occurring amino acid
  Coding DNA Sequence Number=SeqID_3270
XERASASXRIEMSLPYLPVLTYHRHSYIRDASAIYTAVVLEHICRPQGPTLHSASRGSTLYLSPSHILYFFSITLLVSPSLWSIYYCRGCLLCXLHILCITLXIYESHPSTIMCTSIQPHHAPP

SEQ ID NO: 6752 - protein, 134 aa, Glycine max
  Coding DNA Sequence Number=SeqID_3272
TRISRLLDQFERRNVVREGRGHKTHRCYMGRYRNTHYHSLYGAGAVSLLGRVRVARALDGLRLVWCCRYLISDIILFIDIGLVSPLGCVLAAVCFPCCSAVARCGVDVGGGRDGGGRVFRSSSCCLRALLCRGL

SEQ ID NO: 6753 - protein, 166 aa, Glycine max
  misc_feature (7)..(8): Xaa can be any naturally occurring amino acid
  misc_feature (12)..(12): Xaa can be any naturally occurring amino acid
  misc_feature (14)..(15): Xaa can be any naturally occurring amino acid
  misc_feature (17)..(17): Xaa can be any naturally occurring amino acid
  misc_feature (19)..(24): Xaa can be any naturally occurring amino acid
  misc_feature (60)..(60): Xaa can be any naturally occurring amino acid
  misc_feature (78)..(78): Xaa can be any naturally occurring amino acid
  misc_feature (103)..(103): Xaa can be any naturally occurring amino acid
  misc_feature (111)..(113): Xaa can be any naturally occurring amino acid
  misc_feature (127)..(127): Xaa can be any naturally occurring amino acid
  misc_feature (130)..(130): Xaa can be any naturally occurring amino acid
  Coding DNA Sequence Number=SeqID_3274
  Subcellular localization annotation: CTP_CleavageSite=86; ConfidenceScore=5.12e-01
FVFFCCXXSPSXPXXPXPXXXXXXRSGRLLQLTQTTTMHYPLHTTDRTLLYNHTTQLNPXIRHVRRARCTSHRDDERXTTNRTLISCQRTTYASLLTDCICQXYSVPILLXXXHILLPCLSCTRCSXSPXGRRTATNSARTRHHRPPCCCSAYARCQYCDVYVMWR

SEQ ID NO: 6754 - protein, 134 aa, Glycine max
  misc_feature (2)..(2): Xaa can be any naturally occurring amino acid
  misc_feature (5)..(5): Xaa can be any naturally occurring amino acid
  misc_feature (13)..(13): Xaa can be any naturally occurring amino acid
  misc_feature (17)..(17): Xaa can be any naturally occurring amino acid
  misc_feature (19)..(19): Xaa can be any naturally occurring amino acid
  misc_feature (21)..(21): Xaa can be any naturally occurring amino acid
  misc_feature (33)..(33): Xaa can be any naturally occurring amino acid
  misc_feature (49)..(49): Xaa can be any naturally occurring amino acid
  misc_feature (64)..(64): Xaa can be any naturally occurring amino acid
  misc_feature (77)..(78): Xaa can be any naturally occurring amino acid
  misc_feature (93)..(93): Xaa can be any naturally occurring amino acid
  misc_feature (103)..(103): Xaa can be any naturally occurring amino acid
  misc_feature (113)..(113): Xaa can be any naturally occurring amino acid
  Coding DNA Sequence Number=SeqID_3276
SXIDXTTWSSMSXHAHXGXIXPSREPRRSIEEXIMSSAHTILTPRQSSXSCAAASRADECASFXASSARLDPHSTVXXSPHSMIIVSCVISAXRGHERVIRLXSAESLSVATXCGVRAVRVSCRVCLSYLSLSL

SEQ ID NO: 6755 - protein, 98 aa, Glycine max
  Coding DNA Sequence Number=SeqID_3277
  Gene Ontology: Mol. function=ATP binding; Cellular component =endoplasmic reticulum; Biological process=proteolysis
  Homolog annotation: Hit_ID=Q84L45; Match level="QueryCoverage=94%, HitCoverage=42%, E-value=4e-21, Identity=60%"; Hit description=CDC48- like protein
RLQKRRGNLLAMHEETCDYPIAEIKAAHFEESMKFARRSVSDADIHKYHAFAQTLQQSRWFGSEFRVSESGDRTTTGSDLLASSAGGAYQDDLYSSAL

SEQ ID NO: 6756 - protein, 207 aa, Glycine max
  misc_feature (154)..(154): Xaa can be any naturally occurring amino acid
  misc_feature (167)..(167): Xaa can be any naturally occurring amino acid
  misc_feature (170)..(170): Xaa can be any naturally occurring amino acid
  misc_feature (185)..(185): Xaa can be any naturally occurring amino acid
  misc_feature (207)..(207): Xaa can be any naturally occurring amino acid
  Coding DNA Sequence Number=SeqID_3278
  Gene Ontology: Mol. function=ATPase activity, coupled to transmembrane movement of substances; Cellular component=integral to membrane; Biological process=transport
  Homolog annotation: Hit_ID=Q22KG9; Match level="QueryCoverage=95%, HitCoverage=19%, E-value=2e-58, Identity=54%"; Hit description=ABC transporter family protein
  Pfam annotation: Domain name=ABC_tran; Domain location=2-65; Score= -57.9; E_value=0.042; Accession=PF00005.17; Description=ABC transporter
SYVGPPPFADPDILLLDEPTNHLDLDAVVWLEEYLNDWPNTVLIVSHARGFLNNVCTDIIHFRDQVLTQHKGDYDTFEKRRNALITQKKRESEAQKMKIEHTQKFIDRFRANNARAALAQSKIKELAKMEIVEEIIEDPACVFKFPSAEALDPXLLKIEDGEFGYKXDKXLCLKTFSFGIDMESXIAIVGANGCGKSTLLKLLNGEX

SEQ ID NO: 6757 - protein, 127 aa, Glycine max
  Coding DNA Sequence Number=SeqID_3279
  Gene Ontology: Cellular component=integral to membrane; Biological process=protein transport
  Homolog annotation: Hit_ID=Q9M5P2; Match level="QueryCoverage=100%, HitCoverage=42%, E-value=2e-45, Identity=73%"; Hit description =Secretory carrier-associated membrane protein 3
MANKYDRNPFAEEEEVNPFANNNSGSVPAASNSRLSPLPPEPAGFDYGRTVDIPLDNDRSASQNLKKKEKELQAKEADLRRREQEVKRKEDAAARAGISIEVKNWPPIFPLIHHDIANEIPVHLQRL

SEQ ID NO: 6758 - protein, 82 aa, Glycine max
  misc_feature (23)..(23): Xaa can be any naturally occurring amino acid
  misc_feature (29)..(29): Xaa can be any naturally occurring amino acid
  misc_feature (51)..(51): Xaa can be any naturally occurring amino acid
  Coding DNA Sequence Number=SeqID_3280
  Subcellular localization annotation: CTP_CleavageSite=72; ConfidenceScore=5.06e-01
PLRICSNLSGPYKSLRVRNLTHXHGTGVXQAACTHAHVSSRSWLRGGRIRXLSLPKYRSPRPRERKGRTLSRALLGSVCGGI

SEQ ID NO: 6759 - protein, 125 aa, Glycine max
  misc_feature (4)..(5): Xaa can be any naturally occurring amino acid
  misc_feature (14)..(14): Xaa can be any naturally occurring amino acid
  misc_feature (38)..(39): Xaa can be any naturally occurring amino acid
  misc_feature (56)..(57): Xaa can be any naturally occurring amino acid
  misc_feature (60)..(60): Xaa can be any naturally occurring amino acid
  misc_feature (66)..(66): Xaa can be any naturally occurring amino acid
  misc_feature (74)..(74): Xaa can be any naturally occurring amino acid
  misc_feature (87)..(87): Xaa can be any naturally occurring amino acid
  misc_feature (95)..(95): Xaa can be any naturally occurring amino acid
  Coding DNA Sequence Number=SeqID_3282
QCTXXAIISTYDVXRIYRNANSECSSTEYTISDTYRSXXDDVLSYSVETYASYRMXXPSXNASCVXSLLLYQVXAVSVIVQHHVRLXRRCHIYSXAERLQHVTVAHTTLDRHRTKVTIALLYSLY

SEQ ID NO: 6760 - protein, 87 aa, Glycine max
  Coding DNA Sequence Number=SeqID_3284
DTSMCLGMVIRLSDRPKKKKRQKSNKKEEKKQYKKDLNKFFSPFYNFLHICLETCSCLMVKCTSRNTKEGFFPHPKISCCIYFFKRD

SEQ ID NO: 6761 - protein, 107 aa, Glycine max
  misc_feature (73)..(73): Xaa can be any naturally occurring amino acid
  Coding DNA Sequence Number=SeqID_3286
  Subcellular localization annotation: CTP_CleavageSite=28; ConfidenceScore=5.41e-01
FHCALSAALRGALTPQPRHSPPFDALIRCVREQSRRRTPAPCTRRQQCVSISRTDPVDRVVIRRSTCAISASXRAHRPASALLRTTVWYNTHIMHSYALFASLTHTL

SEQ ID NO: 6762 - protein, 332 aa, Glycine max
  misc_feature (9)..(9): Xaa can be any naturally occurring amino acid
  misc_feature (25)..(25): Xaa can be any naturally occurring amino acid
  misc_feature (31)..(31): Xaa can be any naturally occurring amino acid
  misc_feature (42)..(42): Xaa can be any naturally occurring amino acid
  misc_feature (51)..(51): Xaa can be any naturally occurring amino acid
  misc_feature (54)..(54): Xaa can be any naturally occurring amino acid
  misc_feature (68)..(68): Xaa can be any naturally occurring amino acid
  misc_feature (74)..(74): Xaa can be any naturally occurring amino acid
  misc_feature (79)..(79): Xaa can be any naturally occurring amino acid
  misc_feature (100)..(100): Xaa can be any naturally occurring amino acid
  misc_feature (112)..(112): Xaa can be any naturally occurring amino acid
  Coding DNA Sequence Number=SeqID_3288
  Subcellular localization annotation: CTP_CleavageSite=47; ConfidenceScore=5.14e-01
ELARSRATXSSCIGRSFMLSLYVHXAQHAAXVSSRAAHVMHXPRHICASRXRPXFTRDSGVVTSVCTXFFTASXVLMSXLRHHYDCSTHAICSHSLYELXPCLPASHVCACXQLHDTWCRLHCCDHESPPPQLPLLQLHHLPPAAAPRISHRSVHVAVRRLTLSRYRGSSLVHHLLERHSVSAAPTHISRYVILRLLVLSTCRTWETVTSHESRWSFSHTSPAWSILPSITAYHTAAQVGHASQSSIITASPVSALVRACTCCRSSHTTYAYTHPPCLTFDARCTSRVPLLLLRSLSSICSPSSIFLTSCLCLRPSLCSGPASPVLTPPLSH

SEQ ID NO: 6763 - protein, 137 aa, Glycine max
  Coding DNA Sequence Number=SeqID_3289
  Homolog annotation: Hit_ID=Q2KBU3; Match level="QueryCoverage=94%, HitCoverage=69%, E-value=5e-13, Identity=40%"; Hit description =Hypothetical conserved protein
LAPYNAKLIHNHLLIDPAGAVLPRHSPDYQHLRRAIRTAVFNTLATSRDTFDSIYVFTDFQSDDEIGSGVMDEYEALAASRGCTLVPVHATCGTAENLRRLTSSERGMHGKLTDAELVVQIRESEVIYQWPAENPFH

SEQ ID NO: 6764 - protein, 107 aa, Glycine max
  misc_feature (14)..(14): Xaa can be any naturally occurring amino acid
  Coding DNA Sequence Number=SeqID_3290
SDPSVRARRVVRVXVDLILSAPLYLPRLRLCFIYLFKCGYEIGYYVSTCRLYRPPRQRAIGETVLFSASAALPRLWRCDIVTAYMLVLLFSLLFSTVAHSVIASRAS

SEQ ID NO: 6765 - protein, 172 aa, Glycine max
  misc_feature (67)..(67): Xaa can be any naturally occurring amino acid
  misc_feature (84)..(84): Xaa can be any naturally occurring amino acid
  misc_feature (97)..(97): Xaa can be any naturally occurring amino acid
  misc_feature (153)..(154): Xaa can be any naturally occurring amino acid
  Coding DNA Sequence Number=SeqID_3292
HKKIRGVCVSYYLPRLNYAAARDIGAHAPPLAYIFHTLACARCYRAAAIMVCQNIYISAGAATYIYXLSPAMRLYDTMIMYHIXSVAYARCARRRRXYDGIQSDRCCGEKYTCSARYGPAILCACLYPIYDASSDRRARAILVIKPHALTTPXXTLCLDCRPGVSILHERDV

SEQ ID NO: 6766 - protein, 106 aa, Glycine max
  misc_feature (2)..(3): Xaa can be any naturally occurring amino acid
  misc_feature (6)..(6): Xaa can be any naturally occurring amino acid
  misc_feature (34)..(34): Xaa can be any naturally occurring amino acid
  misc_feature (43)..(43): Xaa can be any naturally occurring amino acid
  misc_feature (66)..(66): Xaa can be any naturally occurring amino acid
  misc_feature (68)..(69): Xaa can be any naturally occurring amino acid
  misc_feature (71)..(71): Xaa can be any naturally occurring amino acid
  misc_feature (88)..(89): Xaa can be any naturally occurring amino acid
  misc_feature (93)..(93): Xaa can be any naturally occurring amino acid
  misc_feature (95)..(95): Xaa can be any naturally occurring amino acid
  misc_feature (97)..(97): Xaa can be any naturally occurring amino acid
  misc_feature (100)..(101): Xaa can be any naturally occurring amino acid
  misc_feature (104)..(104): Xaa can be any naturally occurring amino acid
  Coding DNA Sequence Number=SeqID_3294
  Subcellular localization annotation: CTP_CleavageSite=40; ConfidenceScore=5.57e-01
KXXLRXRFTWTHPTVRDRPSNRTISLLCPTSMSXRPSLCVCEXASSAVRVLQSRFVITEFCDNSRXVXXNXVYVVAGARATPRYSLKXXALKXTXHXPHXXTTXNT

SEQ ID NO: 6767 - protein, 45 aa, Glycine max
  Coding DNA Sequence Number=SeqID_3296
DHLVYATQQYAHLLNQEHECNHEPEKEKNQDINQVLVVLVTKCVI

SEQ ID NO: 6768 - protein, 112 aa, Glycine max
  misc_feature (63)..(63): Xaa can be any naturally occurring amino acid
  Coding DNA Sequence Number=SeqID_3298
QSSVSEESMKIIDVPSRVRAQHIRTPQPRSTTLFFSNVSVEELSYTDKYFITIDTEKQTTQPXRLMLLSHPHNSNAIEHLFVTLACSATSCVTTVICLYIMTESTTPTKHIT

SEQ ID NO: 6769 - protein, 136 aa, Glycine max
  Coding DNA Sequence Number=SeqID_3300
TLHTTESTRSTALRARGGPVRRLAQYPLHRRVSRGGASVLHALPSPDGHFFSLIEYPRATALMPLCALSPRRADATHYILTCLCDSHPPHTSTVNCCLRNDVTVLAARSAKSQSYYMTQHRDTPRVARRESRISVV

SEQ ID NO: 6770 - protein, 128 aa, Glycine max
  misc_feature (1)..(1): Xaa can be any naturally occurring amino acid
  misc_feature (3)..(3): Xaa can be any naturally occurring amino acid
  misc_feature (5)..(7): Xaa can be any naturally occurring amino acid
  misc_feature (11)..(13): Xaa can be any naturally occurring amino acid
  misc_feature (16)..(16): Xaa can be any naturally occurring amino acid
  misc_feature (18)..(18): Xaa can be any naturally occurring amino acid
  misc_feature (28)..(28): Xaa can be any naturally occurring amino acid
  misc_feature (31)..(31): Xaa can be any naturally occurring amino acid
  misc_feature (34)..(36): Xaa can be any naturally occurring amino acid
  misc_feature (46)..(46): Xaa can be any naturally occurring amino acid
  misc_feature (54)..(54): Xaa can be any naturally occurring amino acid
  misc_feature (57)..(57): Xaa can be any naturally occurring amino acid
  misc_feature (61)..(61): Xaa can be any naturally occurring amino acid
  misc_feature (67)..(67): Xaa can be any naturally occurring amino acid
  misc_feature (76)..(77): Xaa can be any naturally occurring amino acid
  misc_feature (80)..(80): Xaa can be any naturally occurring amino acid
  misc_feature (83)..(83): Xaa can be any naturally occurring amino acid
  misc_feature (85)..(85): Xaa can be any naturally occurring amino acid
  misc_feature (88)..(89): Xaa can be any naturally occurring amino acid
  misc_feature (94)..(94): Xaa can be any naturally occurring amino acid
  misc_feature (96)..(96): Xaa can be any naturally occurring amino acid
  misc_feature (107)..(107): Xaa can be any naturally occurring amino acid
  misc_feature (111)..(113): Xaa can be any naturally occurring amino acid
  misc_feature (117)..(117): Xaa can be any naturally occurring amino acid
  misc_feature (121)..(121): Xaa can be any naturally occurring amino acid
  misc_feature (123)..(126): Xaa can be any naturally occurring amino acid
  Coding DNA Sequence Number=SeqID_3301
XYXYXXXLCMXXXYIXLXYDTEQYTTDXQRXVRXXXETSRASLTTXVTGVTSSXVAXTSCXCVARRXSLRVARPPXXDIXSRXEXVEXXLAISXHXIKCLLRPHHCXARLXXXAIAXIITXHXXXXAA

SEQ ID NO: 6771 - protein, 106 aa, Glycine max
  misc_feature (3)..(11): Xaa can be any naturally occurring amino acid
  misc_feature (19)..(19): Xaa can be any naturally occurring amino acid
  misc_feature (21)..(21): Xaa can be any naturally occurring amino acid
  misc_feature (27)..(28): Xaa can be any naturally occurring amino acid
  misc_feature (51)..(51): Xaa can be any naturally occurring amino acid
  misc_feature (64)..(64): Xaa can be any naturally occurring amino acid
  Coding DNA Sequence Number=SeqID_3303
  Subcellular localization annotation: CTP_CleavageSite=56; ConfidenceScore=5.19e-01
GFXXXXXXXXXGPLVWARXGXPPPRGXXPPALRGGGCAAPARPSPGCGSGXAERGRGSAEGGGXGARGAPPQTASQLPRPIPNIDQRRVNVREQIGELPTRSKSKH

SEQ ID NO: 6772 - protein, 134 aa, Glycine max
  misc_feature (12)..(12): Xaa can be any naturally occurring amino acid
  misc_feature (16)..(16): Xaa can be any naturally occurring amino acid
  misc_feature (21)..(21): Xaa can be any naturally occurring amino acid
  misc_feature (26)..(26): Xaa can be any naturally occurring amino acid
  misc_feature (32)..(33): Xaa can be any naturally occurring amino acid
  misc_feature (37)..(37): Xaa can be any naturally occurring amino acid
  misc_feature (39)..(39): Xaa can be any naturally occurring amino acid
  misc_feature (62)..(62): Xaa can be any naturally occurring amino acid
  misc_feature (72)..(72): Xaa can be any naturally occurring amino acid
  misc_feature (86)..(86): Xaa can be any naturally occurring amino acid
  misc_feature (88)..(88): Xaa can be any naturally occurring amino acid
  misc_feature (110)..(110): Xaa can be any naturally occurring amino acid
  Coding DNA Sequence Number=SeqID_3305
GRVFTTHHRQIXNLLXSIQDXRVRVXGRMIIXXASYXVXTRRDDVYQLVVALGIADASTRVXSTRTYIRAIXLGHNYIILYISRSXMXTYFTCVLISITISRYKCTATIXTRVRSHHITHHAHASSSRSRDDQH

SEQ ID NO: 6773 - protein, 148 aa, Glycine max
  misc_feature (72)..(72): Xaa can be any naturally occurring amino acid
  misc_feature (109)..(109): Xaa can be any naturally occurring amino acid
  Coding DNA Sequence Number=SeqID_3307
  Gene Ontology: Mol. function=heat shock protein binding
  Homolog annotation: Hit_ID=Q8L4D3; Match level="QueryCoverage=85%, HitCoverage=33%, E-value=3e-26, Identity=48%"; Hit description =AHM1(AT hook-containing MAR binding protein1)-like protein
KRPRRGSAAEPPPGGVPARGCVHLAVECLLPSGRPDSLFILQLQPNPDTPDVRRVFRRLANLLAPRRDPHPXADTALRAVEEAFSHLLESTSTSAGFAPAAPGGVSVSXDVLWTVCPHCCHVHEYERMLVGCLFGCSNPWFMCVFVAT

SEQ ID NO: 6774 - protein, 141 aa, Glycine max
  misc_feature (39)..(39): Xaa can be any naturally occurring amino acid
  Coding DNA Sequence Number=SeqID_3308
SFCIPQPPALPQNDYEHPYQVAGAIMNTLSLVLFPPQTXKTIPLPKLHRSLYAPPFSSLYTSSSITHTHHHRCPLAYNPRSYADRPRAQRQRQHGEKTTKREKAPNTLCPPPSYGAQVARCLPRTRTSSSSRLSPSSSRGS

SEQ ID NO: 6775 - protein, 104 aa, Glycine max
  misc_feature (65)..(65): Xaa can be any naturally occurring amino acid
  misc_feature (85)..(85): Xaa can be any naturally occurring amino acid
  misc_feature (100)..(100): Xaa can be any naturally occurring amino acid
  Coding DNA Sequence Number=SeqID_3310
AVLISCTRADRLHRPRTRNVCDQITITTSSTDQLSVLTDRSLLIVSMPASYVRSRHLLLDTSHSXPLLRRVISRSTLYTTYEQIXVHECVILSILLSRVXYSIR

SEQ ID NO: 6776 - protein, 99 aa, Glycine max
  misc_feature (13)..(13): Xaa can be any naturally occurring amino acid
  misc_feature (39)..(39): Xaa can be any naturally occurring amino acid
  misc_feature (51)..(51): Xaa can be any naturally occurring amino acid
  misc_feature (74)..(75): Xaa can be any naturally occurring amino acid
  Coding DNA Sequence Number=SeqID_3312
HGGAHRCRERGRXRQNKHTTTACGPAPHPSCRRAHGARXTSTTYARYSPPXGRVEVRVSRYLDGHPVATLLAHXXAALARASTRYRRWREVRRSTNYIP

SEQ ID NO: 6777 - protein, 132 aa, Glycine max
  Coding DNA Sequence Number=SeqID_3313
EKRSNPNLGRKMMNLGLKMMRNLGSGCAKFGRSERWYCVSRREKISFSTPPEVTFSTPPSLVSLLFTSFFGYLWYQTKAASEQERLWDVLSEKRNQIRILSRQDESKRKKVKEAEIKLIEKAATVLSEEIQV

SEQ ID NO: 6778 - protein, 143 aa, Glycine max
  misc_feature (44)..(44): Xaa can be any naturally occurring amino acid
  Coding DNA Sequence Number=SeqID_3315
  Gene Ontology: Mol. function=transferase activity, transferring glycosyl groups; Cellular component=integral to membrane
  Homolog annotation: Hit_ID=A7Q1K1; Match level="QueryCoverage=100%, HitCoverage=27%, E-value=8e-56, Identity=76%"; Hit description =Chromosome chr7 scaffold_44, whole genome shotgun sequence
LMECDFDQSICLSPSTLMHYAQSSLFCLQPQRDTYTLLSPSDSXLAVWIPGFYLPCSTYTQFSWHLPKNFTKYSVFIPEDDIRKRNISIEERLGQIPPEQVKIMREEVISLIPRLVYADPRSKLETLKDAFDVAVQAEIDNVT

SEQ ID NO: 6779 - protein, 69 aa, Glycine max
  Coding DNA Sequence Number=SeqID_3316
  Gene Ontology: Mol. function=protein binding; Cellular component =cytoplasm; Biological process=vesicle docking during exocytosis
  Homolog annotation: Hit_ID=A5AIK1; Match level="QueryCoverage=100%, HitCoverage=27%, E-value=6e-19, Identity=69%"; Hit description =Putative uncharacterized protein
SVFKKMGQRIFKFIVGGAPRFELRICPKLTGKLKREVILGPPSIDDPAQYTPKLKMLPAQDLSLDDPQI

SEQ ID NO: 6780 - protein, 95 aa, Glycine max
  Coding DNA Sequence Number=SeqID_3317
  Gene Ontology: Mol. function=2 iron, 2 sulfur cluster binding; Cellular component=peroxisome; Biological process=electron transport
  Homolog annotation: Hit_ID=A7NZS2; Match level="QueryCoverage=96%, HitCoverage=7%, E-value=3e-45, Identity=90%"; Hit description =Chromosome chr6 scaffold_3, whole genome shotgun sequence
EVEIDTLTGDFHTRVANVFLDLGYSLNPAIDVGQIEGAFMQGLGWVALEELKWGDEAHKWIPSGCLYTCGPGAYKIPSVNDVPFKFNVSLLKVCS

SEQ ID NO: 6781 - protein, 172 aa, Glycine max
  Coding DNA Sequence Number=SeqID_3318
GAHYIKMSESPQRLWVRRTRETASASARLSVILADNRQSMFVGWWQRESLTRRNMGRWIGVHGTLGNVVGRGTSGAVIGRELGISGGEARLHDSGRSVEPITVRLRYRVLGERQSWLNCRSADCTENKPTRCEWSQNIQIHRGRCALWINGACREVRSAARLAGDESGVGRY

SEQ ID NO: 6782 - protein, 122 aa, Glycine max
  misc_feature (17)..(17): Xaa can be any naturally occurring amino acid
  Coding DNA Sequence Number=SeqID_3320
  Gene Ontology: Mol. function=protein serine/threonine kinase activity; Biological process=protein amino acid phosphorylation
  Homolog annotation: Hit_ID=P51567; Match level="QueryCoverage=93%, HitCoverage=27%, E-value=4e-47, Identity=74%"; Hit description =Serine/threonine-protein kinase AFC2
MEMERIVEFPHTYMDQXPRKRARLGWDIAEVPKAQVGLFCGQEVENISSFAPSEHPPSSLFKGVARNGSPPWRDDDKDGHYMFELGDNLTSRYKIHSKMGEGTFGQVLECWDRESAGFLLLV

SEQ ID NO: 6783 - protein, 81 aa, Glycine max
  Coding DNA Sequence Number=SeqID_3321
  Gene Ontology: Mol. function=alanine-glyoxylate transaminase activity; Cellular component=mitochondrion; Biological process =arginine catabolic process to glutamate
  Homolog annotation: Hit_ID=A7PL38; Match level="QueryCoverage=100%, HitCoverage=17%, E-value=1e-26, Identity=69%"; Hit description =Chromosome chr7 scaffold_20, whole genome shotgun sequence
KKDSIGNVSGRGLMVGIKLVTELDNKTSEKAETVVVFEKLKELGVLVGKVEIHGNVFRIKPPMCFSKDDADFLVNALDYSL

SEQ ID NO: 6784 - protein, 69 aa, Glycine max
  misc_feature (57)..(57): Xaa can be any naturally occurring amino acid
  Coding DNA Sequence Number=SeqID_3322
QAEVLKLEGECQSIRITKFQCYLPGLVVVLPVLDTISSINRSIGLWYCMAAIYQFQXISYLSIFFFFLT

SEQ ID NO: 6785 - protein, 57 aa, Glycine max
  misc_feature (30)..(30): Xaa can be any naturally occurring amino acid
  Coding DNA Sequence Number=SeqID_3324
  Homolog annotation: Hit_ID=A5AF73; Match level="QueryCoverage=61%, HitCoverage=3%, E-value=3e-09, Identity=82%"; Hit description =Putative uncharacterized protein
KKFLKFVNPNKGGKKKKGVFVLRRLKQMFXPWKKDYGARLRETKVILHKLGSEDGSI

SEQ ID NO: 6786 - protein, 149 aa, Glycine max
  misc_feature (7)..(7): Xaa can be any naturally occurring amino acid
  misc_feature (21)..(21): Xaa can be any naturally occurring amino acid
  misc_feature (52)..(53): Xaa can be any naturally occurring amino acid
  misc_feature (69)..(69): Xaa can be any naturally occurring amino acid
  misc_feature (119)..(119): Xaa can be any naturally occurring amino acid
  misc_feature (128)..(128): Xaa can be any naturally occurring amino acid
  Coding DNA Sequence Number=SeqID_3325
  Subcellular localization annotation: CTP_CleavageSite=57; ConfidenceScore=5.31e-01
AGAGWRXGVLSDTAYSHASLXVVAPRRRVPRTTHNARRCYHSAHERRIKSAXXFTARVSAANALIDSYXHHSHLINQQHHRRAPRRRALHIHRSMTERLVPVSARHRRRRDGRDERIGXIHIILLLSXLLSTPRCRYSRRAKLSYRCFV

SEQ ID NO: 6787 - protein, 387 aa, Glycine max
  misc_feature (21)..(21): Xaa can be any naturally occurring amino acid
  misc_feature (337)..(337): Xaa can be any naturally occurring amino acid
  Coding DNA Sequence Number=SeqID_3327
  Pfam annotation: Domain name=Extensin_2; Domain location=47-361; Score=-142.4; E_value=0.1; Accession=PF04554.4; Description=Extensin- like region
  Subcellular localization annotation: CTP_CleavageSite=32; ConfidenceScore=5.03e-01
FIPLCPPPFSPPSPPPKPHHXQLNPTALSPILSEKKAEYQGPTTLFPSSILLTWIQYRPQNTKQTNQQNQHPPTTYKQTNNNIPTNNSYILQSPTIHIISIQHNHLYSPLHHTTKHTTLPHHNNTHHTHQIIHIHHYSTKPTNPTPTLHITHTSHTHTPHTTYPPTNPPHPTSSPPLPYHPPPFTPNTLPPPPPNHNTYPSTPLNQPILLPHHTTTTLNVQSHIPTHIKNPLLYTHNTSPDTTSHTLTSSHKNPQITNNFSDPPTPHLTHHQPSHPRLHYQTTTHTTTLPPYHSSLLSVHNTHIYTLPHISPTTHLIKPLHTTSTYGDILSSPSTLXTTNHTLTIHHNTTNPPNTTTPHLTILLTITFSTLHIYSPLYAHPLHTTPN

SEQ ID NO: 6788 - protein, 128 aa, Glycine max
  misc_feature (40)..(40): Xaa can be any naturally occurring amino acid
  Coding DNA Sequence Number=SeqID_3329
RRLYGRLVYGTQTTDGAKYEVSENASADIRLSAHLVTQPXISYAAARVCTASAAAHYYTITLSRRARRRETHSPMSGQLQRTYTCNICTRYEYAERLVGNWAHTRRAQIRYTPGLARGDNGRRAPDPH

SEQ ID NO: 6789 - protein, 123 aa, Glycine max
  misc_feature (21)..(21): Xaa can be any naturally occurring amino acid
  misc_feature (39)..(39): Xaa can be any naturally occurring amino acid
  misc_feature (46)..(46): Xaa can be any naturally occurring amino acid
  misc_feature (77)..(77): Xaa can be any naturally occurring amino acid
  Coding DNA Sequence Number=SeqID_3331
  Gene Ontology: Mol. function=oxidoreductase activity; Biological process=electron transport
  Homolog annotation: Hit_ID=Q9ZSN8; Match level="QueryCoverage=100%, HitCoverage=27%, E-value=2e-26, Identity=50%"; Hit description=CTF2A
KELPAFNIKQEDSNKDVPALXSRVFLKTLASNLPVDTIXILIIMTXIENTLNGDTLLELVDGFQLFAKIEIWCDGIXSPHTKWMAFAEPKYVDHSAKRELACYSDGQPFGPRVNYIYGRGLHA

SEQ ID NO: 6790 - protein, 72 aa, Glycine max
  Coding DNA Sequence Number=SeqID_3332
QRRQHHDARIEKHSHRRSEQLMIVLSRPSNSGPQPCKSSGRSTTVLLDLTLELLNKACHHPDMKIFTSEMGV

SEQ ID NO: 6791 - protein, 152 aa, Glycine max
  Coding DNA Sequence Number=SeqID_3334
  Gene Ontology: Mol. function=glutathione transferase activity; Cellular component=cytoplasm; Biological process=auxin mediated signaling pathway
  Homolog annotation: Hit_ID=A2XC67; Match level="QueryCoverage=100%, HitCoverage=67%, E-value=1e-76, Identity=93%"; Hit description =Putative uncharacterized protein
  Pfam annotation: Domain name=GST_N; Domain location=3-78; Score=49.9; E_value=9e-12; Accession=PF02798.10; Description=Glutathione S -transferase, N-terminal domain
MAAGLQVFGQPASTDVARVLTCLFEKNLEFELVRIDTFKREHKLPEFIKLRDPTGQVTFKHGDKTLVDSRAICRYLCTQFPEDGNRGIYGTGSLERASIEQWLQAEAQSFDAPSSELVFHLAFAPQLNMLPDEARIAENERKLQQMLGVYDE

SEQ ID NO: 6792 - protein, 214 aa, Glycine max
  misc_feature (200)..(214): Xaa can be any naturally occurring amino acid
  Coding DNA Sequence Number=SeqID_3335
  Subcellular localization annotation: CTP_CleavageSite=84; ConfidenceScore=5.33e-01
STSILLSLQPYHLRFQRQSCSSLCSAPTFFCSNKLFFTDYLASYFQTNCSTISQDEVLRRPSFRSCQHCNRIPASPASLATILLATNRRTRLWSRLRSWWRIESTNQPSIPRRWRWSPIPRRWRWPPITRRWPPITWRWRWRLLPPHQPPFSRRWPPITWRGRRKLSPLQQPTQPGWKQHPDRGFRPEQLAHRPKGRPRXXXXXXXXXXXXXXX

SEQ ID NO: 6793 - protein, 120 aa, Glycine max
  misc_feature (26)..(26): Xaa can be any naturally occurring amino acid
  misc_feature (89)..(89): Xaa can be any naturally occurring amino acid
  misc_feature (102)..(102): Xaa can be any naturally occurring amino acid
  Coding DNA Sequence Number=SeqID_3337
  Gene Ontology: Mol. function=protein-tyrosine kinase activity; Biological process=protein amino acid phosphorylation
  Homolog annotation: Hit_ID=Q84P43; Match level="QueryCoverage=97%, HitCoverage=31%, E-value=7e-35, Identity=60%"; Hit description =Protein kinase Pti1
LYYTYQVKESYPSNENKHLKSPRNYXDNNQKSSEISAPIKPKTQRTPPPIKAPALSLDDLKKKTNNCISRTLISKRSCGRVDYSTLNSXKTSTLRKLDISSXRESDYEFLDRIVLVFRVR

SEQ ID NO: 6794 - protein, 161 aa, Glycine max
  misc_feature (1)..(1): Xaa can be any naturally occurring amino acid
  misc_feature (6)..(8): Xaa can be any naturally occurring amino acid
  misc_feature (19)..(19): Xaa can be any naturally occurring amino acid
  misc_feature (69)..(69): Xaa can be any naturally occurring amino acid
  misc_feature (75)..(76): Xaa can be any naturally occurring amino acid
  misc_feature (78)..(78): Xaa can be any naturally occurring amino acid
  misc_feature (83)..(83): Xaa can be any naturally occurring amino acid
  misc_feature (89)..(89): Xaa can be any naturally occurring amino acid
  misc_feature (108)..(108): Xaa can be any naturally occurring amino acid
  misc_feature (120)..(120): Xaa can be any naturally occurring amino acid
  misc_feature (133)..(133): Xaa can be any naturally occurring amino acid
  misc_feature (148)..(149): Xaa can be any naturally occurring amino acid
  misc_feature (158)..(159): Xaa can be any naturally occurring amino acid
  Coding DNA Sequence Number=SeqID_3338
XRCCVXXXGEACARPHGRXRIVSRSAQSVARTQPCVIAAIVRCVSRIMCDQVVVCDVVRCSSSSVCCGXGCESIXXYXRQYYXPSTVTXDRGRTEWRWRCLCSCVACXYYSMKFVGRRHXRRELSAMCSVCVXELCREDVWRCRHTHXXRYISTSEMXXLT

SEQ ID NO: 6795 - protein, 69 aa, Glycine max
  misc_feature (17)..(17): Xaa can be any naturally occurring amino acid
  misc_feature (26)..(27): Xaa can be any naturally occurring amino acid
  misc_feature (49)..(49): Xaa can be any naturally occurring amino acid
  misc_feature (56)..(56): Xaa can be any naturally occurring amino acid
  Coding DNA Sequence Number=SeqID_3340
YVCDVCSLMSCYITHPXILTTISSLXXIDIESYHAAIQSSSAYVPGSVXESSVEYXIVYITRSLRHASL

SEQ ID NO: 6796 - protein, 109 aa, Glycine max
  Coding DNA Sequence Number=SeqID_3342
  Homolog annotation: Hit_ID=Q9FJX4; Match level="QueryCoverage=98%, HitCoverage=46%, E-value=2e-23, Identity=58%"; Hit description =Genomic DNA, chromosome 5, TAC clone: K9I9
  Pfam annotation: Domain name=DUF1674; Domain location=47-109; Score =84.6; E_value=3.2e-22; Accession=PF07896.2; Description=Protein of unknown function (DUF1674)
  Subcellular localization annotation: CTP_CleavageSite=19; ConfidenceScore=5.28e-01
MATNKIVRLIAPSRSASSRFMEPVSRFLSSGTPPPQSPSPSPNEDQVVKPDQKLQENLQMPKEEEDEEEGGGGGGGEFFNKDTGEIGGPRGPEPTRYGDWEQRGRCSDF

SEQ ID NO: 6797 - protein, 204 aa, Glycine max
  Coding DNA Sequence Number=SeqID_3343
  Subcellular localization annotation: CTP_CleavageSite=54; ConfidenceScore=5.45e-01
RRFTLDPYRPSFLSCRVSPGGGFFSGRLPLGRPRPCSQASGLTHRPVGGPFSAEAAGLKAKKSVVCLPVRLVLEPAGVFLEGFLGFLDSQEEPGPKVPPGGLGRTPFKDFPSHLRGRAPGPYLWSGWWLGFLQVFGGSTFRYLLVWPRVPTLHFSLFCLCPKGLGDWGGKRREKKGPVPGPVLVKPVKGFQFPKVKKMLKKKKK

SEQ ID NO: 6798 - protein, 171 aa, Glycine max
  misc_feature (62)..(62): Xaa can be any naturally occurring amino acid
  misc_feature (66)..(66): Xaa can be any naturally occurring amino acid
  misc_feature (75)..(75): Xaa can be any naturally occurring amino acid
  misc_feature (85)..(85): Xaa can be any naturally occurring amino acid
  misc_feature (112)..(112): Xaa can be any naturally occurring amino acid
  misc_feature (155)..(155): Xaa can be any naturally occurring amino acid
  misc_feature (165)..(165): Xaa can be any naturally occurring amino acid
  Coding DNA Sequence Number=SeqID_3345
EQSHDMTMSATPAHLSHDERATFVGSPHDPLPSTADCASPLSPPTLSDSCAAPYLSMQSSPXSRLXHTRALYGLXSYAFYITLSXLSLLSLTIIQGSHLCVIISCACYSCVXAHALGRVAPQRSAQVPPLNSRCLRVRQIVFTTSLLNARMTTPXNTTVHRHFWXLSRSPC

SEQ ID NO: 6799 - protein, 115 aa, Glycine max
  misc_feature (39)..(39): Xaa can be any naturally occurring amino acid
  misc_feature (55)..(55): Xaa can be any naturally occurring amino acid
  misc_feature (64)..(64): Xaa can be any naturally occurring amino acid
  Coding DNA Sequence Number=SeqID_3347
CVYIVLYIVVRLVYIRYTMVYEESMTRRCRVVCVSHSRXHTKSIITSYEIVTIAXRTISTRVDXSHTSRVVLIYSRNVSTHTDTQTREHYSVRNDSIDTIHDRQSARMTDIDTYR

SEQ ID NO: 6800 - protein, 82 aa, Glycine max
  misc_feature (5)..(6): Xaa can be any naturally occurring amino acid
  misc_feature (11)..(12): Xaa can be any naturally occurring amino acid
  misc_feature (17)..(17): Xaa can be any naturally occurring amino acid
  misc_feature (75)..(75): Xaa can be any naturally occurring amino acid
  Coding DNA Sequence Number=SeqID_1380
  Subcellular localization annotation: CTP_CleavageSite=74; ConfidenceScore=5.00e-01
LCFVXXGHRCXXTPRTXTQTPTPPHTTTQKLRQNHNHTQKKYIYHLSSNTYRLFTPPHTTTPHVNKTHFIVYTTXFMPWALV

SEQ ID NO: 6801 - protein, 128 aa, Glycine max
  misc_feature (81)..(81): Xaa can be any naturally occurring amino acid
  Coding DNA Sequence Number=SeqID_1381
  Gene Ontology: Mol. function=sequence-specific DNA binding; Cellular component=intracellular; Biological process=regulation of transcription
  Pfam annotation: Domain name=CBFD_NFYB_HMF; Domain location=83-127; Score=35.8; E_value=1.5e-07; Accession=PF00808.13; Description =Histone-like transcription factor (CBFNF-Y) and archaeal histone
SSETMVSSKKPNQEKKPKNGDGLNTRSSGSKTKKKTANKAKLKDVAEKEPEVHEISESSSSEGRRDEPKESNGVVVVEDAXMIRFPMNRIRRIMRSDNSAPQIMQDAVFLVNKATELFIERFSEEAYG

SEQ ID NO: 6802 - protein, 256 aa, Glycine max
  misc_feature (17)..(17): Xaa can be any naturally occurring amino acid
  misc_feature (42)..(42): Xaa can be any naturally occurring amino acid
  misc_feature (109)..(109): Xaa can be any naturally occurring amino acid
  misc_feature (225)..(225): Xaa can be any naturally occurring amino acid
  Coding DNA Sequence Number=SeqID_1382
VRTYISSRREANFIVVXYVCLYPLCTVVGRLPPCLLVPFVCXIPVRAFFSVLSESDRQLGDRSYYVSWALYYLCGSSAPPSTRAPPRTRVTPRPPTAARDRRGVGAALXAGRRVVLYFFVIIFRITATHTTTTLSVWCKGERRCSSLDMRILRTTLSPDRRPPRADVLPFTCVCVVASRGPTYLSRSSPSSPRRVARRPSYSTRDALYVPLPLAVVDRLLFSLVXWVSVSGCLKSEHACVHGRAEWMRRLRLYLRL

SEQ ID NO: 6803 - protein, 114 aa, Glycine max
  misc_feature (62)..(62): Xaa can be any naturally occurring amino acid
  Coding DNA Sequence Number=SeqID_1384
  Gene Ontology: Mol. function=structural constituent of ribosome; Cellular component=intracellular; Biological process=protein modification process
  Homolog annotation: Hit_ID=A4D9S6; Match level="QueryCoverage=99%, HitCoverage=79%, E-value=4e-41, Identity=76%"; Hit description =Ubiquitin UbiA, putative
  Pfam annotation: Domain name=Ribosomal_L40e; Domain location=76-114; Score=27.5; E_value=5e-05; Accession=PF01020.8; Description =Ribosomal L40e family
  Pfam annotation: Domain name=ubiquitin; Domain location=5-73; Score =101.8; E_value=2.2e-27; Accession=PF00240.13; Description=Ubiquitin family
  Pfam module annotation: Pfam domain module=Ribosomal_L40e::ubiquitin; Domain location=76-114::5-73
HIFVKTLTGKTITLEDESSDTIDNVKAKIQDKERIPPEHQRLIIPGKQLEDGRTLADYNIQXESTLHLVLRLAGGIIEPSLMALALKYNQHKMMWAECYAHLQSEDINCRQRKC

SEQ ID NO: 6804 - protein, 97 aa, Glycine max
  misc_feature (64)..(64): Xaa can be any naturally occurring amino acid
  misc_feature (77)..(77): Xaa can be any naturally occurring amino acid
  Coding DNA Sequence Number=SeqID_1385
  Gene Ontology: Mol. function=structural constituent of ribosome; Cellular component=ribonucleoprotein complex; Biological process =translation
  Homolog annotation: Hit_ID=Q7X9K6; Match level="QueryCoverage=91%, HitCoverage=81%, E-value=8e-26, Identity=67%"; Hit description=40S ribosomal protein
MINQASTCDLKELVSKFIPEVIGKEIEKSTSSIFPLQNVFIRKGEILKAPPVDLGKLMEVMPTXKEGMCVKLERAVXGNEAGQEVAAAQKFGCYFWT

SEQ ID NO: 6805 - protein, 121 aa, Glycine max; identical to SEQ ID NO: 6639
  Coding DNA Sequence Number=SeqID_1386
  Subcellular localization annotation: CTP_CleavageSite=20; ConfidenceScore=5.64e-01

SEQ ID NO: 6806 - protein, 94 aa, Glycine max; identical to SEQ ID NO: 6640
  misc_feature (4)..(4): Xaa can be any naturally occurring amino acid
  misc_feature (27)..(28): Xaa can be any naturally occurring amino acid
  misc_feature (35)..(36): Xaa can be any naturally occurring amino acid
  misc_feature (51)..(51): Xaa can be any naturally occurring amino acid
  Coding DNA Sequence Number=SeqID_1388

SEQ ID NO: 6807 - protein, 122 aa, Glycine max
  misc_feature (105)..(105): Xaa can be any naturally occurring amino acid
  Coding DNA Sequence Number=SeqID_1390
  Gene Ontology: Mol. function=strictosidine synthase activity; Cellular component=endoplasmic reticulum; Biological process =biosynthetic process
  Homolog annotation: Hit_ID=Q9C586; Match level="QueryCoverage=82%, HitCoverage=25%, E-value=2e-48, Identity=86%"; Hit description =Putative strictosidine synthase-like
MALFFSPLTSALLFLTLSLALYCSIDPFHHCAISDFPNFVAHEVVSPRPDQVPWERDSQNSLQGSKILFQDQVQGPESVAFDPLGRGPYTGVADGRVLFWNGENXTNFAYTSSNRTEICDPK

SEQ ID NO: 6808 - protein, 138 aa, Glycine max
  misc_feature (1)..(1): Xaa can be any naturally occurring amino acid
  misc_feature (52)..(52): Xaa can be any naturally occurring amino acid
  misc_feature (56)..(56): Xaa can be any naturally occurring amino acid
  misc_feature (80)..(80): Xaa can be any naturally occurring amino acid
  Coding DNA Sequence Number=SeqID_325
XVCVVCETLYLAMFYTSTSNVIVRDIGVLSDLLIKSVHRPYSLRQNTIVIRXSYMXKERCLFMTLVRVPSPSSRGVVRRXMRFSTLTQSLRALHVLLVCSGAAISQYRTYEIRLIGISDVYCTTSCIVVCNTGGVVFA

SEQ ID NO: 6809 - protein, 154 aa, Glycine max
  Coding DNA Sequence Number=SeqID_327
  Homolog annotation: Hit_ID=Q8L5A1; Match level="QueryCoverage=83%, HitCoverage=79%, E-value=1e-52, Identity=80%"; Hit description =Putative uncharacterized protein
  Subcellular localization annotation: CTP_CleavageSite=44; ConfidenceScore=5.75e-01
MIIHSPSPIHRTSFSNSRSRSQCQSRLVTRSAAVRISTGAIGVVAAAVVMMTSVSTAYAELPPPPQDGETLSNVPQTLSGEDCKKQRIQRPKSKNAEKCTVKCVNTCIRGGDGEGPLNIRRPLVVFKQGFRSRNYCLVECSDICNLIGDGDYGP

SEQ ID NO: 6810 - protein, 154 aa, Glycine max
  misc_feature (79)..(79): Xaa can be any naturally occurring amino acid
  misc_feature (103)..(103): Xaa can be any naturally occurring amino acid
  misc_feature (113)..(113): Xaa can be any naturally occurring amino acid
  misc_feature (124)..(124): Xaa can be any naturally occurring amino acid
  misc_feature (134)..(134): Xaa can be any naturally occurring amino acid
  Coding DNA Sequence Number=SeqID_328
HHRSISWLLTCHLSYYSHRFNLSFTLTSLFVIVELSFFTEHERAGSRRVSILYLSSSISHMIQSTAVATQATISDDHTXSYPHSSYYSHQGVVLHSFIYYYLXFSLSYALYHXIQTSHSSARGXRATNLWCLRXLCVDVIGGGEEPTHGGVYSL

SEQ ID NO: 6811 - protein, 145 aa, Glycine max
  Coding DNA Sequence Number=SeqID_330
  Gene Ontology: Mol. function=DNA binding; Cellular component=nucleus; Biological process=regulation of transcription
  Homolog annotation: Hit_ID=A2Q1B8; Match level="QueryCoverage=46%, HitCoverage=19%, E-value=1e-16, Identity=58%"; Hit description =Homeobox domain, ZF-HD class; ZF-HD homeobox protein Cys/His-rich dimerisation region; Homeodomain-like
RYRTRMISNCWRRCRRARTMVGWKMRKRDDEMVMEFCNEIGVERGVLKVWMHNNKNTLATKDNLNGNGIGSAPSVSANGVAPIGAVGSATVRSSVHVHEHEHGGINGNGSGDNNHNPLGSRDVNEYENDSGTNGGGGTNGSSSSS

SEQ ID NO: 6812 - protein, 119 aa, Glycine max
  Coding DNA Sequence Number=SeqID_331
TRVWFFFDKTQCILFPDCFWKLGLQRSENVFLDFCTSSVPPEGCQIADDNEGMMIFMGYRRFLRFCGALCGFNLVRGDPPEKFVFLRSFGTGPMKGFLLKKAPQVFCMVPPWDYEPKRP

SEQ ID NO: 6813 - protein, 161 aa, Glycine max
  misc_feature (4)..(4): Xaa can be any naturally occurring amino acid
  misc_feature (8)..(8): Xaa can be any naturally occurring amino acid
  misc_feature (11)..(12): Xaa can be any naturally occurring amino acid
  misc_feature (30)..(30): Xaa can be any naturally occurring amino acid
  misc_feature (34)..(34): Xaa can be any naturally occurring amino acid
  misc_feature (41)..(41): Xaa can be any naturally occurring amino acid
  misc_feature (54)..(54): Xaa can be any naturally occurring amino acid
  misc_feature (75)..(75): Xaa can be any naturally occurring amino acid
  misc_feature (83)..(83): Xaa can be any naturally occurring amino acid
  misc_feature (86)..(87): Xaa can be any naturally occurring amino acid
  misc_feature (89)..(89): Xaa can be any naturally occurring amino acid
  misc_feature (91)..(91): Xaa can be any naturally occurring amino acid
  misc_feature (96)..(96): Xaa can be any naturally occurring amino acid
  misc_feature (102)..(103): Xaa can be any naturally occurring amino acid
  misc_feature (110)..(110): Xaa can be any naturally occurring amino acid
  misc_feature (114)..(114): Xaa can be any naturally occurring amino acid
  misc_feature (116)..(117): Xaa can be any naturally occurring amino acid
  misc_feature (119)..(119): Xaa can be any naturally occurring amino acid
  misc_feature (122)..(122): Xaa can be any naturally occurring amino acid
  misc_feature (125)..(126): Xaa can be any naturally occurring amino acid
  misc_feature (135)..(135): Xaa can be any naturally occurring amino acid
  misc_feature (139)..(139): Xaa can be any naturally occurring amino acid
  misc_feature (157)..(161): Xaa can be any naturally occurring amino acid
  Coding DNA Sequence Number=SeqID_333
YVSXYDIXYKXXYYNTSYSSTYKQHSRTDXHYTXHALAHHXTQYASTRTVVLEXELSREMIQLHYYLLSSSSITXTRRLTAVXRSXXVXIXLHIKXRADADXXSILSVPXAGCXCXXGXIAXYSXXSIIHPMRAXRHSXSSHHQPVATLSAHRVLLXXXXX

SEQ ID NO: 6814 - protein, 115 aa, Glycine max
  misc_feature (16)..(16): Xaa can be any naturally occurring amino acid
  misc_feature (34)..(34): Xaa can be any naturally occurring amino acid
  misc_feature (74)..(75): Xaa can be any naturally occurring amino acid
  misc_feature (106)..(106): Xaa can be any naturally occurring amino acid
  misc_feature (112)..(112): Xaa can be any naturally occurring amino acid
  Coding DNA Sequence Number=SeqID_335
HRRYNISRPRRQQYAXLSRSTHTHDNRAWRIRRXHVRPDGHHARLWCEHCHLCLLSLCSYTSVVGLCVVRCTVXXESARRATRLHGARHVQHRSAVRRSSLSLTRXHTRMNXSTQ

SEQ ID NO: 6815 - protein, 88 aa, Glycine max
  Coding DNA Sequence Number=SeqID_3349
  Homolog annotation: Hit_ID=Q9LE44; Match level="QueryCoverage=100%, HitCoverage=100%, E-value=2e-31, Identity=79%"; Hit description =Genomic DNA, chromosome 3, P1 clone: MGH6
MAKNKDDIKYATAQTKQSEDEAIRVRYKHGTPLEGGKIAESEPVELFSSAQGIEKGKDQAASEITGDQKQMHRDVKDNPGRRTNDSPR

SEQ ID NO: 6816 - protein, 132 aa, Glycine max
  misc_feature (1)..(1): Xaa can be any naturally occurring amino acid
  misc_feature (66)..(68): Xaa can be any naturally occurring amino acid
  misc_feature (79)..(79): Xaa can be any naturally occurring amino acid
  misc_feature (114)..(114): Xaa can be any naturally occurring amino acid
  misc_feature (122)..(122): Xaa can be any naturally occurring amino acid
  Coding DNA Sequence Number=SeqID_3350
XSVVVYVLYSPYLIHHRVVCRVYVCLHVIYLIIAMCDVVCDNTYNMNHIYEIISVCLTHILSHETXXXDSRGRAAGFIXPRAVRRAGDSTELLHLDIVHIHRQYTPAGAMTVMXKSHVFCDXLAIVVIFVLW

SEQ ID NO: 6817 - protein, 165 aa, Glycine max
  misc_feature (66)..(66): Xaa can be any naturally occurring amino acid
  misc_feature (129)..(129): Xaa can be any naturally occurring amino acid
  misc_feature (149)..(149): Xaa can be any naturally occurring amino acid
  misc_feature (156)..(156): Xaa can be any naturally occurring amino acid
  Coding DNA Sequence Number=SeqID_3352
  Gene Ontology: Mol. function=receptor activity; Cellular component =cell soma; Biological process=wing disc development
  Homolog annotation: Hit_ID=Q39836; Match level="QueryCoverage=95%, HitCoverage=48%, E-value=2e-56, Identity=72%"; Hit description =Guanine nucleotide-binding protein subunit beta-like protein
  Pfam annotation: Domain name=WD40; Domain location=44-82; Score=34.5; E_value=3.8e-07; Accession=PF00400.22; Description=WD domain, G-beta repeat
  Pfam annotation: Domain name=WD40; Domain location=86-124; Score =21.5; E_value=0.0032; Accession=PF00400.22; Description=WD domain, G- beta repeat
  Pfam module annotation: Pfam domain module=WD40::WD40; Domain location=44-82::86-124
LCAFTQDPKTVIGTPIENSDMIVTASRDKSIILWYLTKEDMTYGVTRRRLTGHSHFVQDVVLSSEXTIVLSGSWDGELRLWDLGGVTSARRFVEHTKYVLSVSFSIEHRQIGSASRDRTIMLRNTLCEXQHAIPDGDAHSVLSKIAPFXPSTLQPXIVSVIWYRY

SEQ ID NO: 6818 - protein, 212 aa, Glycine max
  Coding DNA Sequence Number=SeqID_3353
SFKMGKSLRSKRMRRNRSVKRVKTYNPKVEAKLKEALAFEYNDQTEKAHLSIFHDVMNGPPPAVPGLEPGSKLARAHLTEGHVSVERIANFNVGKLGRLWESATRAVTKGARQIPDPPSDPEDEDKMDDKEPRIYDPKTMKDQYGNYPPWMNKKKVKAKSHAAKVQKAKDKRVARRKSGRVLRKDTDGQGKKPSSKKNDDSDESDMEVNYYK

SEQ ID NO: 6819 - protein, 112 aa, Glycine max
  misc_feature (46)..(46): Xaa can be any naturally occurring amino acid
  Coding DNA Sequence Number=SeqID_3355
MYPFGGSLFYYYSVAVLELLYAANLWWMTRCGGIIRGKRCGWCGAXRVPHNLSNTKEAGERRKQVRDDGDKDRANRGTKKGQVTRRERGIHGWSKICQRSLTRFDRIYGGAY

SEQ ID NO: 6820 - protein, 108 aa, Glycine max
  misc_feature (7)..(7): Xaa can be any naturally occurring amino acid
  misc_feature (12)..(12): Xaa can be any naturally occurring amino acid
  misc_feature (25)..(25): Xaa can be any naturally occurring amino acid
  misc_feature (33)..(33): Xaa can be any naturally occurring amino acid
  misc_feature (39)..(39): Xaa can be any naturally occurring amino acid
  misc_feature (54)..(54): Xaa can be any naturally occurring amino acid
  misc_feature (66)..(66): Xaa can be any naturally occurring amino acid
  misc_feature (71)..(72): Xaa can be any naturally occurring amino acid
  misc_feature (83)..(83): Xaa can be any naturally occurring amino acid
  misc_feature (105)..(105): Xaa can be any naturally occurring amino acid
  Coding DNA Sequence Number=SeqID_3357
QYEDRMXARHVXSEHLISRLRRSVXVNMMSDRXVTASSXVKYCFYVTYSIMSRXSIISAAAISSTXVQELXXVYHDRCHISLXRRMPTSCTVCDDHSITYRLIAXASS

SEQ ID NO: 6821 - protein, 274 aa, Glycine max
  misc_feature (178)..(178): Xaa can be any naturally occurring amino acid
  misc_feature (257)..(257): Xaa can be any naturally occurring amino acid
  Coding DNA Sequence Number=SeqID_3359
  Gene Ontology: Mol. function=nucleic acid binding; Cellular component= spliceosome; Biological process=mRNA processing
  Homolog annotation: Hit_ID=A7NYL7; Match level="QueryCoverage=100%, HitCoverage=55%, E-value=1e-138, Identity=86%"; Hit description =Chromosome chr6 scaffold_3, whole genome shotgun sequence
MAHRLLRDHEADGWERSDFPIICESCLGDSPYVRMTKAEYDKECKICTRPFTVFRWRPGRDARYKKTEICQTCSKLKNVCQVCLLDLEYGLPVQVRDTALSIDSNDAIPKSDVNREYFAEEHDRRARAGIDYESSYGKVRPNDTILKLPFATDSTQIRTQRKTTPYYKRNRAHILQFXYIRGECTRGAECPYRHEMPETGELSQQNIKDRYYGVNDPVALKLLGKAGEMSTLEAPEDESIKTLYVGGLDARVTEQDXLRDHFYAHGEIESIKLI

SEQ ID NO: 6822 - protein, 193 aa, Glycine max
  Coding DNA Sequence Number=SeqID_3360
HVCPAATCTSNSLETYTSYSLHSSRCTTSRLHNRISLHTTSIKHKYIDFTIINITTRVHPNHTTLLYPRISSLPIIIKTLYPRALTLSPLRLSSVYSLHSHTLVTIHSTLLTILDSLRALLVARMQHTDYLHPLPLFSLHNILSLTTTKSCYTLLSLFSLPPLTPITQNKPPLRHSILSVYLFIAHTLSHALL

SEQ ID NO: 6823 - protein, 185 aa, Glycine max
  misc_feature (11)..(11): Xaa can be any naturally occurring amino acid
  misc_feature (185)..(185): Xaa can be any naturally occurring amino acid
  Coding DNA Sequence Number=SeqID_3361
  Gene Ontology: Mol. function=serine-type endopeptidase activity; Cellular component=intracellular; Biological process=protein modification process
  Homolog annotation: Hit_ID=Q5SX22; Match level="QueryCoverage=99%, HitCoverage=99%, E-value=1e-94, Identity=96%"; Hit description =Ubiquitin B
  Pfam annotation: Domain name=ubiquitin; Domain location=6-74; Score =135.4; E_value=1.6e-37; Accession=PF00240.13; Description=Ubiquitin family
  Pfam annotation: Domain name=ubiquitin; Domain location=82-150; Score= 138.4; E_value=2e-38; Accession=PF00240.13; Description=Ubiquitin family
  Pfam module annotation: Pfam domain module=ubiquitin::ubiquitin; Domain location=6-74::82-150
MQIFVKTLTGXTITLDVEPSDSIENVKAKIQDKEGIPPDQQRLIFAGKQLEDGRTLSDYNIQKESTLHLVLRLRGGMQIFVKTLTGKTITLDVEPSDSIENVKAKIQDKEGIPPDQQRLIFAGKQLEDGRTLSDYNIQKESTLHLVLRLRGGMQIFVKTLTGKTITLDVEPSDSIENVKAKIQDX

SEQ ID NO: 6824 - protein, 76 aa, Glycine max
  Coding DNA Sequence Number=SeqID_3362
ASGFLTTFEFIVTNQMFALILHEVCFLTFQGPASCLMPLHSEATYTSRQTVTHARQSRITPVTMHLPEVIEGCSQG

SEQ ID NO: 6825 - protein, 129 aa, Glycine max
  misc_feature (16)..(16): Xaa can be any naturally occurring amino acid
  misc_feature (43)..(44): Xaa can be any naturally occurring amino acid
  misc_feature (89)..(89): Xaa can be any naturally occurring amino acid
  Coding DNA Sequence Number=SeqID_3364
QSCTDLLSSLWCVCVXGRREKCACVLPFSAGGSVPAGRPYRYXXNDDTRAPPTRTARSLASEEEPHLSYHSRCARQRVATSTMYTFSVXEGEGIYKNHVTKNIELPYSDAIFAWCVCGVRKMNNPPLNA

SEQ ID NO: 6826 - protein, 226 aa, Glycine max
  misc_feature (52)..(52): Xaa can be any naturally occurring amino acid
  misc_feature (180)..(180): Xaa can be any naturally occurring amino acid
  Coding DNA Sequence Number=SeqID_3366
  Gene Ontology: Mol. function=catalytic activity; Cellular component =mitochondrial inner membrane; Biological process=metabolic process
  Homolog annotation: Hit_ID=O23960; Match level="QueryCoverage=88%, HitCoverage=35%, E-value=1e-78, Identity=77%"; Hit description =Biotin carboxylase precursor
  Pfam annotation: Domain name=CPSase_L_chain; Domain location=103-215; Score=87.9; E_value=3.2e-23; Accession=PF00289.12; Description =Carbamoyl-phosphate synthase L chain, N-terminal domain
SHYLVNRIAIPHTLHSSPFLSFCCELELTLSAWKSHFSPSVPLASFICPSSXLFAGRKGIKSSQCSFLAGASKVSFPRPVGQVSHLRKQRQTRHCGADHATCTGDKILIANRGEIAVRVIRTAHELGIPCVAVYSTIDKDALHVKLADEADCIGEAPSIQSYLLIPNVLSAAISRRCTMXHPGYGCLWGDAGSVELCREAGINCIWADTDRIMVIGDGCTGRQTMK

SEQ ID NO: 6827 - protein, 107 aa, Glycine max
  Coding DNA Sequence Number=SeqID_3367
DACGSTTARYCSMVCEYQIRVCRSNCEYSSSSISVCCLLHKSSYCVTALRRRRDTLTSTPPVSERQHNSNNLRQRSRLMMRLLISDPPSMQTTPLTVSVVPFRRVVG

SEQ ID NO: 6828 - protein, 85 aa, Glycine max
  Coding DNA Sequence Number=SeqID_3369
QSDEVAAGPTRCGIRRFARYVTTLAQQKPARARGEGREPGAGRGRRRAGTRRGKGRREGVNQGKGRSRVEGRAPSSSARRRRRLA

SEQ ID NO: 6829 - protein, 73 aa, Glycine max
  misc_feature (28)..(28): Xaa can be any naturally occurring amino acid
  Coding DNA Sequence Number=SeqID_3371
  Homolog annotation: Hit_ID=Q8LA01; Match level="QueryCoverage=97%, HitCoverage=100%, E-value=2e-17, Identity=67%"; Hit description =Putative uncharacterized protein
KKMDGLSHIGLPVLGILAVSVVTFYAVXFAEIREKSFKDLYDSENGEGAGFKTSLSSRERRLKREANKKRPRS

SEQ ID NO: 6830 - protein, 158 aa, Glycine max
  Coding DNA Sequence Number=SeqID_3372
  Gene Ontology: Mol. function=DNA binding; Cellular component =chromosome; Biological process=nucleosome assembly
  Homolog annotation: Hit_ID=Q43217; Match level="QueryCoverage=52%, HitCoverage=60%, E-value=1e-27, Identity=73%"; Hit description =Histone H2B.3
  Pfam annotation: Domain name=Histone; Domain location=83-153; Score =71.1; E_value=3.8e-18; Accession=PF00125.14; Description=Core histone H2AH2BH3H4
  Subcellular localization annotation: CTP_CleavageSite=41; ConfidenceScore=5.01e-01
TPKKSPPPINPPISHHTRPTPQAPSRSIAANAEPKPAEKKRAAEEAGKAEKTPAGKKQEPEKGAAASESADEGGDRRGGKENKKSEETYKIYIFKVVKQLHPDVAIASKPRPIMNSLINDIFVKLAGEAAKLTRDSKKPTLTSRDIQTSVRLVLPGEL

SEQ ID NO: 6831 - protein, 106 aa, Glycine max
  misc_feature (3)..(4): Xaa can be any naturally occurring amino acid
  misc_feature (22)..(22): Xaa can be any naturally occurring amino acid
  misc_feature (30)..(30): Xaa can be any naturally occurring amino acid
  misc_feature (54)..(54): Xaa can be any naturally occurring amino acid
  Coding DNA Sequence Number=SeqID_3373
HYXXYYIMYIYDGIYTLTTATXLYSCCIIXITIRTYRTHLYPSAHTNHLSTRFXNPTRCCSPVQRTTSADYTHTMILSVLVYRQSHLLCTMRSLAHTNTTTTTCQI

SEQ ID NO: 6832 - protein, 150 aa, Glycine max
  misc_feature (20)..(21): Xaa can be any naturally occurring amino acid
  misc_feature (88)..(88): Xaa can be any naturally occurring amino acid
  misc_feature (91)..(91): Xaa can be any naturally occurring amino acid
  misc_feature (111)..(111): Xaa can be any naturally occurring amino acid
  misc_feature (146)..(146): Xaa can be any naturally occurring amino acid
  Coding DNA Sequence Number=SeqID_3375
GREIKKLLITTVLKLQPPQXXPPPPPPPHPTFDNILRYPPLLLLQTHELYCPSSYELSTPPLTSTLDRTQLFCAYDTHTCAHSHTTPXATXSCCLSLRVFPLLILHLSLSXSHTARLSTSLCSSVLEEAHSSSRALPRPLYCLGTXSTIA

SEQ ID NO: 6833 - protein, 63 aa, Glycine max
  Coding DNA Sequence Number=SeqID_3377
AKVAIETNGGEVYTTDMSRACIHIVTSISITFTQYPLQSKRPDMEKRDCESSSVILCLIMTVC

SEQ ID NO: 6834 - protein, 221 aa, Glycine max
  Coding DNA Sequence Number=SeqID_3379
LINLTHQMVSTETSVREEAEKDLKKFLSLKFSLPMPELQEEIEQEIWRTKFIKYRSIIQELLVELDNEEPGLYKVHVRWDKDPTSIKEDDEWLRGLKAAAYFPPMFEINGDPSFCSHPCYPTVQQQIAISASYGSEDAYQLLVIHASSGDVRVTHPIFQDYPKYTGTSIGYRIAFPKPERWIATDEELITFEDMSKKQIDQNFKKLYNLLWSMQPKKEENS

SEQ ID NO: 6835 - protein, 131 aa, Glycine max
  Coding DNA Sequence Number=SeqID_3381
  Subcellular localization annotation: CTP_CleavageSite=54; ConfidenceScore=5.12e-01
MCCSWFPPSRATAAISPLRTHSSQYIRGTTRILRLRPIHTMNPTRTHDISRSVHAQLGVITLRTYNHHRTERHHMYISLATLYHHFSSSSDTSTTIFIHYSTVHATSLASTCDTRLVISASRRVRHPALCM

SEQ ID NO: 6836 - protein, 130 aa, Glycine max
  misc_feature (7)..(10): Xaa can be any naturally occurring amino acid
  misc_feature (12)..(13): Xaa can be any naturally occurring amino acid
  misc_feature (17)..(17): Xaa can be any naturally occurring amino acid
  misc_feature (23)..(23): Xaa can be any naturally occurring amino acid
  misc_feature (28)..(28): Xaa can be any naturally occurring amino acid
  misc_feature (30)..(30): Xaa can be any naturally occurring amino acid
  misc_feature (33)..(35): Xaa can be any naturally occurring amino acid
  misc_feature (39)..(41): Xaa can be any naturally occurring amino acid
  misc_feature (44)..(44): Xaa can be any naturally occurring amino acid
  misc_feature (49)..(49): Xaa can be any naturally occurring amino acid
  misc_feature (57)..(62): Xaa can be any naturally occurring amino acid
  misc_feature (70)..(71): Xaa can be any naturally occurring amino acid
  misc_feature (74)..(77): Xaa can be any naturally occurring amino acid
  misc_feature (94)..(94): Xaa can be any naturally occurring amino acid
  misc_feature (97)..(97): Xaa can be any naturally occurring amino acid
  misc_feature (128)..(128): Xaa can be any naturally occurring amino acid
  Coding DNA Sequence Number=SeqID_3383
LWWCASXXXXRXXPPHXRVVSRXPHPHXSXSLXXXPPAXXXFFXFISYXLVMCVVRXXXXXXSDWWWEGXXGGXXXXSYSSLAYSVYFLQRTPXQNXICDARRTDARASASTTEISKDCGRETREHRXTV

SEQ ID NO: 6837 - protein, 153 aa, Glycine max
  misc_feature (14)..(14): Xaa can be any naturally occurring amino acid
  misc_feature (18)..(18): Xaa can be any naturally occurring amino acid
  misc_feature (33)..(33): Xaa can be any naturally occurring amino acid
  misc_feature (42)..(42): Xaa can be any naturally occurring amino acid
  misc_feature (62)..(62): Xaa can be any naturally occurring amino acid
  misc_feature (66)..(66): Xaa can be any naturally occurring amino acid
  misc_feature (69)..(69): Xaa can be any naturally occurring amino acid
  misc_feature (99)..(99): Xaa can be any naturally occurring amino acid
  misc_feature (114)..(114): Xaa can be any naturally occurring amino acid
  misc_feature (117)..(117): Xaa can be any naturally occurring amino acid
  misc_feature (120)..(120): Xaa can be any naturally occurring amino acid
  misc_feature (123)..(123): Xaa can be any naturally occurring amino acid
  misc_feature (125)..(125): Xaa can be any naturally occurring amino acid
  misc_feature (128)..(129): Xaa can be any naturally occurring amino acid
  misc_feature (143)..(143): Xaa can be any naturally occurring amino acid
  Coding DNA Sequence Number=SeqID_3385
CARDIHPARNSFSXAVCXMHSPVTHTSTLLMSXNNDLETWRXAHDRCAANDIRISYTRTRIXPSRXAQXHTSTQVSRSYEHMHNSEARFTYPRSSLVDXSHTLATVHVLMMAHXRRXTTXAHXVXALXXRRVARDVSSRSERXYDSLSPPAVL

SEQ ID NO: 6838 - protein, 150 aa, Glycine max
  Coding DNA Sequence Number=SeqID_3387
  Subcellular localization annotation: CTP_CleavageSite=55; ConfidenceScore=5.05e-01
HRNTNLSIARWLRLVWLPMESYALHSLSTSFSRFSQLHHPPPPVISRSPFNQSHSLSLRSPHHNLPTFLLPLLHLQIPPLSHSAHYPNSTLLLHHFHPSPPLPPILGSNPHSFYILPIHRPHRSNFWSAPPNTNFHRLPPPFLSLSPPRP

SEQ ID NO: 6839 - protein, 217 aa, Glycine max
  misc_feature (194)..(194): Xaa can be any naturally occurring amino acid
  misc_feature (217)..(217): Xaa can be any naturally occurring amino acid
  Coding DNA Sequence Number=SeqID_3389
  Gene Ontology: Mol. function=transporter activity; Cellular component= cell outer membrane; Biological process=transport
  Homolog annotation: Hit_ID=A6ECD9; Match level="QueryCoverage=99%, HitCoverage=27%, E-value=3e-76, Identity=59%"; Hit description=Outer membrane protein
  Pfam annotation: Domain name=TonB_dep_Rec; Domain location=1-185; Score=11.2; E_value=0.0084; Accession=PF00593.14; Description=TonB dependent receptor
PRISASYQLNERRSIKASYTRNVQNLHFLSNTTTSSPTDLWLPSTNNVQPETADQFAIGYYQTSANDQYELTVETYYKWMQHQIDYKSGALLRANDNVENQLLYGVGRAYGIEWLLRKKYGRLSGWVGYTLSKTERRFDQINNGQYFPARQDITHDISLVGIYKLSDRWTLSGTWVYNTGNAVTFPSGKYHVKXGKPFFVYTERNGYRMPPYHRLDX

SEQ ID NO: 6840 - protein, 82 aa, Glycine max
  misc_feature (17)..(17): Xaa can be any naturally occurring amino acid
  Coding DNA Sequence Number=SeqID_3390
  Gene Ontology: Mol. function=binding; Cellular component =intracellular; Biological process=cell growth
  Homolog annotation: Hit_ID=Q9LZW9; Match level="QueryCoverage=80%, HitCoverage=4%, E-value=2e-16, Identity=56%"; Hit description =Putative uncharacterized protein T20L15_40
MKMVTNLGDISYINRNXCVCELEVANLSDWLHGGNWLARDRMKTGCVALVLCLNISVDPPDVIKISPCARMECWIGLSLPLI

SEQ ID NO: 6841 - protein, 123 aa, Glycine max
  misc_feature (1)..(1): Xaa can be any naturally occurring amino acid
  misc_feature (8)..(8): Xaa can be any naturally occurring amino acid
  misc_feature (16)..(16): Xaa can be any naturally occurring amino acid
  misc_feature (28)..(28): Xaa can be any naturally occurring amino acid
  misc_feature (40)..(40): Xaa can be any naturally occurring amino acid
  misc_feature (44)..(44): Xaa can be any naturally occurring amino acid
  misc_feature (56)..(56): Xaa can be any naturally occurring amino acid
  misc_feature (63)..(63): Xaa can be any naturally occurring amino acid
  misc_feature (71)..(71): Xaa can be any naturally occurring amino acid
  misc_feature (81)..(81): Xaa can be any naturally occurring amino acid
  misc_feature (96)..(97): Xaa can be any naturally occurring amino acid
  misc_feature (100)..(100): Xaa can be any naturally occurring amino acid
  misc_feature (116)..(116): Xaa can be any naturally occurring amino acid
  Coding DNA Sequence Number=SeqID_3391
XLCQIPLXTCHYYETXALRRLMRVTRCXLTHLHRRLGRHXRRLXSYVSACSRSYSXVASSPHXVGKTRCFXHVNSFCRDRXCVEPSAHTTTTLSPXXRRXLYVSLLLVPLSYLCMXQRISREI

SEQ ID NO: 6842 - protein, 109 aa, Glycine max
  misc_feature (35)..(35): Xaa can be any naturally occurring amino acid
  misc_feature (46)..(46): Xaa can be any naturally occurring amino acid
  misc_feature (49)..(49): Xaa can be any naturally occurring amino acid
  misc_feature (61)..(61): Xaa can be any naturally occurring amino acid
  misc_feature (64)..(64): Xaa can be any naturally occurring amino acid
  Coding DNA Sequence Number=SeqID_3393
YRYSTTILFLCVHRPTPFLSDAYPLRDGGCNELYXNHQRNVLTLSXHPXPSPRPTAPTYRXTTXACSDSSPTTTPLSLLPHTRLLYLTTTYISIIEAYTLTIFDYKCYI

SEQ ID NO: 6843 - protein, 144 aa, Glycine max
  misc_feature (2)..(2): Xaa can be any naturally occurring amino acid
  misc_feature (11)..(11): Xaa can be any naturally occurring amino acid
  misc_feature (21)..(21): Xaa can be any naturally occurring amino acid
  misc_feature (26)..(29): Xaa can be any naturally occurring amino acid
  misc_feature (31)..(31): Xaa can be any naturally occurring amino acid
  misc_feature (34)..(34): Xaa can be any naturally occurring amino acid
  misc_feature (67)..(67): Xaa can be any naturally occurring amino acid
  misc_feature (71)..(72): Xaa can be any naturally occurring amino acid
  misc_feature (141)..(141): Xaa can be any naturally occurring amino acid
  Coding DNA Sequence Number=SeqID_3395
FXFVLWLCVGXLVCVVVSVLXGVLCXXXXRXSPXQNPYHLPTHALALQQNLITPHSPSHSPHAPHTXGDGXXFRKMSSTPTHTPSSATTRTTSSVPTHNRWRSTSHLCTRATHAVPGRLYVSPPATTLAPRTISSIPHTHXSSS

SEQ ID NO: 6844 - protein, 227 aa, Glycine max
  Coding DNA Sequence Number=SeqID_3397
LSELPIPFYSHTISTLLISFLYSLHILLPLSRYTNTYTSSTIFHYNLHNLSIFFTHYYLISLSLSLIYFLLHISFLSYQDLYIPYTPTTITPHYLPLTYLLLVTHLGLLYPKLSSFSPSTHYILHPYHTTLPYCPSSTPIFSSSTLITPLLSSLSFFFFGNKKSSFPHPLHHLTLIFPPLLFLVHTTLSPPSPLFGKHLSSFTSTTTPTGHTIFFFSRFILQSLPPT

SEQ ID NO: 6845 - protein, 143 aa, Glycine max
  Coding DNA Sequence Number=SeqID_3399
  Homolog annotation: Hit_ID=A7P1W7; Match level="QueryCoverage=82%, HitCoverage=17%, E-value=8e-10, Identity=34%"; Hit description =Chromosome chr19 scaffold_4, whole genome shotgun sequence
VKFRSRVRGQILGFKKIGFRAGFHPFFRSFILAPWAPNGGEATFAIKEAPPKKPRTPFFAIFGIYGGGFMKNIFGFFAISVLIFGGEVPWQFSGELRVVAIFWAKTGLTASFPPLFPKGSSFIAIFLNPLFLVWGFKLGPVFN

SEQ ID NO: 6846 - protein, 88 aa, Glycine max
  Coding DNA Sequence Number=SeqID_3400
  Gene Ontology: Mol. function=transcription factor activity; Cellular component=nucleus; Biological process=regulation of transcription
  Homolog annotation: Hit_ID=Q9ZQA0; Match level="QueryCoverage=71%, HitCoverage=16%, E-value=2e-16, Identity=63%"; Hit description =Putative uncharacterized protein At2g36740
  Pfam annotation: Domain name=YL1_C; Domain location=28-57; Score =60.4; E_value=6.3e-15; Accession=PF08265.2; Description=YL1 nuclear protein C-terminal domain
  Pfam annotation: Domain name=zf-HIT; Domain location=26-55; Score =10.7; E_value=0.024; Accession=PF04438.6; Description=HIT zinc finger
  Pfam module annotation: Pfam domain module=YL1_C::zf-HIT; Domain location=28-57::26-55
MAQSTLFYKFSFTFMSLFIYCFADPEQPVCPITGLPAKYRDPKTGQPYATKEAFKIIRERFLNESTNSRKDMSMGGLYDSVSGCGFSI

SEQ ID NO: 6847 - protein, 131 aa, Glycine max
  Coding DNA Sequence Number=SeqID_3401
  Subcellular localization annotation: CTP_CleavageSite=53; ConfidenceScore=5.52e-01
LSYINTNFIHDTRITYTYCTRVRSNKSSCANSRVVIGLALHPDSRRTRPRRCRARAFRQRQGRVTSRSRIAGGEKNKRTTREEASQTGARDETRNAIQNERPGTEIGINLRILESPPLYTPRPPHFPPGCT

SEQ ID NO: 6848 - protein, 137 aa, Glycine max
  misc_feature (1)..(33): Xaa can be any naturally occurring amino acid
  Coding DNA Sequence Number=SeqID_3403
XXXXXXXXXXXXXXXXXXXXXXXXXXXXXXXXXETLKIVPPGGGVFSSGARKGRPLFFPAPLKGVAHREKPFAFLKRRGVKALKNQGVGGGKTPSFPRNFSFLRNLGGRGAIGFLSSPGGGFQPRFLHKQFFQLHAT

SEQ ID NO: 6849 - protein, 201 aa, Glycine max
  misc_feature (3)..(3): Xaa can be any naturally occurring amino acid
  misc_feature (35)..(35): Xaa can be any naturally occurring amino acid
  misc_feature (57)..(57): Xaa can be any naturally occurring amino acid
  misc_feature (67)..(67): Xaa can be any naturally occurring amino acid
  misc_feature (99)..(99): Xaa can be any naturally occurring amino acid
  misc_feature (124)..(126): Xaa can be any naturally occurring amino acid
  misc_feature (137)..(137): Xaa can be any naturally occurring amino acid
  misc_feature (139)..(139): Xaa can be any naturally occurring amino acid
  misc_feature (192)..(193): Xaa can be any naturally occurring amino acid
  Coding DNA Sequence Number=SeqID_3405
LVXRVIERVVRCSRVRARVVRRRVVAVCVSRTGFXELHRVCSSACRPRVVCGVCVVXSYARQHATCXAHYMICDPTHNITAVDALLCRIRTLRPFRRIXGYGGGVGSRCSGSPWLAPERRSGVXXXDVVCARRLISXVXTPVLRVCCIGAGLCVIAMYVACLRRGDSARCRLSRSGRRVHACVIRAGARTAXXSSDLCVRR

SEQ ID NO: 6850 - protein, 99 aa, Glycine max
  misc_feature (73)..(74): Xaa can be any naturally occurring amino acid
  Coding DNA Sequence Number=SeqID_3407
NTPYPSRSPSSSPSRSRPSRCCRTIIVLAAIGLPGAREDVQELQHGRLLRLLASIRVGAPRKLAIARLLRHHXXRISSTSAKRPATSAPSAMSTNPTTP

SEQ ID NO: 6851 - protein, 133 aa, Glycine max
  misc_feature (31)..(31): Xaa can be any naturally occurring amino acid
  misc_feature (47)..(47): Xaa can be any naturally occurring amino acid
  misc_feature (55)..(55): Xaa can be any naturally occurring amino acid
  misc_feature (108)..(109): Xaa can be any naturally occurring amino acid
  misc_feature (112)..(112): Xaa can be any naturally occurring amino acid
  Coding DNA Sequence Number=SeqID_3409
  Subcellular localization annotation: CTP_CleavageSite=37; ConfidenceScore=5.05e-01
HTYSIRLHCDWPLGVPTSNHNHLRANTPYTXHLSSTSANIAVTISAXSTGQLLIXLLVLIYHVRGTAKPFIPMISLRSRNHNRHQTILISAYYSQLTTAYVSYVCGIXXTHXRCIVSTLSSTHSLLDRDAHYV

SEQ ID NO: 6852 - protein, 179 aa, Glycine max
  Coding DNA Sequence Number=SeqID_3411
QVPRTDERFMFSLFTKRSPPPHARTIDSRILKLLKYFGLPRRALFFIFPLPRCQRRKKRADRTIFSLLSSFILIIAVYSYPQTIHASHGRDIYSLPLFLYYILFKSVPPASVSYCSLPDVSTGWSCRGFICLPRLPSFSRDVLTLFLLFPPSRILLRHNNYLIRNDYDAAAPLYALSLQ

SEQ ID NO: 6853 - protein, 72 aa, Glycine max
  Coding DNA Sequence Number=SeqID_3413
ILGRGAGFFFFFFPHLKGLYRTLLCQLLNPPLRGFRSLDPGRDKVHIWNNGLTLLCITAFTHQCSVHSDRGR

SEQ ID NO: 6854 - protein, 114 aa, Glycine max
  Coding DNA Sequence Number=SeqID_3415
VFFPVFLLLVGLGSRVVRRLFRVAVLRLFGFWPLCLSWCGVAWISPSVLRRLGGFWGLGSWLVSCCSPSRLGLGHVAGYVWFFWFVPCPFCSYPPRSPFCCGCGCWKNLKAYGF

SEQ ID NO: 6855 - protein, 199 aa, Glycine max
  misc_feature (5)..(7): Xaa can be any naturally occurring amino acid
  misc_feature (11)..(12): Xaa can be any naturally occurring amino acid
  misc_feature (16)..(16): Xaa can be any naturally occurring amino acid
  misc_feature (19)..(19): Xaa can be any naturally occurring amino acid
  misc_feature (23)..(24): Xaa can be any naturally occurring amino acid
  misc_feature (28)..(29): Xaa can be any naturally occurring amino acid
  misc_feature (31)..(31): Xaa can be any naturally occurring amino acid
  misc_feature (36)..(36): Xaa can be any naturally occurring amino acid
  misc_feature (39)..(41): Xaa can be any naturally occurring amino acid
  misc_feature (45)..(45): Xaa can be any naturally occurring amino acid
  misc_feature (51)..(55): Xaa can be any naturally occurring amino acid
  misc_feature (59)..(59): Xaa can be any naturally occurring amino acid
  misc_feature (63)..(66): Xaa can be any naturally occurring amino acid
  misc_feature (70)..(71): Xaa can be any naturally occurring amino acid
  misc_feature (76)..(76): Xaa can be any naturally occurring amino acid
  misc_feature (78)..(79): Xaa can be any naturally occurring amino acid
  misc_feature (87)..(87): Xaa can be any naturally occurring amino acid
  misc_feature (89)..(90): Xaa can be any naturally occurring amino acid
  misc_feature (92)..(92): Xaa can be any naturally occurring amino acid
  misc_feature (94)..(96): Xaa can be any naturally occurring amino acid
  misc_feature (100)..(102): Xaa can be any naturally occurring amino acid
  misc_feature (105)..(106): Xaa can be any naturally occurring amino acid
  misc_feature (109)..(112): Xaa can be any naturally occurring amino acid
  misc_feature (114)..(115): Xaa can be any naturally occurring amino acid
  misc_feature (123)..(125): Xaa can be any naturally occurring amino acid
  misc_feature (128)..(128): Xaa can be any naturally occurring amino acid
  misc_feature (133)..(134): Xaa can be any naturally occurring amino acid
  misc_feature (137)..(137): Xaa can be any naturally occurring amino acid
  misc_feature (139)..(141): Xaa can be any naturally occurring amino acid
  misc_feature (144)..(146): Xaa can be any naturally occurring amino acid
  misc_feature (149)..(149): Xaa can be any naturally occurring amino acid
  misc_feature (153)..(153): Xaa can be any naturally occurring amino acid
  misc_feature (155)..(155): Xaa can be any naturally occurring amino acid
  misc_feature (158)..(159): Xaa can be any naturally occurring amino acid
  misc_feature (161)..(161): Xaa can be any naturally occurring amino acid
  misc_feature (163)..(164): Xaa can be any naturally occurring amino acid
  misc_feature (166)..(169): Xaa can be any naturally occurring amino acid
  misc_feature (171)..(175): Xaa can be any naturally occurring amino acid
  misc_feature (178)..(179): Xaa can be any naturally occurring amino acid
  misc_feature (182)..(183): Xaa can be any naturally occurring amino acid
  misc_feature (188)..(188): Xaa can be any naturally occurring amino acid
  misc_feature (194)..(194): Xaa can be any naturally occurring amino acid
  misc_feature (197)..(198): Xaa can be any naturally occurring amino acid
  Coding DNA Sequence Number=SeqID_3417
  Subcellular localization annotation: CTP_CleavageSite=37; ConfidenceScore=5.44e-01
SYISXXXPIMXXTSSXSSXQKNXXRRSXXTXQIIFXRSXXXRTAXCYAPPXXXXXWPGXGVLXXXXTYYXXARRAXWXXCATTPTHXLXXAXLXXXFSLXXXDSXXLTXXXXVXXAESGQSTXXXTFXVLVSXXRFXSXXXKRXXXHCXCYKXLXAPXXGXSXXCXXXXEXXXXXCVXXWCXXRASRXPARGLXHEXXG

SEQ ID NO: 6856 - protein, 209 aa, Glycine max
  misc_feature (209)..(209): Xaa can be any naturally occurring amino acid
  Coding DNA Sequence Number=SeqID_3419
RVSYVGPPPEQKTLINFKFEQQVIMSIAVGKRNFAENFSKMMINDFQRDNLYRSKMVVNENTLTNRTYTNQPNAAYYSENVIILAQQFPQVDQRELLTVLDDCDNDLEIAVEILQKGIQNKINSPKLVPMEGRTIKKINGAKEAEQKSNVLALRQAEEKKSDNSIQEEDPAASAKWAETRNLSANVIDKLQTLNTMDEAKELLTQIILX

SEQ ID NO: 6857 - protein, 242 aa, Glycine max
  misc_feature (81)..(81): Xaa can be any naturally occurring amino acid
  misc_feature (83)..(83): Xaa can be any naturally occurring amino acid
  misc_feature (105)..(105): Xaa can be any naturally occurring amino acid
  misc_feature (110)..(111): Xaa can be any naturally occurring amino acid
  misc_feature (159)..(159): Xaa can be any naturally occurring amino acid
  misc_feature (162)..(162): Xaa can be any naturally occurring amino acid
  misc_feature (164)..(165): Xaa can be any naturally occurring amino acid
  misc_feature (172)..(172): Xaa can be any naturally occurring amino acid
  misc_feature (176)..(176): Xaa can be any naturally occurring amino acid
  misc_feature (183)..(183): Xaa can be any naturally occurring amino acid
  misc_feature (195)..(195): Xaa can be any naturally occurring amino acid
  Coding DNA Sequence Number=SeqID_3421
  Gene Ontology: Mol. function=importin-alpha export receptor activity; Cellular component=nuclear pore; Biological process=protein import into nucleus, docking
  Homolog annotation: Hit_ID=A7QWF1; Match level="QueryCoverage=78%, HitCoverage=21%, E-value=4e-54, Identity=59%"; Hit description =Chromosome undetermined scaffold_203, whole genome shotgun sequence
  Pfam annotation: Domain name=IBN_N; Domain location=39-110; Score =49.9; E_value=8.9e-12; Accession=PF03810.9; Description=Importin -beta N-terminal domain
EKRVKECLKLSGGNPQTLQFLSECFLHTLSPSPEPRRRAESSLAEAADRPNYALAVLRLVAEPSIDDQIRQAAAVNFKNHXRXRWASEDSPVPDPEKDQIKTLIXPLMLXXFPKIQSQLSEALALIGHHDFPNLALFLPELIANLQKAFQSFDYAFINXILXTXXSIFKKLXFKYXKPMDLLXDLKYWLDTLAGXLLENFLKKGDRSRGRTWARFEVQKGLGLQGKFLLRLEIFGNLALRFF

SEQ ID NO: 6858 - protein, 171 aa, Glycine max
  Coding DNA Sequence Number=SeqID_3422
RVHRHNTLVRYVCFSLFSSLTRSALLAHNVTANFSLWVCVELLWVYCTTLSTHISPLTSQRGTHLCDLHFIAFILLSLSCRPRTPRTTNKPILIYCVSPHKLSCGVYYRYDTGMGKRGECTDQLLRCLLISRYSIWRIANILHTKYPATIFATQCRLRDPGGYILHNMRVM

SEQ ID NO: 6859 - protein, 130 aa, Glycine max
  misc_feature (17)..(18): Xaa can be any naturally occurring amino acid
  misc_feature (42)..(42): Xaa can be any naturally occurring amino acid
  misc_feature (79)..(80): Xaa can be any naturally occurring amino acid
  misc_feature (93)..(93): Xaa can be any naturally occurring amino acid
  Coding DNA Sequence Number=SeqID_3424
SVIFSSSSSPSLYNRHXXTHLILYHTFILEHSFNLLVLTRSXICVHDPRTDTGDKSNRGSSCVMCGSYSKEHMNSSNYXXNNNIAVRELPFVXSAFLILVTICERDRTIIIIQIELIYLDLGVVKAMRRT

SEQ ID NO: 6860 - protein, 93 aa, Glycine max
  Coding DNA Sequence Number=SeqID_3426
SKVSERWSITRDSTSKEIDACINNVGIVVITVHRRLRQLLPARARSLPADRPDHAPAPLPPTRPPARRLSLYPRVDMKLNDIGLLYSTSLCAL

SEQ ID NO: 6861 - protein, 128 aa, Glycine max
  misc_feature (17)..(17): Xaa can be any naturally occurring amino acid
  misc_feature (50)..(50): Xaa can be any naturally occurring amino acid
  misc_feature (75)..(75): Xaa can be any naturally occurring amino acid
  misc_feature (90)..(90): Xaa can be any naturally occurring amino acid
  misc_feature (113)..(113): Xaa can be any naturally occurring amino acid
  misc_feature (120)..(120): Xaa can be any naturally occurring amino acid
  misc_feature (128)..(128): Xaa can be any naturally occurring amino acid
  Coding DNA Sequence Number=SeqID_3428
MGRGNTIITISHQSTSXSRIVCSEHTYTIAVRSIRCHRLQLRASMDLCSXDMTYDLDTITSPQLLTLCSYRCVIXGLASIRTSLISARVXYKNASSRHVYMPSLFDVSRLLPXQRTQTHXDATCRTRX

SEQ ID NO: 6862 - protein, 159 aa, Glycine max
  misc_feature (89)..(89): Xaa can be any naturally occurring amino acid
  misc_feature (131)..(131): Xaa can be any naturally occurring amino acid
  misc_feature (142)..(142): Xaa can be any naturally occurring amino acid
  Coding DNA Sequence Number=SeqID_3430
RERGAIVDPRHTNITILDNTVYLDLHIYPHQYKAHSQPFTMSPHIHHTNTRITERDGEPYDDTYDCPSASRSATDARGVGALLTDARIXVVRTMLRARWQLSSGLDLSSAAAVYLVLRLPHSRISLVSRMXYNIVVCIGGRXPQLRSLCSPRPEARLRG

SEQ ID NO: 6863 - protein, 56 aa, Glycine max
  Coding DNA Sequence Number=SeqID_3432
KEKTKIYNGVWKKWSSYETERWRHNCIQRSTERCLCSLSLSLSLTMSLFLSLNSLF

SEQ ID NO: 6864 - protein, 129 aa, Glycine max
  misc_feature (6)..(6): Xaa can be any naturally occurring amino acid
  Coding DNA Sequence Number=SeqID_3433
ESTESXTFYLYISHSCHYIFSPIISRITDSIYLSYYPLLLHQLTSRPLHDTTRLHHTHTTLYLHVAWLCSVLDAAYIALQTISYNEFLSYSFSCFISYRSFPPFSPPIRRHAYRHGIRHFSAFLIVILL

SEQ ID NO: 6865 - protein, 150 aa, Glycine max
  misc_feature (100)..(100): Xaa can be any naturally occurring amino acid
  Coding DNA Sequence Number=SeqID_3435
  Gene Ontology: Mol. function=ubiquitin-protein ligase activity; Cellular component=ubiquitin ligase complex; Biological process =protein ubiquitination
  Homolog annotation: Hit_ID=Q8S8Z6; Match level="QueryCoverage=99%, HitCoverage=34%, E-value=4e-25, Identity=43%"; Hit description =Syringolide-induced protein 13-1-1
HNAALVLKEMHVEALVKCVGVFEALINMIKEPVGSGSTKACLSTIFNLANNKRGVTTCLRFVELGVVDVLLKVLVDAQRGVCDKALVVLDSLCDCKQGVXMVNANALTVSLAIKKLSTAFVMCSSYIIFSCLEALLHNIAEGVLIEALQM

SEQ ID NO: 6866 - protein, 161 aa, Glycine max
  misc_feature (76)..(76): Xaa can be any naturally occurring amino acid
  misc_feature (112)..(112): Xaa can be any naturally occurring amino acid
  misc_feature (129)..(129): Xaa can be any naturally occurring amino acid
  Coding DNA Sequence Number=SeqID_3436
LHHPLVSIALSITSSSLLSCVCLIVYPHSLVWTCAALTSLYPLYHPHSSAPLSLLYTRVLYVLVVLALLVSAPLSXSTFICSLCDSTWRPLLHTRRLPRATHYNALTSTIQXSTYISPLPHSTTKTHDXISSYDIDTVCDGGCICTSCYDLCTHASQLHRR

SEQ ID NO: 6867 - protein, 135 aa, Glycine max
  misc_feature (48)..(48): Xaa can be any naturally occurring amino acid
  misc_feature (78)..(78): Xaa can be any naturally occurring amino acid
  misc_feature (116)..(116): Xaa can be any naturally occurring amino acid
  Coding DNA Sequence Number=SeqID_3438
IRLPSDQTINPHSPDVSARRLDMTFAPKIMNIHNTNSYIIHIIQHHSXPDTNSIATGRVSGMKRAMRIVHDSLMRRCXYPRFYILPPFLVARDALSVRGGSRVRQRVVEIVTVLLXRRVACATTRHVYYPFIYLL

SEQ ID NO: 6868 - protein, 106 aa, Glycine max
  misc_feature (57)..(57): Xaa can be any naturally occurring amino acid
  misc_feature (92)..(92): Xaa can be any naturally occurring amino acid
  Coding DNA Sequence Number=SeqID_3440
YAHSLMCRTIQTIVRYSSHADTLTLLLHSTALLVYDSSCIANGYYNITSHNIRVVTXRRASCRHLTYHSACYAVVWLVVSSVVRCVLYIIIXSMCHIDTCDQDSTR

SEQ ID NO: 6869 - protein, 179 aa, Glycine max
  misc_feature (14)..(14): Xaa can be any naturally occurring amino acid
  misc_feature (16)..(16): Xaa can be any naturally occurring amino acid
  misc_feature (34)..(35): Xaa can be any naturally occurring amino acid
  misc_feature (42)..(43): Xaa can be any naturally occurring amino acid
  misc_feature (56)..(56): Xaa can be any naturally occurring amino acid
  misc_feature (71)..(72): Xaa can be any naturally occurring amino acid
  misc_feature (80)..(80): Xaa can be any naturally occurring amino acid
  misc_feature (89)..(89): Xaa can be any naturally occurring amino acid
  misc_feature (106)..(107): Xaa can be any naturally occurring amino acid
  misc_feature (109)..(109): Xaa can be any naturally occurring amino acid
  misc_feature (122)..(122): Xaa can be any naturally occurring amino acid
  misc_feature (126)..(126): Xaa can be any naturally occurring amino acid
  misc_feature (152)..(152): Xaa can be any naturally occurring amino acid
  misc_feature (158)..(158): Xaa can be any naturally occurring amino acid
  misc_feature (166)..(166): Xaa can be any naturally occurring amino acid
  misc_feature (169)..(170): Xaa can be any naturally occurring amino acid
  misc_feature (179)..(179): Xaa can be any naturally occurring amino acid
  Coding DNA Sequence Number=SeqID_3442
SLCVVFVSKAYFVXSXILLSYALQLSSLMFLGVXXCVCVGLXXVIFVDGILYYNSXYECVARAFLLCGLHXXSADNPYRXCVCRDKKEXARTLELACRRASRPLNXXTXQRGSGDLTHLRYXERRXMWVALRGRLAVTLYALLRASSCTLYXVCAHHXVGGVIMYXSIXXPRTAILHAX

SEQ ID NO: 6870 - protein, 133 aa, Glycine max
  misc_feature (6)..(6): Xaa can be any naturally occurring amino acid
  misc_feature (16)..(16): Xaa can be any naturally occurring amino acid
  misc_feature (19)..(21): Xaa can be any naturally occurring amino acid
  misc_feature (61)..(62): Xaa can be any naturally occurring amino acid
  Coding DNA Sequence Number=SeqID_3444
REEEHXSAAASYILRXSAXXXCDIRLWNKGADTRQPLGRSYYTLHHNMKNRTTATQPGRGXXGPHITIHLRALISRRYNSSSLEGCFSHYPVYVYANSLYDIHTPTTPRSSLLFGRVLVSMLALVSPVPCINN

SEQ ID NO: 6871 - protein, 137 aa, Glycine max
  misc_feature (50)..(50): Xaa can be any naturally occurring amino acid
  misc_feature (60)..(60): Xaa can be any naturally occurring amino acid
  Coding DNA Sequence Number=SeqID_3445
IVQSIAQRREWRAHQSLTINSVITIVHRVRIHGAITRTALVATTTHTTRXALVARRAVMXAETESCTTAYTVSCSSSALVTTSLQHRPPGVRDTPGRISSRLSNQHTRDESGQVTDGVGRSDIMSSATSSACISRTT

SEQ ID NO: 6872 - protein, 123 aa, Glycine max
  misc_feature (6)..(6): Xaa can be any naturally occurring amino acid
  misc_feature (33)..(33): Xaa can be any naturally occurring amino acid
  misc_feature (66)..(66): Xaa can be any naturally occurring amino acid
  misc_feature (74)..(74): Xaa can be any naturally occurring amino acid
  misc_feature (121)..(121): Xaa can be any naturally occurring amino acid
  Coding DNA Sequence Number=SeqID_3447
  Subcellular localization annotation: CTP_CleavageSite=38; ConfidenceScore=5.03e-01
HNTHTXSIYIATSDIPAQRVHKRSAIILRHTRXHSRTRPASRTERRRDREATHHERYPERYVETHXRRARDYHXVAGYNRHRTRDAESCAVCVQVDSVAPSTRRIITYSTIIRIEGPAPEXHR

SEQ ID NO: 6873 - protein, 116 aa, Glycine max
  misc_feature (71)..(71): Xaa can be any naturally occurring amino acid
  misc_feature (77)..(77): Xaa can be any naturally occurring amino acid
  misc_feature (92)..(92): Xaa can be any naturally occurring amino acid
  Coding DNA Sequence Number=SeqID_3449
  Gene Ontology: Cellular component=nucleus; Biological process=cell division
  Homolog annotation: Hit_ID=A8Y921; Match level="QueryCoverage=100%, HitCoverage=35%, E-value=9e-20, Identity=43%"; Hit description=D6 -type cyclin
MEYDLENPLGNFHDHPCCDVASLFLIEYDHIPPPNYCWSIKDSDYYISARREDVASMTPQSCSFYQALPYXSYHLLXRFLVNQGRLLPQPWXNKLLAASCCSPPAEMMKTEYSAAD

SEQ ID NO: 6874 - protein, 91 aa, Glycine max
  misc_feature (51)..(51): Xaa can be any naturally occurring amino acid
  Coding DNA Sequence Number=SeqID_3450
LCAASHDCASHGYISLTPTHFLCFPTRSVLSSRQLYLHTPHSLLLDYTPYXSSFCYTSSLYILSLIFALIFIKHPHEKSTSRDNIVLQYVT

SEQ ID NO: 6875 - protein, 473 aa, Glycine max
  Coding DNA Sequence Number=SeqID_3452
LSYTKKMLTFTLLGTIFLSLTCALSFQDYPIYEEHPFRSLAPVQHSQGLAPLIYMRIAEDTYEPECSLCETGLLDYQFDELLVENGDNGFFGRTYLVTSLLTKRSEVVISFRGTDDLSDVVQDLLLLVNSKTSQFESSEQYFQKAYKMFANNYEISLTGHSLGGCFAYVEARKSGNMAVLFDNPGCEPFLPPGNWSESCPLITQYVKNPNMINNFGYSSFCGETFRIAPCGNMDNYKWLKFWRDNSYNIHLAMVMGSFFSVNPLFFLAKTAVFFVLNREISSVLEGHILLNYQELFDNKTGAPLLFEKVDHDSWRSYFSGYSCLLKGLSHKEDTGFTPDPFVNARFNELLKTTDEEETNEFEEGFSYEFSWAVEELPLLTILLVLHVIFEIIPKLRIKHSTKNQDMTSGGWFDLGSYEVNLNDVLKTPLLDRFRRVPKSMINCFVKKTLGDKSAMKIRKSGRLVRETLKNSLF

SEQ ID NO: 6876 - protein, 182 aa, Glycine max
  misc_feature (38)..(38): Xaa can be any naturally occurring amino acid
  misc_feature (79)..(79): Xaa can be any naturally occurring amino acid
  misc_feature (104)..(104): Xaa can be any naturally occurring amino acid
  misc_feature (110)..(110): Xaa can be any naturally occurring amino acid
  misc_feature (116)..(116): Xaa can be any naturally occurring amino acid
  misc_feature (141)..(141): Xaa can be any naturally occurring amino acid
  Coding DNA Sequence Number=SeqID_3454
  Gene Ontology: Mol. function=transcription repressor activity; Cellular component=cytoplasm; Biological process=regulation of nitrogen utilization
  Homolog annotation: Hit_ID=Q9SDZ7; Match level="QueryCoverage=85%, HitCoverage=49%, E-value=4e-48, Identity=68%"; Hit description =Isoflavone reductase-like NAD(P)H-dependent oxidoreductase
  Pfam annotation: Domain name=NmrA; Domain location=5-182; Score= -23.3; E_value=4.3e-07; Accession=PF05368.3; Description=NmrA-like family
YRYTLANNITSKSLTQDANPHLLLCGGESTLYNLSKAXLIHNFDALGGNSTRGDLYDHEKLTKAIKHVYVVISTLVHLXLADQLKIIADIKEAENVKKAFPFRXFGNDVXDCVHAXEAAKSALAIKAQIRRSIEAEGIPYXRYVSSNYFAGYFLPTLAQPGAFAPPTPKDKVIILGDGNPKA

SEQ ID NO: 6877 - protein, 202 aa, Glycine max
  misc_feature (80)..(80): Xaa can be any naturally occurring amino acid
  misc_feature (105)..(105): Xaa can be any naturally occurring amino acid
  misc_feature (118)..(118): Xaa can be any naturally occurring amino acid
  misc_feature (156)..(156): Xaa can be any naturally occurring amino acid
  Coding DNA Sequence Number=SeqID_3455
  Gene Ontology: Mol. function=magnesium ion binding; Cellular component=integral to membrane; Biological process=photosynthesis, light harvesting
  Homolog annotation: Hit_ID=A9PE75; Match level="QueryCoverage=92%, HitCoverage=67%, E-value=5e-60, Identity=61%"; Hit description =Putative uncharacterized protein
  Pfam annotation: Domain name=Chloroa_b-bind; Domain location=1-175; Score=96.5; E_value=8.1e-26; Accession=PF00504.12; Description =Chlorophyll A-B binding protein
LPGDLGFDPLGLSDPEGTGGFIEPKWLAYGEIINGRYAMLGAVGAIAPEILGKAGLIPQETALPWFRTGVFPPARTYNYXTDSYTLFMFKITLIEFTDHTIFQHXAKPHSINKQYFLXLNKDLISSNKPAYPRKPFFNPLIFNNNKKSLINLKLKXVNNKILSILTILHYFIQALITSISPYQNLLDHLTNPIHNNILTSLN

SEQ ID NO: 6878 - protein, 100 aa, Glycine max
  misc_feature (58)..(58): Xaa can be any naturally occurring amino acid
  Coding DNA Sequence Number=SeqID_3456
  Gene Ontology: Mol. function=structural constituent of ribosome; Cellular component=ribonucleoprotein complex; Biological process =translation
  Homolog annotation: Hit_ID=Q9LX88; Match level="QueryCoverage=100%, HitCoverage=76%, E-value=6e-50, Identity=98%"; Hit description=40S ribosomal protein S15a-4
  Pfam annotation: Domain name=Ribosomal_S8; Domain location=5-99; Score=98.4; E_value=2.2e-26; Accession=PF00410.9; Description =Ribosomal protein S8
MVRISVLNDALKSMYNAEKRGKRQVMIRPSSKVIIKFLIVMQKHGYIGEFEYVDDHRXGKIVVELNGRLNKCGVISPRFDVGVKEIEGWTARLLPSRQFG

SEQ ID NO: 6879 - protein, 72 aa, Glycine max
  Coding DNA Sequence Number=SeqID_3457
  Subcellular localization annotation: CTP_CleavageSite=44; ConfidenceScore=5.21e-01
LMVTIRLIQRLYSRSLQYQLPVMAIPNLRSTSSFLTRRRRLILSLQVLPSPHRPNRDPPHRLYPRRLLHSPL

SEQ ID NO: 6880 - protein, 114 aa, Glycine max
  misc_feature (26)..(26): Xaa can be any naturally occurring amino acid
  misc_feature (68)..(68): Xaa can be any naturally occurring amino acid
  misc_feature (106)..(107): Xaa can be any naturally occurring amino acid
  misc_feature (109)..(109): Xaa can be any naturally occurring amino acid
  misc_feature (112)..(114): Xaa can be any naturally occurring amino acid
  Coding DNA Sequence Number=SeqID_3458
HNSLISFYSQTDSYKYTIMFFALFLXSHFILLLLLRGGREGGAGSVRRGERMSRENVDSREPTHHSPXTHHILTLTRLNQNYQYTLNTNTTNSESHNKHHQSHNHXXTXNIXXX

SEQ ID NO: 6881 - protein, 168 aa, Glycine max
  Coding DNA Sequence Number=SeqID_3460
  Gene Ontology: Mol. function=chaperone activator activity; Cellular component=cytoplasm; Biological process=response to stress
  Homolog annotation: Hit_ID=Q3EB77; Match level="QueryCoverage=82%, HitCoverage=43%, E-value=1e-63, Identity=82%"; Hit description =Uncharacterized protein At3g12050.2
  Pfam annotation: Domain name=AHSA1; Domain location=41-99; Score =26.9; E_value=7.2e-05; Accession=PF08327.1; Description=Activator of Hsp90 ATPase homolog 1-l
IWRSLLKVIWFAFTKKEEKKEKEKEKEKKGRKSIGMTERFNCRAKDLYEILMDENRWKGFTQSNARISKEVGGEFSIFDGSVTGTNLELQEAKLIVQRWRFGSWNDGVQSTVRLVFEEPEAGVTVVKLTHTDVPEEDRYGNATVVENTERGWRDLIFQRIRAVFGFGI

SEQ ID NO: 6882 - protein, 173 aa, Glycine max
  misc_feature (100)..(100): Xaa can be any naturally occurring amino acid
  misc_feature (106)..(106): Xaa can be any naturally occurring amino acid
  misc_feature (110)..(112): Xaa can be any naturally occurring amino acid
  misc_feature (121)..(121): Xaa can be any naturally occurring amino acid
  Coding DNA Sequence Number=SeqID_3461
  Gene Ontology: Mol. function=unfolded protein binding; Cellular component=cytoplasm; Biological process=response to stress
  Homolog annotation: Hit_ID=A7Y7E4; Match level="QueryCoverage=45%, HitCoverage=35%, E-value=8e-24, Identity=76%"; Hit description=Heat shock protein
  Subcellular localization annotation: CTP_CleavageSite=43; ConfidenceScore=5.24e-01
GVPRPGRLPRNLWGSPGLGPKGGNFSRRGKRKPPIFLGPPPFKGKTNSPFKFQKKNLYCGKGPFSKNLKLGIHEDSQNKTKLAELLRYHSTKSGDEMTSXLRDYVXRMRXXXNDIYYITGXKARKLVENFPFPLKKLKKEGVSEVSPTWLEAFLTQFGWVGPPFKGNFGGEKK

SEQ ID NO: 6883 - protein, 142 aa, Glycine max
  misc_feature (39)..(39): Xaa can be any naturally occurring amino acid
  misc_feature (47)..(48): Xaa can be any naturally occurring amino acid
  misc_feature (53)..(53): Xaa can be any naturally occurring amino acid
  misc_feature (73)..(73): Xaa can be any naturally occurring amino acid
  misc_feature (92)..(92): Xaa can be any naturally occurring amino acid
  misc_feature (99)..(99): Xaa can be any naturally occurring amino acid
  misc_feature (127)..(127): Xaa can be any naturally occurring amino acid
  misc_feature (131)..(138): Xaa can be any naturally occurring amino acid
  Coding DNA Sequence Number=SeqID_3462
WLCGESSELHRINCPTLYLLYISVVWHAIRSDVRQHDQXHTHTTRPXXTASHXTTLVSTRHFVPRVLAVMVGXSIVVDSDERRRERLVQIGXRGCARHXNSTFSSPLVRPSVRGGRHEGCLHEGCRXKRGXXXXXXXXGGGG

SEQ ID NO: 6884 - protein, 138 aa, Glycine max
  misc_feature (3)..(3): Xaa can be any naturally occurring amino acid
  misc_feature (17)..(17): Xaa can be any naturally occurring amino acid
  misc_feature (71)..(71): Xaa can be any naturally occurring amino acid
  misc_feature (107)..(107): Xaa can be any naturally occurring amino acid
  Coding DNA Sequence Number=SeqID_3464
  Subcellular localization annotation: CTP_CleavageSite=33; ConfidenceScore=5.44e-01
SPXYYCSTPRSVPPRPXRSPSVYPPPPTPSTLSSSHRVIVCPSLYMTDSGRYIDIFLSLISISIDTVHIQXRTNISTRLSLSSVVIVLCRASVFVLLSVLCVYTYAXITSSLHDVIVDAVVDIPSRRIHEVVCYVAVI

SEQ ID NO: 6885 - protein, 145 aa, Glycine max
  Coding DNA Sequence Number=SeqID_3466
  Gene Ontology: Mol. function=chlorophyll binding; Cellular component =chloroplast; Biological process=photosynthesis, light harvesting
  Homolog annotation: Hit_ID=Q9XQB6; Match level="QueryCoverage=100%, HitCoverage=56%, E-value=2e-29, Identity=50%"; Hit description =Chlorophyll a/b-binding protein CP24
  Subcellular localization annotation: CTP_CleavageSite=50; ConfidenceScore=5.39e-01
MAAATSSAVLNGFGSHFLCGGKRSHALLAASVGGKVGASVTPKRVIVAVAAAPKKSWLPAVKGGGSFISPAWLGGFLPGGFGSCPLWLGCAPVFLAWGSSSPSLPGGWPVVALCCFPFGLPCALVLWLGLGRARGPARFSLGLLL

SEQ ID NO: 6886 - protein, 193 aa, Glycine max
  misc_feature (190)..(190): Xaa can be any naturally occurring amino acid
  Coding DNA Sequence Number=SeqID_3467
  Gene Ontology: Mol. function=oxidoreductase activity, acting on the aldehyde or oxo group of donors, NAD or NADP as acceptor; Cellular component=mitochondrion; Biological process=amino acid biosynthetic process
  Homolog annotation: Hit_ID=Q0TXS0; Match level="QueryCoverage=97%, HitCoverage=21%, E-value=6e-80, Identity=78%"; Hit description =Putative uncharacterized protein
  Pfam annotation: Domain name=Semialdhyde_dh; Domain location=59-182; Score=130.0; E_value=7.1e-36; Accession=PF01118.15; Description =Semialdehyde dehydrogenase, NAD binding domain
  Subcellular localization annotation: CTP_CleavageSite=24; ConfidenceScore=5.21e-01
SYVGPPPMARQSARPQLGQNRTIPASTRGFATTASRSMDTTNPNPPYGIKHKHMDYPAKVALIGARGYTGQALIELLNKHPNMDLRHVSSRELNGKKLEGYTKRQITYENLSAEDVEKMAENSEVDCWVMALPNGVCKPFVDAINKSGKDTVIVDLSADYRFDETWTYGLPELIDRSKISDATRIANPGXYAT

SEQ ID NO: 6887 - protein, 264 aa, Glycine max
  misc_feature (72)..(72): Xaa can be any naturally occurring amino acid
  Coding DNA Sequence Number=SeqID_3468
  Gene Ontology: Mol. function=protein transporter activity; Cellular component=clathrin coat of trans-Golgi network vesicle; Biological process=intracellular protein transport
  Homolog annotation: Hit_ID=O04209; Match level="QueryCoverage=100%, HitCoverage=100%, E-value=1e-107, Identity=76%"; Hit description =Expressed protein
  Pfam annotation: Domain name=Clathrin_lg_ch; Domain location=4-226; Score=-33.3; E_value=0.0036; Accession=PF01086.8; Description =Clathrin light chain
MSVFDDSFVILGDDASESVPVSGSFDTTTDHSFSAYDGSGQVDDSIDDVFAAPSSDYEAYSNGDDVFGSNGXHDGPILPPPSEMESDEGSALREWRRQNAIQLEEKEKKEKELRNQIIEEANQFKEDFHRRRELTCENNKAANREKEKLYMETQEKFYAEASKNYWKAIAELVPKEVPTIEKRRGKKEQDPKKPTISVIQGPKPGKPTDLSRMRQILLKLKQNPPAHLKLAPQPPPEAAAATTTAATPPKNVPETKPTEAVTAA

SEQ ID NO: 6888 - protein, 103 aa, Glycine max
  misc_feature (5)..(6): Xaa can be any naturally occurring amino acid
  misc_feature (10)..(10): Xaa can be any naturally occurring amino acid
  misc_feature (19)..(19): Xaa can be any naturally occurring amino acid
  misc_feature (21)..(21): Xaa can be any naturally occurring amino acid
  misc_feature (34)..(34): Xaa can be any naturally occurring amino acid
  misc_feature (55)..(55): Xaa can be any naturally occurring amino acid
  misc_feature (58)..(58): Xaa can be any naturally occurring amino acid
  misc_feature (64)..(64): Xaa can be any naturally occurring amino acid
  misc_feature (66)..(66): Xaa can be any naturally occurring amino acid
  misc_feature (68)..(68): Xaa can be any naturally occurring amino acid
  misc_feature (79)..(79): Xaa can be any naturally occurring amino acid
  misc_feature (90)..(90): Xaa can be any naturally occurring amino acid
  misc_feature (94)..(95): Xaa can be any naturally occurring amino acid
  misc_feature (98)..(98): Xaa can be any naturally occurring amino acid
  Coding DNA Sequence Number=SeqID_111
  Subcellular localization annotation: CTP_CleavageSite=70; ConfidenceScore=5.02e-01
SSYAXXSQLXYIEYVITCXQXYITMKSVSRVCQXQLTRLVSRRSLVVSRRQHMRXSCXATDYAXVXFXVVGSRDVATDXLRLHVVLIDKXSTHXXRSXMYFVL

SEQ ID NO: 6889 - protein, 95 aa, Glycine max
  Coding DNA Sequence Number=SeqID_113
TPRGDSPPFFPGFKISEKKRGPLFPPKFKKFWGVFQKEFWIKVKNFLALKRQITPERMIVSGPFFFILSSGKLKSHQKGEGRYLFENGPCQNRPF

SEQ ID NO: 6890 - protein, 259 aa, Glycine max
  misc_feature (33)..(33): Xaa can be any naturally occurring amino acid
  misc_feature (36)..(36): Xaa can be any naturally occurring amino acid
  misc_feature (51)..(51): Xaa can be any naturally occurring amino acid
  misc_feature (55)..(55): Xaa can be any naturally occurring amino acid
  misc_feature (183)..(183): Xaa can be any naturally occurring amino acid
  misc_feature (213)..(213): Xaa can be any naturally occurring amino acid
  misc_feature (221)..(221): Xaa can be any naturally occurring amino acid
  Coding DNA Sequence Number=SeqID_115
  Gene Ontology: Mol. function=identical protein binding; Cellular component=extracellular region; Biological process=negative regulation of catalytic activity
  Homolog annotation: Hit_ID=A7P8A1; Match level="QueryCoverage=98%, HitCoverage=35%, E-value=2e-69, Identity=56%"; Hit description =Chromosome chr3 scaffold_8, whole genome shotgun sequence
  Pfam annotation: Domain name=PA; Domain location=74-172; Score=91.8; E_value=2.2e-24; Accession=PF02225.12; Description=PA domain
MGCYIGPHRIGSTAQFPEECRFSSRNDGPSGMXVTXLAPWLTAAGAFFFDXDFPXQVILGDGRRLSGVSLYAGAALKGKMYQLVYPVKLGILGDSLCMENSLHPNMVKGKIVICDRGSSPRAAKGLVVKIAGGVGMILANGISNGEGLVGDAHLLPAGAVGANEGDVIKKYISSSTTPTALLXLQGPFLGIKPAPVYVFFKGGANGVNPQTFXPGFLVPGXNILPAEPSCRPTGLTPIPENRVNILCALHCLPHVSGAG

SEQ ID NO: 6891 - protein, 75 aa, Glycine max
  misc_feature (16)..(16): Xaa can be any naturally occurring amino acid
  misc_feature (45)..(45): Xaa can be any naturally occurring amino acid
  Coding DNA Sequence Number=SeqID_116
  Gene Ontology: Mol. function=pectin lyase activity; Cellular component=extracellular region
  Homolog annotation: Hit_ID=Q00374; Match level="QueryCoverage=94%, HitCoverage=18%, E-value=1e-15, Identity=57%"; Hit description =Pectin lyase precursor
  Subcellular localization annotation: CTP_CleavageSite=59; ConfidenceScore=5.19e-01
ENGGGKWFASPDSNTXAKCSSYLGHACQVNAYGSSGTLSGSDTSXLSYFQGKNVASASSAETAKNVPNTAGFGKI

SEQ ID NO: 6892 - protein, 125 aa, Glycine max
  misc_feature (70)..(70): Xaa can be any naturally occurring amino acid
  misc_feature (117)..(117): Xaa can be any naturally occurring amino acid
  Coding DNA Sequence Number=SeqID_117
  Subcellular localization annotation: CTP_CleavageSite=76; ConfidenceScore=5.32e-01
HTLIDMRSSYCVLYFSPPRLAVLSSGVRGRSSLLLTDCCVIARDAQSNNARSRYSTRSNLRCHRSSIITXLLASTLAQHGWNTQYTMCGWRLPHHPHYYSTISLQPVSCCPKSITHXDSPARAPV

SEQ ID NO: 6893 - protein, 425 aa, Glycine max
  Coding DNA Sequence Number=SeqID_119
  Homolog annotation: Hit_ID=Q9U459; Match level="QueryCoverage=91%, HitCoverage=76%, E-value=5e-13, Identity=21%"; Hit description =Erythrocyte membrane-associated giant protein antigen 332
MYKQQENQSFLDKAKEKVDNLLHGKSASRDLKSDAMIDERFESSSKFTNKSNAMVDESYASTSASTSEYSTLSKMNVKTVLNEMIDESHVQRQVIQETPVVQTSVIKEDATIVKEIVHEVPVIQKEIHEREVIHKDIIHERPIIEREIHQVPIHVTEVVKHDTEFRGQLPQDIKMQTEFVQEKAIINEEHIKDQAVLRKVVEHEKPLIHKEIHEMPLINKEIIHERPIVEREVKEVPVLQKEFVRDETLVVDNRAAEKAVQKEFVREQAVKDTEFIREQPVLQSELIHDKPMIQKEIYEKPVITKEIIHEKPVLEKHLIETTTHQTENIREKTLVEEKVVVEKALFETITTNFKGTASVRNVSWLDNERFKIEGEGFRFSNKFHGVFDKLKKDNVYVLRSGVFERYNEPLEKLSLLPVETIYIRE

SEQ ID NO: 6894 - protein, 140 aa, Glycine max
  misc_feature (71)..(71): Xaa can be any naturally occurring amino acid
  Coding DNA Sequence Number=SeqID_120
  Subcellular localization annotation: CTP_CleavageSite=40; ConfidenceScore=5.30e-01
AQLVAVLSFCIIPVFRVLSAPPLLVPSTARNYISPGIYILARRRASCVSTRHSTSFLCTSSLYCAAPHSYXASLELLYVKCMRRDSLSFLRWYTTSRSMSPSNTRYRRGGDIADSVALHACGAVICYRTYVSIMRSPLFF

SEQ ID NO: 6895 - protein, 83 aa, Glycine max
  Coding DNA Sequence Number=SeqID_1189
ERRATSQCVPHCATYCAATIVDAIFLLSRTRKNQTTNNILHATLYCLFIISGDGARDDTHLSTTLLFALHPACICSTAPYVYI

SEQ ID NO: 6896 - protein, 132 aa, Glycine max
  Coding DNA Sequence Number=SeqID_1391
TSLVYLLSMAASPHLLVFLVVALAASGSNGAVAAAGDHDDVQLRKVDLSQAIEVLSRYRPETTDAETLKRAVAVVNREAQRYWKPIFNNVNKVMHSGANDCTKEEAFAAAKALLNRELGQGPDAIKMDFEYV

SEQ ID NO: 6897 - protein, 77 aa, Glycine max
  Coding DNA Sequence Number=SeqID_1393
YSRERRRVNKARTSEKNELLVHGSHRGKGTSKLAPQRGKAKDCCTLTWAGFRLASRGGPAYYVMFSKEGQKRYKLLQ

SEQ ID NO: 6898 - protein, 98 aa, Glycine max
  Coding DNA Sequence Number=SeqID_1395
  Gene Ontology: Mol. function=diacylglycerol kinase activity; Biological process=activation of protein kinase C
  Homolog annotation: Hit_ID=Q5KR50; Match level="QueryCoverage=100%, HitCoverage=12%, E-value=9e-36, Identity=76%"; Hit description =Sphingosine kinase
QSSQVVAPKAEHDDNTLDLLLVHGSGRLRLLRFFLLLQMGRHLSLPYVEYVKVKSVRIKPGKHTHSGCGIDGELFPLKGQVIFFLLPEQGRPVGRLRI

SEQ ID NO: 6899 - protein, 166 aa, Glycine max
  Coding DNA Sequence Number=SeqID_1396
  Gene Ontology: Mol. function=RNA polymerase II transcription factor activity; Cellular component=nucleus; Biological process =transcription from RNA polymerase II promoter
  Homolog annotation: Hit_ID=Q2PQI9; Match level="QueryCoverage=75%, HitCoverage=74%, E-value=3e-41, Identity=68%"; Hit description=BTF3 -like transcription factor
  Pfam annotation: Domain name=NAC; Domain location=34-96; Score=104.0; E_value=4.5e-28; Accession=PF01849.8; Description=NAC domain
MNAEKLARLAEQVRTGGPGSVRRKRKAVHKNVTVDEKKLKASLKKLGVNDIPGIEEVNLFKEDGTVIHFVNPKVQASIAANVSGTYVISGTAETKKLQDLLPGIINQLGPDNLANLKKLAEQYKKDDSAAADDDIPDLVENFEAVSPSQGRVSRGSCHYINSKYYK

SEQ ID NO: 6900 - protein, 110 aa, Glycine max
  Coding DNA Sequence Number=SeqID_1397
  Homolog annotation: Hit_ID=A7PE35; Match level="QueryCoverage=57%, HitCoverage=5%, E-value=2e-17, Identity=66%"; Hit description =Chromosome chr11 scaffold_13, whole genome shotgun sequence
AVNKAELNTFWLLNLSCFLQINSRSVVCNGTIGVGKSDGISQQTGLGIRASTPRNNQDNNSLVNDRRGRPVSSDKERVNFRVVNKSFLTWSVQCVEWSIDRDLLHPPLIM

SEQ ID NO: 6901 - protein, 237 aa, Glycine max
  misc_feature (16)..(16): Xaa can be any naturally occurring amino acid
  misc_feature (35)..(35): Xaa can be any naturally occurring amino acid
  misc_feature (93)..(93): Xaa can be any naturally occurring amino acid
  misc_feature (100)..(100): Xaa can be any naturally occurring amino acid
  misc_feature (127)..(127): Xaa can be any naturally occurring amino acid
  misc_feature (150)..(150): Xaa can be any naturally occurring amino acid
  Coding DNA Sequence Number=SeqID_1398
NPCGSRHRSYSLGICXLPPRAPPSYPISHTFVSEXSRMRSIYMVEQRYMIPRAVIMHPQNTLIRVACVRIFSLHTIHDAPIIILSPPRTAARXTATIISXHIIMIVFILCAALARALLASYLLLMYXLRARGRRYIFSLVPPAYYYILPXIRRARVSFPCVRYLLSTLLVDLAPRHSSLHSLYLYIYSSHYSGCWFSLSYNNSTSYSRLTLRSECIYKTACMLTLSHPRAGVVGKQN

SEQ ID NO: 6902 - protein, 136 aa, Glycine max
  Coding DNA Sequence Number=SeqID_1400
PGKKRSRSDSALITHTAMPGREDEAFADEESSQCSSGCQSGWTLYLEHSGSGQQQRRTLPYVQPGDVLRQMLPQVEYSDDEEEDSMVSDASSGLPPHLRGEEEELLQVQGQTSMLSQQRRSAFGGDQCHSGWGGSR

SEQ ID NO: 6903 - protein, 147 aa, Glycine max
  Coding DNA Sequence Number=SeqID_1402
  Gene Ontology: Mol. function=acid phosphatase activity
  Homolog annotation: Hit_ID=A7Q3N5; Match level="QueryCoverage=100%, HitCoverage=29%, E-value=7e-52, Identity=64%"; Hit description =Chromosome chr13 scaffold_48, whole genome shotgun sequence
LLEDVLHSMEEAIKAREDNLPPGSYEKARLRFAHAETIVPFSCLLGLFLDASEFEKIQKEKPLELPPQPPKTRDFKGSTMAPFGGNNMLVLYSCPAASSPKYFVQVLHNEHPIAVPGCDGKDFCPLEDFKAKVVTPHLKHAFNNLCN

SEQ ID NO: 6904 - protein, 116 aa, Glycine max
  misc_feature (29)..(29): Xaa can be any naturally occurring amino acid
  misc_feature (39)..(40): Xaa can be any naturally occurring amino acid
  misc_feature (54)..(54): Xaa can be any naturally occurring amino acid
  misc_feature (69)..(69): Xaa can be any naturally occurring amino acid
  misc_feature (88)..(88): Xaa can be any naturally occurring amino acid
  misc_feature (100)..(102): Xaa can be any naturally occurring amino acid
  misc_feature (105)..(111): Xaa can be any naturally occurring amino acid
  misc_feature (113)..(113): Xaa can be any naturally occurring amino acid
  Coding DNA Sequence Number=SeqID_337
NKHMIGLQDVGEVKRRAARGDASIAVHSXALIGYMSGVXXKPHIISLLFDGLIXTLCLLFSCALLLYTXICYIVIARSDSSVLFRGGXWCGYVVFVPPSXXXVLXXXXXXXPXPSP

SEQ ID NO: 6905 - protein, 79 aa, Glycine max
  misc_feature (30)..(30): Xaa can be any naturally occurring amino acid
  misc_feature (57)..(57): Xaa can be any naturally occurring amino acid
  Coding DNA Sequence Number=SeqID_339
ICVRLDDISVQRTVLTLISCASIRSSFCVXVVSTLSCICIHRDMYHLYLDQLIDTSXSDPLQYPMCTNHHDMDVLCSLR

SEQ ID NO: 6906 - protein, 54 aa, Glycine max
  misc_feature (15)..(15): Xaa can be any naturally occurring amino acid
  Coding DNA Sequence Number=SeqID_341
  Gene Ontology: Mol. function=protein binding
  Homolog annotation: Hit_ID=Q9LRV8; Match level="QueryCoverage=81%, HitCoverage=9%, E-value=7e-09, Identity=75%"; Hit description =Leucine-rich-repeat protein-like
LPRLEELDVSSNVEXSLPDSIGLLGKLKIFNVAANNLTALPESIDPIMLSCSII

SEQ ID NO: 6907 - protein, 197 aa, Glycine max
  misc_feature (1)..(4): Xaa can be any naturally occurring amino acid
  misc_feature (10)..(12): Xaa can be any naturally occurring amino acid
  misc_feature (19)..(21): Xaa can be any naturally occurring amino acid
  misc_feature (24)..(25): Xaa can be any naturally occurring amino acid
  misc_feature (28)..(28): Xaa can be any naturally occurring amino acid
  misc_feature (32)..(37): Xaa can be any naturally occurring amino acid
  misc_feature (40)..(41): Xaa can be any naturally occurring amino acid
  misc_feature (44)..(50): Xaa can be any naturally occurring amino acid
  misc_feature (54)..(55): Xaa can be any naturally occurring amino acid
  misc_feature (59)..(63): Xaa can be any naturally occurring amino acid
  misc_feature (67)..(67): Xaa can be any naturally occurring amino acid
  misc_feature (71)..(71): Xaa can be any naturally occurring amino acid
  misc_feature (74)..(78): Xaa can be any naturally occurring amino acid
  misc_feature (80)..(80): Xaa can be any naturally occurring amino acid
  misc_feature (82)..(85): Xaa can be any naturally occurring amino acid
  misc_feature (89)..(89): Xaa can be any naturally occurring amino acid
  misc_feature (93)..(94): Xaa can be any naturally occurring amino acid
  misc_feature (96)..(105): Xaa can be any naturally occurring amino acid
  misc_feature (107)..(107): Xaa can be any naturally occurring amino acid
  misc_feature (111)..(115): Xaa can be any naturally occurring amino acid
  misc_feature (123)..(123): Xaa can be any naturally occurring amino acid
  misc_feature (144)..(145): Xaa can be any naturally occurring amino acid
  misc_feature (155)..(155): Xaa can be any naturally occurring amino acid
  misc_feature (157)..(158): Xaa can be any naturally occurring amino acid
  misc_feature (171)..(172): Xaa can be any naturally occurring amino acid
  misc_feature (176)..(176): Xaa can be any naturally occurring amino acid
  misc_feature (180)..(180): Xaa can be any naturally occurring amino acid
  misc_feature (193)..(193): Xaa can be any naturally occurring amino acid
  Coding DNA Sequence Number=SeqID_342
XXXXCTIYTXXXFAGINHXXXPPXXPVXHYIXXXXXXLKXXFLXXXXXXXKKRXXTGWXXXXXGDGXVPCXFSXXXXXCXGXXXXRSGXGTFXXGXXXXXXXXXXGXTAGXXXXXWCGASQNXQVLRGPRGAGSALLLKAPRAXXQRGAAAARRXAXXGRPGERMYQRSVXXSPAXINYXRDWQAVEQEIRKXMRGG

SEQ ID NO: 6908 - protein, 185 aa, Glycine max
  misc_feature (58)..(58): Xaa can be any naturally occurring amino acid
  misc_feature (64)..(64): Xaa can be any naturally occurring amino acid
  misc_feature (71)..(71): Xaa can be any naturally occurring amino acid
  misc_feature (74)..(74): Xaa can be any naturally occurring amino acid
  misc_feature (103)..(105): Xaa can be any naturally occurring amino acid
  misc_feature (114)..(114): Xaa can be any naturally occurring amino acid
  misc_feature (121)..(121): Xaa can be any naturally occurring amino acid
  misc_feature (150)..(150): Xaa can be any naturally occurring amino acid
  misc_feature (152)..(158): Xaa can be any naturally occurring amino acid
  misc_feature (162)..(163): Xaa can be any naturally occurring amino acid
  misc_feature (165)..(166): Xaa can be any naturally occurring amino acid
  misc_feature (169)..(169): Xaa can be any naturally occurring amino acid
  misc_feature (172)..(172): Xaa can be any naturally occurring amino acid
  misc_feature (174)..(176): Xaa can be any naturally occurring amino acid
  misc_feature (179)..(180): Xaa can be any naturally occurring amino acid
  Coding DNA Sequence Number=SeqID_344
ENEVESKKEVVEYREDWETTHSTQTTNTEITHINIYSNIAQHKHTTQARYRCILSHIXFHVHAXCAFDLRXTHXSLQSRSLDATYIIYSSHLTTLDQGAAEAXXXVPCRQSRRXASNIVQXRTARTRAPNYPLLREGGRALSGDSHISPXCXXXXXXXKNTXXRXXFTXSKXKXXXKKXXKKKKK

SEQ ID NO: 6909 - protein, 147 aa, Glycine max
  misc_feature (4)..(4): Xaa can be any naturally occurring amino acid
  misc_feature (19)..(19): Xaa can be any naturally occurring amino acid
  misc_feature (30)..(30): Xaa can be any naturally occurring amino acid
  misc_feature (58)..(58): Xaa can be any naturally occurring amino acid
  misc_feature (64)..(64): Xaa can be any naturally occurring amino acid
  misc_feature (82)..(82): Xaa can be any naturally occurring amino acid
  Coding DNA Sequence Number=SeqID_346
  Gene Ontology: Mol. function=oxidoreductase activity; Biological process=metabolic process
  Homolog annotation: Hit_ID=P50165; Match level="QueryCoverage=76%, HitCoverage=41%, E-value=2e-13, Identity=40%"; Hit description =Tropinone reductase homolog
KRGXLQGTTAADTGGTRGXGQDNGEEKGEXGEKGQTRARKQEETDKRREQRKRKGLKXTAPERXRQRREQRKRKGETVFFTXDGKVNILMKNAATNIRKKITDNTEEDISRIMGTKFESSYHLGEVENAFLKECGNESISIISSGKG

SEQ ID NO: 6910 - protein, 133 aa, Glycine max
  misc_feature (33)..(33): Xaa can be any naturally occurring amino acid
  misc_feature (89)..(90): Xaa can be any naturally occurring amino acid
  Coding DNA Sequence Number=SeqID_347
  Gene Ontology: Mol. function=structural constituent of ribosome; Cellular component=ribonucleoprotein complex; Biological process =translation
  Homolog annotation: Hit_ID=A8QGK0; Match level="QueryCoverage=88%, HitCoverage=81%, E-value=5e-28, Identity=52%"; Hit description=40S ribosomal protein S12, putative
  Pfam annotation: Domain name=Ribosomal_L7Ae; Domain location=11-107; Score=94.1; E_value=4.5e-25; Accession=PF01248.16; Description =Ribosomal protein L7AeL30eS12eGadd45 family
KEIVQELDLDSAIRRVLKAASFRDNLAKGLHEXCKALDNRKKPALCLLADNCDEPQYKKLVEALCKENGVPLIRVPDGKQIGEWIGLCXXDAAMNPRKVRKCSSCVLKAFAIDDEAANLVREAIAKNSEIQLS

SEQ ID NO: 6911 - protein, 197 aa, Glycine max
  Coding DNA Sequence Number=SeqID_348
  Homolog annotation: Hit_ID=A0C1M8; Match level="QueryCoverage=78%, HitCoverage=83%, E-value=3e-16, Identity=32%"; Hit description =Chromosome undetermined scaffold_142, whole genome shotgun sequence
  Subcellular localization annotation: CTP_CleavageSite=28; ConfidenceScore=5.09e-01
MSLSGLFRTQFLQCVSSTPLRKKIPKVSAKTLRKRKEKKRLSYINVYSSEYTGEAPLHAWMDPKRVKALMTAYQDSRNTHRFNRIVDPKDKEIIEEKNKEFGDFYYHKWRAELLRENQLLAKAREALDEINNLPYYLRDEMNVNRGPKLDTVIPENHHFINMYNEQILRTHPEEIAIRMQLGERIEKIVNDELEQGE

SEQ ID NO: 6912 - protein, 59 aa, Glycine max
  misc_feature (35)..(37): Xaa can be any naturally occurring amino acid
  Coding DNA Sequence Number=SeqID_3469
  Gene Ontology: Mol. function=unfolded protein binding; Cellular component=endoplasmic reticulum; Biological process=protein folding
  Homolog annotation: Hit_ID=A0A762; Match level="QueryCoverage=88%, HitCoverage=12%, E-value=3e-13, Identity=69%"; Hit description =Calreticulin-1
TLFDNVLITDDPEYAKQLVEETWGKHKDAEKAAFXXXERRRGGEGTQMDPIEGRLRPLY

SEQ ID NO: 6913 - protein, 94 aa, Glycine max
  misc_feature (10)..(10): Xaa can be any naturally occurring amino acid
  misc_feature (31)..(31): Xaa can be any naturally occurring amino acid
  misc_feature (37)..(37): Xaa can be any naturally occurring amino acid
  Coding DNA Sequence Number=SeqID_3470
  Subcellular localization annotation: CTP_CleavageSite=19; ConfidenceScore=5.06e-01
QYDTPSVDIXLLAAHSSARARHVRQLRCRSXWSHCLXYRLLVSGVALLRSSRTVYDPPTHYVRFVVTIKLTRRIVRLQVLLCECRIVCTARRET

SEQ ID NO: 6914 - protein, 151 aa, Glycine max
  Coding DNA Sequence Number=SeqID_3472
YKTGNGRGSVVGGREKQVGILGGGRREERGIDGKPGWENKTAFQKEEARVVVVGGWPAVGEWKVRVHQGWAAHGDEGTFLHASVRGAGCINCGRCLFGSRWRGGGVVKRLAAVVSMCRVFLGSIRAGVWPIESKIGQVWDTIHYSTCCKIL

SEQ ID NO: 6915 - protein, 230 aa, Glycine max
  Coding DNA Sequence Number=SeqID_3474
  Gene Ontology: Mol. function=translation elongation factor activity; Cellular component=cytoplasm; Biological process=translational elongation
  Homolog annotation: Hit_ID=Q8VZW6; Match level="QueryCoverage=95%, HitCoverage=93%, E-value=8e-94, Identity=76%"; Hit description =Putative elongation factor P
  Pfam annotation: Domain name=EFP; Domain location=112-166; Score =82.3; E_value=1.6e-21; Accession=PF01132.10; Description=Elongation factor P (EF-P)
  Pfam annotation: Domain name=EFP_N; Domain location=48-105; Score =106.3; E_value=9.6e-29; Accession=PF08207.2; Description=Elongation factor P (EF-P) KOW-like do
  Pfam annotation: Domain name=Elong-fact-P_C; Domain location=174-229; Score=120.3; E_value=5.6e-33; Accession=PF09285.1; Description =Elongation factor P, C-terminal
  Pfam module annotation: Pfam domain module=EFP::EFP_N::Elong-fact-P _C; Domain location=112-166::48-105::174-229
  Subcellular localization annotation: CTP_CleavageSite=30; ConfidenceScore=5.63e-01
MAATWTCFVTSLCISSPSYKPSSLHGLSFRRQAVTRTNRFFTRIYALSSNDIKVGTSIEVDGAPWRVLEFLHVKPGKGAAFVRTKIRNYVNGSTVERTFRAGITIEEANVSKETKQFTYKDGSQFVFMDLSSYEETRLNEADMGDKTKWLKEGMDCNLLYWKDKVIDFELPITVQLKIVDVDPGLRGDTAQGGTKPATLETGAVVNVPLFVNVGEDIMVDTRTGTYMSRV

SEQ ID NO: 6916 - protein, 133 aa, Glycine max
  misc_feature (8)..(8): Xaa can be any naturally occurring amino acid
  misc_feature (13)..(13): Xaa can be any naturally occurring amino acid
  misc_feature (15)..(15): Xaa can be any naturally occurring amino acid
  misc_feature (18)..(18): Xaa can be any naturally occurring amino acid
  misc_feature (20)..(21): Xaa can be any naturally occurring amino acid
  misc_feature (25)..(26): Xaa can be any naturally occurring amino acid
  misc_feature (33)..(33): Xaa can be any naturally occurring amino acid
  misc_feature (39)..(39): Xaa can be any naturally occurring amino acid
  misc_feature (54)..(55): Xaa can be any naturally occurring amino acid
  misc_feature (57)..(58): Xaa can be any naturally occurring amino acid
  misc_feature (75)..(75): Xaa can be any naturally occurring amino acid
  misc_feature (89)..(89): Xaa can be any naturally occurring amino acid
  misc_feature (98)..(98): Xaa can be any naturally occurring amino acid
  misc_feature (102)..(102): Xaa can be any naturally occurring amino acid
  misc_feature (105)..(106): Xaa can be any naturally occurring amino acid
  misc_feature (116)..(116): Xaa can be any naturally occurring amino acid
  misc_feature (128)..(128): Xaa can be any naturally occurring amino acid
  Coding DNA Sequence Number=SeqID_3475
  Subcellular localization annotation: CTP_CleavageSite=47; ConfidenceScore=5.11e-01
SVYKSSVXLTVSXYXSVXYXXRNNXXVYSIQTXDMHLFXSLRMYTSSVMTFRPXXLXXIVLLLRTTYNTMLHQTXVRYIAQCRRHRSCXRAVVLFACXHVAXLIXXQLSAAISASXYCNVEQYVIYVXCSAIQ

SEQ ID NO: 6917 - protein, 80 aa, Glycine max
  Coding DNA Sequence Number=SeqID_3477
GFHFFGFFNPELERNGINGGEVTVFLIPFRKSKKKRIGIILGAPKLRKGKTHLKQRKSISLSPYREKMKELKMEMEMEID

SEQ ID NO: 6918 - protein, 133 aa, Glycine max
  misc_feature (87)..(87): Xaa can be any naturally occurring amino acid
  Coding DNA Sequence Number=SeqID_3478
RTRARNSAISLAWRIIYTHIAILYSTTTTPRAYLSLHNEGYNPSTPSPPNTLRDSLYTHTYDTDAILARRLRMRTSLAHYIGQRSQXTHRKHDIHTSRATDHHKTIYITTQGLTHKSLTSSWTDHNKLYTKTI

SEQ ID NO: 6919 - protein, 108 aa, Glycine max
  Coding DNA Sequence Number=SeqID_3480
  Gene Ontology: Mol. function=hydrolase activity, hydrolyzing O -glycosyl compounds; Biological process=carbohydrate metabolic process
  Homolog annotation: Hit_ID=UPI0000196E3D; Match level="QueryCoverage =28%, HitCoverage=4%, E-value=3e-10, Identity=93%"; Hit description =glycosyl hydrolase family protein 27 / alpha-galactosidase family protein / melibiase family protein
RELVSISLFILLFLCSESVSSQNVSESEQQQASIPPRGWNSYDSFCWTISEEEFLQSAEIVSQRLRYVRPVALRVVSGISIQSFFIFCYYLFCLIAVWLCSWTLELEY

SEQ ID NO: 6920 - protein, 128 aa, Glycine max; identical to SEQ ID NO: 6788
  misc_feature (40)..(40): Xaa can be any naturally occurring amino acid
  Coding DNA Sequence Number=SeqID_4993

SEQ ID NO: 6921 - protein, 320 aa, Glycine max
  misc_feature (76)..(76): Xaa can be any naturally occurring amino acid
  Coding DNA Sequence Number=SeqID_4995
  Homolog annotation: Hit_ID=A5AUP9; Match level="QueryCoverage=55%, HitCoverage=8%, E-value=1e-13, Identity=31%"; Hit description =Putative uncharacterized protein
MAQPPPRERTLREMVAPDFTYESLCNQYPDEDVPYVLKTGLIHLLPTFHGLVGEDPHKHLKEFHIVCSTMKPPDVXEDHIFVKAFPHSLEGVVKDWLHSLAARAIIGGDDPPRVGAEENHPACRTTGMRRGNPGDRQPSGAGMDGTWERFERASARRGHPEHSEQPLEGDSEEADSEQTRSKIDAGSGGAPGARARTEGGKVAPEMASDSQRIRARDEGVAHGGEPGVAPEPPTSPGHAGEGAHKQPRATQKVSSPRKRPEDQEQETVVKVLPQTPEGVADDRWNNLAPRSNLKRDEHTRVIEAHSSPATRSRTIRNDTR

SEQ ID NO: 6922 - protein, 149 aa, Glycine max
  Coding DNA Sequence Number=SeqID_4996
  Subcellular localization annotation: CTP_CleavageSite=61; ConfidenceScore=5.58e-01
RSRKANKKTSLLIKCSNLSLTKLGQAAVKLRFRRSLCRLRRPPGLPFSFAFLCSSLSVGPRRSAASKACPSFSSGVDLERSLHRSQAVGLCSARGRRSRLTGSVSSTGGRLFPDEVFPVWTWLGLSYGVWRFGEARVVRLVLYRLVSRR

SEQ ID NO: 6923 - protein, 89 aa, Glycine max
  misc_feature (6)..(6): Xaa can be any naturally occurring amino acid
  misc_feature (13)..(13): Xaa can be any naturally occurring amino acid
  misc_feature (46)..(46): Xaa can be any naturally occurring amino acid
  Coding DNA Sequence Number=SeqID_4998
LLVSLXRCAISVXRFRRAYPSISARCGRCRPCAGRAGHGENPTLRXGGGTTSTLTFFFCSPPHQLSVYLTHARNKKNAHKQSTTHQDAI

SEQ ID NO: 6924 - protein, 69 aa, Glycine max
  misc_feature (9)..(12): Xaa can be any naturally occurring amino acid
  misc_feature (14)..(14): Xaa can be any naturally occurring amino acid
  misc_feature (20)..(21): Xaa can be any naturally occurring amino acid
  misc_feature (48)..(48): Xaa can be any naturally occurring amino acid
  misc_feature (56)..(57): Xaa can be any naturally occurring amino acid
  misc_feature (67)..(67): Xaa can be any naturally occurring amino acid
  Coding DNA Sequence Number=SeqID_5000
VGGGAPPPXXXXFXLTILYXXLVSAPISLTSKEHTEHTHGDVVQRDGXVRDHDMMXXVTTSRAVIIXMV

SEQ ID NO: 6925 - protein, 178 aa, Glycine max
  misc_feature (9)..(10): Xaa can be any naturally occurring amino acid
  misc_feature (14)..(14): Xaa can be any naturally occurring amino acid
  misc_feature (19)..(19): Xaa can be any naturally occurring amino acid
  misc_feature (158)..(158): Xaa can be any naturally occurring amino acid
  Coding DNA Sequence Number=SeqID_5002
  Gene Ontology: Mol. function=heat shock protein binding; Cellular component=membrane; Biological process=protein folding
  Homolog annotation: Hit_ID=UPI0000D55675; Match level="QueryCoverage =91%, HitCoverage=39%, E-value=2e-43, Identity=55%"; Hit description =PREDICTED: similar to DnaJ homolog subfamily A member 1 (Heat shock 40 kDa protein ...
  Homolog annotation: Hit description=4) (DnaJ protein homolog 2) (HSJ -2) (HSDJ)
  Pfam annotation: Domain name=DnaJ; Domain location=6-65; Score=120.2; E_value=6.1e-33; Accession=PF00226.21; Description=DnaJ domain
  Pfam annotation: Domain name=DnaJ_CXXCXGXG; Domain location=131-178; Score=-4.8; E_value=2.8e-05; Accession=PF00684.9; Description=DnaJ central domain (4 repeats)
  Pfam module annotation: Pfam domain module=DnaJ::DnaJ_CXXCXGXG; Domain location=6-65::131-178
MVKETRFYXXLGVXPQASXEEIKKSYKKLALKYHPDKNPDEGHKFKEIVQAYEVLSDPEKRKTYDRFGEQAIKEGASNGGGGFGGGVDMFDMFFRGGGGSFFGGGGRSERARHANDVVHQLKVSLEELYKGTTRKLQLQKNVVCNKCEGKGGKKVETXCPVCKGVGVQIQVQQLGPNI

SEQ ID NO: 6926 - protein, 177 aa, Glycine max
  Coding DNA Sequence Number=SeqID_5003
  Gene Ontology: Mol. function=hydrolase activity, acting on carbon -nitrogen (but not peptide) bonds; Biological process=nucleobase, nucleoside, nucleotide and nucleic acid metabolic process
  Homolog annotation: Hit_ID=Q5VR53; Match level="QueryCoverage=66%, HitCoverage=31%, E-value=1e-40, Identity=60%"; Hit description =Putative dihydropyrimidine amidohydrolase
TCCRLSLLINHHGRAAVVSVNANLTAGLESYKHKAVKAAMDYGFHMAITKWHDEVAREMEVMVKEHEDGDAGQQWMIDLWIAGLEGHALSRPPILEGEATARAIRLAKFINMLLYVHVMSIDAMDEIAKAKREVRCRDLEIATTVARSNGLHCTTLDGSLGFLHLSCRCYFNSKIVN

SEQ ID NO: 6927 - protein, 238 aa, Glycine max
  Coding DNA Sequence Number=SeqID_5004
APPPDQKNKKLSTHEKTKKETKPIANKHNTVRMSQPATPNYKNVESKIKDEINYHKELAKQYKKMKQSIGQCGGFDEEPLNRGSSRHEQTRENTRDKFAFTTDKEANREVEVNSRYKMPKTLELGGSAQQRSSLTMQPNAYVVEKAPLYHHKSRNDKENVVVEKNKENDYKGSTSRGGILDIANSFLNSPLMQHISNIDTSLKESISAVSNATRTPAELRVQMGSVGLLMVSQISKMM

SEQ ID NO: 6928 - protein, 180 aa, Glycine max
  Coding DNA Sequence Number=SeqID_5005
RWSAHAVRDALIQYYDASAGILRWIMLYHAERLDLRGETESTHNSSSRTPSVHTDAGAKLYASIYSLSYRAIIHLVYHRLVYQSIRTTNHHLAEPTWTSLSRHHRYTSSSKSCIPSVLLLSRVQWPVSWLHILRNTCLDIHVLTVNKLTIHNRQQCQTPTSRYNIALHSTYIYYHTPSIS

SEQ ID NO: 6929 - protein, 178 aa, Glycine max
  misc_feature (2)..(2): Xaa can be any naturally occurring amino acid
  misc_feature (36)..(37): Xaa can be any naturally occurring amino acid
  misc_feature (40)..(40): Xaa can be any naturally occurring amino acid
  misc_feature (44)..(44): Xaa can be any naturally occurring amino acid
  misc_feature (53)..(53): Xaa can be any naturally occurring amino acid
  misc_feature (114)..(114): Xaa can be any naturally occurring amino acid
  misc_feature (121)..(121): Xaa can be any naturally occurring amino acid
  Coding DNA Sequence Number=SeqID_5007
RXPCCLYFFISSLSRHSHASVYIHIVTCATQTPTQXXFFXCVVXAFGYCYISXLYLFPRRIYSHYYLYSTLSYFSVFFPLSVHFLCAFALSVFIVMNCNDLRESLSYMCILYLXYFFSLSXLLYLFYSYGIHPSLLFSHPIYIIFISIIYSVINTTKTYDIRRTATKHNIQTTPLIYL

SEQ ID NO: 6930 - protein, 368 aa, Glycine max
  Coding DNA Sequence Number=SeqID_5009
  Gene Ontology: Mol. function=transporter activity; Cellular component= intracellular; Biological process=transport
  Homolog annotation: Hit_ID=A0DVT4; Match level="QueryCoverage=71%, HitCoverage=96%, E-value=8e-70, Identity=46%"; Hit description =Chromosome undetermined scaffold_66, whole genome shotgun sequence
  Pfam annotation: Domain name=CRAL_TRIO; Domain location=93-279; Score= 186.0; E_value=9.6e-53; Accession=PF00650.10; Description=CRALTRIO domain
  Pfam annotation: Domain name=CRAL_TRIO_N; Domain location=9-77; Score= 58.5; E_value=2.3e-14; Accession=PF03765.5; Description=CRALTRIO, N -terminus
  Pfam module annotation: Pfam domain module=CRAL_TRIO::CRAL_TRIO_N; Domain location=93-279::9-77
MPQKKTFSGYLGDCSEEQLQTLAQFRTKVAEMGCSNPTYDDTYLLRFLRARKFDLKDTMAMWTNYINWRKEKRVDEICKMEISEMIEAKQYYPHLWFRTDKLGRPIYIERVGKVNFDKLMKIISLERVEQHFIQDSERLIHEIFPACSKAKGETVQNTCYIMDMKGAAAKMMSSKVWDLLKMISKIGQDYYPETLGHMFIINVPLFFYGIWNVVKHFVDDKTRKKIHILGSGYKKELFQYVDEKDLPDFLGGKATVEDYGENLTKEQGPWVKGDNELVNNSPVQEMNRKISTEAGEDDRPSLVLDIPETEQMRTKSVPVLPKSSTSIESLNDMEGYDVATESPLKVRVKSLQTKPSMSFNTLRSFGVI

SEQ ID NO: 6931 - protein, 115 aa, Glycine max; identical to SEQ ID NO: 6799
  misc_feature (39)..(39): Xaa can be any naturally occurring amino acid
  misc_feature (55)..(55): Xaa can be any naturally occurring amino acid
  misc_feature (64)..(64): Xaa can be any naturally occurring amino acid
  Coding DNA Sequence Number=SeqID_5010

SEQ ID NO: 6932 - protein, 134 aa, Glycine max
  misc_feature (1)..(1): Xaa can be any naturally occurring amino acid
  misc_feature (5)..(5): Xaa can be any naturally occurring amino acid
  misc_feature (23)..(23): Xaa can be any naturally occurring amino acid
  misc_feature (25)..(25): Xaa can be any naturally occurring amino acid
  misc_feature (29)..(29): Xaa can be any naturally occurring amino acid
  misc_feature (32)..(33): Xaa can be any naturally occurring amino acid
  misc_feature (38)..(39): Xaa can be any naturally occurring amino acid
  misc_feature (42)..(42): Xaa can be any naturally occurring amino acid
  misc_feature (53)..(54): Xaa can be any naturally occurring amino acid
  misc_feature (74)..(75): Xaa can be any naturally occurring amino acid
  misc_feature (80)..(81): Xaa can be any naturally occurring amino acid
  misc_feature (83)..(84): Xaa can be any naturally occurring amino acid
  misc_feature (88)..(88): Xaa can be any naturally occurring amino acid
  misc_feature (99)..(99): Xaa can be any naturally occurring amino acid
  misc_feature (110)..(112): Xaa can be any naturally occurring amino acid
  misc_feature (115)..(117): Xaa can be any naturally occurring amino acid
  misc_feature (134)..(134): Xaa can be any naturally occurring amino acid
  Coding DNA Sequence Number=SeqID_5012
XTIFXLRMDCEEIEKGKWKRKPXFXVPLXPPXXMASVXXLHXRSLSLRPCLYXXSNCSSAATRNRISIRSLNLXXVLLRXXTXXRFHXFHYQISPSTCXIPGTIPPFLLXXXGGXXXPICGCVAAVDLVVAGRX

SEQ ID NO: 6933 - protein, 169 aa, Glycine max
  Coding DNA Sequence Number=SeqID_5014
  Homolog annotation: Hit_ID=A3HWJ8; Match level="QueryCoverage=86%, HitCoverage=13%, E-value=2e-35, Identity=48%"; Hit description =Putative uncharacterized protein
YHQHLQAVETTLTTMHDMVTMLYSKQEQLEAVLKNIPSDEKYKSVKAAGEQLLKKMKAWDEDMVQRKSKAYDDAENFPNKFTANYLFLINQMLQDLPIVTTAAKNRVKEMNATWSTLKSTADDILNKEIPAFNKLCWDAGIGAIWVTSSISHQTTSKFFYTHPSSCWAL

SEQ ID NO: 6934 - protein, 114 aa, Glycine max
  misc_feature (110)..(110): Xaa can be any naturally occurring amino acid
  misc_feature (112)..(112): Xaa can be any naturally occurring amino acid
  Coding DNA Sequence Number=SeqID_5015
HIYMSYCIYITNYDRSVITTTRTDSVRECATLPFLRTPLSYTWVMRPSTSAHTAVYYGHHSTSRHSPYTAADTRSLTHMSLHTSPPTISTICKSQYCLDSSCSRLDALVXSXSI

SEQ ID NO: 6935 - protein, 182 aa, Glycine max
  misc_feature (143)..(182): Xaa can be any naturally occurring amino acid
  Coding DNA Sequence Number=SeqID_5017
  Subcellular localization annotation: CTP_CleavageSite=28; ConfidenceScore=5.15e-01
NCHTPENLLQEPSMAPFVCTSLKGATTRLVKKGTFPPTPTPVTQPPGAGQPPPPPVSKWCYTSYFSHPPVPIPFPPGPLNLPSTPTYLRSPSPPQLLPRPLPRGRTKSPSYPPHLARAHPALSPPSQHKTTPPFHSPPPPPPXXXXXXXXXXXXXXXXXXXXXXXXXXXXXXXXXXXXXXXX

SEQ ID NO: 6936 - protein, 109 aa, Glycine max
  misc_feature (10)..(10): Xaa can be any naturally occurring amino acid
  misc_feature (86)..(109): Xaa can be any naturally occurring amino acid
  Coding DNA Sequence Number=SeqID_5019
LYLFASGGTXENNFQRLAKIPYVAAHRNKMQDSACCPKLFWKSRCLELNTLCLRGNAMRLPYLNKKSYPESTKPPLLWQVTSHWVXXXXXXXXXXXXXXXXXXXXXXXX

SEQ ID NO: 6937 - protein, 86 aa, Glycine max
  misc_feature (48)..(48): Xaa can be any naturally occurring amino acid
  Coding DNA Sequence Number=SeqID_5021
  Homolog annotation: Hit_ID=A2Q5V9; Match level="QueryCoverage=98%, HitCoverage=34%, E-value=3e-24, Identity=66%"; Hit description =Putative uncharacterized protein
MEIITSPRRKVIEKDVCDKEEETTWEEENNSGFNLWKWSLTGVGAICXFGGGAATICVLFFGSQQRNKLKKDQKIRFQIYTDDKVS

SEQ ID NO: 6938 - protein, 369 aa, Glycine max
  misc_feature (164)..(164): Xaa can be any naturally occurring amino acid
  misc_feature (261)..(261): Xaa can be any naturally occurring amino acid
  misc_feature (301)..(301): Xaa can be any naturally occurring amino acid
  misc_feature (330)..(330): Xaa can be any naturally occurring amino acid
  misc_feature (345)..(345): Xaa can be any naturally occurring amino acid
  misc_feature (369)..(369): Xaa can be any naturally occurring amino acid
  Coding DNA Sequence Number=SeqID_5022
  Gene Ontology: Mol. function=oxidoreductase activity, acting on paired donors, with oxidation of a pair of donors resulting in the reduction of molecular oxygen to two molecules of water; Cellular component=membrane; ...
  Gene Ontology: Cellular component=Biological process=fatty acid biosynthetic process
  Homolog annotation: Hit_ID=Q3EBF7; Match level="QueryCoverage=98%, HitCoverage=81%, E-value=1e-139, Identity=64%"; Hit description =Uncharacterized protein At2g46210.1
  Pfam annotation: Domain name=Cyt-b5; Domain location=10-83; Score =89.0; E_value=1.5e-23; Accession=PF00173.18; Description=Cytochrome b5-like HemeSteroid bindin
  Pfam annotation: Domain name=FA_desaturase; Domain location=146-368; Score=70.1; E_value=7.4e-18; Accession=PF00487.14; Description=Fatty acid desaturase
  Pfam module annotation: Pfam domain module=Cyt-b5::FA_desaturase; Domain location=10-83::146-368
MEVVEKEKKYITSEELKGHNKEGDLWISIQGKVYNVSDWVKEHPGGDVPISNLAGQDVTDAFIAYHPGTAWSHLEKFFTGYHLSDFKVSEVSKDYRKLASEFSKLGLFDTKGHVTSCTLASVAVMFLIVLYGVLRCTSVWAHLGSGMLLGLLLMQSAYVGHDSXHYVVMTTKRSNNVAQILSGNCLTGISIAWWKWTHDAHHIACNILDHDPDLQHMPVFAVSSRFFNSITSHFYGRKLEFDFIARFLICYQHFTFYPVMXVARVNLYLQTILLLFLRRKVQDRTLNIMGILEFWTWFSLXVSCLSNWSERVMSELASLADGSIHHIHSXWNCYDADVFVGPPEXNVLFETYISGISDVTSAYLMDWYX

SEQ ID NO: 6939 - protein, 196 aa, Glycine max
  misc_feature (1)..(2): Xaa can be any naturally occurring amino acid
  misc_feature (39)..(39): Xaa can be any naturally occurring amino acid
  misc_feature (41)..(41): Xaa can be any naturally occurring amino acid
  misc_feature (58)..(58): Xaa can be any naturally occurring amino acid
  misc_feature (89)..(89): Xaa can be any naturally occurring amino acid
  misc_feature (119)..(119): Xaa can be any naturally occurring amino acid
  misc_feature (123)..(123): Xaa can be any naturally occurring amino acid
  misc_feature (177)..(177): Xaa can be any naturally occurring amino acid
  misc_feature (182)..(182): Xaa can be any naturally occurring amino acid
  misc_feature (192)..(192): Xaa can be any naturally occurring amino acid
  Coding DNA Sequence Number=SeqID_5023
XXRGSWRVTLPRYRYPPHYHIRLRLRGISYTPCSCHCDXQXMHSYPYGVLNIIHIMRXSRSYPAHRLDLDRSRIRHLTLITQHLHLIIXNRQPQQHTQTQRRHTTRRQEAHTSHMSTGXTSVXCVLHTTDSSISIYNTAEQYTHNVSCDRRDLHDASSITLSTIYISHTTTPHTTHXYNSAXNTHTLTRIYXHHTL

SEQ ID NO: 6940 - protein, 171 aa, Glycine max
  Coding DNA Sequence Number=SeqID_5025
RFSALWVEWYRFAARRTAGGQELINGGTGERPIWKTPFFRGFGGLFIQVARQVFRLGNGEWGPRHLCGFGSFFGPPGFSLFCFGLFFLWDFGGVTIFPREQVLPWFWPSWNFTFLKGTKSGGSPGGGAVLKLWVSRGSGIFFFFFFGFFFFFFFFFFFFFFFFFFFNNNNK

SEQ ID NO: 6941 - protein, 67 aa, Glycine max
  Coding DNA Sequence Number=SeqID_5027
  Homolog annotation: Hit_ID=Q949R9; Match level="QueryCoverage=80%, HitCoverage=49%, E-value=3e-10, Identity=57%"; Hit description =Putative uncharacterized protein At5g20090
LISQILICSDVCLFGTVREGFAWMVRPPNPHLLVCHASNETVQLYQLSRWFRAQSLLQGSSDMFPRS

SEQ ID NO: 6942 - protein, 63 aa, Glycine max
  Coding DNA Sequence Number=SeqID_5028
  Gene Ontology: Mol. function=nucleoside-triphosphatase activity; Cellular component=integral to membrane; Biological process=transport
  Homolog annotation: Hit_ID=A7PT55; Match level="QueryCoverage=87%, HitCoverage=5%, E-value=1e-17, Identity=74%"; Hit description =Chromosome chr8 scaffold_29, whole genome shotgun sequence
VIGFKFSCSKLSTCNPNTATQNMHAYGALIIVALSTLLIFIYNCSDQVLVTRERRKAKSRESG

SEQ ID NO: 6943 - protein, 211 aa, Glycine max
  misc_feature (42)..(42): Xaa can be any naturally occurring amino acid
  misc_feature (63)..(63): Xaa can be any naturally occurring amino acid
  misc_feature (70)..(70): Xaa can be any naturally occurring amino acid
  misc_feature (129)..(129): Xaa can be any naturally occurring amino acid
  misc_feature (211)..(211): Xaa can be any naturally occurring amino acid
  Coding DNA Sequence Number=SeqID_5029
ERPPHPDRPGDEESHRPTGQKIEGPGPTPSGTRGREGEAGEXTRGRSGKSPKNKERRPTRRGXRSCSPPXRKPGGEKRRAGRAEAMREDKQRRATREISTTSQRGETAERNSAPTERSRRLRHKTIQQXVSTPGTARANATREQARNYIYSQFAKARPTREGAARLTRAEKHEPREARAPRGSSGVQGERHKPHSNTAASKRRPRETHKGX

SEQ ID NO: 6944 - protein, 145 aa, Glycine max
  misc_feature (67)..(67): Xaa can be any naturally occurring amino acid
  misc_feature (137)..(137): Xaa can be any naturally occurring amino acid
  Coding DNA Sequence Number=SeqID_5031
CSARYDRGPACNRPHAPERCLYATPAWVSVCLYLSHLLSIVITVIIQYFTDICMLYTTFILAHSRRXLASHSTSHRPVQTRTRRTTYYSRDNNAISTTPSPLSLLSIVHRSISPRAACRAAVGLAYAWRAHTTVHSXVNSHRLSR

SEQ ID NO: 6945 - protein, 116 aa, Glycine max
  misc_feature (75)..(75): Xaa can be any naturally occurring amino acid
  Coding DNA Sequence Number=SeqID_5033
  Subcellular localization annotation: CTP_CleavageSite=43; ConfidenceScore=5.15e-01
VTPPSSTSFAGLCCARALRNKRVVGLRWGGEGGFFLFIAVSPRARGVVYLRLSSACARPIRLEPFLFIRPSQERXLLSEPRSCTPIVGISVFGTPLVSVHPPPACWRYDRSSVCLV

SEQ ID NO: 6946 - protein, 53 aa, Glycine max
  Coding DNA Sequence Number=SeqID_5035
  Gene Ontology: Mol. function=structural constituent of ribosome; Cellular component=ribonucleoprotein complex; Biological process =translation
  Homolog annotation: Hit_ID=Q9M5M7; Match level="QueryCoverage=96%, HitCoverage=23%, E-value=3e-25, Identity=100%"; Hit description=60S ribosomal protein L10
MGRRPARCYRQIKNKPYPKSRFCRGVPDPKIRIYDVGMKKKGVDEFPFCVHPG

SEQ ID NO: 6947 - protein, 111 aa, Glycine max
  Coding DNA Sequence Number=SeqID_5036
PYKCAVRRGSLRFSFYILMSNLLLPLCIWHSGGGDPESWSWVRKSGQEHTESGINTRRCVLVIFGSDMGQRIIEHHTGNSACLTRDRESESWNRRPETQHDETGNRSSTSG

SEQ ID NO: 6948 - protein, 225 aa, Glycine max
  misc_feature (166)..(166): Xaa can be any naturally occurring amino acid
  misc_feature (179)..(179): Xaa can be any naturally occurring amino acid
  Coding DNA Sequence Number=SeqID_5038
  Gene Ontology: Mol. function=3-dehydroquinate synthase activity; Cellular component=cytoplasm; Biological process=aromatic amino acid family biosynthetic process
  Homolog annotation: Hit_ID=A9PE59; Match level="QueryCoverage=43%, HitCoverage=21%, E-value=4e-32, Identity=72%"; Hit description =Putative uncharacterized protein
EKKKERGGGGGAGDWGRGKEKADPRKNLPKQGGGAEKEGGCPPHRTNQQTPSPKPTGGAKNNQRQANAKKGAGTTEATARKARRATTPQGEGAEEAKAEPARPTTGEVFLGKGSYPIYIGSGLLNQPDYLQRHVHGKRVLVVTKKTAAPLYLDKAVDALTRGNPNXAVESAILPEGEQXKDMDTLMKALEKAIGLGLDRGSKFAAPGGGGMGKWGGGLLLGAKGG

SEQ ID NO: 6949 - protein, 161 aa, Glycine max
  misc_feature (17)..(17): Xaa can be any naturally occurring amino acid
  misc_feature (34)..(34): Xaa can be any naturally occurring amino acid
  misc_feature (119)..(119): Xaa can be any naturally occurring amino acid
  Coding DNA Sequence Number=SeqID_5039
  Gene Ontology: Mol. function=nucleoside-triphosphatase activity; Biological process=proteolysis
  Homolog annotation: Hit_ID=A7PHX9; Match level="QueryCoverage=99%, HitCoverage=22%, E-value=2e-37, Identity=55%"; Hit description =Chromosome chr13 scaffold_17, whole genome shotgun sequence
LEVLETLLEGKGPPTSXCAVEPISRTECRVHHRXDATVDAIVAGKPTLWEIRQWDDTDTELAMYAALADEQLGETTDLTNTHITSSDPEPSEDGRDHPRTWSTKWSTSGPGMTRSTPVXCYTYEILEADLLQVAKVMGLEDVTDVTDDIGTAEAILASSSD

SEQ ID NO: 6950 - protein, 106 aa, Glycine max; identical to SEQ ID NO: 6831
  misc_feature (3)..(4): Xaa can be any naturally occurring amino acid
  misc_feature (22)..(22): Xaa can be any naturally occurring amino acid
  misc_feature (30)..(30): Xaa can be any naturally occurring amino acid
  misc_feature (54)..(54): Xaa can be any naturally occurring amino acid
  Coding DNA Sequence Number=SeqID_5040

SEQ ID NO: 6951 - protein, 86 aa, Glycine max
  Coding DNA Sequence Number=SeqID_5041
GVYRVVTIFYSWLEFEASGAGEIEPFLAVDSTKSTTTCFTFLYTICFTETLSLGKTLPFLGLCHGSVSSASFPFFSASMLSYQLLT

SEQ ID NO: 6952 - protein, 141 aa, Glycine max
  misc_feature (3)..(3): Xaa can be any naturally occurring amino acid
  misc_feature (19)..(19): Xaa can be any naturally occurring amino acid
  misc_feature (53)..(53): Xaa can be any naturally occurring amino acid
  misc_feature (98)..(98): Xaa can be any naturally occurring amino acid
  misc_feature (135)..(135): Xaa can be any naturally occurring amino acid
  Coding DNA Sequence Number=SeqID_5043
VLXVFSSGGDPFLEYRMWXRSESHKIQTQVYDTHVLLPTNYIPRAASSAHVLXVSLSDSLIPSHTPVYTGEEGSAPHLLPRFCVGGREPPLPPLLLNXPVRPAISFSPLTISLISAGGSTRAWSPPSRDSRAQHXPRALAH

SEQ ID NO: 6953 - protein, 223 aa, Glycine max
  misc_feature (40)..(40): Xaa can be any naturally occurring amino acid
  misc_feature (115)..(116): Xaa can be any naturally occurring amino acid
  misc_feature (146)..(146): Xaa can be any naturally occurring amino acid
  Coding DNA Sequence Number=SeqID_5045
  Gene Ontology: Mol. function=membrane alanyl aminopeptidase activity; Cellular component=cytoplasm; Biological process=proteolysis
  Homolog annotation: Hit_ID=A7P4P1; Match level="QueryCoverage=86%, HitCoverage=22%, E-value=7e-53, Identity=55%"; Hit description =Chromosome chr4 scaffold_6, whole genome shotgun sequence
NSFPPSRSHFIVFNKKYPLLPPDMKQAAYVSVMLRASQSXASGYESLLIAYNEPDLSQDKTRILDSLASSRDPDLILEALNFMLSSDARNLDAVFGLADTPEGRDVAGAWLRENXXHLITTYGSGFLITRSVSSVVSPFASLDKAXEVEEFFATHAMPSMCYERSWRACQRLNIIANWVQSVQNEHRLGDALKELAYIAYYVSCLERFSIIKNRNVVAISTFF

SEQ ID NO: 6954 - protein, 67 aa, Glycine max
  misc_feature (23)..(23): Xaa can be any naturally occurring amino acid
  Coding DNA Sequence Number=SeqID_5046
  Gene Ontology: Mol. function=3-oxoacyl-[acyl-carrier-protein] synthase activity; Cellular component=chloroplast; Biological process=fatty acid biosynthetic process
  Homolog annotation: Hit_ID=Q9M4R7; Match level="QueryCoverage=77%, HitCoverage=12%, E-value=6e-13, Identity=75%"; Hit description=Beta -ketoacyl-acyl carrier protein synthase III
  Pfam annotation: Domain name=ACP_syn_III; Domain location=7-62; Score= -19.1; E_value=0.063; Accession=PF08545.1; Description=3-Oxoacyl -[acyl-carrier-protein (ACP)] sy
TLEDPPACHIRGGGFNNALHIGXADALSRPSDWTYRGTCILFRDAAGAELIQGIAEEESTALRIILK

SEQ ID NO: 6955 - protein, 189 aa, Glycine max
  Coding DNA Sequence Number=SeqID_5047
  Homolog annotation: Hit_ID=A2WYB7; Match level="QueryCoverage=96%, HitCoverage=9%, E-value=9e-68, Identity=74%"; Hit description =Putative uncharacterized protein
SYVGPPPRNALIVLTKITSIFPVMRKSGINIEKRVAKLKGDEREDLKVLATGVAAALAARKSSWVSEEEFGMGHLDLKPVPAKPIAGNQYADPSTAKDHSVRAKSVEGRHERSENAMKPDAHKKNASTTNGSDIQMPSSSAQGKGSGLVRGVDEPPKLLSDDGVKVLKPTAEPETRAPQKRAVQNAAKV

SEQ ID NO: 6956 - protein, 79 aa, Glycine max
  misc_feature (37)..(38): Xaa can be any naturally occurring amino acid
  misc_feature (43)..(43): Xaa can be any naturally occurring amino acid
  misc_feature (50)..(50): Xaa can be any naturally occurring amino acid
  misc_feature (64)..(64): Xaa can be any naturally occurring amino acid
  misc_feature (66)..(66): Xaa can be any naturally occurring amino acid
  Coding DNA Sequence Number=SeqID_5048
IHHSSRHTTEYTIRCVVNTTATPTCTLTRLSTSSRAXXVYVAXRYESTDXDSHSLRAGYYVDVXIXNSDRLKTAYRIMR

SEQ ID NO: 6957 - protein, 130 aa, Glycine max; identical to SEQ ID NO: 6836
  misc_feature (7)..(10): Xaa can be any naturally occurring amino acid
  misc_feature (12)..(13): Xaa can be any naturally occurring amino acid
  misc_feature (17)..(17): Xaa can be any naturally occurring amino acid
  misc_feature (23)..(23): Xaa can be any naturally occurring amino acid
  misc_feature (28)..(28): Xaa can be any naturally occurring amino acid
  misc_feature (30)..(30): Xaa can be any naturally occurring amino acid
  misc_feature (33)..(35): Xaa can be any naturally occurring amino acid
  misc_feature (39)..(41): Xaa can be any naturally occurring amino acid
  misc_feature (44)..(44): Xaa can be any naturally occurring amino acid
  misc_feature (49)..(49): Xaa can be any naturally occurring amino acid
  misc_feature (57)..(62): Xaa can be any naturally occurring amino acid
  misc_feature (70)..(71): Xaa can be any naturally occurring amino acid
  misc_feature (74)..(77): Xaa can be any naturally occurring amino acid
  misc_feature (94)..(94): Xaa can be any naturally occurring amino acid
  misc_feature (97)..(97): Xaa can be any naturally occurring amino acid
  misc_feature (128)..(128): Xaa can be any naturally occurring amino acid
  Coding DNA Sequence Number=SeqID_5050

SEQ ID NO: 6958 - protein, 152 aa, Glycine max
  Coding DNA Sequence Number=SeqID_5052
PAPLGVSLKPWPLAWGPWAFGVFQGEPSLARGEFWPPPFFLGWSPPRPSGASAEERISSLVSHQLAALHTTRREPLTTNYHINPLDPSGIRLCRRRPNFSFLGPQRKFLLKLPHHGGTTMPISPHTLLTSKVASTPPPPLWGGDRTQNPSTI

SEQ ID NO: 6959 - protein, 40 aa, Glycine max
  Coding DNA Sequence Number=SeqID_5053
SQKLALKIQNKSRTVKFTLTLFLFFIAVSNHRFYFRTISY

SEQ ID NO: 6960 - protein, 144 aa, Glycine max; identical to SEQ ID NO: 6843
  misc_feature (2)..(2): Xaa can be any naturally occurring amino acid
  misc_feature (11)..(11): Xaa can be any naturally occurring amino acid
  misc_feature (21)..(21): Xaa can be any naturally occurring amino acid
  misc_feature (26)..(29): Xaa can be any naturally occurring amino acid
  misc_feature (31)..(31): Xaa can be any naturally occurring amino acid
  misc_feature (34)..(34): Xaa can be any naturally occurring amino acid
  misc_feature (67)..(67): Xaa can be any naturally occurring amino acid
  misc_feature (71)..(72): Xaa can be any naturally occurring amino acid
  misc_feature (141)..(141): Xaa can be any naturally occurring amino acid
  Coding DNA Sequence Number=SeqID_5055

SEQ ID NO: 6961 - protein, 81 aa, Glycine max
  misc_feature (4)..(4): Xaa can be any naturally occurring amino acid
  misc_feature (13)..(13): Xaa can be any naturally occurring amino acid
  misc_feature (19)..(19): Xaa can be any naturally occurring amino acid
  misc_feature (30)..(30): Xaa can be any naturally occurring amino acid
  misc_feature (60)..(60): Xaa can be any naturally occurring amino acid
  misc_feature (71)..(71): Xaa can be any naturally occurring amino acid
  Coding DNA Sequence Number=SeqID_5057
TAQXILSYMMLSXNTCHVXSLRATTSLLSXVYYLYIYDNRAISVLLLYYLRITLTHSYSXNRQTRYSQHIXHLLISTITCR

SEQ ID NO: 6962 - protein, 125 aa, Glycine max
  misc_feature (18)..(19): Xaa can be any naturally occurring amino acid
  misc_feature (26)..(26): Xaa can be any naturally occurring amino acid
  misc_feature (38)..(38): Xaa can be any naturally occurring amino acid
  misc_feature (81)..(81): Xaa can be any naturally occurring amino acid
  Coding DNA Sequence Number=SeqID_5059
  Gene Ontology: Mol. function=oxidoreductase activity; Cellular component=membrane; Biological process=electron transport
  Homolog annotation: Hit_ID=Q42798; Match level="QueryCoverage=82%, HitCoverage=20%, E-value=6e-39, Identity=79%"; Hit description =Cytochrome P450 93A1
ECWIRLEGRDPTWENPLXXFVWFIRXGQIVLVVMGQRXHFIPFGSGRRTCPGASLAWQVVPVNLAIIIQCFQWKLVGGNGXVDMEEKSGIPLPTASPIIWVPVPRINPFPPMWLNAIHLAPNVIQ

SEQ ID NO: 6963 - protein, 143 aa, Glycine max; identical to SEQ ID NO: 6845
  Coding DNA Sequence Number=SeqID_5060
  Homolog annotation: Hit_ID=A7P1W7; Match level="QueryCoverage=82%, HitCoverage=17%, E-value=8e-10, Identity=34%"; Hit description =Chromosome chr19 scaffold_4, whole genome shotgun sequence

SEQ ID NO: 6964 - protein, 217 aa, Glycine max
  Coding DNA Sequence Number=SeqID_5061
SLFNYVNVLTQDIDFLEENNKDIQLEIELLEKELDQKQKAMEKTPEEEIEKQKIQEVICEKELYISDVRNQLYKMRDPLEAVLRRLSETNFCSISNLVIMENFILNEQTIDYYLSIFEAMINKLVPYISKKNNNKNFMTSGLLFDELNVKQLKKQANEIPNVKDLTFTEESTLEQTPFLEEDRLQLIALEVLDKYRERSINNGYQSVERPNKEASFL

SEQ ID NO: 6965 - protein, 149 aa, Glycine max
  misc_feature (7)..(7): Xaa can be any naturally occurring amino acid
  misc_feature (22)..(22): Xaa can be any naturally occurring amino acid
  misc_feature (25)..(25): Xaa can be any naturally occurring amino acid
  misc_feature (68)..(68): Xaa can be any naturally occurring amino acid
  misc_feature (78)..(78): Xaa can be any naturally occurring amino acid
  misc_feature (145)..(145): Xaa can be any naturally occurring amino acid
  Coding DNA Sequence Number=SeqID_5062
SSSYVGXTPPNSLLAKRSELNXFDXLLVKKHKTQSTQASETNSDDQSVTSRDNFGGADFAILACSETXEEDSQASSTXGTPRRQVSEENLEGLSVLQQALKALELKIKMQDEQSKKKEIVLAGHRAAYAIPVFQETAEFAMREAXNLSI

SEQ ID NO: 6966 - protein, 98 aa, Glycine max
  misc_feature (72)..(72): Xaa can be any naturally occurring amino acid
  misc_feature (74)..(74): Xaa can be any naturally occurring amino acid
  misc_feature (80)..(80): Xaa can be any naturally occurring amino acid
  Coding DNA Sequence Number=SeqID_5064
SVYSFELGVDLISLCASAHRVTSYTVQRIREDIADKRFLPEVAVAHTRAIAGCNHWHTTQLRCCNSAQTGYXGXGRSVLXCEQESITPQAGVEPREVR

SEQ ID NO: 6967 - protein, 172 aa, Glycine max
  misc_feature (75)..(75): Xaa can be any naturally occurring amino acid
  misc_feature (102)..(102): Xaa can be any naturally occurring amino acid
  misc_feature (105)..(105): Xaa can be any naturally occurring amino acid
  misc_feature (118)..(118): Xaa can be any naturally occurring amino acid
  misc_feature (126)..(126): Xaa can be any naturally occurring amino acid
  misc_feature (136)..(136): Xaa can be any naturally occurring amino acid
  misc_feature (155)..(155): Xaa can be any naturally occurring amino acid
  Coding DNA Sequence Number=SeqID_5065
SDISLYRELIIRGRRGLSLTDMRHLSSLYDAALMLLDCNSTSCVLCALAYSRTGSHSIADHCSLSHHHVSQHSTXHFLTTLCALRSYVECSIVDVSSCMHRXCNXHCSLPASLVVLVXIASSIRQXCVLHTLRSSXRTTICSCYDHFIIHALIHXILRSRSTKTILHLLSES

SEQ ID NO: 6968 - protein, 201 aa, Glycine max; identical to SEQ ID NO: 6849
  misc_feature (3)..(3): Xaa can be any naturally occurring amino acid
  misc_feature (35)..(35): Xaa can be any naturally occurring amino acid
  misc_feature (57)..(57): Xaa can be any naturally occurring amino acid
  misc_feature (67)..(67): Xaa can be any naturally occurring amino acid
  misc_feature (99)..(99): Xaa can be any naturally occurring amino acid
  misc_feature (124)..(126): Xaa can be any naturally occurring amino acid
  misc_feature (137)..(137): Xaa can be any naturally occurring amino acid
  misc_feature (139)..(139): Xaa can be any naturally occurring amino acid
  misc_feature (192)..(193): Xaa can be any naturally occurring amino acid
  Coding DNA Sequence Number=SeqID_5067

SEQ ID NO: 6969 - protein, 105 aa, Glycine max
  misc_feature (1)..(1): Xaa can be any naturally occurring amino acid
  misc_feature (9)..(9): Xaa can be any naturally occurring amino acid
  misc_feature (15)..(15): Xaa can be any naturally occurring amino acid
  misc_feature (51)..(51): Xaa can be any naturally occurring amino acid
  misc_feature (53)..(53): Xaa can be any naturally occurring amino acid
  Coding DNA Sequence Number=SeqID_5069
XTDRPSRDXLLSIIXPTLLRTFHKRSSHTSLIALTNHSLILTNTNNAYQSXMXIIYITYTFTAICNTTDDHSHHKLSSYDVSAPTIIACLYSRITSTSLYMSQVV

SEQ ID NO: 6970 - protein, 179 aa, Glycine max; identical to SEQ ID NO: 6852
  Coding DNA Sequence Number=SeqID_5071

SEQ ID NO: 6971 - protein, 106 aa, Glycine max
  Coding DNA Sequence Number=SeqID_5073
  Subcellular localization annotation: CTP_CleavageSite=65; ConfidenceScore=5.67e-01
AFLKKKGGASLWGPFFKPHHFVSPPPFLKKPLPRAQLGFVVSKDQGGPRFHLPRLPPNSGFNEVRFQATSPFRSVFPVPYVLRHFQAMIPCDRNIGLSSGTFKSVR

SEQ ID NO: 6972 - protein, 89 aa, Glycine max
  misc_feature (80)..(80): Xaa can be any naturally occurring amino acid
  Coding DNA Sequence Number=SeqID_5075
  Gene Ontology: Mol. function=NAD+ ADP-ribosyltransferase activity; Cellular component=mitochondrion; Biological process=oxygen and reactive oxygen species metabolic process
  Homolog annotation: Hit_ID=Q9FJJ3; Match level="QueryCoverage=78%, HitCoverage=22%, E-value=3e-28, Identity=80%"; Hit description =Genomic DNA, chromosome 5, TAC clone: K19B1
GLIDVRLIRERSILSYDASEVVPRGSTQSCPSSPEFDSSVDDLASPKKYIVWSTQMNTHVLPDFLVCIKTPFNINRSPRXLRSPWMPFL

SEQ ID NO: 6973 - protein, 161 aa, Glycine max
  misc_feature (15)..(15): Xaa can be any naturally occurring amino acid
  misc_feature (36)..(36): Xaa can be any naturally occurring amino acid
  misc_feature (47)..(48): Xaa can be any naturally occurring amino acid
  misc_feature (50)..(50): Xaa can be any naturally occurring amino acid
  misc_feature (62)..(63): Xaa can be any naturally occurring amino acid
  misc_feature (65)..(65): Xaa can be any naturally occurring amino acid
  misc_feature (71)..(73): Xaa can be any naturally occurring amino acid
  misc_feature (81)..(81): Xaa can be any naturally occurring amino acid
  misc_feature (84)..(84): Xaa can be any naturally occurring amino acid
  misc_feature (149)..(149): Xaa can be any naturally occurring amino acid
  misc_feature (155)..(155): Xaa can be any naturally occurring amino acid
  Coding DNA Sequence Number=SeqID_5076
IPPRVCSSKSSRVTXTKGRPSDPFPQQLQYTHPDDXFLFYSAPPLFXXPXRRGDEPAARLAXXMXILRGQXXXDGGAFVVXQLXDLYSVRLKPSGGPRCGPSEWGGARERKAHRRVSCVGATLREYYRAFTFSGSEPFCFLRYIDIGSXSAHLSXVRALRA

SEQ ID NO: 6974 - protein, 131 aa, Glycine max
  misc_feature (13)..(13): Xaa can be any naturally occurring amino acid
  Coding DNA Sequence Number=SeqID_5077
ERPRANSTSSLSXTLLSLYLVTYLMQSPAAITHARTTSSLSYVEHRELDREEVEIEHAREARVSTQSSSISTRSNTSAIANVYLHILSLCTCRQRDNVIKRWSRRSPRTTITIQRYRISQNRILTLRQAYY

SEQ ID NO: 6975 - protein, 161 aa, Glycine max
  Coding DNA Sequence Number=SeqID_5079
  Gene Ontology: Mol. function=structural constituent of ribosome; Cellular component=ribonucleoprotein complex; Biological process =translation
  Homolog annotation: Hit_ID=Q9XJ27; Match level="QueryCoverage=85%, HitCoverage=64%, E-value=1e-60, Identity=86%"; Hit description=30S ribosomal protein S9, chloroplast precursor
  Pfam annotation: Domain name=Ribosomal_S9; Domain location=91-161; Score=0.8; E_value=5.8e-07; Accession=PF00380.9; Description =Ribosomal protein S9S16
  Subcellular localization annotation: CTP_CleavageSite=56; ConfidenceScore=5.79e-01
MALSVSNLASSLSSLSFSSQVSHGPTTLSLPRSNYLFSLPAKSPRRASLSITATVAAPAEVSEEDDTMELKKYVKSRLPGGFAAQKIIGTGRRKCAIARVVLQEGTGKVIINYRDAKEYLQRNPLWLQYVKVPLVTLGYENSYDVFVKAHGGGLSGQAQAI

SEQ ID NO: 6976 - protein, 99 aa, Glycine max
  Coding DNA Sequence Number=SeqID_5080
FHICSNFWALILYYIAKRNRYLSCILFYLYIKGRGDEKFHARLYFGLSHKHNTWGYIDRTSCICAEAPRLTLPYHPFFLFLHICIVFALCFSTHVLYLV

SEQ ID NO: 6977 - protein, 88 aa, Glycine max
  Coding DNA Sequence Number=SeqID_5082
  Subcellular localization annotation: CTP_CleavageSite=50; ConfidenceScore=5.07e-01
LGALEKILEILTLPKTSLTGRVSGSSAINPVLNPRILGTLSTLSMLMLPLALPYSYLLLEGLRGLSLPSNSLLLSQLLLSFLCEPLEP

SEQ ID NO: 6978 - protein, 64 aa, Glycine max
  Coding DNA Sequence Number=SeqID_5084
  Homolog annotation: Hit_ID=A7PZS1; Match level="QueryCoverage=84%, HitCoverage=67%, E-value=2e-14, Identity=59%"; Hit description =Chromosome chr15 scaffold_40, whole genome shotgun sequence
EWCRHFQMPLPYPRYTQPDYKAIPKWRLACLLKKDGFPIFGGVENKKNFALGALLWDQVSFQCF

SEQ ID NO: 6979 - protein, 130 aa, Glycine max
  misc_feature (130)..(130): Xaa can be any naturally occurring amino acid
  Coding DNA Sequence Number=SeqID_5085
  Subcellular localization annotation: CTP_CleavageSite=22; ConfidenceScore=5.20e-01
PPLFFPPFFFPRVWDAPPKKKGCGGKKKTPFFFFFFWDKITHTRGGVLPPPPRKILTKKGGGPRGFKTQKTNPSTFLKPWFSFGKKKGLKEKFGPLGSPRNPNECFVPMDLTRRQGHGIPVEVMLDQTAX

SEQ ID NO: 6980 - protein, 109 aa, Glycine max
  misc_feature (45)..(45): Xaa can be any naturally occurring amino acid
  misc_feature (54)..(54): Xaa can be any naturally occurring amino acid
  Coding DNA Sequence Number=SeqID_5087
EIVSNIYTSYTPTPRAEYDIDVVNGHVPTNTSLTLMRFLVPTSVXTYHASATHXHSSSSPTSHTPTHAQSWCAIELCSCVSMSAVVWCMRGANLQSNYYHTHLHLMHTG

SEQ ID NO: 6981 - protein, 147 aa, Glycine max
  misc_feature (89)..(89): Xaa can be any naturally occurring amino acid
  misc_feature (98)..(98): Xaa can be any naturally occurring amino acid
  Coding DNA Sequence Number=SeqID_5089
  Gene Ontology: Mol. function=hydrolase activity, hydrolyzing O -glycosyl compounds; Cellular component=integral to membrane; Biological process=carbohydrate metabolic process
  Homolog annotation: Hit_ID=Q27SZ6; Match level="QueryCoverage=100%, HitCoverage=24%, E-value=3e-55, Identity=73%"; Hit description=Endo -1,4-beta-glucancase
AFWGGPDYGALSWDNKLAAAQALLTRSRLLLSPGYPYEEILRTFHNQTSIIMCSYLPVLTSFNRTKGGSIQLNHGRPHPLQYAANAAFXPALYTDYLXTAADTPGPDRGPNFSSPPPLPPSATPQIDYILGNNPTKMIYVLRFGTHY

SEQ ID NO: 6982 - protein, 139 aa, Glycine max
  misc_feature (17)..(17): Xaa can be any naturally occurring amino acid
  misc_feature (24)..(24): Xaa can be any naturally occurring amino acid
  misc_feature (45)..(45): Xaa can be any naturally occurring amino acid
  misc_feature (66)..(66): Xaa can be any naturally occurring amino acid
  misc_feature (91)..(91): Xaa can be any naturally occurring amino acid
  misc_feature (97)..(97): Xaa can be any naturally occurring amino acid
  misc_feature (108)..(109): Xaa can be any naturally occurring amino acid
  misc_feature (111)..(111): Xaa can be any naturally occurring amino acid
  misc_feature (115)..(115): Xaa can be any naturally occurring amino acid
  misc_feature (125)..(126): Xaa can be any naturally occurring amino acid
  misc_feature (129)..(129): Xaa can be any naturally occurring amino acid
  Coding DNA Sequence Number=SeqID_5090
VVCDVHMRRRRLCKREXAVGDDTXNTDDTLDGQGTARSIPTNDNXVLTVSTLQRIHSSSRYSTSQXVANICSVRLLTVLTHISVDAVRTRXTHDRAXVHHSISACDSXXRXIYTXTSSLHRGTIXXSPXIVSRALVGSY

SEQ ID NO: 6983 - protein, 185 aa, Glycine max
  misc_feature (9)..(9): Xaa can be any naturally occurring amino acid
  misc_feature (20)..(21): Xaa can be any naturally occurring amino acid
  misc_feature (29)..(31): Xaa can be any naturally occurring amino acid
  misc_feature (33)..(33): Xaa can be any naturally occurring amino acid
  misc_feature (39)..(39): Xaa can be any naturally occurring amino acid
  misc_feature (42)..(42): Xaa can be any naturally occurring amino acid
  misc_feature (76)..(76): Xaa can be any naturally occurring amino acid
  Coding DNA Sequence Number=SeqID_5092
  Gene Ontology: Mol. function=transmembrane receptor activity; Cellular component=intrinsic to membrane; Biological process=innate immune response
  Homolog annotation: Hit_ID=Q8W2C0; Match level="QueryCoverage=91%, HitCoverage=15%, E-value=2e-50, Identity=60%"; Hit description =Functional candidate resistance protein KR1
NAYLECFKXDKVDPCTSHFXXRVVTYTSXXXMXLEVIGXSTXSGKRKEVWESALDQYERIPDKKIQDILKVSFDSXQEDEHKIFLDIACCFKGYDFTYVKEVLFIHHGFCPEYAIGVLIDKSLLCRRSSYLTMHDLIEDMGKEIVRQESPGEPGKRSRLWLHEDIVQVLEETELRLVSSITHCAS

SEQ ID NO: 6984 - protein, 72 aa, Glycine max
  misc_feature (41)..(41): Xaa can be any naturally occurring amino acid
  Coding DNA Sequence Number=SeqID_1403
  Homolog annotation: Hit_ID=A9PJB2; Match level="QueryCoverage=97%, HitCoverage=27%, E-value=7e-14, Identity=54%"; Hit description =Putative uncharacterized protein
CLNTEDSVVCLCQSSQSELLAPQPVDIRKQDLLAQLAMLSXHKVRVRDYSDERSEFLPQFGEEAQSEFGKIG

SEQ ID NO: 6985 - protein, 189 aa, Glycine max
  misc_feature (177)..(177): Xaa can be any naturally occurring amino acid
  Coding DNA Sequence Number=SeqID_1404
  Gene Ontology: Mol. function=protein serine/threonine kinase activity; Biological process=protein amino acid phosphorylation
  Homolog annotation: Hit_ID=A7P019; Match level="QueryCoverage=99%, HitCoverage=27%, E-value=1e-85, Identity=79%"; Hit description =Chromosome chr6 scaffold_3, whole genome shotgun sequence
QKVGQKRGRLNIEEEDDSQPKKKVRLGVPATQWISVYNARLPMKQRYHYNVADARLAQHVERGIADGLLISCVASCSNLWALIMDAGTGFSSQVYKLSPFFLHKWEKNYYITSIAGANNGSSLVVMSKGPQYTQQSYQVSDSFPFQWDNQKWREGFHVTSMASAGKSLGVGLSKMLXFNDQVVDLISLF

SEQ ID NO: 6986 - protein, 126 aa, Glycine max
  misc_feature (33)..(33): Xaa can be any naturally occurring amino acid
  misc_feature (92)..(92): Xaa can be any naturally occurring amino acid
  misc_feature (101)..(101): Xaa can be any naturally occurring amino acid
  misc_feature (119)..(119): Xaa can be any naturally occurring amino acid
  misc_feature (124)..(124): Xaa can be any naturally occurring amino acid
  Coding DNA Sequence Number=SeqID_1405
VCRCVLLAPLRVSRSHLPSYVENRFALLSQTHXYTSECLSHNCICYSSSLLMSLALSRPVLASAAGCEQSGVTYFTPPRYCLYMNAQHTCSXHATEHTADXWWDVNRTTDGALTPALLXYHSLXTA

SEQ ID NO: 6987 - protein, 109 aa, Glycine max
  Coding DNA Sequence Number=SeqID_1407
ASIVPPDSMPLGQIHNTPPTTPQKPPKTTTQKHNQTDGHPTKLHIYINLLYYYFLVISLSSPSLGDIRTCLGALVFLCFFFVLIFAVAHVLLFLRGGVAGAVCSRICVS

SEQ ID NO: 6988 - protein, 113 aa, Glycine max; identical to SEQ ID NO: 6654
  misc_feature (11)..(11): Xaa can be any naturally occurring amino acid
  misc_feature (32)..(32): Xaa can be any naturally occurring amino acid
  misc_feature (52)..(52): Xaa can be any naturally occurring amino acid
  Coding DNA Sequence Number=SeqID_1409

SEQ ID NO: 6989 - protein, 123 aa, Glycine max; identical to SEQ ID NO: 6655
  misc_feature (19)..(19): Xaa can be any naturally occurring amino acid
  misc_feature (60)..(60): Xaa can be any naturally occurring amino acid
  misc_feature (92)..(92): Xaa can be any naturally occurring amino acid
  misc_feature (110)..(111): Xaa can be any naturally occurring amino acid
  misc_feature (116)..(116): Xaa can be any naturally occurring amino acid
  Coding DNA Sequence Number=SeqID_1411

SEQ ID NO: 6990 - protein, 133 aa, Glycine max
  misc_feature (12)..(12): Xaa can be any naturally occurring amino acid
  misc_feature (68)..(68): Xaa can be any naturally occurring amino acid
  misc_feature (112)..(112): Xaa can be any naturally occurring amino acid
  Coding DNA Sequence Number=SeqID_1413
  Gene Ontology: Mol. function=structural constituent of ribosome; Cellular component=ribonucleoprotein complex; Biological process =translation
  Homolog annotation: Hit_ID=Q96S84; Match level="QueryCoverage=100%, HitCoverage=65%, E-value=8e-31, Identity=53%"; Hit description =Ribosomal protein L15
  Pfam annotation: Domain name=Ribosomal_L15e; Domain location=1-133; Score=70.1; E_value=7.4e-18; Accession=PF00827.8; Description =Ribosomal L15
IVLMTMSTRPDXASCLGFMAKQVYVIYRIRVRRGGRHRPIPTGIVYGKPTHHGFTQLNLLRNKTSVAXERAGLNLGGLRVLIHYCVNDDSTYKYFDVMLLDLANAPMIHDPXIRWVVISMHNRIELCGLTSVG

SEQ ID NO: 6991 - protein, 121 aa, Glycine max
  Coding DNA Sequence Number=SeqID_1414
  Gene Ontology: Mol. function=lipid binding; Cellular component =extracellular region; Biological process=lipid transport
  Homolog annotation: Hit_ID=A8CT74; Match level="QueryCoverage=100%, HitCoverage=100%, E-value=4e-50, Identity=80%"; Hit description=Non -specific lipid-transfer protein
  Pfam annotation: Domain name=Tryp_alpha_amyl; Domain location=28-114; Score=103.4; E_value=7e-28; Accession=PF00234.12; Description =Protease inhibitorseed storageLTP f
MAFPSKITTCLLVLAVYMAAPSESPITCGTVTSTLARCMGYLTNCGPVPSDYCCAGVKALNQMAQTTPDRRQVCECLKAAAKDITGLINTDLVATLPTTCGVSVPYPFRFSTNCDTISTAV

SEQ ID NO: 6992 - protein, 98 aa, Glycine max
  misc_feature (18)..(18): Xaa can be any naturally occurring amino acid
  Coding DNA Sequence Number=SeqID_5093
DTAAARRGSRPPRRPTIXHTQQTDYSYTNITVIQYDNLFRPCSTMRGLDTTIDKYDGDMIRWRLRKIHVCSCRHIRQTHCLLCLSTRPLYIYVSGVVY

SEQ ID NO: 6993 - protein, 95 aa, Glycine max
  Coding DNA Sequence Number=SeqID_5095
  Gene Ontology: Mol. function=structural constituent of ribosome; Cellular component=ribonucleoprotein complex; Biological process =translation
  Homolog annotation: Hit_ID=A2Q4V6; Match level="QueryCoverage=100%, HitCoverage=77%, E-value=3e-36, Identity=83%"; Hit description =Ribosomal protein S10, eukaryotic and archaeal form
  Pfam annotation: Domain name=Ribosomal_S10; Domain location=1-90; Score=97.6; E_value=4e-26; Accession=PF00338.12; Description =Ribosomal protein S10pS20e
SSKHVKNLEKVCGDLVRGAKDKMLMVKGPVMMPTIVLQITTMKSSCGECAITWDRFELLVHNRVIDLYSLPDVVKQITSITIEPGVEDEVTIADA

SEQ ID NO: 6994 - protein, 62 aa, Glycine max
  Coding DNA Sequence Number=SeqID_5096
  Homolog annotation: Hit_ID=A5BCA7; Match level="QueryCoverage=80%, HitCoverage=3%, E-value=6e-11, Identity=68%"; Hit description =Putative uncharacterized protein
PGSPLSRTVPPFRPRRPMTAAEIMRQQMRVTEHDDNRLRKTLLRTHVGQVCLMVLVIFSTYP

SEQ ID NO: 6995 - protein, 190 aa, Glycine max
  misc_feature (68)..(68): Xaa can be any naturally occurring amino acid
  misc_feature (78)..(78): Xaa can be any naturally occurring amino acid
  misc_feature (148)..(148): Xaa can be any naturally occurring amino acid
  misc_feature (164)..(164): Xaa can be any naturally occurring amino acid
  misc_feature (182)..(182): Xaa can be any naturally occurring amino acid
  misc_feature (187)..(187): Xaa can be any naturally occurring amino acid
  Coding DNA Sequence Number=SeqID_5097
QLRRAPPQEIIENQKYEIKLLTQTLHDRETQETRATPSIYSPHTHFTEEGPGTPSLGSRDTYEHNQAXDKLAHDYQSXSARYKESQEIINSLRNDRDMRDQDVYIIDEKFERIMKDSESIKNAKESMERERNSLYKYAEELNSKIRTXTEEHLSLQKAYDEIQXRNMSDQTKLFQDIDAKNXEIRQXNAA

SEQ ID NO: 6996 - protein, 125 aa, Glycine max
  misc_feature (18)..(18): Xaa can be any naturally occurring amino acid
  misc_feature (74)..(74): Xaa can be any naturally occurring amino acid
  Coding DNA Sequence Number=SeqID_5099
YLSGLSARLIDARARRPXLPAKITTDQGEQCTGRIYSTYFSAAPQVYMITWLLINLVLQEILTFYSCPHALFNXGNYRNFVGRPAIKIGRGVVKLYIPALNVPRNIGLSVITGGHINIIAYGGDK

SEQ ID NO: 6997 - protein, 150 aa, Glycine max
  misc_feature (25)..(25): Xaa can be any naturally occurring amino acid
  misc_feature (39)..(39): Xaa can be any naturally occurring amino acid
  misc_feature (53)..(54): Xaa can be any naturally occurring amino acid
  misc_feature (66)..(66): Xaa can be any naturally occurring amino acid
  Coding DNA Sequence Number=SeqID_25
  Gene Ontology: Mol. function=catalytic activity; Biological process =cellular metabolic process
  Homolog annotation: Hit_ID=A2XAT9; Match level="QueryCoverage=96%, HitCoverage=51%, E-value=9e-51, Identity=63%"; Hit description =Putative uncharacterized protein
VVVPATTIGPALQQTLNFSSDHVAXYLTGAKPAYQNVVXAYIDVRDVARAHAXXYEHPDARGDRYXCVSAVMHRAHFVRLLKDLYPQYPVTAKREDDGKPMAREYRFSNQKLGDLGLEFTDMRTSLYDTVICLQHRGHVPVIVPRHRACL

SEQ ID NO: 6998 - protein, 125 aa, Glycine max
  misc_feature (96)..(96): Xaa can be any naturally occurring amino acid
  misc_feature (102)..(102): Xaa can be any naturally occurring amino acid
  misc_feature (122)..(122): Xaa can be any naturally occurring amino acid
  Coding DNA Sequence Number=SeqID_26
YGIMHSKQPRYVLECRSVLWCYHMWFTTTRHQELETSECSERHGERVDTHHEIDARVIALVHRPAHLSTTSGRCTGLAPAACAAVRAWRGVLATSXRDAVLXRQPCVSALFTGVLSVSCGCXAYA

SEQ ID NO: 6999 - protein, 61 aa, Glycine max
  Coding DNA Sequence Number=SeqID_28
HESSYMATVKHEITRDGRTQLYAYEHYLTGDGKQLTLTLRILRSTKGYPFEIYRSCEDCKC

SEQ ID NO: 7000 - protein, 160 aa, Glycine max
  misc_feature (14)..(14): Xaa can be any naturally occurring amino acid
  Coding DNA Sequence Number=SeqID_30
QPASSPELVPTYLXRFSHSHTTPSLFYIYICRCAASRCQSCVYLSPANIHGLSGLAVSFLYVSHHLYLRLSGIFLPLLARRVPRRPYSTPSPLYMYDTVIICSRVWRLCCPDALYKLMKKHIVYLLATYNAWSRKLSPIYTYSRISRVISVLHDSLYRTS

SEQ ID NO: 7001 - protein, 291 aa, Glycine max
  Coding DNA Sequence Number=SeqID_32
  Gene Ontology: Mol. function=oxidoreductase activity; Cellular component=periplasmic space; Biological process=nitrogen compound metabolic process
  Homolog annotation: Hit_ID=A5EUB5; Match level="QueryCoverage=100%, HitCoverage=46%, E-value=1e-151, Identity=85%"; Hit description =Putative multicopper oxidase domain
  Pfam annotation: Domain name=Cu-oxidase_2; Domain location=70-179; Score=-6.3; E_value=0.0041; Accession=PF07731.4; Description =Multicopper oxidase
  Pfam annotation: Domain name=Cu-oxidase_3; Domain location=63-180; Score=179.0; E_value=1.2e-50; Accession=PF07732.5; Description =Multicopper oxidase
  Pfam module annotation: Pfam domain module=Cu-oxidase_2::Cu-oxidase _3; Domain location=70-179::63-180
ARDVDGSIMPPGMINTFDLPGEAMKDMAAVKPRQVAYVAAPDARGDKVLAPRIENGVKVFDIKAEIIRWNILPDVAVEAYAYNRQVPGPRLQVTEGDHVRINFRNALPESTTVHWHGLIVPNEMDGPANVTQDPVPPGGSYTYEFDVGQSGTYFYHSHDHPDRQQALGLYGALLIAPKDPSAEVKADLDYAIQLQEWLKREWLTYPAMLMEGALPNYFTINGKAYPSTDTVAMKVGQTIKLRFIGTNNNFVHPMHVHGGPFEVVAVDGVNLKESARYQADTVNVGPGQRYD

SEQ ID NO: 7002 - protein, 127 aa, Glycine max
  Coding DNA Sequence Number=SeqID_33
  Homolog annotation: Hit_ID=A7NTE6; Match level="QueryCoverage=81%, HitCoverage=12%, E-value=6e-11, Identity=39%"; Hit description =Chromosome chr18 scaffold_1, whole genome shotgun sequence
ELYTDSERSDTKDEAVNDKSNNPSEEVFAPSMLAMNLKLDSAPPDDDVSSNEEEEDNDKENIEPHVHVSVDLTLSPDGDPVRAFVDEEAEEEDDSDNDLQRFQDDEGEDDDDIEEDDMIATKKKKKK

SEQ ID NO: 7003 - protein, 144 aa, Glycine max
  misc_feature (29)..(29): Xaa can be any naturally occurring amino acid
  misc_feature (31)..(31): Xaa can be any naturally occurring amino acid
  misc_feature (71)..(71): Xaa can be any naturally occurring amino acid
  misc_feature (77)..(77): Xaa can be any naturally occurring amino acid
  misc_feature (79)..(79): Xaa can be any naturally occurring amino acid
  misc_feature (99)..(100): Xaa can be any naturally occurring amino acid
  misc_feature (115)..(115): Xaa can be any naturally occurring amino acid
  misc_feature (117)..(117): Xaa can be any naturally occurring amino acid
  misc_feature (127)..(127): Xaa can be any naturally occurring amino acid
  Coding DNA Sequence Number=SeqID_34
YREQLWKTHNKITVPFAPRATTTRDRERXMXGVHVASGIDVLYTIRILEEYHTLDAGVRHAMRWRARRVPXGYTPSXTXRTISTLLYQTDLTTADRVNXXRHCDIIYDSHTSLSXHXSHMSLAPALXDARRSNYVHLSQHILHN

SEQ ID NO: 7004 - protein, 89 aa, Glycine max
  Coding DNA Sequence Number=SeqID_36
YCSVWLSSHHLCTLTHLDMAPDYARGCVQHRFLRRLPSVRCRPYIMIVSISEYMIGMLLARYNYTFLVVVCLCVFVIVIYYLCSVNVCS

SEQ ID NO: 7005 - protein, 72 aa, Glycine max
  Coding DNA Sequence Number=SeqID_349
  Gene Ontology: Cellular component=chloroplast
  Homolog annotation: Hit_ID=Q03943; Match level="QueryCoverage=72%, HitCoverage=16%, E-value=6e-21, Identity=98%"; Hit description =Membrane-associated 30 kDa protein, chloroplast precursor
CYLLFNFIFIELFCFFLEVLASQKRLENKYKAAQQASEEWYRKAQLALQKGEEDLAREALKRRKSYADNASS

SEQ ID NO: 7006 - protein, 109 aa, Glycine max
  misc_feature (9)..(9): Xaa can be any naturally occurring amino acid
  misc_feature (22)..(22): Xaa can be any naturally occurring amino acid
  misc_feature (53)..(53): Xaa can be any naturally occurring amino acid
  misc_feature (92)..(92): Xaa can be any naturally occurring amino acid
  Coding DNA Sequence Number=SeqID_350
  Gene Ontology: Mol. function=structural constituent of ribosome; Cellular component=ribonucleoprotein complex; Biological process =translation
  Homolog annotation: Hit_ID=P35684; Match level="QueryCoverage=94%, HitCoverage=25%, E-value=1e-35, Identity=74%"; Hit description=60S ribosomal protein L3
LAFTSCGKXGGEAHSALTEFDXRSEKDITPIGGVPHYGVVKGEYIMGKGCCVXPKKRGITLRQSLLKQTSRVALGGSKLKCIDTSSKVGHGXRFQTTQEKQKVFGRLKA

SEQ ID NO: 7007 - protein, 146 aa, Glycine max
  misc_feature (17)..(17): Xaa can be any naturally occurring amino acid
  Coding DNA Sequence Number=SeqID_351
  Subcellular localization annotation: CTP_CleavageSite=12; ConfidenceScore=5.06e-01
LSLIFLSPSTPRTIHSXYISPPTPPRPNNLLPQKFIYQTPLYRLTDRATELLLIFAISPPPPRPLYPPSPPPPLHIHPIITPCTCPPTPHNISHLQKTCSLTPTLHSHAPFSCLHLYVIFSTTPRGHAPRRSFNVSTPHRHPATLS

SEQ ID NO: 7008 - protein, 36 aa, Glycine max
  Coding DNA Sequence Number=SeqID_353
ICTYIINYCEFVPFLSERLGKKANKASNDLCFLFRV

SEQ ID NO: 7009 - protein, 65 aa, Glycine max
  Coding DNA Sequence Number=SeqID_355
  Gene Ontology: Mol. function=structural constituent of ribosome; Cellular component=viral capsid; Biological process=protein modification process
  Homolog annotation: Hit_ID=UPI0000E2507E; Match level="QueryCoverage =86%, HitCoverage=26%, E-value=1e-10, Identity=58%"; Hit description =PREDICTED: similar to ubiquitin A-52 residue ribosomal protein fusion product 1
  Pfam annotation: Domain name=ubiquitin; Domain location=20-65; Score =15.3; E_value=0.0078; Accession=PF00240.13; Description=Ubiquitin family
FNRRDDNCLGNHLEIIMQIFVRGQETISLDVQPFDSVETVKTQIQEREGIPVDQQRLIFAGKQLE

SEQ ID NO: 7010 - protein, 109 aa, Glycine max
  misc_feature (50)..(50): Xaa can be any naturally occurring amino acid
  misc_feature (75)..(75): Xaa can be any naturally occurring amino acid
  misc_feature (92)..(92): Xaa can be any naturally occurring amino acid
  Coding DNA Sequence Number=SeqID_356
EGRDGSNNKVEATNKGVTRMIRQRSRGERSEYVAIVYITNIFGRFVVCGXVLPSFPHFTSYRGPTAADCDVRWRXRRRHSGRFHVFSYLLYXIILCLISACLLERATEA

SEQ ID NO: 7011 - protein, 97 aa, Glycine max
  Coding DNA Sequence Number=SeqID_358
YEDHVVRKYRSARCSVVQLWKVSPGVYSCSYRCHVRRYVALLHRQLVIARSRLVCVHSYNRWRRRARGEHQYDSDTIDAICLQCMYRIHICRRLLTL

SEQ ID NO: 7012 - protein, 186 aa, Glycine max
  Coding DNA Sequence Number=SeqID_360
  Homolog annotation: Hit_ID=Q0TV83; Match level="QueryCoverage=97%, HitCoverage=99%, E-value=8e-61, Identity=68%"; Hit description =Putative uncharacterized protein
MAESLAAFRDRRSKDLRQLAEEHLQHDLNQQDRDILQKAGGKVSTHTGFASAVGLGLGLYTAFRLRAMRLAYFRAFRAMEKPVEVRFADGRTEPIPDITAKISGPSRWGDAATYFLFSVGGLFLGGELGLLTGTASAARTVTKDPASRERIEKAFKNYRIDVLQREIEQLKGKSKFEEFFSSGPSA

SEQ ID NO: 7013 - protein, 143 aa, Glycine max
  misc_feature (11)..(11): Xaa can be any naturally occurring amino acid
  misc_feature (22)..(22): Xaa can be any naturally occurring amino acid
  Coding DNA Sequence Number=SeqID_5101
ERCICGEWIAXCYVASQISRAXCRWRGAGLCISRFAAVHLSRRVCDPVHRSVCLPPPLSGSRLSREETDRQMMSCHAVGDTRNLVYPSSDSENNGCPQCGHTHLCILCVVDTLWPPSSSLWCGCSYLPAPASYAEEAARTVPR

SEQ ID NO: 7014 - protein, 96 aa, Glycine max
  misc_feature (22)..(22): Xaa can be any naturally occurring amino acid
  Coding DNA Sequence Number=SeqID_5103
  Gene Ontology: Biological process=pollen maturation
  Homolog annotation: Hit_ID=A7PCS5; Match level="QueryCoverage=100%, HitCoverage=9%, E-value=8e-37, Identity=78%"; Hit description =Chromosome chr17 scaffold_12, whole genome shotgun sequence
SSSKIDAESSEYAEILEFDAMXEPPSILHVEVLDFDGPFDKDVSLGHAEINFLKHTSTELADMWVMLEGKLAQSSKSKLHLRIFLDNNNGVETIKE

SEQ ID NO: 7015 - protein, 161 aa, Glycine max; identical to SEQ ID NO: 6866
  misc_feature (76)..(76): Xaa can be any naturally occurring amino acid
  misc_feature (112)..(112): Xaa can be any naturally occurring amino acid
  misc_feature (129)..(129): Xaa can be any naturally occurring amino acid
  Coding DNA Sequence Number=SeqID_5104

SEQ ID NO: 7016 - protein, 50 aa, Glycine max
  Coding DNA Sequence Number=SeqID_5106
EGGKEKKRERWRSLLSNTYVKLTSFFLFSYQSPNLYFYKELMSKHSREEN

SEQ ID NO: 7017 - protein, 135 aa, Glycine max; identical to SEQ ID NO: 6867
  misc_feature (48)..(48): Xaa can be any naturally occurring amino acid
  misc_feature (78)..(78): Xaa can be any naturally occurring amino acid
  misc_feature (116)..(116): Xaa can be any naturally occurring amino acid
  Coding DNA Sequence Number=SeqID_5108

SEQ ID NO: 7018 - protein, 178 aa, Glycine max
  misc_feature (8)..(8): Xaa can be any naturally occurring amino acid
  misc_feature (24)..(24): Xaa can be any naturally occurring amino acid
  misc_feature (27)..(27): Xaa can be any naturally occurring amino acid
  misc_feature (84)..(84): Xaa can be any naturally occurring amino acid
  misc_feature (93)..(93): Xaa can be any naturally occurring amino acid
  misc_feature (112)..(112): Xaa can be any naturally occurring amino acid
  misc_feature (120)..(120): Xaa can be any naturally occurring amino acid
  misc_feature (122)..(122): Xaa can be any naturally occurring amino acid
  misc_feature (130)..(130): Xaa can be any naturally occurring amino acid
  misc_feature (168)..(168): Xaa can be any naturally occurring amino acid
  Coding DNA Sequence Number=SeqID_5110
RIYRTRVXCVKLRRITRMYARFIXMTXQRQTVICRLLVIIVHYHFDVETRSAVDIYAPDTMQQSERHNRIRYQRICRSTARRLXTASTSIRDXQMTYTYSIYNIVTRLIECXSMVSSSIXHXRAQLSYSXHTSYYQPFVSASRMSTEHVIHNQHICYDRYKQVLQSAXYSRIARAVID

SEQ ID NO: 7019 - protein, 92 aa, Glycine max
  Coding DNA Sequence Number=SeqID_5112
  Subcellular localization annotation: CTP_CleavageSite=67; ConfidenceScore=5.72e-01
VCSLLTLSFFSFLSLPVLTLFSYCIVGSVLSLFHPSSNVFSFGSGNMSVVRRLKSPGMALSSAGLVSGSYVACRLLCPNHVFHQVNIISVSM

SEQ ID NO: 7020 - protein, 158 aa, Glycine max
  Coding DNA Sequence Number=SeqID_5113
LSTPHGDPSPTKKIDNCPRRAYTNTCHGRDITVNFACSLWTISAINDGSSTPYGETCAAAANTRTLTSRPPLAASTSRWPALRRFSPWSTRPHTGRAPTLRRASRARWSIAPGEPRSPVWRSRSMTASSPTPMSTATSTSPPSSLASTRSKCRAARLG

SEQ ID NO: 7021 - protein, 133 aa, Glycine max; identical to SEQ ID NO: 6870
  misc_feature (6)..(6): Xaa can be any naturally occurring amino acid
  misc_feature (16)..(16): Xaa can be any naturally occurring amino acid
  misc_feature (19)..(21): Xaa can be any naturally occurring amino acid
  misc_feature (61)..(62): Xaa can be any naturally occurring amino acid
  Coding DNA Sequence Number=SeqID_5115

SEQ ID NO: 7022 - protein, 142 aa, Glycine max
  Coding DNA Sequence Number=SeqID_5117
  Gene Ontology: Mol. function=nucleoside-triphosphatase activity; Cellular component=endoplasmic reticulum; Biological process =response to abscisic acid stimulus
  Homolog annotation: Hit_ID=Q5URW9; Match level="QueryCoverage=81%, HitCoverage=22%, E-value=1e-31, Identity=60%"; Hit description =ATPase 2
FEHPATFETLAMDRRKKEDILKDLVKLKKGKDYYAKTGKAWKRGYLLHGPPVYGKPTMTAAIANFMNYDEYDLETTAEKDNTELTKPLIETPRKSITATDDIDCSLDLTGPRATQKTEKNKPTKHQAKNFGGGTGTQIPPTG

SEQ ID NO: 7023 - protein, 123 aa, Glycine max; identical to SEQ ID NO: 6872
  misc_feature (6)..(6): Xaa can be any naturally occurring amino acid
  misc_feature (33)..(33): Xaa can be any naturally occurring amino acid
  misc_feature (66)..(66): Xaa can be any naturally occurring amino acid
  misc_feature (74)..(74): Xaa can be any naturally occurring amino acid
  misc_feature (121)..(121): Xaa can be any naturally occurring amino acid
  Coding DNA Sequence Number=SeqID_5118
  Subcellular localization annotation: CTP_CleavageSite=38; ConfidenceScore=5.03e-01

SEQ ID NO: 7024 - protein, 172 aa, Glycine max
  misc_feature (8)..(9): Xaa can be any naturally occurring amino acid
  misc_feature (58)..(58): Xaa can be any naturally occurring amino acid
  misc_feature (127)..(127): Xaa can be any naturally occurring amino acid
  Coding DNA Sequence Number=SeqID_5120
IFLIVLLXXVSAYRVLRRRAAVHSARRGGRCESSARDTSYNVILISTTPIYARGLYVXRCRRHVFCYFMRDVARHAAEYARDNRCGIGYIISTSHTDAHTKMRSVGSPFLVVRTIFFCMHVSACTIXRTTPAGGVSTTHWPLSLTSTQPHLYPQHPSRLLCPSCCTMLSLIS

SEQ ID NO: 7025 - protein, 108 aa, Glycine max
  Coding DNA Sequence Number=SeqID_5122
YSSKKQRLTAPVSRLIKLKYHQSPSPIAADAYEFRIKGVLSSCVPGDHCWISRSVVHVKGVLSSCVRFPNFSPCVRAQIIGPEPRVHWYQEHFPSYPGNKGKTFRGPA

SEQ ID NO: 7026 - protein, 232 aa, Glycine max
  misc_feature (57)..(58): Xaa can be any naturally occurring amino acid
  misc_feature (66)..(66): Xaa can be any naturally occurring amino acid
  misc_feature (68)..(70): Xaa can be any naturally occurring amino acid
  misc_feature (78)..(78): Xaa can be any naturally occurring amino acid
  Coding DNA Sequence Number=SeqID_5124
  Gene Ontology: Biological process=ubiquitin cycle
  Homolog annotation: Hit_ID=Q9SJ04; Match level="QueryCoverage=32%, HitCoverage=19%, E-value=4e-12, Identity=56%"; Hit description=F -box/kelch-repeat protein SKIP6
  Pfam annotation: Domain name=F-box; Domain location=16-63; Score =27.2; E_value=6.2e-05; Accession=PF00646.23; Description=F-box domain
MMSWACRSEESESPNNLIPYLPNDVALNCLARIPRSHHPTLSLVSKPIRSLLYSPLXXHTRSLLNXTXXXLYSLSVHXIPPLSGHAPPHKPNPLFVSFSHPSPALLPRPWPTSTSRGSIKSPFSKFGPDWRSTLVRGPPGVPRSSRPGSSRKINSGGGSPTWAPFPMWKVFTPLGGGKGPPPQRAGRKMFPPPSLGNNLRGGARGGFFLHPTFVWERGEEKFHPGGGGSSVL

SEQ ID NO: 7027 - protein, 132 aa, Glycine max
  Coding DNA Sequence Number=SeqID_5125
  Homolog annotation: Hit_ID=A7Q0F2; Match level="QueryCoverage=84%, HitCoverage=68%, E-value=4e-44, Identity=76%"; Hit description =Chromosome chr7 scaffold_42, whole genome shotgun sequence
  Pfam annotation: Domain name=DUF538; Domain location=6-132; Score =153.1; E_value=7.8e-43; Accession=PF04398.3; Description=Protein of unknown function, DUF538
MSRLPILIAAFLLLLLTTATAESDSPTAYSLLQSYNFPVGILPKGVVAYDLDTSTGKFHAYFNGSCSFSLVGSYQLNYKSTISGYISENKLTKLSGIKVKVLFLWLNIVEVVRKGEEMAFSVGITSANFDIE

SEQ ID NO: 7028 - protein, 95 aa, Glycine max
  misc_feature (19)..(19): Xaa can be any naturally occurring amino acid
  misc_feature (45)..(45): Xaa can be any naturally occurring amino acid
  misc_feature (54)..(54): Xaa can be any naturally occurring amino acid
  misc_feature (61)..(61): Xaa can be any naturally occurring amino acid
  Coding DNA Sequence Number=SeqID_5126
RQRKGKQEDKTGSMTGTTXNQKPNKEKTATKPRRKKPIRAEVADXPTEAATTTXHKKRKKXGSHRSFFSASASQTPLIRRRHHRTIMIRIALAGE

SEQ ID NO: 7029 - protein, 138 aa, Glycine max
  misc_feature (47)..(47): Xaa can be any naturally occurring amino acid
  Coding DNA Sequence Number=SeqID_5128
  Homolog annotation: Hit_ID=A9PHT4; Match level="QueryCoverage=86%, HitCoverage=48%, E-value=4e-11, Identity=39%"; Hit description =Putative uncharacterized protein
MTNEGVNTVVVEQQPVASTSKFPLSFWETTVASSVALVFAVGLLGVXLTMPDSHYRFLKLPLTLSEPSFFRISFKTYQWTHLANLGGVCGGYIFMPTLMISRAGFSDSLLEPLLKTLKGGSCWFTSHSGDSYCYFWCK

SEQ ID NO: 7030 - protein, 45 aa, Glycine max
  Coding DNA Sequence Number=SeqID_5129
  Homolog annotation: Hit_ID=A7Q246; Match level="QueryCoverage=86%, HitCoverage=4%, E-value=8e-13, Identity=82%"; Hit description =Chromosome chr13 scaffold_45, whole genome shotgun sequence
FSDTFNENSPPTNDPEYISNLGAAVYKGISKGDKDAVWLMQVCFS

SEQ ID NO: 7031 - protein, 171 aa, Glycine max
  misc_feature (40)..(40): Xaa can be any naturally occurring amino acid
  misc_feature (83)..(83): Xaa can be any naturally occurring amino acid
  misc_feature (91)..(91): Xaa can be any naturally occurring amino acid
  misc_feature (96)..(96): Xaa can be any naturally occurring amino acid
  misc_feature (108)..(108): Xaa can be any naturally occurring amino acid
  misc_feature (127)..(127): Xaa can be any naturally occurring amino acid
  Coding DNA Sequence Number=SeqID_5130
  Gene Ontology: Mol. function=ribulose-phosphate 3-epimerase activity; Cellular component=chloroplast thylakoid membrane; Biological process= carbohydrate metabolic process
  Homolog annotation: Hit_ID=Q8S4X2; Match level="QueryCoverage=91%, HitCoverage=55%, E-value=1e-34, Identity=56%"; Hit description =Ribulose-5-phosphate-3-epimerase
  Pfam annotation: Domain name=Ribul_P_3_epim; Domain location=58-169; Score=-72.1; E_value=3.7e-05; Accession=PF00834.9; Description =Ribulose-phosphate 3 epimerase family
  Subcellular localization annotation: CTP_CleavageSite=44; ConfidenceScore=5.80e-01
MAATSSLCSSTLQSQINGFFLHKTSLSHTPSLTFSRRKFXTTVKATSRVDKFSKSDIIVSPSILSANFSKLGEQVKSREWPGXRLIPRDEXDARFXPNITMELLGGDXMAPGTNFLLDEPLMMENPXQRVPNFFRAGPEIARVLGKIFPPSFFFQKVTQGKSREIKSGSFL

SEQ ID NO: 7032 - protein, 97 aa, Glycine max
  misc_feature (16)..(16): Xaa can be any naturally occurring amino acid
  misc_feature (18)..(18): Xaa can be any naturally occurring amino acid
  Coding DNA Sequence Number=SeqID_5131
GSAPAHRYLVVNITFXTXEHPPPFAVGAGPPPSAVERGVEGFSHLNLYYLLLNSSLKDARYTLLMSTEIDEVSPPIIIVTKPALSRDVSAMECATLA

SEQ ID NO: 7033 - protein, 125 aa, Glycine max
  Coding DNA Sequence Number=SeqID_5133
  Gene Ontology: Mol. function=inorganic diphosphatase activity; Cellular component=cytoplasm; Biological process=phosphate metabolic process
  Homolog annotation: Hit_ID=Q2HTA8; Match level="QueryCoverage=98%, HitCoverage=55%, E-value=3e-56, Identity=86%"; Hit description =Inorganic pyrophosphatase
  Pfam annotation: Domain name=Pyrophosphatase; Domain location=52-125; Score=-11.8; E_value=5e-07; Accession=PF00719.9; Description =Inorganic pyrophosphatase
MSEEVKENQSDKLQRTAPRLNERILSSLSRKSVAAHPWHDLEIGPGAPSIFNVVIEISKGSKVKYELDKKTGLIKVDRILYSSVVYPHNYGFIPRTLCEDNDPLDVLVIMQEPVLPGCFLRARAI

SEQ ID NO: 7034 - protein, 68 aa, Glycine max
  misc_feature (60)..(60): Xaa can be any naturally occurring amino acid
  Coding DNA Sequence Number=SeqID_5134
  Gene Ontology: Mol. function=phosphoric monoester hydrolase activity; Biological process=protein amino acid dephosphorylation
  Homolog annotation: Hit_ID=Q6J2K7; Match level="QueryCoverage=100%, HitCoverage=20%, E-value=3e-23, Identity=79%"; Hit description =Protein tyrosine phosphatase
AGIGRTGAYCTIHNTIQTILAGDMSAVNIADAVATFRTQRLRMVQTQAQYNFCYKAIIEXLEDLVSQQ

SEQ ID NO: 7035 - protein, 101 aa, Glycine max
  Coding DNA Sequence Number=SeqID_5135
FIFDSILLSVGKQNVNRWPHIDSFERDSNTFTFTLETGKQQLTLESYISFLSSRQLNEISESILPVNNRLLSRFIHLLISHVVYLLIMGRALQGVTHSAHG

SEQ ID NO: 7036 - protein, 94 aa, Glycine max; identical to SEQ ID NO: 6913
  misc_feature (10)..(10): Xaa can be any naturally occurring amino acid
  misc_feature (31)..(31): Xaa can be any naturally occurring amino acid
  misc_feature (37)..(37): Xaa can be any naturally occurring amino acid
  Coding DNA Sequence Number=SeqID_5137
  Subcellular localization annotation: CTP_CleavageSite=19; ConfidenceScore=5.06e-01

SEQ ID NO: 7037 - protein, 193 aa, Glycine max
  misc_feature (172)..(172): Xaa can be any naturally occurring amino acid
  Coding DNA Sequence Number=SeqID_5139
SLVNFLLPTYICLYDLFRLCTHFWKILTNHLASSDTRHTCLIISHLYTSPPSVHRLPATLTARPAHSCARSCLVPLLYTPSPLLLSPSPYTPLLFIPPANRNLAIFFSHSLFYSLCFVTTRRVRLSLYLIISTITSPLAHSIISTLYSRRSPILASIAPFTKVTANLSLTLXAHLLYVVGTTTLLVPPYPTYS

SEQ ID NO: 7038 - protein, 90 aa, Glycine max
  Coding DNA Sequence Number=SeqID_5141
KINIKKMQFIYYFFFILFHSSIGIYYILFWVGGGGGINNTTTEKNKLWGRGGWVTKTHRAGGWGGEDTKQHLRRLGGGATQIGHRGVFFL

SEQ ID NO: 7039 - protein, 90 aa, Glycine max
  Coding DNA Sequence Number=SeqID_5143
FIMKFVVLAVLFGFIAVAVVSALPQEGSPVGTVQNATQDASDKSAITSALGEILKLVENVLEQLGVRAGTDTITDGLPMGDMGSGNDGAA

SEQ ID NO: 7040 - protein, 152 aa, Glycine max
  misc_feature (102)..(102): Xaa can be any naturally occurring amino acid
  misc_feature (135)..(137): Xaa can be any naturally occurring amino acid
  Coding DNA Sequence Number=SeqID_5145
SEPKGSPDLKLPEKPPTAQKEGKKPKDGPMGLANERYLGVHTHPPRLIALQGGSLSNQGSQLLERRSCGPFSFYPNWRKGDLLPSDLIGEPQGFSHPHVFKXRPMRGGKTTPYKGNWGPGPPPRFFFFFFFFFFXXXFFFFFFFFFFFFYAK

SEQ ID NO: 7041 - protein, 123 aa, Glycine max
  Coding DNA Sequence Number=SeqID_5146
  Gene Ontology: Mol. function=transporter activity; Cellular component= integral to membrane; Biological process=transport
  Homolog annotation: Hit_ID=A8MRW1; Match level="QueryCoverage=100%, HitCoverage=40%, E-value=8e-66, Identity=96%"; Hit description =Uncharacterized protein At2g45960.3
  Pfam annotation: Domain name=MIP; Domain location=44-123; Score= -61.2; E_value=8.6e-06; Accession=PF00230.10; Description=Major intrinsic protein
MEGKEEDVRVGVNKFPERQPIGTSAQTDKDYKEPPPAPLFEPGELSSWSFWRAGIAEFIATFLFLYITVLTVMGVKRAPNMCASVGIQGIAWAFGGMIFALVYCTAGISGGHINPAVTFGLFL

SEQ ID NO: 7042 - protein, 289 aa, Glycine max
  misc_feature (168)..(168): Xaa can be any naturally occurring amino acid
  Coding DNA Sequence Number=SeqID_5147
  Homolog annotation: Hit_ID=A0CLM5; Match level="QueryCoverage=83%, HitCoverage=83%, E-value=4e-20, Identity=25%"; Hit description =Chromosome undetermined scaffold_20, whole genome shotgun sequence
MNFIRKEISAALNTFTFWIMPPAVRRYKYPKPGTRLYRYSSIGSEPSDRETSYIDYKTAFRDSTHHIRFNVDTQKTLQTYLYLQDPIGESVNEKLRRFGYLATEEFSNNDAIQKARTQYESDIGESVDVKNHHDDFGFSELGIGRDNREAVGEYVTSVFEGIKHGNAXEAWLNDLDDIYNASFYVLRNFDFAADDPVYRQMNLDMMQQLDEIANNREAIGQFPVFKGNAATWAILDDSFSAENIKKVQASVRNFTGYADLTPVVYGEGEIPPAKGGPGVAVPHISKVVE

SEQ ID NO: 7043 - protein, 124 aa, Glycine max
  misc_feature (5)..(7): Xaa can be any naturally occurring amino acid
  misc_feature (33)..(33): Xaa can be any naturally occurring amino acid
  misc_feature (39)..(39): Xaa can be any naturally occurring amino acid
  misc_feature (43)..(43): Xaa can be any naturally occurring amino acid
  Coding DNA Sequence Number=SeqID_5148
FCCLXXXRGAGRQRSRMRVRQLVDTKAGCLRCXEKPMIXCPPXHPPQVSSAVPGRALVHRRHAPGGWFVVGLPAGECICQGGFGLRTCSHRRRARLVCGLWGWYVGLCLFLLVLIFCSWSTTRN

SEQ ID NO: 7044 - protein, 155 aa, Glycine max
  Coding DNA Sequence Number=SeqID_5149
  Gene Ontology: Mol. function=sequence-specific DNA binding; Cellular component=nucleus; Biological process=regulation of transcription, DNA-dependent
  Homolog annotation: Hit_ID=Q9SXK8; Match level="QueryCoverage=57%, HitCoverage=21%, E-value=4e-15, Identity=46%"; Hit description=Heat shock factor
  Pfam annotation: Domain name=HSF_DNA-bind; Domain location=3-155; Score=-25.5; E_value=7.6e-08; Accession=PF00447.8; Description=HSF -type DNA-binding
MKQFHVAIYEIVDDPSLDSTISWSKNNKSFVIWNPNELFTKKILKRFFCCNLSQFLTELDTYGFVRIKGSEHLEFGHKQYFVRGKPELLKKMRLEAAMNRMKKSAQRAKARAEAEKNGSVTVRREPRIIINADEARRYKQIFESSSSSTIAKTPL

SEQ ID NO: 7045 - protein, 129 aa, Glycine max
  Coding DNA Sequence Number=SeqID_5150
RAKRNRGAIISCLCNPVVPREGSKSFLAQPGHERKHVYGCAGLNKLDGWRGPVNQMFFVDRPDGFHVHGSRGFRGQSGRMHQRGRGEGDGGRRTHGHALRAGGTYGPPRGHRQHLHLIDLGSLPVLFLR

SEQ ID NO: 7046 - protein, 156 aa, Glycine max
  misc_feature (5)..(5): Xaa can be any naturally occurring amino acid
  misc_feature (18)..(18): Xaa can be any naturally occurring amino acid
  misc_feature (22)..(22): Xaa can be any naturally occurring amino acid
  misc_feature (24)..(24): Xaa can be any naturally occurring amino acid
  misc_feature (52)..(53): Xaa can be any naturally occurring amino acid
  misc_feature (56)..(57): Xaa can be any naturally occurring amino acid
  misc_feature (61)..(61): Xaa can be any naturally occurring amino acid
  misc_feature (65)..(65): Xaa can be any naturally occurring amino acid
  misc_feature (86)..(87): Xaa can be any naturally occurring amino acid
  misc_feature (109)..(109): Xaa can be any naturally occurring amino acid
  misc_feature (134)..(134): Xaa can be any naturally occurring amino acid
  misc_feature (147)..(147): Xaa can be any naturally occurring amino acid
  Coding DNA Sequence Number=SeqID_5152
  Subcellular localization annotation: CTP_CleavageSite=36; ConfidenceScore=5.07e-01
YRFHXRRLDMLSCSVCVXGCGXSXSQDTSTTETTTKATRDTRRVVRSVPPRXXDMXXITPXTWWXHARVNRSDAGHAALCVVTSCXXDLEPTNEVGEETPDAAKHTYNXTKSVTSASRHQSSCGMVMSRSCPTXAVDLCDAETSCLXWICQCGVWW

SEQ ID NO: 7047 - protein, 155 aa, Glycine max
  misc_feature (1)..(1): Xaa can be any naturally occurring amino acid
  misc_feature (3)..(3): Xaa can be any naturally occurring amino acid
  misc_feature (12)..(12): Xaa can be any naturally occurring amino acid
  misc_feature (14)..(17): Xaa can be any naturally occurring amino acid
  misc_feature (27)..(27): Xaa can be any naturally occurring amino acid
  misc_feature (29)..(29): Xaa can be any naturally occurring amino acid
  misc_feature (44)..(44): Xaa can be any naturally occurring amino acid
  misc_feature (49)..(49): Xaa can be any naturally occurring amino acid
  misc_feature (69)..(69): Xaa can be any naturally occurring amino acid
  misc_feature (73)..(74): Xaa can be any naturally occurring amino acid
  misc_feature (84)..(85): Xaa can be any naturally occurring amino acid
  misc_feature (87)..(87): Xaa can be any naturally occurring amino acid
  misc_feature (90)..(90): Xaa can be any naturally occurring amino acid
  misc_feature (98)..(98): Xaa can be any naturally occurring amino acid
  misc_feature (102)..(102): Xaa can be any naturally occurring amino acid
  misc_feature (108)..(109): Xaa can be any naturally occurring amino acid
  misc_feature (116)..(116): Xaa can be any naturally occurring amino acid
  misc_feature (119)..(119): Xaa can be any naturally occurring amino acid
  misc_feature (124)..(124): Xaa can be any naturally occurring amino acid
  misc_feature (126)..(126): Xaa can be any naturally occurring amino acid
  misc_feature (142)..(142): Xaa can be any naturally occurring amino acid
  misc_feature (144)..(144): Xaa can be any naturally occurring amino acid
  misc_feature (148)..(148): Xaa can be any naturally occurring amino acid
  misc_feature (152)..(152): Xaa can be any naturally occurring amino acid
  Coding DNA Sequence Number=SeqID_5154
XAXSRCSLTISXAXXXXLIYRHAQTAXAXVRSHRHTSSDCARCXDESAXDPHTTRARYYDYDSATCYQXIVQXXTSSYHTSEKXXTXDAXILMPQVHXTLSXSYYHLXXIYGLHSXCYXISDVXRXDQRADYNHRHTHMHSXSXAPFXFIDXSCI

SEQ ID NO: 7048 - protein, 138 aa, Glycine max
  misc_feature (25)..(25): Xaa can be any naturally occurring amino acid
  misc_feature (73)..(73): Xaa can be any naturally occurring amino acid
  misc_feature (137)..(137): Xaa can be any naturally occurring amino acid
  Coding DNA Sequence Number=SeqID_5156
SKSVCTEERAEVEANTREELHIVDXATLGYPVNTGPLAVFLVSVCNAMRGSGPSMLSTSMIAVRHCAPVLFSXICRFTTSLIPYQPSVTAVLYIHPFCRCVRLIFITLATVRTPTYSTMGCSPVSDTHIHIGRRRGXL

SEQ ID NO: 7049 - protein, 162 aa, Glycine max
  misc_feature (155)..(155): Xaa can be any naturally occurring amino acid
  Coding DNA Sequence Number=SeqID_5158
  Homolog annotation: Hit_ID=Q9SN29; Match level="QueryCoverage=98%, HitCoverage=87%, E-value=5e-82, Identity=94%"; Hit description =Putative uncharacterized protein F28M11.60
MVMGSSKGRVKAWFNKKITDPLLQILRRGTEPKQLAFSAALGITLGIFPICGVPVFLCGVAIAFLGSACHAPTVMLANIIATPVELALVVPFLRLGEKVTGGPHFPLTSDALKKVFTGQASQEVFLSIGNALLGWLVATPFFFIALYVVLMPCFXILVRKFG

SEQ ID NO: 7050 - protein, 191 aa, Glycine max
  Coding DNA Sequence Number=SeqID_5159
KGVKSTTTLLSSGETFKKFGEFQVPRMLYLSKGCGCEVVLFLWFCCYLLLTAGQITEPTEGLFLFHPFFCWYSMLCTPFFYDCGSSSYSIGEYFLLDLIGVITYITKWNLSISSFVSMYIIMQSIVNKAISKIWKYCIYVLKKKKKKRKKKKKKKKTEFKGPGPAGPLMLSRSRLPPLYAGSPSRFAEPLS

SEQ ID NO: 7051 - protein, 79 aa, Glycine max
  misc_feature (35)..(35): Xaa can be any naturally occurring amino acid
  Coding DNA Sequence Number=SeqID_5161
GEGVVGPDEQTHIMLCREVIPHQSVSPIICQMYGXVCGWKGRVLLINNLKTYEVCHEVGMCPSPTIILLIHSVLVKSKL

SEQ ID NO: 7052 - protein, 114 aa, Glycine max
  misc_feature (42)..(42): Xaa can be any naturally occurring amino acid
  misc_feature (82)..(82): Xaa can be any naturally occurring amino acid
  misc_feature (86)..(86): Xaa can be any naturally occurring amino acid
  misc_feature (108)..(108): Xaa can be any naturally occurring amino acid
  Coding DNA Sequence Number=SeqID_5163
  Gene Ontology: Mol. function=transferase activity; Cellular component= integral to membrane; Biological process=glycolysis
  Homolog annotation: Hit_ID=Q946X2; Match level="QueryCoverage=100%, HitCoverage=50%, E-value=1e-33, Identity=63%"; Hit description =Hexokinase
  Pfam annotation: Domain name=Hexokinase_1; Domain location=2-114; Score=-69.7; E_value=1.1e-05; Accession=PF00349.11; Description =Hexokinase
DNLPTVDYEGLYYSFYLNGTNLRVRLVHLGGKDKGLFGQDFXEVSIPPNLMTASSDASFDFIPSALATFVHSEPDRFHPPPXKTKXLGFTFSFPMRQTSISSGTLIKXTKGFNI

SEQ ID NO: 7053 - protein, 142 aa, Glycine max
  Coding DNA Sequence Number=SeqID_5164
VQSTTDRQYARSDHHLLHGRCGGLRPISRLRSFLRWRFPWWRFLWWRFLWCRSLIRQGRSYLLPELQAGERTAGIRQAFIRIRTRLQRSCPCLPRSCPRIPRSCPCLQAFLQRSRLQAQLLNTSSLDLCHSLLFMSSSSVTC

SEQ ID NO: 7054 - protein, 426 aa, Glycine max
  misc_feature (181)..(181): Xaa can be any naturally occurring amino acid
  Coding DNA Sequence Number=SeqID_5166
  Gene Ontology: Mol. function=protein binding; Biological process =response to stress
  Homolog annotation: Hit_ID=O16527; Match level="QueryCoverage=96%, HitCoverage=83%, E-value=6e-15, Identity=23%"; Hit description=Ce-LEA
  Subcellular localization annotation: CTP_CleavageSite=19; ConfidenceScore=5.16e-01
MFSAAVRQSSQALYRQSTRAVSKNNNFLNILKQFSVNNTQGYKGYRGIQTDNKTDSTLKAAEKVGEQMKQSTKDMSENITRKYEEWTRSSTGVGAQAQSWADSIKDTAAKKGQEWTNQAQEKVSEATSGMSVDGMAKTAKDAANYAKDKMSNATSGMNMDDMGKTAKDAANYAKNKMSDAXGQMNVDGMTKTAKDAANYAKDKMSDATSGMSMDTVTKTAKDAADYAKTKMGDVTGQMNIDGVTKTVKDAASYAKEKVSNVAPDMSMDTDKIVKTVKDAANAAKDKMADTTSGMSMDKMAQQAKEAASTLAEKAKQAVGQGSSATETLKDWASTAQETASKVTEKAKEAVQGSTTGYVDSAKEAMKNIKEGASTVTETAKEYAQTAKEKVQDVASSSTVETMKKKGEEMIGTAKEAVKNASDKMKK

SEQ ID NO: 7055 - protein, 102 aa, Glycine max
  misc_feature (19)..(19): Xaa can be any naturally occurring amino acid
  Coding DNA Sequence Number=SeqID_5167
PPTLKLRRYRALALLVTHXQPSQNNLLSLKHIETHYIHSSVHRPTTLTPHRPHTPPELRDLSARDARKSTTHRSASKTLRLTYACLTHTYIYHAFRTYNKPC

SEQ ID NO: 7056 - protein, 62 aa, Glycine max
  Coding DNA Sequence Number=SeqID_5169
  Subcellular localization annotation: CTP_CleavageSite=16; ConfidenceScore=5.07e-01
FLSKDPSFKTEPPPLRPGALPEPEVNPPSLSLFFPLLPSSSTSLQNRYTFCSEPIDSFTGDP

SEQ ID NO: 7057 - protein, 151 aa, Glycine max
  misc_feature (100)..(100): Xaa can be any naturally occurring amino acid
  Coding DNA Sequence Number=SeqID_5171
TPRLGVISSEQPLNTNKKEPITNRRPCPAETEGEKDTLRENGAARREQAPTRQPTTSGARPQTKQSRTKQNRRTRKPGHSPAAPTHTRRATTVRPPRSTXRCRVYAVRGGRERGQKQRDTQNHARPRVRRPHPRYNKRRLGRSRGRRGPAA

SEQ ID NO: 7058 - protein, 144 aa, Glycine max
  misc_feature (25)..(25): Xaa can be any naturally occurring amino acid
  misc_feature (31)..(31): Xaa can be any naturally occurring amino acid
  misc_feature (34)..(34): Xaa can be any naturally occurring amino acid
  misc_feature (42)..(42): Xaa can be any naturally occurring amino acid
  misc_feature (46)..(46): Xaa can be any naturally occurring amino acid
  misc_feature (51)..(52): Xaa can be any naturally occurring amino acid
  misc_feature (77)..(77): Xaa can be any naturally occurring amino acid
  Coding DNA Sequence Number=SeqID_5173
  Gene Ontology: Mol. function=oxidoreductase activity; Cellular component=flagellum; Biological process=negative regulation of transcription
  Homolog annotation: Hit_ID=Q207T5; Match level="QueryCoverage=90%, HitCoverage=62%, E-value=3e-26, Identity=53%"; Hit description =Quinone oxidoreductase
  Pfam annotation: Domain name=Flavodoxin_1; Domain location=7-124; Score=-5.2; E_value=0.0084; Accession=PF00258.15; Description =Flavodoxin
MATKVYIVYYSTYGHVEKLAREIEXGAASVXGVXSKLWQVPXTLPXEVLCXXGAPPRSDGPNYYSPMSSLEADAFLXFGFQQNFGSIGRSLKAFFEGTGRPFGETGTNQKGAPGGLLLAKFPQGGGPKNSPAWDPLNPPWPPRG

SEQ ID NO: 7059 - protein, 260 aa, Glycine max
  Coding DNA Sequence Number=SeqID_5174
  Homolog annotation: Hit_ID=Q40443; Match level="QueryCoverage=74%, HitCoverage=72%, E-value=3e-19, Identity=30%"; Hit description=Tumor- related protein
MTATSRPQHPNGSLAPASDGGESFAKFFECWILEQSRDLAALRAAATARPDDADLRRLVDRVLGHYEHYYRAKSAAASADVLPMFAPSWISATESLYLWCGGWRPTSAIQLLYSKSGLQLEAQLPAFLDGGSLGDGDLGGLSAEQLQAADQLQRRTIRREREIEEAAAGAQESLATTKMVELAGKGGMDAAEGMELEMDAKAEAMKRVLEMADGLRLETLRGVVGLLRPAQAVHFLVAAAELHLAVHKFGRRKDGAAAAE

SEQ ID NO: 7060 - protein, 47 aa, Glycine max
  Coding DNA Sequence Number=SeqID_5175
REKGVGNAVALLTSQFPCQHMQRHSPVHLCALMAYTIRLVVSSQQWL

SEQ ID NO: 7061 - protein, 138 aa, Glycine max
  misc_feature (2)..(2): Xaa can be any naturally occurring amino acid
  misc_feature (28)..(29): Xaa can be any naturally occurring amino acid
  misc_feature (49)..(50): Xaa can be any naturally occurring amino acid
  misc_feature (57)..(57): Xaa can be any naturally occurring amino acid
  misc_feature (68)..(68): Xaa can be any naturally occurring amino acid
  misc_feature (71)..(71): Xaa can be any naturally occurring amino acid
  misc_feature (85)..(85): Xaa can be any naturally occurring amino acid
  misc_feature (102)..(102): Xaa can be any naturally occurring amino acid
  misc_feature (105)..(105): Xaa can be any naturally occurring amino acid
  misc_feature (138)..(138): Xaa can be any naturally occurring amino acid
  Coding DNA Sequence Number=SeqID_5176
SXMRRASRGGCGIVIYSSTYKHNVRQLXXHKIIYTYIAMYNDAPDSIHXXRAPYSIXTSLSTVRADTXLQXILRTTQCLNLLYSXLYSHYTDTTLTTRHITXTRXYTQLVDARRFMITRNLYLGHASTPRGSAHSESX

SEQ ID NO: 7062 - protein, 120 aa, Glycine max
  misc_feature (3)..(4): Xaa can be any naturally occurring amino acid
  misc_feature (12)..(12): Xaa can be any naturally occurring amino acid
  misc_feature (52)..(52): Xaa can be any naturally occurring amino acid
  misc_feature (88)..(88): Xaa can be any naturally occurring amino acid
  misc_feature (98)..(98): Xaa can be any naturally occurring amino acid
  misc_feature (106)..(106): Xaa can be any naturally occurring amino acid
  misc_feature (119)..(119): Xaa can be any naturally occurring amino acid
  Coding DNA Sequence Number=SeqID_5178
QHXXMSRVVSYXDGGLCRGCRVDLQYTVICALYSVSIRSTVLLASCELTYAXGVTGAKITGPTQRMVATLYSITRPKPQSTAMDREWXTSCQSVHSQXRTPVSLQXLSSRPGGRRFDEXI

SEQ ID NO: 7063 - protein, 340 aa, Glycine max
  misc_feature (24)..(24): Xaa can be any naturally occurring amino acid
  Coding DNA Sequence Number=SeqID_5180
  Gene Ontology: Mol. function=transcription factor activity; Cellular component=transcription factor complex; Biological process =regulation of transcription, DNA-dependent
  Homolog annotation: Hit_ID=Q7XZI4; Match level="QueryCoverage=86%, HitCoverage=85%, E-value=1e-119, Identity=76%"; Hit description=DP1
  Pfam annotation: Domain name=DP; Domain location=182-339; Score =241.8; E_value=1.5e-69; Accession=PF08781.1; Description =Transcription factor DP
  Pfam annotation: Domain name=E2F_TDP; Domain location=93-175; Score =107.0; E_value=5.7e-29; Accession=PF02319.11; Description =Transcription factor E2Fdimerisation partner (TDP)
  Pfam module annotation: Pfam domain module=DP::E2F_TDP; Domain location=182-339::93-175
  Subcellular localization annotation: CTP_CleavageSite=50; ConfidenceScore=5.63e-01
SAYQHGNTTPANISGGRGGGDARXGTTMSGQSMSTSRSVGSPSSRSEQTMATPASDSTFLRLNHLDIHGDDAGSQGTVAKKKKRGQRAVGGDKSGRGLRQFSMKVCEKVESKGRTTYNVADELVAEFADPINGVSTPDQQQYDEKNIRRRVYDALNVLMAMDIISKDKKGTPRKGIPVGPPPHIEELKSERLGLRNRIEKKAAYLQELEEQYIGLQKLIQRNEQLYSSGNAPNGGVSLPFILVQTRPHATVEVEISEDMQLVHFDFNSTPFELHDDNYVLKAMKFCERSQNDNTTDNSTDGGEGSSIYAQVPTSVSNPPNRPPSSPPLPGILKARVKNEH

SEQ ID NO: 7064 - protein, 239 aa, Glycine max
  misc_feature (181)..(181): Xaa can be any naturally occurring amino acid
  misc_feature (221)..(221): Xaa can be any naturally occurring amino acid
  misc_feature (226)..(226): Xaa can be any naturally occurring amino acid
  Coding DNA Sequence Number=SeqID_5181
  Gene Ontology: Mol. function=calcium ion binding; Biological process =response to abscisic acid stimulus
  Homolog annotation: Hit_ID=Q6Z2H9; Match level="QueryCoverage=73%, HitCoverage=81%, E-value=3e-51, Identity=55%"; Hit description =Putative caleosin
  Pfam annotation: Domain name=Caleosin; Domain location=59-232; Score =247.2; E_value=3.5e-71; Accession=PF05042.4; Description=Caleosin related protein
EEKHRSGATARARESRSRRNRLRRWAPASVASPPAAVAVPLLLLFVVPFWSHVASAHGGASAWTTALQKHVAFFDADNDGIVSFSETEQGLRAIGLGAAEATVKATLINGVIGPKTRPENATTSKLSIYIENIHQGIHGSDSGSYDAQGRFVPVKFNEIFTKHAKVEPNAVNESELEAMRXANRKDGDDIGRAASKAEWDLLYSLAKDKDGFLHKDNARTXFDDTXFVQLAKKGGSSRN

SEQ ID NO: 7065 - protein, 195 aa, Glycine max
  misc_feature (4)..(4): Xaa can be any naturally occurring amino acid
  misc_feature (11)..(11): Xaa can be any naturally occurring amino acid
  misc_feature (23)..(23): Xaa can be any naturally occurring amino acid
  Coding DNA Sequence Number=SeqID_5182
  Subcellular localization annotation: CTP_CleavageSite=67; ConfidenceScore=5.61e-01
AAAXFASPPSXFHSFCVLCPLFXFSLFSLSTYIHISSTIFLNNLQTISRGVPLLRFCCPILSCAPSRFMLLAHYDNTLLNFIYSINNISRAPSARGASSCYHAILWAIFLDSIDTLSTLPLYSDTINKSSLPHLRRSIYICIYNFGYGSVCRALVLILFPTPLQLPSTRATYDKVKYYTTHCRGTTTQARHPLRT

SEQ ID NO: 7066 - protein, 164 aa, Glycine max
  misc_feature (56)..(56): Xaa can be any naturally occurring amino acid
  misc_feature (109)..(109): Xaa can be any naturally occurring amino acid
  misc_feature (137)..(137): Xaa can be any naturally occurring amino acid
  misc_feature (162)..(162): Xaa can be any naturally occurring amino acid
  Coding DNA Sequence Number=SeqID_5184
GKNRCDDYGLLSITDNELTLVEDRDRAYLNAHHPAPAMSSCEIHESLITTVDYVDXPDTLIAMDTTLTVPRRTLDTRSPRARCRAVMSLRPRTWHSLECRHAVESNVRXSECTVMDSRPDSMQSRPEAILSGYKRIXTEQSFSIPNYSALSHHRASPNMQSXPM

SEQ ID NO: 7067 - protein, 163 aa, Glycine max
  misc_feature (9)..(9): Xaa can be any naturally occurring amino acid
  misc_feature (23)..(23): Xaa can be any naturally occurring amino acid
  misc_feature (127)..(127): Xaa can be any naturally occurring amino acid
  Coding DNA Sequence Number=SeqID_5185
RLSHRYKSXPSSCDLVLIYILPXYYFNLHLSTRGAVLYAQTRLGDVEECRRTCALLLLVLFAFSLEHDSPHNHLSPSELLIQRYYILACDLISDSYIAPPSARRARPPTALIIAAAPKTTHRLRQDXRDISHIRSLRSNEITILAYLCVGLCGFVGVFTAFVS

SEQ ID NO: 7068 - protein, 133 aa, Glycine max
  misc_feature (2)..(2): Xaa can be any naturally occurring amino acid
  misc_feature (38)..(38): Xaa can be any naturally occurring amino acid
  misc_feature (50)..(50): Xaa can be any naturally occurring amino acid
  misc_feature (71)..(71): Xaa can be any naturally occurring amino acid
  misc_feature (101)..(101): Xaa can be any naturally occurring amino acid
  misc_feature (107)..(107): Xaa can be any naturally occurring amino acid
  Coding DNA Sequence Number=SeqID_5187
  Subcellular localization annotation: CTP_CleavageSite=51; ConfidenceScore=5.33e-01
RXRREYALSSSYKKTTLSSSTDVRWSTARDVAMSSSLXTRLLIRHGVSSXAAAERARSRLGLTSSRDVTPXAPHPSTYITLHDTTHRSEHSAHSTSERQIXCDAWCXSFVLIHNSQTYSATTYHDRTRRRYTS

SEQ ID NO: 7069 - protein, 112 aa, Glycine max
  misc_feature (1)..(1): Xaa can be any naturally occurring amino acid
  misc_feature (5)..(5): Xaa can be any naturally occurring amino acid
  misc_feature (12)..(12): Xaa can be any naturally occurring amino acid
  misc_feature (20)..(21): Xaa can be any naturally occurring amino acid
  misc_feature (27)..(27): Xaa can be any naturally occurring amino acid
  misc_feature (33)..(33): Xaa can be any naturally occurring amino acid
  misc_feature (43)..(43): Xaa can be any naturally occurring amino acid
  misc_feature (49)..(49): Xaa can be any naturally occurring amino acid
  misc_feature (52)..(52): Xaa can be any naturally occurring amino acid
  misc_feature (56)..(56): Xaa can be any naturally occurring amino acid
  misc_feature (77)..(77): Xaa can be any naturally occurring amino acid
  misc_feature (80)..(81): Xaa can be any naturally occurring amino acid
  misc_feature (89)..(89): Xaa can be any naturally occurring amino acid
  misc_feature (91)..(91): Xaa can be any naturally occurring amino acid
  misc_feature (99)..(99): Xaa can be any naturally occurring amino acid
  Coding DNA Sequence Number=SeqID_5189
XVSLXITVATSXLQRAGRPXXQVPMMXVALCSXCQLDAHVERXGSQSVXVSXREQXLRLSDYADRSHDKLCSGQYVXSVXXSIGTSCEXAXLCNGSAAXLVVCYERTSVASV

SEQ ID NO: 7070 - protein, 152 aa, Glycine max
  misc_feature (125)..(127): Xaa can be any naturally occurring amino acid
  misc_feature (129)..(129): Xaa can be any naturally occurring amino acid
  misc_feature (140)..(140): Xaa can be any naturally occurring amino acid
  misc_feature (142)..(143): Xaa can be any naturally occurring amino acid
  misc_feature (146)..(146): Xaa can be any naturally occurring amino acid
  Coding DNA Sequence Number=SeqID_5191
LGVVVPLHHRPGLVCGGCEIAAVHNIHRYVLWLMARYIRLCGCTTATRGLQMARSVCSYNEETSVYTGLSCSHTMSCEVYCAECVSIQSQTHHGGCCEAEGGGAGAHLTSDTAPSGGPFQLSYNXXXSXPPQDGRGRRIXAXXEGXDTHTPH

SEQ ID NO: 7071 - protein, 155 aa, Glycine max
  misc_feature (123)..(123): Xaa can be any naturally occurring amino acid
  Coding DNA Sequence Number=SeqID_5193
  Subcellular localization annotation: CTP_CleavageSite=83; ConfidenceScore=5.41e-01
RGRPRRPTEWDSSNPTSSAKSKRVISPQRGTPHRAPLPPLAHPAARAAHSALPYSTRPTRLTIRTRTICINRPTQSARRVYVQAPAYASDPPLHSDRDYVTQRGGARRCAEGEARQARRGTCXPCAHTRRGSGPTAARHLRSEVRPCLHATHDHP

SEQ ID NO: 7072 - protein, 472 aa, Glycine max
  misc_feature (221)..(221): Xaa can be any naturally occurring amino acid
  misc_feature (285)..(285): Xaa can be any naturally occurring amino acid
  misc_feature (310)..(310): Xaa can be any naturally occurring amino acid
  Coding DNA Sequence Number=SeqID_1415
  Gene Ontology: Mol. function=catalytic activity; Cellular component =nucleus; Biological process=metabolic process
  Homolog annotation: Hit_ID=O23169; Match level="QueryCoverage=77%, HitCoverage=89%, E-value=1e-134, Identity=41%"; Hit description =Putative uncharacterized protein C7A10.190
  Pfam annotation: Domain name=PPR; Domain location=117-151; Score=1.6; E_value=5.1; Accession=PF01535.11; Description=PPR repeat
  Pfam annotation: Domain name=PPR; Domain location=183-217; Score =42.6; E_value=1.4e-09; Accession=PF01535.11; Description=PPR repeat
  Pfam annotation: Domain name=PPR; Domain location=238-272; Score=3.2; E_value=3.2; Accession=PF01535.11; Description=PPR repeat
  Pfam annotation: Domain name=PPR; Domain location=304-338; Score =12.5; E_value=0.26; Accession=PF01535.11; Description=PPR repeat
  Pfam module annotation: Pfam domain module=PPR::PPR::PPR::PPR; Domain location=117-151::183-217::238-272::304-338
MFENHKNMGQLKVVASTFVVLRSWWSFDGAVGDPQLFLLKWECSVVAVHDLLNFNQNLNASLVDLRAQVSNHRKHFTTSLLRRMGTGPPPRSQLRRPPPRFLLFRDLMQSGVRPNEYTFSGVLNACADHAAEHLGKEVHRYMMRTGYGPFSFAISALVHMYSKCGNTRVARKVFNEMHQPDLVSWTSLIVGYAQNGQPEEALHFFKLLLQSGTKPDQIKGXEYFHSIREKHGLMHTADHYACVIDLLERFGRFKEAENIIDNMHIKPDKFLWASLLGGCRIHGTXELAKRAPKALYEIEPENPATYITLXNIYANAGLWTKVAKVRKDMDNRGIVKKPGKSWIEIKRQVHVFLVGDTSHPKTSDMHEFLGELSKKIKEEGYVPGTNFVLHDVEEEQKEQNLFYHGEKLAVAFGIISTPTGTPIKVFKNLRTCVDCHTTIKYISKIVQRKIIVRDSNRFHCFEDGSCSCKDYW

SEQ ID NO: 7073 - protein, 106 aa, Glycine max
  misc_feature (14)..(14): Xaa can be any naturally occurring amino acid
  misc_feature (18)..(19): Xaa can be any naturally occurring amino acid
  misc_feature (27)..(27): Xaa can be any naturally occurring amino acid
  misc_feature (37)..(37): Xaa can be any naturally occurring amino acid
  misc_feature (57)..(58): Xaa can be any naturally occurring amino acid
  misc_feature (60)..(60): Xaa can be any naturally occurring amino acid
  misc_feature (65)..(65): Xaa can be any naturally occurring amino acid
  misc_feature (70)..(70): Xaa can be any naturally occurring amino acid
  misc_feature (76)..(76): Xaa can be any naturally occurring amino acid
  misc_feature (84)..(86): Xaa can be any naturally occurring amino acid
  misc_feature (94)..(94): Xaa can be any naturally occurring amino acid
  misc_feature (105)..(105): Xaa can be any naturally occurring amino acid
  Coding DNA Sequence Number=SeqID_1416
FISVCALYSCTTRXIVFXXIRYVDGDXDVVRFIRDDXSTTSTIIILDLLTLHIHNAXXRXSDNTXHTTQXTVACSXCMQRASIXXXISRIYVSXILVVSTVMRRXL

SEQ ID NO: 7074 - protein, 219 aa, Glycine max
  misc_feature (7)..(13): Xaa can be any naturally occurring amino acid
  misc_feature (27)..(27): Xaa can be any naturally occurring amino acid
  misc_feature (36)..(36): Xaa can be any naturally occurring amino acid
  misc_feature (50)..(50): Xaa can be any naturally occurring amino acid
  misc_feature (66)..(66): Xaa can be any naturally occurring amino acid
  misc_feature (84)..(84): Xaa can be any naturally occurring amino acid
  misc_feature (95)..(95): Xaa can be any naturally occurring amino acid
  misc_feature (98)..(98): Xaa can be any naturally occurring amino acid
  misc_feature (112)..(112): Xaa can be any naturally occurring amino acid
  misc_feature (120)..(120): Xaa can be any naturally occurring amino acid
  misc_feature (122)..(122): Xaa can be any naturally occurring amino acid
  misc_feature (131)..(131): Xaa can be any naturally occurring amino acid
  misc_feature (136)..(136): Xaa can be any naturally occurring amino acid
  misc_feature (150)..(150): Xaa can be any naturally occurring amino acid
  misc_feature (152)..(152): Xaa can be any naturally occurring amino acid
  misc_feature (157)..(157): Xaa can be any naturally occurring amino acid
  misc_feature (163)..(163): Xaa can be any naturally occurring amino acid
  misc_feature (171)..(171): Xaa can be any naturally occurring amino acid
  misc_feature (184)..(184): Xaa can be any naturally occurring amino acid
  misc_feature (193)..(193): Xaa can be any naturally occurring amino acid
  misc_feature (195)..(195): Xaa can be any naturally occurring amino acid
  misc_feature (200)..(200): Xaa can be any naturally occurring amino acid
  misc_feature (204)..(204): Xaa can be any naturally occurring amino acid
  misc_feature (209)..(209): Xaa can be any naturally occurring amino acid
  Coding DNA Sequence Number=SeqID_1417
VYTRWCXXXXXXXKTTDDSIVIVCYTXVRSHLHALXPSSSTAAPPTSRTXVHSTIADFAQTHLDTXHAPTARAPRITARGARRXDTRVQRAAPRXARXVASRARFAAPSAYXQRIASTTXRXAGAIAIRPXVGGAXARAVRRTDRQRALXTXVARRXSRVATXRTRCDRVXVSSAIVFARLATXCSIRHVAIXAXGVSRXRDRXVQVRXDSVVGTRVRT

SEQ ID NO: 7075 - protein, 149 aa, Glycine max
  misc_feature (149)..(149): Xaa can be any naturally occurring amino acid
  Coding DNA Sequence Number=SeqID_1419
  Homolog annotation: Hit_ID=Q9ATQ9; Match level="QueryCoverage=70%, HitCoverage=39%, E-value=1e-34, Identity=70%"; Hit description=PST19
MSFHRGSSSGTGGGDGPSAWPSSLSTPETEELYRFGLLVPPGCRLPDRKLDKDGYPRRGPGATAEEKRTGGRNNIAGRHAFWDGKDYAAVIRECRLTESGDTADLVPRPRPEARGRRAPPPPAPATANPPAPPEVELPPEQLVLREDGX

SEQ ID NO: 7076 - protein, 148 aa, Glycine max
  misc_feature (54)..(54): Xaa can be any naturally occurring amino acid
  Coding DNA Sequence Number=SeqID_1420
  Subcellular localization annotation: CTP_CleavageSite=37; ConfidenceScore=5.32e-01
FAPYPTRKYILPPSLSSVFPGAFPPPRPPPHILKACRGRRKGRRTIYNHMKIPXFLGSIYYINPLIQAQERCGSSILCGYITANADSPLATDQLHAIYYFRSLPYHIHNSVYYPTSLCHFSTRSSSPYPRAEHYSPVFRCAMGRPPPL

SEQ ID NO: 7077 - protein, 377 aa, Glycine max
  misc_feature (145)..(145): Xaa can be any naturally occurring amino acid
  misc_feature (178)..(178): Xaa can be any naturally occurring amino acid
  misc_feature (182)..(182): Xaa can be any naturally occurring amino acid
  Coding DNA Sequence Number=SeqID_1422
  Gene Ontology: Mol. function=microtubule motor activity; Cellular component=microtubule associated complex; Biological process =microtubule-based movement
  Homolog annotation: Hit_ID=A0CZI7; Match level="QueryCoverage=68%, HitCoverage=13%, E-value=2e-16, Identity=24%"; Hit description =Chromosome undetermined scaffold_32, whole genome shotgun sequence
MEPKLRQEISDYSSKISGIYEQQESEINQMKDQYLKLAQDHKNLTKTIILKDDQLAKIRDELQYVFVEKEKLMEDLKAQKQTEVKLKKEKQEYYEKVTRLNNDQYLLLKEIDNLNKANEGAANQNNMAQKIKHLNKLKEENNELXTEKAQLCEDLALAIDQRETLQKKLDEQLLMKGXQDGXNDFKQDIEKRNVDSQILVESLSRINSIVYTNLHKEDSKFFVPKVKDIESTLRGVQILCALIMEKNNRIRNRESELESTLLTNSILEKEVLLLKQKISIGNSIASELVSQNESLISKQHPPLDLRNKNRMPTPTRMQNTNESYYKVVPQPLNSSHRAGSTNVRRQENEVPGFDENFRSNTSDIRKYSHLTRNPSAK

SEQ ID NO: 7078 - protein, 131 aa, Glycine max
  misc_feature (80)..(80): Xaa can be any naturally occurring amino acid
  Coding DNA Sequence Number=SeqID_1423
  Gene Ontology: Mol. function=transition metal ion binding; Cellular component=endoplasmic reticulum membrane; Biological process =electron transport
  Homolog annotation: Hit_ID=O24651; Match level="QueryCoverage=98%, HitCoverage=97%, E-value=7e-54, Identity=75%"; Hit description =Cytochrome b5
  Pfam annotation: Domain name=Cyt-b5; Domain location=4-78; Score =80.1; E_value=7.3e-21; Accession=PF00173.18; Description=Cytochrome b5-like HemeSteroid bindin
RNKVFSLAEVSQHNNAKDCWLVIHGKVYNVTKFLEDQAGGDEVLLSSTGKDATNDFEDIGHSTTAVPMMDEFYVGDIDTXTIPSKVKYTPPKQPHYNQDKMPELIIRILHFLVPLFILGLATRFSFYTKSP

SEQ ID NO: 7079 - protein, 141 aa, Glycine max
  Coding DNA Sequence Number=SeqID_1424
  Gene Ontology: Mol. function=structural constituent of ribosome; Cellular component=ribonucleoprotein complex; Biological process =translation
  Homolog annotation: Hit_ID=Q6BFE0; Match level="QueryCoverage=92%, HitCoverage=91%, E-value=1e-42, Identity=61%"; Hit description=40s ribosomal protein S15, putative
  Pfam annotation: Domain name=Ribosomal_S19; Domain location=43-124; Score=110.5; E_value=5.1e-30; Accession=PF00203.11; Description =Ribosomal protein S19
SYVGPPPPRKYTYRGLSLEQLTEMKNEQLIELFESRIRRRFNRGLKHKYQRFVQKLRKNKKNLQPGEKPAPVKTQLRNAIVLPEMVGSVVGIHTGKEYANVEIKFDMIGKYLGEFGLSYKPTTHGKPGVGATKGSSNTDKK

SEQ ID NO: 7080 - protein, 128 aa, Glycine max
  misc_feature (16)..(16): Xaa can be any naturally occurring amino acid
  misc_feature (19)..(20): Xaa can be any naturally occurring amino acid
  misc_feature (43)..(45): Xaa can be any naturally occurring amino acid
  misc_feature (47)..(47): Xaa can be any naturally occurring amino acid
  misc_feature (57)..(58): Xaa can be any naturally occurring amino acid
  misc_feature (70)..(70): Xaa can be any naturally occurring amino acid
  misc_feature (75)..(75): Xaa can be any naturally occurring amino acid
  misc_feature (85)..(86): Xaa can be any naturally occurring amino acid
  misc_feature (105)..(105): Xaa can be any naturally occurring amino acid
  Coding DNA Sequence Number=SeqID_5195
LDNIHNIYKSLHVIDXQYXXRLTSLTLRTPATTYMIRCGGDGXXXIXGISRVYREKXXIACICIRHLTYXIVIRXDCYHESGEVXXYTRGREIPDDREQRILIPXSTQCCLRRTPTSKRMISTHRQNV

SEQ ID NO: 7081 - protein, 119 aa, Glycine max
  misc_feature (21)..(21): Xaa can be any naturally occurring amino acid
  misc_feature (38)..(38): Xaa can be any naturally occurring amino acid
  misc_feature (46)..(46): Xaa can be any naturally occurring amino acid
  misc_feature (99)..(99): Xaa can be any naturally occurring amino acid
  Coding DNA Sequence Number=SeqID_4777
  Gene Ontology: Mol. function=nucleic acid binding; Cellular component= ribonucleoprotein complex; Biological process=nuclear mRNA splicing, via spliceosome
  Homolog annotation: Hit_ID=A7NY57; Match level="QueryCoverage=89%, HitCoverage=44%, E-value=5e-29, Identity=61%"; Hit description =Chromosome chr6 scaffold_3, whole genome shotgun sequence
FNEEGPSIDAIRRQSLHCLFXSQYGRFSDVIALKTPKXLKDMRVSXLNEGTAACNAVRQMQNYPFYDKPMRIHCANTKSDCIAKEEGTYVPKENKNNHXDNAERKRLVEEAQQSRVANG

SEQ ID NO: 7082 - protein, 219 aa, Glycine max
  misc_feature (137)..(137): Xaa can be any naturally occurring amino acid
  misc_feature (148)..(148): Xaa can be any naturally occurring amino acid
  Coding DNA Sequence Number=SeqID_4778
  Gene Ontology: Mol. function=nucleoside-triphosphatase activity; Cellular component=membrane; Biological process=transport
  Homolog annotation: Hit_ID=P0A9U1; Match level="QueryCoverage=70%, HitCoverage=73%, E-value=7e-73, Identity=70%"; Hit description =Uncharacterized ABC transporter ATP-binding protein ybhF
  Pfam annotation: Domain name=ABC_tran; Domain location=7-128; Score =18.7; E_value=2.2e-08; Accession=PF00005.17; Description=ABC transporter
  Subcellular localization annotation: CTP_CleavageSite=50; ConfidenceScore=5.19e-01
FFFFFFFSSPYPPRPRHWVPGPPSNTTYPRDAICQRFLEFTSLGPITGRLAGKLSGGMKQKLGLACTLVGEPKVLLLDEPGVGVDPISRRELRQMAHELAREGMLILWSTSYLDEAEQCRDVLLMNEGELLYQGEPXALTQIMAGRSXFLMTSPHEGNRKLLQRALKLPQVSDGMIHGKPARLILTKEATLTRYSPTPTVCREIQHHLNYSPLSEHAFH

SEQ ID NO: 7083 - protein, 166 aa, Glycine max; identical to SEQ ID NO: 6617
  misc_feature (96)..(96): Xaa can be any naturally occurring amino acid
  misc_feature (134)..(134): Xaa can be any naturally occurring amino acid
  misc_feature (154)..(154): Xaa can be any naturally occurring amino acid
  misc_feature (156)..(156): Xaa can be any naturally occurring amino acid
  misc_feature (158)..(159): Xaa can be any naturally occurring amino acid
  Coding DNA Sequence Number=SeqID_4779

SEQ ID NO: 7084 - protein, 153 aa, Glycine max; identical to SEQ ID NO: 6620
  misc_feature (2)..(3): Xaa can be any naturally occurring amino acid
  misc_feature (17)..(17): Xaa can be any naturally occurring amino acid
  misc_feature (23)..(25): Xaa can be any naturally occurring amino acid
  misc_feature (53)..(53): Xaa can be any naturally occurring amino acid
  misc_feature (57)..(57): Xaa can be any naturally occurring amino acid
  misc_feature (77)..(78): Xaa can be any naturally occurring amino acid
  misc_feature (80)..(80): Xaa can be any naturally occurring amino acid
  misc_feature (114)..(114): Xaa can be any naturally occurring amino acid
  misc_feature (120)..(121): Xaa can be any naturally occurring amino acid
  misc_feature (131)..(131): Xaa can be any naturally occurring amino acid
  Coding DNA Sequence Number=SeqID_4781

SEQ ID NO: 7085 - protein, 104 aa, Glycine max
  misc_feature (50)..(50): Xaa can be any naturally occurring amino acid
  misc_feature (92)..(92): Xaa can be any naturally occurring amino acid
  Coding DNA Sequence Number=SeqID_4783
  Gene Ontology: Mol. function=RNA binding
  Homolog annotation: Hit_ID=A2WWD8; Match level="QueryCoverage=100%, HitCoverage=35%, E-value=5e-22, Identity=54%"; Hit description =Putative uncharacterized protein
MDGLHGADACFSPGRAMSPQVRPPAGPPDVGSHYLTELLQEHQKLVPFTXVLPICSKLLGHEIMRVSSLLKHQHGGDFERLPPMASPNQMHXSSVAPMPNFCGN

SEQ ID NO: 7086 - protein, 201 aa, Glycine max
  misc_feature (1)..(1): Xaa can be any naturally occurring amino acid
  Coding DNA Sequence Number=SeqID_4784
XLNHNGIVQEESHDTEVLLTDEGTLSMEQRDAKDLKGKGGSINEIKNWTNNLAFDEEEKERKAPEAANNVKHAQETMLERLRDALGSEEFVKREDYERVVQEKRELEEYAEAVREENEKLRAFFMELKNSGWGQDGSQGLKELVVKQQKELDVLKRREGAVKNVLKMIYQTGIDVNEFMGGNEGNDEQLFTETQYKKKKKK

SEQ ID NO: 7087 - protein, 190 aa, Glycine max
  Coding DNA Sequence Number=SeqID_4786
  Gene Ontology: Mol. function=calcium ion binding
  Homolog annotation: Hit_ID=Q3EAA4; Match level="QueryCoverage=68%, HitCoverage=23%, E-value=2e-25, Identity=48%"; Hit description =Uncharacterized protein At4g05520.1
  Subcellular localization annotation: CTP_CleavageSite=26; ConfidenceScore=5.28e-01
PPTFCRVFWGPLKGVPPGVKFLISPRKFSPGYTKAPLYRKTLLGERLFSIPFRTGFFLERNKNKSLCGFEGIFPRRPGDCRSKKFFKRARFVKIPAFLICPLKKGIPFLMGKTKAPQSLFFFFGEEFPKVQRGFFFPAGVFSPVDPFRKVLRGFTLAKFGKLKPKKFQPVEALLGFEIPELLKKFRNPSG

SEQ ID NO: 7088 - protein, 213 aa, Glycine max
  misc_feature (17)..(17): Xaa can be any naturally occurring amino acid
  misc_feature (22)..(22): Xaa can be any naturally occurring amino acid
  misc_feature (36)..(37): Xaa can be any naturally occurring amino acid
  misc_feature (57)..(57): Xaa can be any naturally occurring amino acid
  misc_feature (60)..(60): Xaa can be any naturally occurring amino acid
  misc_feature (63)..(63): Xaa can be any naturally occurring amino acid
  misc_feature (80)..(80): Xaa can be any naturally occurring amino acid
  misc_feature (84)..(84): Xaa can be any naturally occurring amino acid
  misc_feature (90)..(90): Xaa can be any naturally occurring amino acid
  misc_feature (96)..(96): Xaa can be any naturally occurring amino acid
  misc_feature (136)..(137): Xaa can be any naturally occurring amino acid
  misc_feature (147)..(147): Xaa can be any naturally occurring amino acid
  misc_feature (164)..(164): Xaa can be any naturally occurring amino acid
  misc_feature (166)..(166): Xaa can be any naturally occurring amino acid
  misc_feature (171)..(172): Xaa can be any naturally occurring amino acid
  misc_feature (178)..(178): Xaa can be any naturally occurring amino acid
  misc_feature (182)..(182): Xaa can be any naturally occurring amino acid
  misc_feature (190)..(190): Xaa can be any naturally occurring amino acid
  misc_feature (197)..(197): Xaa can be any naturally occurring amino acid
  misc_feature (208)..(208): Xaa can be any naturally occurring amino acid
  misc_feature (211)..(211): Xaa can be any naturally occurring amino acid
  Coding DNA Sequence Number=SeqID_4787
CRTLRRVYSLCLSSHHXMRLFXIVSDIHIILYQYAXXDLYRTTVRGISSLRSLYMSXASXPSXLSRLRRVSRRRRPSDVXARHXRDLCTXYDATVXFDWMCQDIRDSRERPDMSHILLVYSYHDIRYRRSLVARCXXAVAIDPLSLXYAVVLLVAAQLLYSHDXHXIDYVXXLRSARXTHLXRTCTPALXSQRHRIXTVVTVRAATLXYNXTK

SEQ ID NO: 7089 - protein, 80 aa, Glycine max
  misc_feature (78)..(78): Xaa can be any naturally occurring amino acid
  Coding DNA Sequence Number=SeqID_4789
  Subcellular localization annotation: CTP_CleavageSite=56; ConfidenceScore=5.81e-01
AASKLGSRLSCPLLRCASPLAFKGFAFVLKAVRPTSTLSAITFAPFVNPLSLSTTRARKSRSRAPSQGLLKNNPIPPXWG

SEQ ID NO: 7090 - protein, 20 aa, Glycine max
  Coding DNA Sequence Number=SeqID_4791
MKASYSVRRFYSMNLFFNAT

SEQ ID NO: 7091 - protein, 160 aa, Glycine max
  Coding DNA Sequence Number=SeqID_4792
  Gene Ontology: Mol. function=voltage-gated potassium channel activity; Cellular component=integral to membrane; Biological process=potassium ion transport
  Homolog annotation: Hit_ID=A7PF93; Match level="QueryCoverage=97%, HitCoverage=20%, E-value=8e-32, Identity=46%"; Hit description =Chromosome chr11 scaffold_13, whole genome shotgun sequence
DQVPPFHIVPFEGLFPRAEVFLEAGASVLFKDRGGNTPLHEAHTGGDRNMIKMLEVAKASQWVELSNNIHETQATPPDEIPKKRCIVFPFPPWDVQKADRKEGVVLTVPQSIEEFIKGGTNHLEIPNASCILSEQCGKIVYVGRFTNDGKLFLVSEAQNE

SEQ ID NO: 7092 - protein, 145 aa, Glycine max
  misc_feature (14)..(14): Xaa can be any naturally occurring amino acid
  misc_feature (48)..(48): Xaa can be any naturally occurring amino acid
  misc_feature (52)..(52): Xaa can be any naturally occurring amino acid
  misc_feature (98)..(98): Xaa can be any naturally occurring amino acid
  misc_feature (108)..(108): Xaa can be any naturally occurring amino acid
  misc_feature (143)..(143): Xaa can be any naturally occurring amino acid
  Coding DNA Sequence Number=SeqID_4793
YVLTSSARCPRCTXAPLFRSLSLHPDQCEAGVLHYMLIACCVRSNAWXPCGXPPLSELIPTYTTAFAASCSLLLCIPCVLRSLTRVSPLTSTACRSHXELIPTYTSVXISHLDSVCLYSLYMLYRLTRCVDCESLCCWLRVCXHA

SEQ ID NO: 7093 - protein, 176 aa, Glycine max
  misc_feature (1)..(7): Xaa can be any naturally occurring amino acid
  Coding DNA Sequence Number=SeqID_4795
XXXXXXXQHTTRLCSGGGWSGGGEGRSNSRWQEIGGALVGSAGVAVRQPLSRCLACRLQASTRGHRYSRRKLRRRAGVPGGPGGAVGRFRAVGWGCVSPRFVGVSWLCCAVSFGDLWVACGVGYLVVVGGCLMESLLFLIGLVYLLCGVLLSLCGWAPLSRDVCGHVNTLNVHFEV

SEQ ID NO: 7094 - protein, 82 aa, Glycine max
  misc_feature (8)..(8): Xaa can be any naturally occurring amino acid
  misc_feature (11)..(12): Xaa can be any naturally occurring amino acid
  misc_feature (15)..(15): Xaa can be any naturally occurring amino acid
  misc_feature (22)..(22): Xaa can be any naturally occurring amino acid
  misc_feature (26)..(26): Xaa can be any naturally occurring amino acid
  misc_feature (36)..(36): Xaa can be any naturally occurring amino acid
  misc_feature (38)..(38): Xaa can be any naturally occurring amino acid
  misc_feature (52)..(52): Xaa can be any naturally occurring amino acid
  misc_feature (56)..(56): Xaa can be any naturally occurring amino acid
  misc_feature (60)..(61): Xaa can be any naturally occurring amino acid
  misc_feature (71)..(71): Xaa can be any naturally occurring amino acid
  misc_feature (74)..(74): Xaa can be any naturally occurring amino acid
  Coding DNA Sequence Number=SeqID_4797
QLQDESDXVIXXEAXQEVTTTXYLMXTFKDEPLSPXSXITDAVKSDYGYESXGSPXSDIXXSEPTSDLWNXSFXQLFPNTLI

SEQ ID NO: 7095 - protein, 216 aa, Glycine max
  misc_feature (23)..(23): Xaa can be any naturally occurring amino acid
  misc_feature (46)..(46): Xaa can be any naturally occurring amino acid
  misc_feature (48)..(48): Xaa can be any naturally occurring amino acid
  misc_feature (56)..(56): Xaa can be any naturally occurring amino acid
  misc_feature (64)..(64): Xaa can be any naturally occurring amino acid
  misc_feature (69)..(69): Xaa can be any naturally occurring amino acid
  misc_feature (77)..(77): Xaa can be any naturally occurring amino acid
  misc_feature (120)..(120): Xaa can be any naturally occurring amino acid
  misc_feature (141)..(141): Xaa can be any naturally occurring amino acid
  Coding DNA Sequence Number=SeqID_4799
  Gene Ontology: Mol. function=sugar:hydrogen symporter activity; Cellular component=membrane; Biological process=carbohydrate transport
  Homolog annotation: Hit_ID=A9PBN5; Match level="QueryCoverage=68%, HitCoverage=43%, E-value=4e-34, Identity=55%"; Hit description =Putative uncharacterized protein
MEESFVFQWSVIRSLLSILQWWXLHVTVIIVNKWIFQKWKFKFPLXVXCVHFIWSXFGAYVGIXVAEAXPLITVEPXENRWKRTFPGHLGVRINIGRGKGGPTNFPVSFLGKKKSFPPAXIGFSWDRGEKKFWRGIWGSPXPRGGGVFLPLGKKFIFKVGGTGGALFGGWGTPKKKFFGKTFSVGRKLWANKTVYFGGLFLKKNFGRPPRRFLGGR

SEQ ID NO: 7096 - protein, 164 aa, Glycine max
  misc_feature (163)..(163): Xaa can be any naturally occurring amino acid
  Coding DNA Sequence Number=SeqID_4800
  Homolog annotation: Hit_ID=A2ZK94; Match level="QueryCoverage=92%, HitCoverage=15%, E-value=3e-22, Identity=42%"; Hit description =Putative uncharacterized protein
  Subcellular localization annotation: CTP_CleavageSite=17; ConfidenceScore=5.24e-01
LFSKTLAPHRRRNMASRGGYDGGSATGGKIRRRPPSRVAAASPYARPAAPTHPASRGGEGSGWLARLISGGASRLLSSVFRKPPPQLAAPTLSEPELVDAPCSPLPPPLENDILEEENGGGTANNLSTDNPENSPIDGDDILSSCFNGSMDLEELLKQKTFTXE

SEQ ID NO: 7097 - protein, 176 aa, Glycine max
  misc_feature (1)..(3): Xaa can be any naturally occurring amino acid
  Coding DNA Sequence Number=SeqID_361
XXXCDQLSGLKLTYDDDVVGTCQTLAAGSNKMSLSTLTSDMYTYGSQYYDMYSASSKSMSALILILSSMAENLANLIAVYTTTLMLLYNTTLSSFQDDIYSARVEVIVATILTCSITLIESIILWKRVVRRIFKHQRRDKEVLQLVPTRILLSNRYLRQYLIRNSGDILDSVKRFI

SEQ ID NO: 7098 - protein, 88 aa, Glycine max
  misc_feature (4)..(4): Xaa can be any naturally occurring amino acid
  misc_feature (6)..(6): Xaa can be any naturally occurring amino acid
  misc_feature (12)..(12): Xaa can be any naturally occurring amino acid
  misc_feature (14)..(18): Xaa can be any naturally occurring amino acid
  misc_feature (21)..(22): Xaa can be any naturally occurring amino acid
  misc_feature (24)..(24): Xaa can be any naturally occurring amino acid
  misc_feature (27)..(27): Xaa can be any naturally occurring amino acid
  misc_feature (43)..(43): Xaa can be any naturally occurring amino acid
  misc_feature (56)..(56): Xaa can be any naturally occurring amino acid
  misc_feature (58)..(58): Xaa can be any naturally occurring amino acid
  Coding DNA Sequence Number=SeqID_363
FVWXCXCGVLEXYXXXXXPPXXTXLDXKRPTTPHTHNRHTHPXLAAAAPRYDRAEXRXGVLSHEYKRAPHHSHHELNGYLSSSLSVRR

SEQ ID NO: 7099 - protein, 101 aa, Glycine max
  misc_feature (43)..(43): Xaa can be any naturally occurring amino acid
  misc_feature (55)..(55): Xaa can be any naturally occurring amino acid
  misc_feature (101)..(101): Xaa can be any naturally occurring amino acid
  Coding DNA Sequence Number=SeqID_365
PTNNMEEYPATSLPECEAFFPCMVPTFPASLYFGREQPSPVQXALKLKLHLAVSXGLVHPQRTMQRKHCCKRFSEGEVGIGLRICHHGECGERNQRLRVQX

SEQ ID NO: 7100 - protein, 144 aa, Glycine max
  misc_feature (82)..(82): Xaa can be any naturally occurring amino acid
  Coding DNA Sequence Number=SeqID_367
  Gene Ontology: Mol. function=nutrient reservoir activity; Cellular component=extracellular region; Biological process=auxin mediated signaling pathway
  Homolog annotation: Hit_ID=Q9M3Y4; Match level="QueryCoverage=100%, HitCoverage=67%, E-value=2e-40, Identity=61%"; Hit description =Germin-like protein
  Subcellular localization annotation: CTP_CleavageSite=63; ConfidenceScore=5.21e-01
IHVLFLFALVSFTSHASVNDFCVADLKGPDSPSSYQCKPPNTVTGDDFVVSGFVAGNTTNTFNAALTSAFGTDFPGVNGLGXSVARLDITKGGSNPNAHHTLGANELVIMGGRVQTLLGLITRDGTLYQEPWNPGKIEGLFHQG

SEQ ID NO: 7101 - protein, 82 aa, Glycine max
  misc_feature (33)..(33): Xaa can be any naturally occurring amino acid
  misc_feature (46)..(46): Xaa can be any naturally occurring amino acid
  misc_feature (61)..(61): Xaa can be any naturally occurring amino acid
  misc_feature (63)..(63): Xaa can be any naturally occurring amino acid
  misc_feature (65)..(65): Xaa can be any naturally occurring amino acid
  Coding DNA Sequence Number=SeqID_368
  Subcellular localization annotation: CTP_CleavageSite=53; ConfidenceScore=5.50e-01
CHNSTTLSGTLTATGFATSPYTTHRHSRDVMLXRMNQGVASRRVRXGVVIGTLAHMSEDSXLXCXRTIVLIAHCVLPANRSW

SEQ ID NO: 7102 - protein, 111 aa, Glycine max
  misc_feature (23)..(23): Xaa can be any naturally occurring amino acid
  Coding DNA Sequence Number=SeqID_370
  Gene Ontology: Mol. function=heat shock protein binding; Biological process=response to stress
  Homolog annotation: Hit_ID=A7NWU0; Match level="QueryCoverage=68%, HitCoverage=46%, E-value=5e-17, Identity=58%"; Hit description =Chromosome chr5 scaffold_2, whole genome shotgun sequence
  Pfam annotation: Domain name=DnaJ; Domain location=13-72; Score=57.6; E_value=4.2e-14; Accession=PF00226.21; Description=DnaJ domain
DLFFFLDITLHGTYYQILSVKEXYDEIRNSYRSAILHSHPDKLNGCSSDEKFLKIQKAWQVLSDAELRVVYDNDLRSSRLDGVTADELIQNCLVQLWKFSGKLFDFCTHLC

SEQ ID NO: 7103 - protein, 174 aa, Glycine max
  Coding DNA Sequence Number=SeqID_371
  Homolog annotation: Hit_ID=A8FCT2; Match level="QueryCoverage=82%, HitCoverage=68%, E-value=2e-56, Identity=83%"; Hit description =Putative uncharacterized protein ylaE
CAGQQNLTEKGEKRSMKKFLSKSLSSVVFFALAIILTFTTVAPGQASAATFKGIPFEQQQIIKELLEKNERVINILINSFVEEDNNYTFDVKKAVELGLTEEEAATAEKFLDRAAVLTIVFSESLTKNEKGKLVFDAEKAVELGLTKEEAAKFEKLFKSVIRIADLAGDALVLD

SEQ ID NO: 7104 - protein, 107 aa, Glycine max
  misc_feature (9)..(9): Xaa can be any naturally occurring amino acid
  misc_feature (36)..(36): Xaa can be any naturally occurring amino acid
  misc_feature (63)..(63): Xaa can be any naturally occurring amino acid
  Coding DNA Sequence Number=SeqID_372
RRDDIASAXRSSSVVELLFSFLSRLPWRFNTIINIXRLCHFSSLPLPHHIRARESLPHQAPQXICARVYYLLLSLPTPDTIDYQRTLAETLRVYRNLGGVSLLAGSA

SEQ ID NO: 7105 - protein, 104 aa, Glycine max
  Coding DNA Sequence Number=SeqID_4801
  Gene Ontology: Mol. function=transmembrane receptor activity; Cellular component=intrinsic to membrane; Biological process=innate immune response
  Homolog annotation: Hit_ID=Q9SCZ3; Match level="QueryCoverage=66%, HitCoverage=5%, E-value=7e-09, Identity=40%"; Hit description =Disease resistance-like protein
SITPPLSTLKNPKFPPEAFVRLNNPQFLDFGKNSPSLPQGLQSLPKELKNLLWRHYPLTCLPKQFSAEKLVILNLSCTKGEKLWPEGKVKRFPPFTKAPQFRKA

SEQ ID NO: 7106 - protein, 135 aa, Glycine max
  misc_feature (15)..(15): Xaa can be any naturally occurring amino acid
  misc_feature (80)..(80): Xaa can be any naturally occurring amino acid
  misc_feature (106)..(106): Xaa can be any naturally occurring amino acid
  Coding DNA Sequence Number=SeqID_4802
  Subcellular localization annotation: CTP_CleavageSite=79; ConfidenceScore=5.53e-01
PRTTTTVAQHENTPXQTQPISTPNNVHSRRYPRPPVVSASRDSLRLIPPLPCLSLARRALIIKNSTERLTPRTSPPSTYXSTTSHHSLYSNYYLILSNSPARRATXLRRLYTTQHVELLTTTYHRIDPYSYVARL

SEQ ID NO: 7107 - protein, 133 aa, Glycine max
  Coding DNA Sequence Number=SeqID_4804
KEIKTRHSLIMENKKRKGKDDGVLEEEEEEMMNKFYTLLRRFRDARDGRRKELEELQKSERKKKRSKVGTEQHHVWVPSFELEDFINEAEFRGQQPLRFPTSSASPSPRGGGTDKQRKNDDQHSHSLDLNLSL

SEQ ID NO: 7108 - protein, 179 aa, Glycine max
  misc_feature (55)..(55): Xaa can be any naturally occurring amino acid
  misc_feature (69)..(69): Xaa can be any naturally occurring amino acid
  misc_feature (105)..(105): Xaa can be any naturally occurring amino acid
  Coding DNA Sequence Number=SeqID_4806
  Gene Ontology: Mol. function=structural molecule activity; Cellular component=protein complex; Biological process=microtubule-based movement
  Homolog annotation: Hit_ID=Q002G1; Match level="QueryCoverage=98%, HitCoverage=45%, E-value=9e-29, Identity=40%"; Hit description=Alpha tubulin
  Pfam annotation: Domain name=Tubulin_C; Domain location=34-172; Score= -2.4; E_value=0.0036; Accession=PF03953.7; Description=TubulinFtsZ family, C-terminal domain
IFLEIDRPIYINLNRVSCPTVADLINSLRTDGAMNADITEFSSIRSVLPKEHVLXSTHALVIYADKGSXDKKEGTDITDVEIYPTSMTAKSHPRYSKYKACRLMXCGDGLPKEAHAADDTPKTKRTGENVERRPTGSECGIKYHPASVDPGGELVTGLGGGGLTSPNHAVCEGYPPIDQ

SEQ ID NO: 7109 - protein, 94 aa, Glycine max
  misc_feature (14)..(14): Xaa can be any naturally occurring amino acid
  misc_feature (84)..(84): Xaa can be any naturally occurring amino acid
  Coding DNA Sequence Number=SeqID_4807
  Gene Ontology: Mol. function=structural constituent of ribosome; Cellular component=intracellular; Biological process=translation
  Homolog annotation: Hit_ID=Q2HVJ1; Match level="QueryCoverage=76%, HitCoverage=67%, E-value=3e-22, Identity=65%"; Hit description =Ribosomal protein S21e
  Pfam annotation: Domain name=Ribosomal_S21e; Domain location=13-93; Score=112.0; E_value=1.8e-30; Accession=PF01249.9; Description =Ribosomal protein S21e
ISVKSLYNTQPKMXNEEGHITKLYIPKKCSATNQLITTKDHTSVQVNIEHVDENGIYNGHFSTFALYSFIHTQGDTNNTLDHLXQKKKVKVKQQ

SEQ ID NO: 7110 - protein, 131 aa, Glycine max
  misc_feature (23)..(24): Xaa can be any naturally occurring amino acid
  misc_feature (57)..(57): Xaa can be any naturally occurring amino acid
  misc_feature (130)..(130): Xaa can be any naturally occurring amino acid
  Coding DNA Sequence Number=SeqID_4808
FVCSHHHCVCVAISILRRAVSIXXCPPHAATLCYIYMAPRRRDPFHIHIVHLSTHTXIRRRCGRDGIQRSAYTYELRPSHGVTCVSRAVGIYLIYCCVARCRRFVFTVANTFLHPSPARCLHHTLFVAFXI

SEQ ID NO: 7111 - protein, 118 aa, Glycine max
  Coding DNA Sequence Number=SeqID_4810
  Gene Ontology: Mol. function=translation elongation factor activity; Cellular component=mitochondrion; Biological process=translational elongation
  Homolog annotation: Hit_ID=A5BV56; Match level="QueryCoverage=86%, HitCoverage=22%, E-value=6e-42, Identity=81%"; Hit description =Elongation factor Tu
  Pfam annotation: Domain name=GTP_EFTU; Domain location=20-118; Score=- 30.3; E_value=7.7e-06; Accession=PF00009.17; Description=Elongation factor Tu GTP binding domain
SSSSSSNPWWRSMATFTISKPDVNDGTMGLVDHGKTTLTAAITSVLADEGKANTVAFDEIDYAPEERNRGITIATAHREYETAKRDYAHVDCPGHADYFRNMITVAAQMIEVYLGVPA

SEQ ID NO: 7112 - protein, 208 aa, Glycine max
  Coding DNA Sequence Number=SeqID_4811
  Gene Ontology: Mol. function=protein binding; Biological process =defense response
  Homolog annotation: Hit_ID=A5AWL3; Match level="QueryCoverage=94%, HitCoverage=12%, E-value=5e-22, Identity=37%"; Hit description =Putative uncharacterized protein
SPSRSNFIVFNNNVDEDGLVSQLKVICPDSLPELVSIGSENSGIVPFLRNLETLQVISCFSSINLVPCTVSFSNLTYLKVESCKSLLYLFTSSTARSLGQLKTMKISWCDSIEEIVSSTEEGDESDENEIIFQQLNCLKLIRLGKLRRFYKGSLSFPSLEEFTVWRCERMESLCAGTVKTDKLLQVNISLGGDVIPLETDLNSAMQNR

SEQ ID NO: 7113 - protein, 145 aa, Glycine max; identical to SEQ ID NO: 6649
  misc_feature (11)..(11): Xaa can be any naturally occurring amino acid
  misc_feature (33)..(33): Xaa can be any naturally occurring amino acid
  misc_feature (38)..(38): Xaa can be any naturally occurring amino acid
  misc_feature (42)..(42): Xaa can be any naturally occurring amino acid
  misc_feature (44)..(44): Xaa can be any naturally occurring amino acid
  misc_feature (72)..(72): Xaa can be any naturally occurring amino acid
  misc_feature (89)..(89): Xaa can be any naturally occurring amino acid
  misc_feature (110)..(110): Xaa can be any naturally occurring amino acid
  Coding DNA Sequence Number=SeqID_4812

SEQ ID NO: 7114 - protein, 62 aa, Glycine max
  Coding DNA Sequence Number=SeqID_4813
IKSHHLSYHTFITSLSLPPPPSQFCEIISFLGFLPFKALLGLGESLSYVSPCKEALLRFDDK

SEQ ID NO: 7115 - protein, 195 aa, Glycine max
  misc_feature (8)..(8): Xaa can be any naturally occurring amino acid
  misc_feature (28)..(28): Xaa can be any naturally occurring amino acid
  misc_feature (30)..(30): Xaa can be any naturally occurring amino acid
  misc_feature (33)..(33): Xaa can be any naturally occurring amino acid
  misc_feature (36)..(36): Xaa can be any naturally occurring amino acid
  misc_feature (38)..(38): Xaa can be any naturally occurring amino acid
  misc_feature (47)..(48): Xaa can be any naturally occurring amino acid
  misc_feature (50)..(50): Xaa can be any naturally occurring amino acid
  misc_feature (61)..(61): Xaa can be any naturally occurring amino acid
  misc_feature (63)..(63): Xaa can be any naturally occurring amino acid
  misc_feature (65)..(65): Xaa can be any naturally occurring amino acid
  misc_feature (67)..(69): Xaa can be any naturally occurring amino acid
  misc_feature (77)..(77): Xaa can be any naturally occurring amino acid
  misc_feature (81)..(81): Xaa can be any naturally occurring amino acid
  misc_feature (83)..(83): Xaa can be any naturally occurring amino acid
  misc_feature (101)..(101): Xaa can be any naturally occurring amino acid
  misc_feature (104)..(105): Xaa can be any naturally occurring amino acid
  misc_feature (110)..(110): Xaa can be any naturally occurring amino acid
  misc_feature (114)..(114): Xaa can be any naturally occurring amino acid
  misc_feature (129)..(129): Xaa can be any naturally occurring amino acid
  misc_feature (131)..(131): Xaa can be any naturally occurring amino acid
  misc_feature (138)..(139): Xaa can be any naturally occurring amino acid
  misc_feature (149)..(149): Xaa can be any naturally occurring amino acid
  misc_feature (153)..(153): Xaa can be any naturally occurring amino acid
  misc_feature (155)..(155): Xaa can be any naturally occurring amino acid
  misc_feature (162)..(162): Xaa can be any naturally occurring amino acid
  misc_feature (168)..(168): Xaa can be any naturally occurring amino acid
  misc_feature (170)..(170): Xaa can be any naturally occurring amino acid
  misc_feature (173)..(173): Xaa can be any naturally occurring amino acid
  misc_feature (175)..(175): Xaa can be any naturally occurring amino acid
  misc_feature (186)..(186): Xaa can be any naturally occurring amino acid
  misc_feature (189)..(189): Xaa can be any naturally occurring amino acid
  misc_feature (194)..(194): Xaa can be any naturally occurring amino acid
  Coding DNA Sequence Number=SeqID_4815
FSTLYTYXMMRSDVSSDCVVFGSPPPPXSXAVXTIXRXCSLPLIYLXXEXTDMHIALHITXAXRXTXXXLLSQPHLXDDRXGXCVRTVYYGMARTRTYTIXEGXXGPHLXLAYXTLHSAALFICAIMSXCXIAVIYLXXGVCTTYSTRXRSQXIXLLHILHXLYYLWXRXETXEXMDALNCGDILXSHXFPVRXR

SEQ ID NO: 7116 - protein, 152 aa, Glycine max
  misc_feature (30)..(30): Xaa can be any naturally occurring amino acid
  misc_feature (48)..(48): Xaa can be any naturally occurring amino acid
  misc_feature (113)..(113): Xaa can be any naturally occurring amino acid
  Coding DNA Sequence Number=SeqID_4817
  Subcellular localization annotation: CTP_CleavageSite=53; ConfidenceScore=5.04e-01
HIDLPLLIYLPYLLSLCFGVDFFSLSLYVXPPLRRRSFAVPLSLFLGXCYLSPSMTCSSDIPHVYYNRFACGDTARLCIGFVVTTDHECPHLSACMDFYSRSLSFRSTTSVPXGLALPSATPRTASAYNNDYLTTSSHPHYLIAVGVRRAPS

SEQ ID NO: 7117 - protein, 183 aa, Glycine max
  Coding DNA Sequence Number=SeqID_4819
TRRLVTMAASHVNTNGELLDLYQLPFVLGVQRNIRLSSLGELSTAPDMFEQLHFLTRTRQWTCAQMEVLRGYSWLAGWLVRLRDDVLEPLLPVHIPNPVLHGQQGFLPVITRIMHEAIQLMHAKKDIGFKPVQLGTRLNIFSEVLIDLAEKVLGDGLSVAQFQLHIPHLIISINMLLHAQMAF

SEQ ID NO: 7118 - protein, 128 aa, Glycine max
  misc_feature (31)..(31): Xaa can be any naturally occurring amino acid
  misc_feature (123)..(123): Xaa can be any naturally occurring amino acid
  Coding DNA Sequence Number=SeqID_4821
PRLIYTPHDIPLQSTALTSSNTISQPVDTLXRSMTADMTTHIRPIRLTKSDKHIKCDYMTESHTVQHTHKNGILIETYISTTYDAAPHCMKTVRHRHIRIIKQTREIEQYDTVSVGDYVISLXVDIII

SEQ ID NO: 7119 - protein, 106 aa, Glycine max
  misc_feature (4)..(4): Xaa can be any naturally occurring amino acid
  misc_feature (6)..(6): Xaa can be any naturally occurring amino acid
  misc_feature (21)..(22): Xaa can be any naturally occurring amino acid
  misc_feature (39)..(40): Xaa can be any naturally occurring amino acid
  misc_feature (45)..(45): Xaa can be any naturally occurring amino acid
  misc_feature (49)..(49): Xaa can be any naturally occurring amino acid
  misc_feature (58)..(58): Xaa can be any naturally occurring amino acid
  misc_feature (60)..(60): Xaa can be any naturally occurring amino acid
  misc_feature (73)..(75): Xaa can be any naturally occurring amino acid
  misc_feature (90)..(92): Xaa can be any naturally occurring amino acid
  misc_feature (94)..(94): Xaa can be any naturally occurring amino acid
  misc_feature (96)..(96): Xaa can be any naturally occurring amino acid
  Coding DNA Sequence Number=SeqID_4823
  Subcellular localization annotation: CTP_CleavageSite=45; ConfidenceScore=5.12e-01
AWSXAXQRGDSSPLVHIRRDXXYKSFVVGLFRLRSLCCXXGLGCXGGEXRSGTMSLRXFXFILSLPQEGYISXXXMFTIFKQILHICIFXXXFXIXLWPYFLYFYI

SEQ ID NO: 7120 - protein, 167 aa, Glycine max
  Coding DNA Sequence Number=SeqID_4825
  Homolog annotation: Hit_ID=A7Q0B3; Match level="QueryCoverage=98%, HitCoverage=98%, E-value=2e-54, Identity=55%"; Hit description =Chromosome chr7 scaffold_42, whole genome shotgun sequence
  Pfam annotation: Domain name=Nop16; Domain location=4-156; Score =138.3; E_value=2.2e-38; Accession=PF02319.11; Description=Ribosome biogenesis protein Nop16
  Subcellular localization annotation: CTP_CleavageSite=16; ConfidenceScore=5.06e-01
MGRSRRKYKQSRTKVRVGLPKKNPRLFKPSFSVPPKLLRTLAEEPQWDDQGTVNSNYSSFGVLSDPNSLTEPSPDPQTFDSGSDLEEDDLKSALGKKRRDGRSAPPQPLTAMQRIHISRLVDKYGNDYQSMLMDIKLNPMQHSIATLQKLCMRYHIYQNKNPLLKAK

SEQ ID NO: 7121 - protein, 168 aa, Glycine max
  misc_feature (22)..(22): Xaa can be any naturally occurring amino acid
  misc_feature (35)..(35): Xaa can be any naturally occurring amino acid
  misc_feature (42)..(42): Xaa can be any naturally occurring amino acid
  misc_feature (52)..(52): Xaa can be any naturally occurring amino acid
  misc_feature (61)..(62): Xaa can be any naturally occurring amino acid
  misc_feature (89)..(89): Xaa can be any naturally occurring amino acid
  misc_feature (112)..(112): Xaa can be any naturally occurring amino acid
  misc_feature (116)..(116): Xaa can be any naturally occurring amino acid
  misc_feature (120)..(120): Xaa can be any naturally occurring amino acid
  misc_feature (122)..(122): Xaa can be any naturally occurring amino acid
  misc_feature (134)..(135): Xaa can be any naturally occurring amino acid
  misc_feature (138)..(138): Xaa can be any naturally occurring amino acid
  misc_feature (168)..(168): Xaa can be any naturally occurring amino acid
  Coding DNA Sequence Number=SeqID_4826
SITHLARIARLASLFIFFLSLXSYLHHILLTHDCXFVHHLLXHHHTSTRIVXRRLCDSLQXXRCSLVVGVCCAIRDALCEREGAGARDXKSQRSLGAGSQSLPLHLTIHSSXHTLXIDDXSXPPTHTYPVSRIXXALXAAQSSVPTDSYLTRHTRTRDDSHARHHDSX

SEQ ID NO: 7122 - protein, 64 aa, Glycine max
  Coding DNA Sequence Number=SeqID_4828
ARGLVPNSARGNYISILGPCKCSLLLSAVWIIIKATVEVYHHITEHLFLMCMLSLIFMFRLSKS

SEQ ID NO: 7123 - protein, 137 aa, Glycine max
  Coding DNA Sequence Number=SeqID_4830
THCSSLYPYLPPRLRLKLPCCALPYPGAGFRLLPRPYFMVPGPIGYNILLEPPGSGSGRRPYTVAGRPPPFFFWRKKFFIHLRRSSSIDSCSVCLPFKAFRSDLGLFHLKSKKLGSRINRRILYGLGGIFHPTRAIG

SEQ ID NO: 7124 - protein, 92 aa, Glycine max
  misc_feature (71)..(71): Xaa can be any naturally occurring amino acid
  Coding DNA Sequence Number=SeqID_4832
PCRGYAHLSHTSARPRGRAAPRHSSTYICFLIDFDTCVYCYFFSSLFAYLLIEWLQLRRRSVKGRVDRVTXVMCRGDHRSERFYIDLLTDTL

SEQ ID NO: 7125 - protein, 101 aa, Glycine max
  Coding DNA Sequence Number=SeqID_4834
  Gene Ontology: Biological process=response to other organism
  Homolog annotation: Hit_ID=Q9FJ65; Match level="QueryCoverage=98%, HitCoverage=99%, E-value=4e-30, Identity=58%"; Hit description =Arabidopsis thaliana genomic DNA, chromosome 5, P1 clone:MTE17
  Pfam annotation: Domain name=Tryp_alpha_amyl; Domain location=32-99; Score=16.1; E_value=0.0085; Accession=PF00234.12; Description =Protease inhibitorseed storageLTP f
MGKNNTKILITALVMVVTAAMMIEEATSIPICGVNTNDLKKCSPAVTGNNPPPPTPQCCKVAKAANLECLCPYFTRSALDPAKIKALGTNCGITKKPSCLP

SEQ ID NO: 7126 - protein, 403 aa, Glycine max
  Coding DNA Sequence Number=SeqID_4835
  Gene Ontology: Mol. function=nucleic acid binding
  Homolog annotation: Hit_ID=Q3E877; Match level="QueryCoverage=39%, HitCoverage=41%, E-value=4e-18, Identity=37%"; Hit description =Uncharacterized protein At5g61080.1
  Pfam annotation: Domain name=PHD; Domain location=4-52; Score=11.0; E_ value=0.00069; Accession=PF00628.19; Description=PHD-finger
MRPICETCGNQGWKGLLVACSKCRIACEHRYCMDKVSFEASVDFVCADCSKRPVQNRLSTASIKAAPSRIEKGKARVESSNPVPRWKKIPESSKMRLISPEEVRKLSSSGGNNSTFKVPKPVPARSPTGLTKLACFPRSRSLSSTVVARKTNHMLLPPPKRAESPRPLQIRSGVMQQSSKRQAVVEGSKLKVGGGVKDLGSKEICRSILSEKLLQLLPHRPALPPIWKGRIVDSATPSEFNGLFWAQPASVIRKKAYNLSKTIPVVLKVELVPIGSLLNDLFANRKPALSDVEMYIFPDDKNTIRFKEEHAYLFETMKRRNAMIRINVKDKPFLIFSSKVLDKSSQIIIEMQKKTKNFLWGVFLVTKKSLALVPGTSNQAAQRFDAGDVVDNTAKRQYRRERV

SEQ ID NO: 7127 - protein, 108 aa, Glycine max
  Coding DNA Sequence Number=SeqID_4836
  Gene Ontology: Mol. function=hydroxymethyl-, formyl- and related transferase activity; Biological process='de novo' IMP biosynthetic process
  Homolog annotation: Hit_ID=A7R2D1; Match level="QueryCoverage=65%, HitCoverage=32%, E-value=1e-20, Identity=71%"; Hit description =Chromosome undetermined scaffold_419, whole genome shotgun sequence
MTNIIWRYVKWFNLIHWCWEYFSKIGCRTLRKSQTAEKLTAVTSQYETTVLFGCHIIKQMVERVSHRDNLQSFVQKSENLEKQCLSKAIRSYCELRVLPYEEKRTVVF

SEQ ID NO: 7128 - protein, 96 aa, Glycine max; identical to SEQ ID NO: 6665
  Coding DNA Sequence Number=SeqID_4837

SEQ ID NO: 7129 - protein, 91 aa, Glycine max
  misc_feature (33)..(33): Xaa can be any naturally occurring amino acid
  misc_feature (42)..(42): Xaa can be any naturally occurring amino acid
  misc_feature (45)..(45): Xaa can be any naturally occurring amino acid
  Coding DNA Sequence Number=SeqID_4839
  Homolog annotation: Hit_ID=A9PBY9; Match level="QueryCoverage=65%, HitCoverage=35%, E-value=8e-21, Identity=80%"; Hit description =Putative uncharacterized protein
  Pfam annotation: Domain name=efhand; Domain location=42-70; Score =0.8; E_value=15; Accession=PF00036.22; Description=EF hand
  Pfam annotation: Domain name=efhand; Domain location=6-34; Score =15.9; E_value=0.15; Accession=PF00036.22; Description=EF hand
  Pfam module annotation: Pfam domain module=efhand::efhand; Domain location=42-70::6-34
MENRVILQEWFDRVDSEKSGSITAVQLKTALAXGNLEFPLSXVQXMIRMYDFDRNGTMSFSGISIPYTPFFLSLSLFLPSILKFVDSTTSF

SEQ ID NO: 7130 - protein, 161 aa, Glycine max; identical to SEQ ID NO: 6668
  misc_feature (3)..(3): Xaa can be any naturally occurring amino acid
  misc_feature (7)..(7): Xaa can be any naturally occurring amino acid
  misc_feature (17)..(17): Xaa can be any naturally occurring amino acid
  misc_feature (47)..(47): Xaa can be any naturally occurring amino acid
  misc_feature (50)..(50): Xaa can be any naturally occurring amino acid
  misc_feature (52)..(52): Xaa can be any naturally occurring amino acid
  misc_feature (60)..(60): Xaa can be any naturally occurring amino acid
  misc_feature (67)..(67): Xaa can be any naturally occurring amino acid
  misc_feature (69)..(69): Xaa can be any naturally occurring amino acid
  misc_feature (77)..(77): Xaa can be any naturally occurring amino acid
  misc_feature (79)..(79): Xaa can be any naturally occurring amino acid
  misc_feature (87)..(89): Xaa can be any naturally occurring amino acid
  misc_feature (115)..(115): Xaa can be any naturally occurring amino acid
  misc_feature (118)..(119): Xaa can be any naturally occurring amino acid
  misc_feature (136)..(136): Xaa can be any naturally occurring amino acid
  misc_feature (139)..(139): Xaa can be any naturally occurring amino acid
  misc_feature (142)..(142): Xaa can be any naturally occurring amino acid
  misc_feature (151)..(151): Xaa can be any naturally occurring amino acid
  misc_feature (160)..(160): Xaa can be any naturally occurring amino acid
  Coding DNA Sequence Number=SeqID_4840

SEQ ID NO: 7131 - protein, 101 aa, Glycine max
  misc_feature (55)..(55): Xaa can be any naturally occurring amino acid
  Coding DNA Sequence Number=SeqID_4842
ETRNVSREQTHQTFVTLFDYSGISSVALSRLIRSVFIRVLLFLSLILLRQKISLXHLPPSYCGKQARPSPRAPQSPNSSNNSNQYYIHLIRIKSELKINTS

SEQ ID NO: 7132 - protein, 93 aa, Glycine max
  misc_feature (2)..(2): Xaa can be any naturally occurring amino acid
  misc_feature (66)..(66): Xaa can be any naturally occurring amino acid
  Coding DNA Sequence Number=SeqID_4844
LXLTSDLLSSNPSRCVAMRCESSRYMNRYVLVDTSLEESHPSCRISLALSSLAFILLAVTQELLVXELELLSSVVYAVECESYAQIYISDGCI

SEQ ID NO: 7133 - protein, 126 aa, Glycine max
  misc_feature (5)..(5): Xaa can be any naturally occurring amino acid
  misc_feature (24)..(24): Xaa can be any naturally occurring amino acid
  misc_feature (26)..(26): Xaa can be any naturally occurring amino acid
  misc_feature (40)..(40): Xaa can be any naturally occurring amino acid
  misc_feature (42)..(42): Xaa can be any naturally occurring amino acid
  misc_feature (65)..(65): Xaa can be any naturally occurring amino acid
  misc_feature (74)..(74): Xaa can be any naturally occurring amino acid
  misc_feature (82)..(82): Xaa can be any naturally occurring amino acid
  misc_feature (90)..(90): Xaa can be any naturally occurring amino acid
  misc_feature (107)..(107): Xaa can be any naturally occurring amino acid
  misc_feature (114)..(114): Xaa can be any naturally occurring amino acid
  Coding DNA Sequence Number=SeqID_4846
ACRIXDCAHLSNTLAQTAASPTRXRXPPTKRCEENIYTQXAXEYILASDGGEMDDAAPSIPLHYXLLSQSHYIXFICRLYAXQRRVVCFXYIEDVRQSTGATSRGVXASAAARXGGGRGRAALHTT

SEQ ID NO: 7134 - protein, 73 aa, Glycine max
  Coding DNA Sequence Number=SeqID_4848
  Homolog annotation: Hit_ID=A1DLL7; Match level="QueryCoverage=95%, HitCoverage=97%, E-value=2e-11, Identity=41%"; Hit description =Putative uncharacterized protein
MGGVVSCIKSCLQTIGDAIMAVIGGVGRILQAIIGAIVKFCGIIVSFLTCGYCGSKGGRTKRRGHSHMKSTRV

SEQ ID NO: 7135 - protein, 157 aa, Glycine max
  misc_feature (12)..(12): Xaa can be any naturally occurring amino acid
  misc_feature (18)..(18): Xaa can be any naturally occurring amino acid
  misc_feature (27)..(29): Xaa can be any naturally occurring amino acid
  misc_feature (32)..(32): Xaa can be any naturally occurring amino acid
  misc_feature (35)..(37): Xaa can be any naturally occurring amino acid
  misc_feature (46)..(49): Xaa can be any naturally occurring amino acid
  misc_feature (51)..(52): Xaa can be any naturally occurring amino acid
  misc_feature (55)..(56): Xaa can be any naturally occurring amino acid
  misc_feature (58)..(60): Xaa can be any naturally occurring amino acid
  misc_feature (63)..(67): Xaa can be any naturally occurring amino acid
  misc_feature (69)..(69): Xaa can be any naturally occurring amino acid
  misc_feature (71)..(71): Xaa can be any naturally occurring amino acid
  misc_feature (76)..(76): Xaa can be any naturally occurring amino acid
  misc_feature (79)..(80): Xaa can be any naturally occurring amino acid
  misc_feature (85)..(92): Xaa can be any naturally occurring amino acid
  misc_feature (94)..(96): Xaa can be any naturally occurring amino acid
  misc_feature (98)..(99): Xaa can be any naturally occurring amino acid
  misc_feature (101)..(105): Xaa can be any naturally occurring amino acid
  misc_feature (111)..(112): Xaa can be any naturally occurring amino acid
  misc_feature (114)..(115): Xaa can be any naturally occurring amino acid
  misc_feature (117)..(120): Xaa can be any naturally occurring amino acid
  misc_feature (122)..(122): Xaa can be any naturally occurring amino acid
  misc_feature (124)..(127): Xaa can be any naturally occurring amino acid
  misc_feature (129)..(132): Xaa can be any naturally occurring amino acid
  misc_feature (137)..(137): Xaa can be any naturally occurring amino acid
  misc_feature (139)..(144): Xaa can be any naturally occurring amino acid
  misc_feature (147)..(149): Xaa can be any naturally occurring amino acid
  misc_feature (152)..(153): Xaa can be any naturally occurring amino acid
  misc_feature (155)..(155): Xaa can be any naturally occurring amino acid
  misc_feature (157)..(157): Xaa can be any naturally occurring amino acid
  Coding DNA Sequence Number=SeqID_4849
VGAMGQEASHDXMRSLQXEEELGAPPXXXLDXPAXXXHSTREGPRXXXXGXXKTXXGXXXAKXXXXXKXRXFFFFXPPXXGGGGXXXXXXXXEXXXGXXKXXXXXGRGGGXXSXXPXXXXPXGXXXXAXXXXRAGPXKXXXXXXRRXXXPRXXPXTX

SEQ ID NO: 7136 - protein, 314 aa, Glycine max
  Coding DNA Sequence Number=SeqID_4851
  Gene Ontology: Mol. function=phosphoprotein phosphatase activity; Cellular component=cytoplasm; Biological process=negative regulation of tyrosine phosphorylation of Stat3 protein
  Homolog annotation: Hit_ID=P48578; Match level="QueryCoverage=100%, HitCoverage=100%, E-value=1e-177, Identity=94%"; Hit description =Serine/threonine-protein phosphatase PP2A-3 catalytic subunit
  Pfam annotation: Domain name=Metallophos; Domain location=55-250; Score=140.7; E_value=4.2e-39; Accession=PF00149.18; Description =Calcineurin-like phosphoesterase
MGANSLPSAESNFDLDEQISQLMQCKPLSEHQVRVLCEKAKEILMEESNVQPVKSPVTICGDIHGQFHDLAELFRIGGKCPDTNYLFMGDYVDRGYYSVETVTLLVSLKVRYPQRITILRGNHESRQITQVYGFYDECLRKYGNASVWKIFTDLFDFFPLTALVESEIFCLHGGLSPSIETLDNIRNFDRVQEVPHEGPMCDLLWSDPDDRCGWGISPRGAGYTFGQDISEQFNHSNKLKLIARAHQLVMDGFNWAHEQKVVTIFSAPNYCYRCGNMASILEVDDSKGHTFIQFDPAPRRGEPDVTRRTPDYFL

SEQ ID NO: 7137 - protein, 128 aa, Glycine max; identical to SEQ ID NO: 6675
  Coding DNA Sequence Number=SeqID_4852

SEQ ID NO: 7138 - protein, 100 aa, Glycine max; identical to SEQ ID NO: 6678
  misc_feature (36)..(36): Xaa can be any naturally occurring amino acid
  Coding DNA Sequence Number=SeqID_4854

SEQ ID NO: 7139 - protein, 393 aa, Glycine max
  Coding DNA Sequence Number=SeqID_4856
  Gene Ontology: Mol. function=oxidoreductase activity, acting on paired donors, with oxidation of a pair of donors resulting in the reduction of molecular oxygen to two molecules of water; Cellular component=membrane; ...
  Gene Ontology: Cellular component=Biological process=lipid metabolic process
  Homolog annotation: Hit_ID=A4HQL7; Match level="QueryCoverage=96%, HitCoverage=91%, E-value=3e-58, Identity=31%"; Hit description =Delta8 fatty acid desaturase-like protein
  Pfam annotation: Domain name=Cyt-b5; Domain location=1-59; Score=7.9; E_value=0.021; Accession=PF00173.18; Description=Cytochrome b5-like HemeSteroid bindin
  Pfam annotation: Domain name=FA_desaturase; Domain location=121-360; Score=96.6; E_value=8e-26; Accession=PF00487.14; Description=Fatty acid desaturase
  Pfam module annotation: Pfam domain module=Cyt-b5::FA_desaturase; Domain location=1-59::121-360
MASSNKIHVVIDNKLYDLTKFGKTHPGGSLILENFHDCDVTDYFYAIHSKQAQKMLKNMPSSDIAEEDKVPQTDYLKLLFQLEKTDLFKADYVVEFVQIFHTIVLFFLATWYGQTYPVFSAICLGFGTLIGGWVGHQCDHQRDNIMRDVNLVYATVCDGLSPHWWSTKHNRHHLSTNETEHDGDIQLFPFIYLWTPKKDQDSWNRAIQHIYFTALYTILQIKWQIDSVQWAISQRNYKEMVGLAIHWAWYIFFLPWQVWTLGVLIAGTISAFVVTASHQAEHKYEGKKEFEGEAANVRRSKYQIHDYFTHQVVTTRNIDLHNWFLNYICGGMQYQIEHHVFPRIPLYKLPLVKGVVQEYCQKHGVEYRDEGFMDIMMRNYYHIETIAKVKAQA

SEQ ID NO: 7140 - protein, 109 aa, Glycine max
  misc_feature (1)..(1): Xaa can be any naturally occurring amino acid
  misc_feature (18)..(18): Xaa can be any naturally occurring amino acid
  misc_feature (21)..(21): Xaa can be any naturally occurring amino acid
  misc_feature (40)..(40): Xaa can be any naturally occurring amino acid
  misc_feature (53)..(54): Xaa can be any naturally occurring amino acid
  misc_feature (56)..(56): Xaa can be any naturally occurring amino acid
  misc_feature (59)..(59): Xaa can be any naturally occurring amino acid
  misc_feature (77)..(79): Xaa can be any naturally occurring amino acid
  misc_feature (100)..(100): Xaa can be any naturally occurring amino acid
  Coding DNA Sequence Number=SeqID_4857
XSSGTIARVQIVIRCAVXSSXRRTTHLSMNVRVVHISDTXLSALTSRDTHYIXXLXTLXRLCRRADAKMTIVYHKRXXXLTRRPRRCVACAILSSTDRKXMRYMSVLRT

SEQ ID NO: 7141 - protein, 84 aa, Glycine max
  misc_feature (36)..(45): Xaa can be any naturally occurring amino acid
  Coding DNA Sequence Number=SeqID_4859
  Gene Ontology: Mol. function=ATP-dependent helicase activity
  Homolog annotation: Hit_ID=A7Q2K9; Match level="QueryCoverage=92%, HitCoverage=6%, E-value=3e-20, Identity=67%"; Hit description =Chromosome chr1 scaffold_46, whole genome shotgun sequence
ACTRRKEVKLICLSATVANPDELAGWIGQILRLCCXXXXXXXXXXGETELVTSSKRPVPLTWHFSLKNFLSPLLNEKGTHMNRC

SEQ ID NO: 7142 - protein, 194 aa, Glycine max
  misc_feature (3)..(4): Xaa can be any naturally occurring amino acid
  misc_feature (6)..(6): Xaa can be any naturally occurring amino acid
  misc_feature (8)..(8): Xaa can be any naturally occurring amino acid
  misc_feature (55)..(55): Xaa can be any naturally occurring amino acid
  misc_feature (74)..(74): Xaa can be any naturally occurring amino acid
  misc_feature (80)..(80): Xaa can be any naturally occurring amino acid
  misc_feature (82)..(83): Xaa can be any naturally occurring amino acid
  misc_feature (86)..(86): Xaa can be any naturally occurring amino acid
  misc_feature (88)..(89): Xaa can be any naturally occurring amino acid
  misc_feature (91)..(91): Xaa can be any naturally occurring amino acid
  misc_feature (101)..(101): Xaa can be any naturally occurring amino acid
  misc_feature (115)..(115): Xaa can be any naturally occurring amino acid
  misc_feature (123)..(123): Xaa can be any naturally occurring amino acid
  misc_feature (125)..(125): Xaa can be any naturally occurring amino acid
  misc_feature (127)..(129): Xaa can be any naturally occurring amino acid
  misc_feature (138)..(138): Xaa can be any naturally occurring amino acid
  misc_feature (140)..(141): Xaa can be any naturally occurring amino acid
  misc_feature (144)..(144): Xaa can be any naturally occurring amino acid
  misc_feature (146)..(147): Xaa can be any naturally occurring amino acid
  misc_feature (149)..(149): Xaa can be any naturally occurring amino acid
  misc_feature (154)..(154): Xaa can be any naturally occurring amino acid
  misc_feature (160)..(161): Xaa can be any naturally occurring amino acid
  misc_feature (163)..(163): Xaa can be any naturally occurring amino acid
  misc_feature (165)..(165): Xaa can be any naturally occurring amino acid
  misc_feature (179)..(179): Xaa can be any naturally occurring amino acid
  misc_feature (182)..(182): Xaa can be any naturally occurring amino acid
  Coding DNA Sequence Number=SeqID_4860
VVXXGXRXLDLLAPQERISHITRSPRPAVAPCVLLIPNLCAVARLPTRGGTARFXALAQAWRNDNKIISFTLSXLSLLCXHXXSPXSXXLXARSFRSRGVXLAFLYSGGAKTYDXAPLSRCAXPXSXXXSPRSRQPSXLXXRAXVXXLXSRSGXRPSRPXXRXRXRLLSSSLSPCLRLXSRXVSVVLVCLRRVA

SEQ ID NO: 7143 - protein, 197 aa, Glycine max
  misc_feature (3)..(7): Xaa can be any naturally occurring amino acid
  misc_feature (9)..(13): Xaa can be any naturally occurring amino acid
  misc_feature (15)..(19): Xaa can be any naturally occurring amino acid
  misc_feature (24)..(24): Xaa can be any naturally occurring amino acid
  misc_feature (26)..(26): Xaa can be any naturally occurring amino acid
  misc_feature (29)..(29): Xaa can be any naturally occurring amino acid
  Coding DNA Sequence Number=SeqID_4861
  Gene Ontology: Mol. function=structural molecule activity; Cellular component=flagellin-based flagellum part; Biological process =flagellum organization and biogenesis
  Homolog annotation: Hit_ID=Q3J8L4; Match level="QueryCoverage=83%, HitCoverage=67%, E-value=2e-37, Identity=47%"; Hit description =Putative uncharacterized protein
  Subcellular localization annotation: CTP_CleavageSite=44; ConfidenceScore=5.21e-01
KTXXXXXVXXXXXKXXXXXRRNNXNXANXSTTGFKADLSAFQSRAVTGPGYASRVYATDNTVGWDHGVGAIEQTGNPLDLAIHGDGFIAVQDVTGNEAYTRAGDLHVDPNGQLLTATGLPVMGDNGPISVPPHSSISVGRDGTMSIVPLGQTPNTISTVARVKLVNPALDSIQRGNDGLFRANSGQPLEGGPGTQFN

SEQ ID NO: 7144 - protein, 206 aa, Glycine max
  misc_feature (196)..(197): Xaa can be any naturally occurring amino acid
  misc_feature (206)..(206): Xaa can be any naturally occurring amino acid
  Coding DNA Sequence Number=SeqID_4862
  Homolog annotation: Hit_ID=A0DZN6; Match level="QueryCoverage=94%, HitCoverage=35%, E-value=5e-52, Identity=55%"; Hit description =Chromosome undetermined scaffold_70, whole genome shotgun sequence
SSQLRRPPPPPESDRKAYAEETIANVKKQRQVIENLKNENMALRETIARINDQQTQLTQNLAAKNASFDTMRAEYEMSIENEQMKIREYDRNIEAFRDRIKSQKKDLGGVNAGSENQNALGKQIKILENRLDKANQKFNEAIATNKSLRQNIDSLRRERVIFDNLYKKLEKELHEKRKNMASIIESANSAYEERDXXNDQIQNLKX

SEQ ID NO: 7145 - protein, 116 aa, Glycine max; identical to SEQ ID NO: 6683
  misc_feature (1)..(1): Xaa can be any naturally occurring amino acid
  misc_feature (99)..(99): Xaa can be any naturally occurring amino acid
  Coding DNA Sequence Number=SeqID_4863

SEQ ID NO: 7146 - protein, 114 aa, Glycine max
  Coding DNA Sequence Number=SeqID_4865
  Homolog annotation: Hit_ID=A7NUJ6; Match level="QueryCoverage=96%, HitCoverage=7%, E-value=1e-16, Identity=66%"; Hit description =Chromosome chr18 scaffold_1, whole genome shotgun sequence
SITETSTGLDNIFRSLRSGRHGHRLNLRSDNSQQIRGSNTAVVPQGLEELLVTQLRRPTAEKSSNQNIAEAGSHVEMQFEHTDGAVRDIEAVSQESSGSGATFGESLRSLDDEI

SEQ ID NO: 7147 - protein, 132 aa, Glycine max
  misc_feature (29)..(29): Xaa can be any naturally occurring amino acid
  misc_feature (92)..(92): Xaa can be any naturally occurring amino acid
  Coding DNA Sequence Number=SeqID_4866
WCVLDQESDAYLDYVYILYYHYYNSHFSXTISFDVMCYYVSSLSHSYSYTTILLSTSSHPTYVSLLYSFIIYGSQFNLVFCRIVYLTNYLRXYRRLVSAGYCVCDGINLWCRLPAASCVAEVVLAFRRCPRS

SEQ ID NO: 7148 - protein, 112 aa, Glycine max; identical to SEQ ID NO: 6686
  misc_feature (13)..(13): Xaa can be any naturally occurring amino acid
  misc_feature (111)..(111): Xaa can be any naturally occurring amino acid
  Coding DNA Sequence Number=SeqID_4868

SEQ ID NO: 7149 - protein, 156 aa, Glycine max
  misc_feature (7)..(7): Xaa can be any naturally occurring amino acid
  misc_feature (41)..(41): Xaa can be any naturally occurring amino acid
  misc_feature (45)..(45): Xaa can be any naturally occurring amino acid
  misc_feature (122)..(122): Xaa can be any naturally occurring amino acid
  Coding DNA Sequence Number=SeqID_4870
CITDICXLGRTARLQLCHTSSISPRAARPLASLCAVLCILXGGRXGDESAPTSFMSVCPLIAAARASAPCIYSCRLSSACPRQCCIVLHTIIYVPCDSCGRGARCRTIYCHAIYCVARGPSXCYVCGERRYYLICAISTARRPNNMREVDMKRVVE

SEQ ID NO: 7150 - protein, 109 aa, Glycine max
  Coding DNA Sequence Number=SeqID_4872
  Gene Ontology: Mol. function=phosphogluconate dehydrogenase (decarboxylating) activity; Cellular component=mitochondrion; Biological process=pentose-phosphate shunt
  Homolog annotation: Hit_ID=O22111; Match level="QueryCoverage=89%, HitCoverage=18%, E-value=1e-23, Identity=59%"; Hit description=6 -phosphogluconate dehydrogenase, decarboxylating
  Pfam annotation: Domain name=NAD_binding_2; Domain location=6-106; Score=-40.7; E_value=1.5e-05; Accession=PF03446.5; Description=NAD binding domain of 6-phosphogluconate dehydrogenase
AQPASLTRIGLAGLAVMGQNLALNIAEKGFPISVYNQTTSKVYDTLKIAKQKRNLPIYSYHNPKFFIQSIQKPKIIIILINSYTPINQTIKTLSSHLETNNYIINNNNK

SEQ ID NO: 7151 - protein, 170 aa, Glycine max
  misc_feature (12)..(13): Xaa can be any naturally occurring amino acid
  misc_feature (36)..(36): Xaa can be any naturally occurring amino acid
  misc_feature (42)..(44): Xaa can be any naturally occurring amino acid
  misc_feature (48)..(48): Xaa can be any naturally occurring amino acid
  misc_feature (54)..(54): Xaa can be any naturally occurring amino acid
  misc_feature (61)..(61): Xaa can be any naturally occurring amino acid
  misc_feature (87)..(88): Xaa can be any naturally occurring amino acid
  misc_feature (92)..(92): Xaa can be any naturally occurring amino acid
  misc_feature (126)..(126): Xaa can be any naturally occurring amino acid
  misc_feature (132)..(132): Xaa can be any naturally occurring amino acid
  misc_feature (143)..(143): Xaa can be any naturally occurring amino acid
  misc_feature (161)..(161): Xaa can be any naturally occurring amino acid
  Coding DNA Sequence Number=SeqID_4873
  Subcellular localization annotation: CTP_CleavageSite=77; ConfidenceScore=5.00e-01
TQMIVATSLCAXXHHTHSQHITHTTSSTATAHHAMXAHHLNXXXYSTXNVRHIXRSAQHSXSSTSSGLAATLHTQSSAPAVKTTHYXXTPAXTTQSYDYMHRLYIDPSAHLLHYHLTHTQPTQHQXDAAQLXSTDMQTATADXDRRDISHAELRLVTCASXARRDRLKAA

SEQ ID NO: 7152 - protein, 87 aa, Glycine max
  misc_feature (46)..(46): Xaa can be any naturally occurring amino acid
  Coding DNA Sequence Number=SeqID_4875
YTRARICCFAPHRVLLTRVLIYGSKQCAMIFYPTCTLWRLYWSECXECSPAATIRVYVCARVCYGGVTYERIENSRICTEASPFRFI

SEQ ID NO: 7153 - protein, 152 aa, Glycine max
  misc_feature (19)..(20): Xaa can be any naturally occurring amino acid
  misc_feature (135)..(135): Xaa can be any naturally occurring amino acid
  misc_feature (148)..(148): Xaa can be any naturally occurring amino acid
  misc_feature (150)..(150): Xaa can be any naturally occurring amino acid
  Coding DNA Sequence Number=SeqID_4877
  Gene Ontology: Cellular component=cytoplasm; Biological process=cell division
  Homolog annotation: Hit_ID=Q9FVX0; Match level="QueryCoverage=37%, HitCoverage=12%, E-value=3e-13, Identity=70%"; Hit description =Cyclin-A1-2
  Subcellular localization annotation: CTP_CleavageSite=76; ConfidenceScore=5.12e-01
PENEDSAESKFFHFILNKXXSSSRNLPKENPLSRPSVVAKTRAPLGDVVNRRNPLGDITNQKTGSRISAPSSTLVHCSNKIGKSKKAPKPPKSNVLVPYEDIESSFVAESDLGNDDDDEVDDIDSNLVDPQLCGXFACDIYEHLRSSXVXKG

SEQ ID NO: 7154 - protein, 77 aa, Glycine max
  misc_feature (41)..(41): Xaa can be any naturally occurring amino acid
  misc_feature (45)..(45): Xaa can be any naturally occurring amino acid
  misc_feature (55)..(55): Xaa can be any naturally occurring amino acid
  misc_feature (61)..(62): Xaa can be any naturally occurring amino acid
  misc_feature (65)..(65): Xaa can be any naturally occurring amino acid
  misc_feature (70)..(71): Xaa can be any naturally occurring amino acid
  misc_feature (74)..(74): Xaa can be any naturally occurring amino acid
  Coding DNA Sequence Number=SeqID_4878
TMKARLGSIMEINQSLKCISTKRLSVKVIIINDQEDHSYRXVVSXKDMKWCLNFXKELRIXXQWXYPKIXXRLXTGL

SEQ ID NO: 7155 - protein, 100 aa, Glycine max
  misc_feature (51)..(51): Xaa can be any naturally occurring amino acid
  Coding DNA Sequence Number=SeqID_4880
  Gene Ontology: Mol. function=electron-transferring-flavoprotein dehydrogenase activity; Cellular component=mitochondrial inner membrane; Biological process=electron transport
  Homolog annotation: Hit_ID=A7QYQ5; Match level="QueryCoverage=100%, HitCoverage=18%, E-value=3e-33, Identity=64%"; Hit description =Chromosome chr5 scaffold_253, whole genome shotgun sequence
  Pfam annotation: Domain name=ETF_QO; Domain location=13-100; Score =79.1; E_value=1.5e-20; Accession=PF05187.3; Description=Electron transfer flavoprotein-ubiquinone ox
HKSNNYLPSFIYGLITGLALTGLEQYIFKARHPITLNHFKPDHEATNAAKXHSPIHYPKADDVLFFYVPTSLHRSNTNHEHDQPPHLRLRHPKIPELLNL

SEQ ID NO: 7156 - protein, 128 aa, Glycine max
  misc_feature (7)..(7): Xaa can be any naturally occurring amino acid
  Coding DNA Sequence Number=SeqID_4881
EGFALFXDFVFFVCFFDAYQLICSSSCCRSCLVMIVVRRTLWISDDGWRSDMRHDASYSISRMRKIVSYIYISRRADDVLSRELLTMYCLSCLSTVRYIYTSDAQRAYAFVCRARADDAPRCSFRVRL

SEQ ID NO: 7157 - protein, 98 aa, Glycine max
  Coding DNA Sequence Number=SeqID_4883
PTILFNTVHKIRSTIACIYVNWSSQEFPHVTTFFSIHLFIGPEIKIASRLTWITQNWVNRVNRINRVNLVAGLDRLKAALSEGARAVEKLVIRLRCQG

SEQ ID NO: 7158 - protein, 153 aa, Glycine max
  misc_feature (7)..(7): Xaa can be any naturally occurring amino acid
  misc_feature (54)..(54): Xaa can be any naturally occurring amino acid
  misc_feature (103)..(103): Xaa can be any naturally occurring amino acid
  misc_feature (120)..(121): Xaa can be any naturally occurring amino acid
  misc_feature (134)..(134): Xaa can be any naturally occurring amino acid
  Coding DNA Sequence Number=SeqID_4885
HYATTYXGSACRASCWLVTYYICDSHSVPHGLRVYSVQCHKPAVRAIRYARRRXEADRRRSRREAGDKYPVRWGAIIQINIIHVRAAPCRRIAMCQIVMMVSXYNNMAVVYIIFISSCSXXFCLDDAYTVDILXERITVEISAIMRSCDSSAK

SEQ ID NO: 7159 - protein, 134 aa, Glycine max
  misc_feature (6)..(6): Xaa can be any naturally occurring amino acid
  misc_feature (22)..(22): Xaa can be any naturally occurring amino acid
  misc_feature (36)..(36): Xaa can be any naturally occurring amino acid
  misc_feature (85)..(85): Xaa can be any naturally occurring amino acid
  misc_feature (100)..(100): Xaa can be any naturally occurring amino acid
  Coding DNA Sequence Number=SeqID_4887
  Gene Ontology: Mol. function=protein kinase activity; Cellular component=plastoglobule; Biological process=protein amino acid phosphorylation
  Homolog annotation: Hit_ID=A7QWS9; Match level="QueryCoverage=100%, HitCoverage=18%, E-value=3e-44, Identity=67%"; Hit description =Chromosome chr4 scaffold_208, whole genome shotgun sequence
LYCSLXRQMLEAGYVHAERHPXNLVALNDGSLAYFXDFGMMGDIPRHYRIGLIQMIVHCVNRDSLSLANDYPSLGFTSEGIDTHXVSDAPQSIFADRTTXFQDFHGILNPLYDCTYEFNFSLPPDYSLVIRTLG

SEQ ID NO: 7160 - protein, 159 aa, Glycine max
  Coding DNA Sequence Number=SeqID_1425
  Homolog annotation: Hit_ID=A5B8W9; Match level="QueryCoverage=82%, HitCoverage=93%, E-value=2e-12, Identity=37%"; Hit description =Putative uncharacterized protein
  Subcellular localization annotation: CTP_CleavageSite=57; ConfidenceScore=5.73e-01
MASMTMLQTMIPKNAPNLPPRVGASSNNTTKISFGGSGRVLWTGIQRNRNNRSSSIVVAAVGDGSSDGTAYLVAGAIAVALVGTAFPIFFSRRDTCPECDGAGVVPNANVTLIANAARKAQTRMGGALLNGWCIRKRIDNERQYAPTWPVLALLILCSS

SEQ ID NO: 7161 - protein, 111 aa, Glycine max; identical to SEQ ID NO: 6662
  misc_feature (13)..(15): Xaa can be any naturally occurring amino acid
  misc_feature (26)..(27): Xaa can be any naturally occurring amino acid
  misc_feature (32)..(32): Xaa can be any naturally occurring amino acid
  misc_feature (35)..(35): Xaa can be any naturally occurring amino acid
  misc_feature (43)..(43): Xaa can be any naturally occurring amino acid
  misc_feature (45)..(45): Xaa can be any naturally occurring amino acid
  misc_feature (48)..(48): Xaa can be any naturally occurring amino acid
  misc_feature (52)..(52): Xaa can be any naturally occurring amino acid
  misc_feature (73)..(75): Xaa can be any naturally occurring amino acid
  misc_feature (77)..(79): Xaa can be any naturally occurring amino acid
  misc_feature (110)..(110): Xaa can be any naturally occurring amino acid
  Coding DNA Sequence Number=SeqID_1426
  Subcellular localization annotation: CTP_CleavageSite=31; ConfidenceScore=5.20e-01

SEQ ID NO: 7162 - protein, 109 aa, Glycine max
  misc_feature (19)..(19): Xaa can be any naturally occurring amino acid
  Coding DNA Sequence Number=SeqID_1428
  Subcellular localization annotation: CTP_CleavageSite=48; ConfidenceScore=5.02e-01
LLAYLIPLILSSPTPSRPXQRPNALHSSLTPSPCVHPAHVATHVYIVCCSHPPHRHHPVNHTTLRITSHRCRGAVSNNSNSHILRDIHSCHYLFVRRERDTHLSAHINI

SEQ ID NO: 7163 - protein, 77 aa, Glycine max
  misc_feature (4)..(4): Xaa can be any naturally occurring amino acid
  misc_feature (16)..(17): Xaa can be any naturally occurring amino acid
  misc_feature (24)..(25): Xaa can be any naturally occurring amino acid
  misc_feature (43)..(43): Xaa can be any naturally occurring amino acid
  misc_feature (47)..(47): Xaa can be any naturally occurring amino acid
  Coding DNA Sequence Number=SeqID_133
DLEXLMRIKKKIITLXXTKKAVLXXIGHNWLLSLFNIVRNACXMCKXPYLTPYLFKELFCILIYFLIVSYICKKSLD

SEQ ID NO: 7164 - protein, 158 aa, Glycine max
  misc_feature (1)..(1): Xaa can be any naturally occurring amino acid
  misc_feature (7)..(7): Xaa can be any naturally occurring amino acid
  misc_feature (51)..(51): Xaa can be any naturally occurring amino acid
  misc_feature (69)..(69): Xaa can be any naturally occurring amino acid
  misc_feature (73)..(73): Xaa can be any naturally occurring amino acid
  misc_feature (84)..(85): Xaa can be any naturally occurring amino acid
  misc_feature (97)..(97): Xaa can be any naturally occurring amino acid
  misc_feature (103)..(103): Xaa can be any naturally occurring amino acid
  misc_feature (116)..(116): Xaa can be any naturally occurring amino acid
  misc_feature (148)..(148): Xaa can be any naturally occurring amino acid
  Coding DNA Sequence Number=SeqID_135
XHTRPHXVSRSQTTSGSSQATHRDADALYNSYLSSHVPHLGSHKSRTRLVXIRRHLFLLIDMLSTMLIXSLCXLSLHYYFPRAXXIQRSRAASHVIXTQSHIXTRHTIITRIWAAXVYILSREISTSSLRREARVSYSRARMRRHTHXRDDYYATRWL

SEQ ID NO: 7165 - protein, 123 aa, Glycine max
  Coding DNA Sequence Number=SeqID_137
  Gene Ontology: Mol. function=protein-tyrosine kinase activity; Cellular component=integral to membrane; Biological process=protein amino acid phosphorylation
  Homolog annotation: Hit_ID=A7UE73; Match level="QueryCoverage=79%, HitCoverage=12%, E-value=1e-32, Identity=69%"; Hit description=LRR receptor-like kinase
SQLSGRLLTAYGYSAPEFESGSYTQQSDVFSFGVVMLELLTGRKSYEKSLPRGEQVLVRWAVPQLHDIDASSQMATPCLKGTNPIKSGHRLADTVSSCTGGVPMAPFVDSNNNHENRDMICEE

SEQ ID NO: 7166 - protein, 215 aa, Glycine max
  misc_feature (61)..(61): Xaa can be any naturally occurring amino acid
  Coding DNA Sequence Number=SeqID_138
  Subcellular localization annotation: CTP_CleavageSite=39; ConfidenceScore=5.03e-01
ISLRKHLIKTRVNKKKMMGTLKVSNSSLYIFSKFLVICMVMMISLVDSSIPCVILRQSFIXVIEFRYGWVSYKFPAQPAPYWMASFKKQGAWLSDEGLLLFSPSGPGMANLTHFAINWNKLTLGENLAFRPPWDPPHIFFLGGGKTFFPLLPPGEGGFPTPLCFFLKRKDFFWRKTPSQKFWGPSPLFFGKRFSFKKNPLFFFGGGAPLPPLLKK

SEQ ID NO: 7167 - protein, 159 aa, Glycine max
  Coding DNA Sequence Number=SeqID_140
YIWRRPLASSSLLLLLIQRARSASPGAQLLLLLFLLVLAFAPLPPPPVAQLFLLLLLVLFCTVRNRRRRISRGGSAGGSLVVLPDAGPKGTRRGTVCSPPVRYTALCRRSLGCSWWRPPRRGAVLGRGVHTIQQGCCCYASSWNPYPWLAKLSRRWMAV

SEQ ID NO: 7168 - protein, 71 aa, Glycine max
  Coding DNA Sequence Number=SeqID_4888
  Homolog annotation: Hit_ID=Q5N9W1; Match level="QueryCoverage=80%, HitCoverage=81%, E-value=3e-14, Identity=70%"; Hit description =Putative uncharacterized protein P0406G08.33
  Pfam annotation: Domain name=DVL; Domain location=48-66; Score=43.8; E_value=6.2e-10; Accession=PF08137.3; Description=DVL family
MEVCGAEEKQTPPKKRSGGKGAAMGVRADGGGKGRRPSFPGRCARLVKEQRARFYIMRRCVTMLVCWRDYA

SEQ ID NO: 7169 - protein, 125 aa, Glycine max
  misc_feature (20)..(20): Xaa can be any naturally occurring amino acid
  misc_feature (23)..(23): Xaa can be any naturally occurring amino acid
  misc_feature (33)..(33): Xaa can be any naturally occurring amino acid
  misc_feature (43)..(43): Xaa can be any naturally occurring amino acid
  misc_feature (58)..(58): Xaa can be any naturally occurring amino acid
  misc_feature (60)..(61): Xaa can be any naturally occurring amino acid
  misc_feature (81)..(81): Xaa can be any naturally occurring amino acid
  Coding DNA Sequence Number=SeqID_4889
CARSACVCGVGDVTSTITYXSEXCCRLSHLVRXLYIHSYILHXHVVRVGWRASFSSYXLXXNTRRAIRAYILCRLSYIISXRGCRLISQHYSLRSLGSSWMSDIQYIYTIIARSCMYYSRMQGVL

SEQ ID NO: 7170 - protein, 140 aa, Glycine max
  misc_feature (83)..(83): Xaa can be any naturally occurring amino acid
  misc_feature (101)..(101): Xaa can be any naturally occurring amino acid
  Coding DNA Sequence Number=SeqID_4891
  Subcellular localization annotation: CTP_CleavageSite=25; ConfidenceScore=5.39e-01
TPSSSHPNSKEAKRRSRARPKRPVSCKPRRRRRRLISSGACGMGSGRPAAWRTCAAAAAAACAVPVALSLVLLWLPLLCCAVXVVRFRRARRRMMQMCGGXTRGGGRFGAVDAGDRLGLLQKYLEDQLELVGAEAGGLLR

SEQ ID NO: 7171 - protein, 167 aa, Glycine max; identical to SEQ ID NO: 6699
  misc_feature (2)..(2): Xaa can be any naturally occurring amino acid
  Coding DNA Sequence Number=SeqID_4893

SEQ ID NO: 7172 - protein, 575 aa, Glycine max
  Coding DNA Sequence Number=SeqID_4895
  Gene Ontology: Mol. function=kinase activity; Cellular component =proteinaceous extracellular matrix; Biological process=protein amino acid phosphorylation
  Homolog annotation: Hit_ID=Q5CK77; Match level="QueryCoverage=58%, HitCoverage=93%, E-value=2e-50, Identity=32%"; Hit description =Phosphatidylinositol-4-phosphate 5-kinase, 11335-7537
  Pfam annotation: Domain name=MORN; Domain location=241-263; Score =27.7; E_value=4.2e-05; Accession=PF02493.10; Description=MORN repeat
  Pfam annotation: Domain name=MORN; Domain location=264-286; Score =31.3; E_value=3.4e-06; Accession=PF02493.10; Description=MORN repeat
  Pfam annotation: Domain name=MORN; Domain location=287-309; Score =29.8; E_value=1e-05; Accession=PF02493.10; Description=MORN repeat
  Pfam annotation: Domain name=MORN; Domain location=310-332; Score =7.1; E_value=1.5; Accession=PF02493.10; Description=MORN repeat
  Pfam annotation: Domain name=MORN; Domain location=333-353; Score =9.0; E_value=0.86; Accession=PF02493.10; Description=MORN repeat
  Pfam annotation: Domain name=MORN; Domain location=355-375; Score =11.4; E_value=0.42; Accession=PF02493.10; Description=MORN repeat
  Pfam annotation: Domain name=MORN; Domain location=377-399; Score =16.4; E_value=0.092; Accession=PF02493.10; Description=MORN repeat
  Pfam annotation: Domain name=MORN; Domain location=400-422; Score =8.1; E_value=1.1; Accession=PF02493.10; Description=MORN repeat
  Pfam annotation: Domain name=MORN; Domain location=445-468; Score =6.7; E_value=1.7; Accession=PF02493.10; Description=MORN repeat
  Pfam annotation: Domain name=MORN; Domain location=469-491; Score =11.2; E_value=0.44; Accession=PF02493.10; Description=MORN repeat
  Pfam annotation: Domain name=MORN; Domain location=492-516; Score =4.7; E_value=3.1; Accession=PF02493.10; Description=MORN repeat
  Pfam annotation: Domain name=MORN; Domain location=517-539; Score =17.9; E_value=0.038; Accession=PF02493.10; Description=MORN repeat
  Pfam annotation: Domain name=zf-C3HC4; Domain location=147-185; Score= 32.1; E_value=2e-06; Accession=PF00097.15; Description=Zinc finger, C3HC4 type (RING finger)
  Pfam annotation: Domain name=zf-MIZ; Domain location=143-188; Score= -14.2; E_value=0.093; Accession=PF02891.10; Description=MIZ zinc finger
  Pfam module annotation: Pfam domain module=MORN::MORN::MORN::MORN::MOR N::MORN::MORN::MORN::MORN::MORN::MORN::MORN::zf-C3HC4::zf-MIZ; Domain location=241-263::264-286::287-309::310-332::333-353::355-375::377 -399::400-422:...
  Pfam module annotation: Domain location=:445-468::469-491::492 -516::517-539::147-185::143-188
MNENPKNNIWAKLVSLHPDKSNILFDIKSDKITQSHLTDEWKIYQNLAEEGPVWIVNLSTTFICIDENWLATNEERQLIGGEKITFSQEKITSDIKFDYVFYVIDPKSNNELKRSKNENTEPRTFVASQDMMKFLKVQNAIHEELLCTICMENITDCRTLNPCQHNFCGNCLINYLQKSTDCPLCREEIVSHSKNLLMQNIIAQANCAVNIFKNVKEFKEYTVLGPTSNNEKDYPAQSGVYQGPYVDGKRNGEGEMTYQDGSVYKGSWKNDQRYGQGKMTYKDGSRYEGLWRNNKRVGKGKLYLENGDIYEAEWVDDIMQPFAKISYHNGSQYEGEIKGFQKHGKGMFKDGSYQYDGLWSYDLKHGQGTDKSGNKTYKGNWVNGKKHGYGEMKFSYFREYLGFWANDKIFGEGTFEYDCKTYKGIWQKGGNAGKGEIIYGNREKYEGMIGKGFCRDGEGVLTLQSGDKYKGNWSKNLLESPATVEYINGDRYTGGVQNSELYREGSGVLICRNGDQYDAKWRKGKLQGRGTILYTNGLKYSVVWKNGREVLRTVIPPKKVKTSAGSLIEPSAIQA

SEQ ID NO: 7173 - protein, 201 aa, Glycine max
  Coding DNA Sequence Number=SeqID_4896
  Gene Ontology: Mol. function=nucleic acid binding; Cellular component= intracellular; Biological process=polar nucleus fusion
  Homolog annotation: Hit_ID=Q9LEW7; Match level="QueryCoverage=86%, HitCoverage=95%, E-value=4e-25, Identity=40%"; Hit description =Putative uncharacterized protein T27I15_180
  Pfam annotation: Domain name=DUF537; Domain location=33-182; Score =112.3; E_value=1.5e-30; Accession=PF04396.4; Description=Protein of unknown function, DUF537
MPTPTSLIMGKMIITMTLSQRMPSVTTASYAEAKTVVFWDVDECPIPEDLDPQSVYQNIRTALANKGYHGEVSIMAFGDRNQIPGYYESAGIQIFPKGDKYDRIGQMQLEFFGWMRDNSCQYTNMMVVTRSAMELVSYLEYKNTHHNILFANPLYPQTKACGCKFGARQEDPSAETWVWETLALGGDPSIKTVEEPCRYRE

SEQ ID NO: 7174 - protein, 109 aa, Glycine max; identical to SEQ ID NO: 6702
  misc_feature (2)..(3): Xaa can be any naturally occurring amino acid
  misc_feature (5)..(15): Xaa can be any naturally occurring amino acid
  misc_feature (19)..(25): Xaa can be any naturally occurring amino acid
  misc_feature (27)..(27): Xaa can be any naturally occurring amino acid
  misc_feature (40)..(40): Xaa can be any naturally occurring amino acid
  misc_feature (46)..(46): Xaa can be any naturally occurring amino acid
  misc_feature (49)..(50): Xaa can be any naturally occurring amino acid
  misc_feature (62)..(62): Xaa can be any naturally occurring amino acid
  misc_feature (70)..(70): Xaa can be any naturally occurring amino acid
  misc_feature (87)..(89): Xaa can be any naturally occurring amino acid
  misc_feature (103)..(103): Xaa can be any naturally occurring amino acid
  Coding DNA Sequence Number=SeqID_4897
  Subcellular localization annotation: CTP_CleavageSite=30; ConfidenceScore=5.53e-01

SEQ ID NO: 7175 - protein, 176 aa, Glycine max
  misc_feature (10)..(10): Xaa can be any naturally occurring amino acid
  misc_feature (19)..(19): Xaa can be any naturally occurring amino acid
  misc_feature (25)..(25): Xaa can be any naturally occurring amino acid
  misc_feature (45)..(45): Xaa can be any naturally occurring amino acid
  misc_feature (50)..(50): Xaa can be any naturally occurring amino acid
  misc_feature (53)..(53): Xaa can be any naturally occurring amino acid
  misc_feature (56)..(57): Xaa can be any naturally occurring amino acid
  misc_feature (61)..(61): Xaa can be any naturally occurring amino acid
  misc_feature (65)..(65): Xaa can be any naturally occurring amino acid
  misc_feature (72)..(72): Xaa can be any naturally occurring amino acid
  misc_feature (81)..(81): Xaa can be any naturally occurring amino acid
  misc_feature (84)..(84): Xaa can be any naturally occurring amino acid
  misc_feature (90)..(90): Xaa can be any naturally occurring amino acid
  misc_feature (95)..(95): Xaa can be any naturally occurring amino acid
  misc_feature (110)..(110): Xaa can be any naturally occurring amino acid
  misc_feature (118)..(118): Xaa can be any naturally occurring amino acid
  misc_feature (126)..(126): Xaa can be any naturally occurring amino acid
  misc_feature (140)..(140): Xaa can be any naturally occurring amino acid
  misc_feature (176)..(176): Xaa can be any naturally occurring amino acid
  Coding DNA Sequence Number=SeqID_4899
RNSDMLVASXRHSIHHEYXRGASVXRVRELLSSSRAQRIGQATEXGASDXEYXEWXXQGTXRGVXRDRQSAXCGVACVAVXRAXVSSTSXSACRXSTRSFVQCASGQRVXRVSRARAXTLLTHANXRPPNTYHSASLTSXPSHHIFYSSLVVTDRYIICDYVLCVRLVYVLFTSIX

SEQ ID NO: 7176 - protein, 156 aa, Glycine max
  misc_feature (11)..(13): Xaa can be any naturally occurring amino acid
  misc_feature (15)..(16): Xaa can be any naturally occurring amino acid
  misc_feature (18)..(18): Xaa can be any naturally occurring amino acid
  misc_feature (20)..(20): Xaa can be any naturally occurring amino acid
  misc_feature (22)..(36): Xaa can be any naturally occurring amino acid
  misc_feature (38)..(41): Xaa can be any naturally occurring amino acid
  misc_feature (43)..(50): Xaa can be any naturally occurring amino acid
  misc_feature (52)..(61): Xaa can be any naturally occurring amino acid
  misc_feature (63)..(63): Xaa can be any naturally occurring amino acid
  misc_feature (65)..(71): Xaa can be any naturally occurring amino acid
  misc_feature (73)..(78): Xaa can be any naturally occurring amino acid
  misc_feature (80)..(88): Xaa can be any naturally occurring amino acid
  misc_feature (90)..(109): Xaa can be any naturally occurring amino acid
  misc_feature (111)..(124): Xaa can be any naturally occurring amino acid
  misc_feature (126)..(142): Xaa can be any naturally occurring amino acid
  misc_feature (144)..(156): Xaa can be any naturally occurring amino acid
  Coding DNA Sequence Number=SeqID_4901
HRRSQEYGAIXXXNXXFXDXLXXXXXXXXXXXXXXXFXXXXGXXXXXXXXSXXXXXXXXXXFXWXXXXXXXIXXXXXXAXXXXXXXXXVXXXXXXXXXXXXXXXXXXXXNXXXXXXXXXXXXXXPXXXXXXXXXXXXXXXXXKXXXXXXXXXXXXX

SEQ ID NO: 7177 - protein, 141 aa, Glycine max
  misc_feature (1)..(1): Xaa can be any naturally occurring amino acid
  misc_feature (20)..(20): Xaa can be any naturally occurring amino acid
  misc_feature (26)..(26): Xaa can be any naturally occurring amino acid
  misc_feature (33)..(33): Xaa can be any naturally occurring amino acid
  misc_feature (37)..(37): Xaa can be any naturally occurring amino acid
  misc_feature (114)..(114): Xaa can be any naturally occurring amino acid
  misc_feature (116)..(116): Xaa can be any naturally occurring amino acid
  misc_feature (118)..(118): Xaa can be any naturally occurring amino acid
  misc_feature (131)..(131): Xaa can be any naturally occurring amino acid
  Coding DNA Sequence Number=SeqID_4903
XMHSHAYQITRYRHYSRIVXTASSGXRLHNRVXVLMXQLATACSVYHTTRSCVLYVQINNIEENTISNSSSRQCRDVVDDHRLPLIISRRIPASLMPGRAIDVNSYRSPESELXHXTXECEDPTTMRVVRXVSMPRHVSEL

SEQ ID NO: 7178 - protein, 186 aa, Glycine max
  misc_feature (1)..(1): Xaa can be any naturally occurring amino acid
  misc_feature (16)..(16): Xaa can be any naturally occurring amino acid
  misc_feature (43)..(43): Xaa can be any naturally occurring amino acid
  misc_feature (50)..(50): Xaa can be any naturally occurring amino acid
  misc_feature (126)..(126): Xaa can be any naturally occurring amino acid
  misc_feature (128)..(128): Xaa can be any naturally occurring amino acid
  Coding DNA Sequence Number=SeqID_4905
  Gene Ontology: Mol. function=oxidoreductase activity, acting on single donors with incorporation of molecular oxygen, incorporation of two atoms of oxygen; Cellular component=cytoplasm; Biological process=ethylene biosynthetic process
  Homolog annotation: Hit_ID=Q9FFF6; Match level="QueryCoverage=82%, HitCoverage=40%, E-value=1e-35, Identity=51%"; Hit description =Leucoanthocyanidin dioxygenase-like protein
  Pfam annotation: Domain name=2OG-FeII_Oxy; Domain location=31-131; Score=58.7; E_value=2e-14; Accession=PF03171.10; Description=2OG -Fe(II) oxygenase superfamily
XVGGRILKMRSINPGXKEDSILKAFGGESEIGTRVSVNIDTKXPQPTISXGLSPHSEAGGMTILEPEDYKYGPQVRRGDEWTTVKPVPNAKSINIGGQIQVVSNVIYKSVDRRVIVTSNKDRVSLXLXYNKRSEGIIGADKEIVTEEKPGKYPPLSSLHHHQLTHHHRHHHHPLSSLHHHLLVVPI

SEQ ID NO: 7179 - protein, 130 aa, Glycine max
  Coding DNA Sequence Number=SeqID_4906
TVVAVCCVCFVDRHFGARCLFVLHYFIACLLDVFSGVLLESLLFIFELVGTLVRPVCLAHLLLRIAAFSSSAVTFSYNCFCLCSLLELCSLLLLSYQDRAHVPLPLCLYCDRSLCSCFFVYHLRLHLDVR

SEQ ID NO: 7180 - protein, 78 aa, Glycine max
  misc_feature (34)..(34): Xaa can be any naturally occurring amino acid
  Coding DNA Sequence Number=SeqID_4908
IFISYYASYVVLFIAAQTRYIYLDSGVVKKIRMXHRACLLSSSHPRLDVRPTSLIYTTIGTNCPDTHTDISLAYYSVR

SEQ ID NO: 7181 - protein, 133 aa, Glycine max; identical to SEQ ID NO: 6727
  misc_feature (43)..(43): Xaa can be any naturally occurring amino acid
  misc_feature (105)..(105): Xaa can be any naturally occurring amino acid
  Coding DNA Sequence Number=SeqID_4909

SEQ ID NO: 7182 - protein, 109 aa, Glycine max
  misc_feature (48)..(48): Xaa can be any naturally occurring amino acid
  misc_feature (81)..(81): Xaa can be any naturally occurring amino acid
  Coding DNA Sequence Number=SeqID_4911
IRYEIRVSTSSSIILYLCISVPLSILVTYSTALITSILDSAINYNTIXYRSRQHASNTYSCATTRHRIERTQHMIDSSNKXYSTISNYVLVSSVTSNLYILSIYMRYYI

SEQ ID NO: 7183 - protein, 73 aa, Glycine max
  Coding DNA Sequence Number=SeqID_4913
  Gene Ontology: Biological process=response to stress
  Homolog annotation: Hit_ID=O23957; Match level="QueryCoverage=47%, HitCoverage=21%, E-value=5e-12, Identity=94%"; Hit description =Dehydrin
AEAQLPDQHGNPVPLTDQYGNPVILTDKRGNPVQLTGVATTATGTAGSGFGSYGTGAYRGGASATTEAELLAT

SEQ ID NO: 7184 - protein, 58 aa, Glycine max
  Coding DNA Sequence Number=SeqID_4914
  Gene Ontology: Mol. function=electron carrier activity; Biological process=electron transport
  Homolog annotation: Hit_ID=Q0M2G2; Match level="QueryCoverage=93%, HitCoverage=26%, E-value=7e-22, Identity=87%"; Hit description =Putative uncharacterized protein precursor
AMPAWGKTHSDELIWDMVAFVRQLPRMSPAQYQAAIASAPEDHDAMMKDMPGMTKTAP

SEQ ID NO: 7185 - protein, 289 aa, Glycine max
  misc_feature (137)..(137): Xaa can be any naturally occurring amino acid
  misc_feature (162)..(162): Xaa can be any naturally occurring amino acid
  misc_feature (197)..(197): Xaa can be any naturally occurring amino acid
  misc_feature (220)..(220): Xaa can be any naturally occurring amino acid
  misc_feature (229)..(229): Xaa can be any naturally occurring amino acid
  misc_feature (255)..(255): Xaa can be any naturally occurring amino acid
  Coding DNA Sequence Number=SeqID_4915
  Homolog annotation: Hit_ID=A7QNY4; Match level="QueryCoverage=96%, HitCoverage=85%, E-value=1e-42, Identity=39%"; Hit description =Chromosome chr1 scaffold_135, whole genome shotgun sequence
MMGDSEMAKFGLKVGKNEKNGFPRGLDPAISKFFVQLQIVVKSRLSRLAKQDGMSLMSSVQRKGERSFSYSEAELNEQLQAWRENPSWVDKPPLIKVTGPKGSLCNLDVEVDVGLRPDAVYNIVIDPDNRRVFKNIXKVVSSQGFVDQGHRLVLDSAIETLXQYPCWAATLATRHIVNRKPNSCSVKFNHTKTTSIXPSPVKIGVDTITLDEAMCPHFKXDNEGRINCXTRARGRTRFKVSPEHLLQPYLVPPPXPLSWYLMGITARTTEMLNNYMLAETARIRGGYEA

SEQ ID NO: 7186 - protein, 78 aa, Glycine max
  misc_feature (31)..(31): Xaa can be any naturally occurring amino acid
  Coding DNA Sequence Number=SeqID_4916
SRSRRARRERHRPCRHGGVIQDDRTCMTLVXPPTRPPTLSHDVSADADAYATSSRGLLMHNHCAQKVAESSTDDVCGS

SEQ ID NO: 7187 - protein, 92 aa, Glycine max
  Coding DNA Sequence Number=SeqID_4918
DVKLVPPHPHSVGSGHLLYFYDTSHFLFIYHLFYKHLTNSIIQRIIPREAVRFPSYVTNLLSPCRPTPTSHLDSTVLTLKIHNLFSHEPLYP

SEQ ID NO: 7188 - protein, 118 aa, Glycine max
  Coding DNA Sequence Number=SeqID_4920
PTRIEHNPHVCDGRHLFPPAASRRSPLVVRHLYSTIEIYTADSPYHNPLALHVTTTHALLTSSQTTSTARAEQSLISLPPYSFPDTHKIREPARYTSRTILLARLGILSSCTNLRYLD

SEQ ID NO: 7189 - protein, 121 aa, Glycine max
  misc_feature (31)..(31): Xaa can be any naturally occurring amino acid
  misc_feature (59)..(59): Xaa can be any naturally occurring amino acid
  misc_feature (66)..(66): Xaa can be any naturally occurring amino acid
  misc_feature (90)..(90): Xaa can be any naturally occurring amino acid
  Coding DNA Sequence Number=SeqID_373
  Gene Ontology: Mol. function=aspartic-type endopeptidase activity; Biological process=proteolysis
  Homolog annotation: Hit_ID=A7PU90; Match level="QueryCoverage=87%, HitCoverage=24%, E-value=4e-21, Identity=50%"; Hit description =Chromosome chr7 scaffold_31, whole genome shotgun sequence
LTSSGQFLWVDCDNGCVCSTYLLARVLIPEXSLARSDISGNCFCVPKWGCNSNTCGVTXDNTVTGXATSVELGQEVVYLWGTNGLNHIQXVTVWRFSFSWAGTLLLQGLESVSEAWGYRHN

SEQ ID NO: 7190 - protein, 143 aa, Glycine max
  misc_feature (10)..(10): Xaa can be any naturally occurring amino acid
  misc_feature (21)..(23): Xaa can be any naturally occurring amino acid
  misc_feature (30)..(30): Xaa can be any naturally occurring amino acid
  misc_feature (32)..(32): Xaa can be any naturally occurring amino acid
  misc_feature (45)..(47): Xaa can be any naturally occurring amino acid
  misc_feature (101)..(101): Xaa can be any naturally occurring amino acid
  Coding DNA Sequence Number=SeqID_374
SLINILPSIXRHILLYLLMPXXXTMHLLTXRXCTLSISIIHYTTXXXTTIRLNHHSRRELACYVHDIPSLITTLTDVTPLYSSTTPPALTHLPDDTLSSLXLLTTALRHEQHDVTLTSCSFIRDHCYSPTQISHADLSSSADL

SEQ ID NO: 7191 - protein, 165 aa, Glycine max
  misc_feature (32)..(32): Xaa can be any naturally occurring amino acid
  Coding DNA Sequence Number=SeqID_376
YYMLLDIASLVAPSRCVIDRETCLLIMRRKTXPICAHETLTAMRREAYVTRGDSRRTLRVAWSTAFSESNWRDVTLILCGRRRAVDRSSTRATYARVRQCESDELIYLRIDDTDIYMRSGHSSTQLFTIHLYQSDRRRDRHQQLPRFRTDDARDVRDLRRTSSPR

SEQ ID NO: 7192 - protein, 74 aa, Glycine max
  Coding DNA Sequence Number=SeqID_378
LIWNRMENKSKSALLLNLEYSSRAECFLNPISDTLYIWKHQISFNNQSWLRFMIHRPTNQIISEKIKSKKKKKK

SEQ ID NO: 7193 - protein, 221 aa, Glycine max
  misc_feature (64)..(64): Xaa can be any naturally occurring amino acid
  misc_feature (170)..(170): Xaa can be any naturally occurring amino acid
  Coding DNA Sequence Number=SeqID_380
NIHRHHTVGEKELRVEGGETIAGEATHIARTCSRARAASLILAYRRWGHPLVIHSHIDYDVVIXEHMTLSSSLRVILGWLSARGGIGGATWVVAACGLTIRGGVYINQRGGVCVNERRWCVRVSHAPYVGFSTAPTRAPKTRAGGYHAAPARADYRQTTSRGGRGSHTSXLGRVSSKIALTRWRTRALLFCCRLVVYCWWCEIIVCYSCSSSTRRARMKVV

SEQ ID NO: 7194 - protein, 158 aa, Glycine max
  misc_feature (1)..(2): Xaa can be any naturally occurring amino acid
  misc_feature (22)..(23): Xaa can be any naturally occurring amino acid
  misc_feature (31)..(31): Xaa can be any naturally occurring amino acid
  misc_feature (40)..(40): Xaa can be any naturally occurring amino acid
  misc_feature (51)..(51): Xaa can be any naturally occurring amino acid
  misc_feature (56)..(56): Xaa can be any naturally occurring amino acid
  misc_feature (74)..(74): Xaa can be any naturally occurring amino acid
  misc_feature (101)..(101): Xaa can be any naturally occurring amino acid
  misc_feature (112)..(112): Xaa can be any naturally occurring amino acid
  misc_feature (119)..(119): Xaa can be any naturally occurring amino acid
  misc_feature (133)..(133): Xaa can be any naturally occurring amino acid
  misc_feature (153)..(153): Xaa can be any naturally occurring amino acid
  Coding DNA Sequence Number=SeqID_382
XXCLSRAYIDRTSGGITPTYCXXSLPSSSHXQTQASPIAXAGLLIDTRRRXDTALXRHRYIYSRRRCEESVYIXVTLIPLSSFVTSGISYCAAQYRSPATXHRQLLTHLLRXVTQTSRXAYSSSSYDDTSYIXQSARLSVRSFEGHTTPMLEXTLSHH

SEQ ID NO: 7195 - protein, 223 aa, Glycine max
  Coding DNA Sequence Number=SeqID_384
  Gene Ontology: Mol. function=protein binding; Cellular component =striated muscle thick filament; Biological process=striated muscle contraction
  Homolog annotation: Hit_ID=UPI0000D55BF6; Match level="QueryCoverage =96%, HitCoverage=24%, E-value=7e-76, Identity=73%"; Hit description =PREDICTED: similar to CG5939-PA, isoform A
  Pfam annotation: Domain name=DUF827; Domain location=4-198; Score= -113.3; E_value=0.055; Accession=PF05701.2; Description=Plant protein of unknown function (DUF827)
QLRRPPPPKQKSRLQSEVEVLIIDLEKANNTARELQKRVEHLERINIDIKTRLDETVQLYEQTQRDLRNKQQELQRCVHELDKTREQKDALARDNKKLADDLHDAKNTISELTRRMHEMELELRRLENERDELTAAYKEAEAGRRAEEQRSQRLASEFGQFRHEAEKRLQEKDDEIEAIRKATSIEIEQLNARVVEAETRLKTEVTRIKKKLQIQITELEMSL

SEQ ID NO: 7196 - protein, 165 aa, Glycine max
  misc_feature (15)..(15): Xaa can be any naturally occurring amino acid
  misc_feature (88)..(88): Xaa can be any naturally occurring amino acid
  misc_feature (111)..(111): Xaa can be any naturally occurring amino acid
  misc_feature (146)..(146): Xaa can be any naturally occurring amino acid
  misc_feature (157)..(157): Xaa can be any naturally occurring amino acid
  misc_feature (159)..(159): Xaa can be any naturally occurring amino acid
  misc_feature (163)..(163): Xaa can be any naturally occurring amino acid
  Coding DNA Sequence Number=SeqID_4921
RPCSLSHALPHSTAXRARTRLVYAVSTAPRALHDVRIHHAALSTLVFPQLATAKHHRYTVVPELGGMDTPARASGMHIPLILLLVQRXPRYASLRTSILLTLHTILNSTAXHYSGCTGYVSARARRHAVRTHIRLLNSTIALSMLXTQRPTAPSTIXTXARAXPC

SEQ ID NO: 7197 - protein, 136 aa, Glycine max
  misc_feature (16)..(16): Xaa can be any naturally occurring amino acid
  misc_feature (18)..(19): Xaa can be any naturally occurring amino acid
  misc_feature (43)..(43): Xaa can be any naturally occurring amino acid
  misc_feature (53)..(53): Xaa can be any naturally occurring amino acid
  misc_feature (63)..(63): Xaa can be any naturally occurring amino acid
  misc_feature (72)..(72): Xaa can be any naturally occurring amino acid
  misc_feature (90)..(90): Xaa can be any naturally occurring amino acid
  misc_feature (123)..(123): Xaa can be any naturally occurring amino acid
  Coding DNA Sequence Number=SeqID_4923
ASAIRVDATLVELRVXVXXLHETRTLPLRTASQTPVDDLTDSXSLHITPIHTXITPPVHRRDXRLTPYRNNXVASPFRALRAEEMISTYXEEICRDASRTHSSRVLSSYTLRTQVRNDVHWHXRRDATQSHCHSRL

SEQ ID NO: 7198 - protein, 186 aa, Glycine max
  Coding DNA Sequence Number=SeqID_4925
YLQYIFSVSFLFISYINKTIATQHTHTHVSARTPICLRFITPDPVYVVYYLHSCILRYIYIPSEHSVFILLYISFFVSLFTSFLSHCSLVLLLILSSLDCLSLSRLATSPSYSRVIIHGVMSIICVHTTIIICTLSYSAELHILLRSVIMLSRPLVYPPTSPLMPTPLATLILHIITYYNIHLISL

SEQ ID NO: 7199 - protein, 109 aa, Glycine max
  misc_feature (67)..(67): Xaa can be any naturally occurring amino acid
  misc_feature (72)..(72): Xaa can be any naturally occurring amino acid
  misc_feature (80)..(81): Xaa can be any naturally occurring amino acid
  misc_feature (87)..(87): Xaa can be any naturally occurring amino acid
  misc_feature (101)..(101): Xaa can be any naturally occurring amino acid
  misc_feature (105)..(106): Xaa can be any naturally occurring amino acid
  Coding DNA Sequence Number=SeqID_4927
HHNRLCGQAGRADRQYFLRSDHMSMPTRIYLRCGSGAPRSSLSTHTTDEGEAAPLSAHYIAGHTSVXWRPPXILILSHTXXSATLAXPVRSSTDVATSHRXKQHXXKKH

SEQ ID NO: 7200 - protein, 72 aa, Glycine max
  Coding DNA Sequence Number=SeqID_4929
  Subcellular localization annotation: CTP_CleavageSite=22; ConfidenceScore=5.15e-01
GATKSKANRIGVSTSSCTKKTRSKLKGNVKFHTIKEWEPNTRTWNLKLNITEKTSPNRSTPSYIFKDGSTNL

SEQ ID NO: 7201 - protein, 149 aa, Glycine max
  Coding DNA Sequence Number=SeqID_4931
LNGDAARGLRRKFRAAVVMYIRVEAREAKRDGSTRQHSNPAERLRAHTNTQNQRLFSTQHTPDIPETSQRGAVLGTPTQHTQHHALTPLAHSKGRLVPEGRTHPTTAQIHNKTNTTRHKQPPLQRPTYSLQSLFIYYRPQHTSQNNTKN

SEQ ID NO: 7202 - protein, 141 aa, Glycine max
  misc_feature (105)..(105): Xaa can be any naturally occurring amino acid
  Coding DNA Sequence Number=SeqID_4933
  Gene Ontology: Mol. function=protein transporter activity; Cellular component=clathrin adaptor complex; Biological process=intracellular protein transport
  Homolog annotation: Hit_ID=A7P2Q5; Match level="QueryCoverage=100%, HitCoverage=24%, E-value=2e-36, Identity=57%"; Hit description =Chromosome chr1 scaffold_5, whole genome shotgun sequence
SLQNLNQEDGHIQVQVLTGHNQTGSFQTHPNMNKEFSANDYILGLKHPNRPLPTGKASDAAGVDFSTCIMHTTDYLILSFTIICWTCSSGNQTYVCIEYEAISMXDLNNGVILLPLPSLLEAPYCMHTDGEWMYYLKHSIL

SEQ ID NO: 7203 - protein, 113 aa, Glycine max
  Coding DNA Sequence Number=SeqID_4934
  Gene Ontology: Mol. function=structural constituent of cuticle; Cellular component=extracellular region; Biological process=larval chitin-based cuticle development
  Homolog annotation: Hit_ID=UPI00015B4B06; Match level="QueryCoverage =81%, HitCoverage=67%, E-value=1e-25, Identity=60%"; Hit description =PREDICTED: similar to pupal cuticle protein 78E, putative, partial
  Pfam annotation: Domain name=Chitin_bind_4; Domain location=37-104; Score=102.6; E_value=1.2e-27; Accession=PF00379.13; Description =Insect cuticle protein
MIGLVQVCLLAVVAVTLAAPQNKPIAILRQESDGPNPDGSYRYAFDTENGIHGEESGQLLNAGSEAEAIAVQGASSYTSPEGQVINLQYTAGEQGFVPVGDHLPTSPPIPEAI

SEQ ID NO: 7204 - protein, 102 aa, Glycine max
  misc_feature (19)..(19): Xaa can be any naturally occurring amino acid
  misc_feature (40)..(40): Xaa can be any naturally occurring amino acid
  misc_feature (67)..(67): Xaa can be any naturally occurring amino acid
  Coding DNA Sequence Number=SeqID_4935
  Gene Ontology: Mol. function=DNA-directed RNA polymerase activity; Cellular component=nucleus; Biological process=transcription
  Homolog annotation: Hit_ID=Q70LQ2; Match level="QueryCoverage=82%, HitCoverage=25%, E-value=7e-19, Identity=57%"; Hit description=RNA polymerase II
  Pfam annotation: Domain name=RNA_pol_Rpb2_4; Domain location=3-64; Score=28.4; E_value=8.2e-07; Accession=PF04566.3; Description=RNA polymerase Rpb2, domain 4
TKILVNGCWMGLHRDPDVXARTLKKLLRHAVVNTEGGGGXDIRRQKLRIYTGCGRCRRALFIEATHXLFIRNTDIPALQTDGDPAATASHLCRLRNHRAHAR

SEQ ID NO: 7205 - protein, 143 aa, Glycine max
  misc_feature (13)..(13): Xaa can be any naturally occurring amino acid
  misc_feature (15)..(15): Xaa can be any naturally occurring amino acid
  misc_feature (39)..(39): Xaa can be any naturally occurring amino acid
  Coding DNA Sequence Number=SeqID_4936
CCYVYSVKYNTIXGXYNIHNHSLCNQRCPLAALPLSSSXSTYGRRSRCWCGAWCDSLRTNIQIDMYGACARAWASNPPPIALICCIIISVYRSVICGMRAIYRVITQTKACVRAELHSLSARMKHYTLAKTRGAKIISCGAVV

SEQ ID NO: 7206 - protein, 127 aa, Glycine max
  misc_feature (117)..(117): Xaa can be any naturally occurring amino acid
  misc_feature (120)..(120): Xaa can be any naturally occurring amino acid
  misc_feature (122)..(122): Xaa can be any naturally occurring amino acid
  Coding DNA Sequence Number=SeqID_4938
  Gene Ontology: Mol. function=small conjugating protein ligase activity; Cellular component=cytoplasm; Biological process=ubiquitin- dependent protein catabolic process
  Homolog annotation: Hit_ID=Q9FI61; Match level="QueryCoverage=100%, HitCoverage=66%, E-value=4e-64, Identity=90%"; Hit description =Ubiquitin carrier protein
  Pfam annotation: Domain name=RWD; Domain location=7-113; Score=-5.0; E_value=0.081; Accession=PF05773.12; Description=RWD domain
  Pfam annotation: Domain name=UEV; Domain location=7-119; Score=-34.2; E_value=0.02; Accession=PF05743.3; Description=UEV domain
  Pfam annotation: Domain name=UQ_con; Domain location=6-127; Score =177.8; E_value=2.7e-50; Accession=PF00179.16; Description=Ubiquitin -conjugating enzyme
  Pfam module annotation: Pfam domain module=RWD::UEV::UQ_con; Domain location=7-113::7-119::6-127
MIDISRVQKELQDCEKDRDSSGIRVCPKSDNLTRLTGTIPGPIGTPYEGGTFQIDITIPEGYPFEPPKMQFSTKVWHPNISSQSGAICLDVLKDQWSPALTLKTALVSVQALLSAPXPKXPXDAVVA

SEQ ID NO: 7207 - protein, 225 aa, Glycine max
  Coding DNA Sequence Number=SeqID_4939
  Gene Ontology: Mol. function=drug transporter activity; Cellular component=membrane; Biological process=multidrug transport
  Homolog annotation: Hit_ID=Q3T7F5; Match level="QueryCoverage=96%, HitCoverage=41%, E-value=2e-59, Identity=59%"; Hit description=Multi drug and toxin extrusion protein
  Subcellular localization annotation: CTP_CleavageSite=59; ConfidenceScore=5.03e-01
ASASTALLFGTILGLIQAAVLIFATKPLLGVMGVKRDSPMLKPAESYLRLRSFGAPAVLLSLAMQGIFRGFKDTTTPLYVIVSGYALNVILDPIFIFTLKLGIKGAAIAHVLSQYMMAFTLLLILMKKVHLLPPRIKDLQIFRFLKNGGLLMLRVIAVTFCVTLAHHWLQARSIPMAAFQTCLQAGDIVLLAMVGCVSAIYWSLWKTETQALNDLLEAFCLIGRG

SEQ ID NO: 7208 - protein, 166 aa, Glycine max; identical to SEQ ID NO: 6753
  misc_feature (7)..(8): Xaa can be any naturally occurring amino acid
  misc_feature (12)..(12): Xaa can be any naturally occurring amino acid
  misc_feature (14)..(15): Xaa can be any naturally occurring amino acid
  misc_feature (17)..(17): Xaa can be any naturally occurring amino acid
  misc_feature (19)..(24): Xaa can be any naturally occurring amino acid
  misc_feature (60)..(60): Xaa can be any naturally occurring amino acid
  misc_feature (78)..(78): Xaa can be any naturally occurring amino acid
  misc_feature (103)..(103): Xaa can be any naturally occurring amino acid
  misc_feature (111)..(113): Xaa can be any naturally occurring amino acid
  misc_feature (127)..(127): Xaa can be any naturally occurring amino acid
  misc_feature (130)..(130): Xaa can be any naturally occurring amino acid
  Coding DNA Sequence Number=SeqID_4940
  Subcellular localization annotation: CTP_CleavageSite=86; ConfidenceScore=5.12e-01

SEQ ID NO: 7209 - protein, 52 aa, Glycine max
  Coding DNA Sequence Number=SeqID_4942
YTIDQYNLFFLNNNIEFFHRHCLVYNSSFFCHYITSYIYHFFLSLPSLKVYI

SEQ ID NO: 7210 - protein, 149 aa, Glycine max
  misc_feature (2)..(2): Xaa can be any naturally occurring amino acid
  misc_feature (9)..(10): Xaa can be any naturally occurring amino acid
  misc_feature (32)..(32): Xaa can be any naturally occurring amino acid
  misc_feature (34)..(34): Xaa can be any naturally occurring amino acid
  Coding DNA Sequence Number=SeqID_4944
FXIRHPQSXXMRDHHSIWLWSIHHYRPTPTAXSXWGYGAFDTSDPANNSTSTNTNNTASPAPPTFRPLQPPGMVYYTNHQHSIHATLGRELANVGSKTITSLGRETLLPNILTELLIQSTDPNANGDLMNQALIPSPPQKAKNKSNRRT

SEQ ID NO: 7211 - protein, 136 aa, Glycine max
  misc_feature (7)..(8): Xaa can be any naturally occurring amino acid
  misc_feature (74)..(74): Xaa can be any naturally occurring amino acid
  Coding DNA Sequence Number=SeqID_4945
LEQQAVXXAGSDKHRSSLTRVSRSCPNVRCIIYIDSKTRALSTLRGQLHINKCLPIYKILHLLSRSISENRLAXSVASLQTHRQIYVNLYHPLACVSIVGVPRYLPYSEWCNPVPQYFLLRLVIDGRVCGGNVMWR

SEQ ID NO: 7212 - protein, 94 aa, Glycine max
  Coding DNA Sequence Number=SeqID_4947
QKQAQKDLQLRNFMVMSAGINGALDNSEKGEGKKQEAGNRGSKIQWQDKHEVMLKEKGKMHKQLKKKGVLKAMFSSGPCFASERNEPLKSPKDV

SEQ ID NO: 7213 - protein, 107 aa, Glycine max; identical to SEQ ID NO: 6761
  misc_feature (73)..(73): Xaa can be any naturally occurring amino acid
  Coding DNA Sequence Number=SeqID_4949
  Subcellular localization annotation: CTP_CleavageSite=28; ConfidenceScore=5.41e-01

SEQ ID NO: 7214 - protein, 206 aa, Glycine max
  misc_feature (200)..(200): Xaa can be any naturally occurring amino acid
  Coding DNA Sequence Number=SeqID_4951
  Gene Ontology: Mol. function=glyceraldehyde-3-phosphate dehydrogenase (NADP+) activity; Cellular component=cytoplasm; Biological process =metabolic process
  Homolog annotation: Hit_ID=A7PFT1; Match level="QueryCoverage=99%, HitCoverage=41%, E-value=7e-96, Identity=84%"; Hit description =Chromosome chr11 scaffold_14, whole genome shotgun sequence
  Pfam annotation: Domain name=Aldedh; Domain location=19-206; Score= -250.1; E_value=0.00048; Accession=PF00171.12; Description=Aldehyde dehydrogenase family
LFAEILDGDVYKYYADGEWKKSASGKSVAIINPTTRKTQYKVQACSQEEVNKVMDLAKSAQKLWAKTPLWKRAELFHKAAAILKEHKAPIAECLVKEIAKPAKDAVTEVVRSEDLVSYTAEEGVRILGEGKFLVSDSSPGHERTRYCLTSKIALGVMLAMSPFNYPVHLAVSKIAPALIAGDCIVLTPSTQRAATARHMXHCFHRL

SEQ ID NO: 7215 - protein, 107 aa, Glycine max; identical to SEQ ID NO: 6764
  misc_feature (14)..(14): Xaa can be any naturally occurring amino acid
  Coding DNA Sequence Number=SeqID_4952

SEQ ID NO: 7216 - protein, 113 aa, Glycine max
  misc_feature (29)..(29): Xaa can be any naturally occurring amino acid
  misc_feature (57)..(58): Xaa can be any naturally occurring amino acid
  misc_feature (68)..(68): Xaa can be any naturally occurring amino acid
  misc_feature (84)..(84): Xaa can be any naturally occurring amino acid
  misc_feature (93)..(93): Xaa can be any naturally occurring amino acid
  misc_feature (97)..(97): Xaa can be any naturally occurring amino acid
  Coding DNA Sequence Number=SeqID_4954
AMTLERDATIRTSERVHTVDSARHPTAEXNSSIYYLHSYRTAYETIYSHATFSRSQXXLYTLVRRTSXALCSFSVCLRAYFSVXAITYTTRSXHTTXPSLTYRIDDLVIVYDT

SEQ ID NO: 7217 - protein, 258 aa, Glycine max
  Coding DNA Sequence Number=SeqID_4956
  Gene Ontology: Mol. function=6-phosphogluconolactonase activity; Cellular component=microtubule; Biological process=carbohydrate metabolic process
  Homolog annotation: Hit_ID=Q94IQ4; Match level="QueryCoverage=100%, HitCoverage=100%, E-value=1e-125, Identity=82%"; Hit description =Putative 6-phosphogluconolactonase
MAETTQRKREVFATKNELSVALAKYTAHLSAKFCKEKGIFTVVLSGCGLIDWLGKLLESPYKESVEWSKWHVFWVDERVCSHEDQNSNYKLAMDGFISKVGIPKENIYAIDKQCAADGDAERCATLYEECLRNLVKEKILPLCPNGQFPQFDLQLQGMGPDGHMASLFPERPQINVTDKWVTHITDSPKPPPRRITLTLPVINSSLYNLVAVCDDNTEQCARSIADIFKHNNLALPAAHLTAQVEQMWYLDKAAASLL

SEQ ID NO: 7218 - protein, 238 aa, Glycine max
  misc_feature (17)..(17): Xaa can be any naturally occurring amino acid
  misc_feature (28)..(28): Xaa can be any naturally occurring amino acid
  misc_feature (210)..(210): Xaa can be any naturally occurring amino acid
  Coding DNA Sequence Number=SeqID_4957
  Subcellular localization annotation: CTP_CleavageSite=17; ConfidenceScore=5.38e-01
TPSPRCTRCVRLSSGCXAAHASPSLLSXTLFPLSHTIYTLTTQPLPRRPPPSSLLAPPSRRLRPSTHSTPSPPARRTLRAPPRALASPPPRPAGLSSSTHRAPRSPHRGTRWLGRLYRLTPPPPPRPRAPPHAPRLLARARPSPPTPLAPHPAALSPAPRTSFVARPSRRLSPPLHLHSPPLRHAPRLPPPHPRPAPSVPGACPDAAYIXSPPLPARARPAYYHAVSLSLPPRSSSPR

SEQ ID NO: 7219 - protein, 106 aa, Glycine max; identical to SEQ ID NO: 6766
  misc_feature (2)..(3): Xaa can be any naturally occurring amino acid
  misc_feature (6)..(6): Xaa can be any naturally occurring amino acid
  misc_feature (34)..(34): Xaa can be any naturally occurring amino acid
  misc_feature (43)..(43): Xaa can be any naturally occurring amino acid
  misc_feature (66)..(66): Xaa can be any naturally occurring amino acid
  misc_feature (68)..(69): Xaa can be any naturally occurring amino acid
  misc_feature (71)..(71): Xaa can be any naturally occurring amino acid
  misc_feature (88)..(89): Xaa can be any naturally occurring amino acid
  misc_feature (93)..(93): Xaa can be any naturally occurring amino acid
  misc_feature (95)..(95): Xaa can be any naturally occurring amino acid
  misc_feature (97)..(97): Xaa can be any naturally occurring amino acid
  misc_feature (100)..(101): Xaa can be any naturally occurring amino acid
  misc_feature (104)..(104): Xaa can be any naturally occurring amino acid
  Coding DNA Sequence Number=SeqID_4959
  Subcellular localization annotation: CTP_CleavageSite=40; ConfidenceScore=5.57e-01

SEQ ID NO: 7220 - protein, 134 aa, Glycine max
  Coding DNA Sequence Number=SeqID_4961
  Homolog annotation: Hit_ID=A9PDE9; Match level="QueryCoverage=54%, HitCoverage=56%, E-value=2e-08, Identity=39%"; Hit description =Putative uncharacterized protein
QISARTSINAYLWICSTLVLSDSRLHGSRGCLGCFPNPKGHATNKDNRSEDFWSSSAFEIDQSALQSQKSISSIGIPSDPQSSADIQIDSSEYVNHGKYSVIVCLSIISVGLLVSLIRYQRVLVILYHPGSHFL

SEQ ID NO: 7221 - protein, 56 aa, Glycine max
  Coding DNA Sequence Number=SeqID_4962
  Gene Ontology: Mol. function=metal ion binding; Biological process =defense response to bacterium
  Homolog annotation: Hit_ID=Q2TE73; Match level="QueryCoverage=82%, HitCoverage=10%, E-value=1e-13, Identity=73%"; Hit description=Ring zinc finger protein
MWVVFGTIPTPVLLAAMHGKIACVEKLLEAGANVLMFDACYRRTCLHLCPYFGHSC

SEQ ID NO: 7222 - protein, 119 aa, Glycine max
  misc_feature (37)..(37): Xaa can be any naturally occurring amino acid
  Coding DNA Sequence Number=SeqID_4963
  Gene Ontology: Mol. function=galactinol-raffinose galactosyltransferas e activity; Cellular component=cytoplasm; Biological process =oligosaccharide biosynthetic process
  Homolog annotation: Hit_ID=Q9SBZ0; Match level="QueryCoverage=89%, HitCoverage=12%, E-value=2e-35, Identity=68%"; Hit description =Galactinol-raffinose galactosyltransferase
AATDDLLSHIIHYSTLRLEIILCKNHLFYQQTPLKIXNFNAHGGIIVAFNCQGAGWDPKMKNIKGFSECYRPIYCTVHVTEVELDHKKEAVHMGKAQEYVLYLNQAEELHFITPKSEPL

SEQ ID NO: 7223 - protein, 122 aa, Glycine max
  misc_feature (8)..(8): Xaa can be any naturally occurring amino acid
  misc_feature (11)..(12): Xaa can be any naturally occurring amino acid
  misc_feature (14)..(14): Xaa can be any naturally occurring amino acid
  misc_feature (19)..(19): Xaa can be any naturally occurring amino acid
  misc_feature (29)..(29): Xaa can be any naturally occurring amino acid
  misc_feature (32)..(32): Xaa can be any naturally occurring amino acid
  misc_feature (65)..(65): Xaa can be any naturally occurring amino acid
  misc_feature (73)..(73): Xaa can be any naturally occurring amino acid
  Coding DNA Sequence Number=SeqID_4964
RHHHTTTXITXXRXNISNXRGYREERDRXSMXVMGRMYEGRRTSTPAHLMLSCCAMNISSHLCAXGLSLSCDXSLADSPITVEESDSYTCALAPLSMSVSCRIYPHFAVGRHSRHVMTTSSA

SEQ ID NO: 7224 - protein, 233 aa, Glycine max
  Coding DNA Sequence Number=SeqID_4966
  Gene Ontology: Mol. function=transferase activity; Cellular component= cytoplasm; Biological process=response to stress
  Homolog annotation: Hit_ID=Q8LGN6; Match level="QueryCoverage=93%, HitCoverage=93%, E-value=4e-82, Identity=68%"; Hit description =Glutathione-S-transferase Cla47
  Pfam annotation: Domain name=GST_C; Domain location=100-203; Score =13.6; E_value=0.0039; Accession=PF00043.15; Description=Glutathione S-transferase, C-terminal domain
  Pfam annotation: Domain name=GST_N; Domain location=5-78; Score=61.8; E_value=2.2e-15; Accession=PF02798.10; Description=Glutathione S -transferase, N-terminal domain
  Pfam module annotation: Pfam domain module=GST_C::GST_N; Domain location=100-203::5-78
MAAKPDLKLLGMSVSPFVIRVRMALHMKGVSHEYIEQDLFNKSELLLESSPVEKKVPVLIHDGKPVCDSPAIVQYIDEVWAATGPPILPADPYERAVARFWTAYVDDKLFPAYAGTAKAATEEERTQQINEMFAVMGQLEEAFAQCSNGKAFFAGDSIGNLDIAVGCNLLLLEVLRSMYGVEFVDTGRTPLLAAWAKRFGETDAAREVVPDVHVAVEYAKKRQAYWAAAAATK

SEQ ID NO: 7225 - protein, 78 aa, Glycine max
  Coding DNA Sequence Number=SeqID_4967
  Homolog annotation: Hit_ID=Q9M371; Match level="QueryCoverage=94%, HitCoverage=9%, E-value=2e-09, Identity=50%"; Hit description =Putative uncharacterized protein F15G16.60
SIEYFIIPCQTDDSGGSTGVVVYGRVRHLIDAYLLSEKGLPPDLDRSYITHVSGRPPDYNPCEELDNLRLLARTLVLE

SEQ ID NO: 7226 - protein, 152 aa, Glycine max
  misc_feature (76)..(76): Xaa can be any naturally occurring amino acid
  misc_feature (79)..(79): Xaa can be any naturally occurring amino acid
  misc_feature (81)..(81): Xaa can be any naturally occurring amino acid
  misc_feature (87)..(88): Xaa can be any naturally occurring amino acid
  Coding DNA Sequence Number=SeqID_4968
  Homolog annotation: Hit_ID=A7PDA5; Match level="QueryCoverage=86%, HitCoverage=26%, E-value=9e-25, Identity=47%"; Hit description =Chromosome chr17 scaffold_12, whole genome shotgun sequence
LRRPPPHGEASKVTDESVLCAVPCLPKIGSSNDVKKMKFNAGSGRSKRLSPTSNVLSGRHIHTQHDETFLFSLGIXFGXIXSILANXXEMDKLIELLKQTESLVQDLQQELEMKDSMRVKELHNENYDSQGTCDHSFCDKELNGFSPEKHTD

SEQ ID NO: 7227 - protein, 128 aa, Glycine max
  Coding DNA Sequence Number=SeqID_4969
  Gene Ontology: Mol. function=metal ion binding; Cellular component =cellular_component; Biological process=response to stress
  Homolog annotation: Hit_ID=Q94B40; Match level="QueryCoverage=100%, HitCoverage=71%, E-value=4e-46, Identity=71%"; Hit description=Zinc finger A20 and AN1 domain-containing stress-associated protein 6
  Pfam annotation: Domain name=zf-AN1; Domain location=69-109; Score =69.1; E_value=1.5e-17; Accession=PF01428.7; Description=AN1-like Zinc finger
  Subcellular localization annotation: CTP_CleavageSite=84; ConfidenceScore=5.28e-01
IKTTVESSLSAVSPPSTEIASVSSPVISPLVQNPSAELEVTTKNVPATLTPPPSQTTTEDKQLKRPNRCTTCRKRVGLTGFKCRCGTTFCGVHRYPEVHGCTFDFKSAGREEIAKANPLVKAAKLQKI

SEQ ID NO: 7228 - protein, 75 aa, Glycine max
  Coding DNA Sequence Number=SeqID_4970
IMVTAEFDKLIQHMQSPGTVAKHLRDMGFPDFDQSVINYWYTSTGIHPHKKYFAALREIGKMYGIEITFTGLAAK

SEQ ID NO: 7229 - protein, 108 aa, Glycine max
  misc_feature (2)..(2): Xaa can be any naturally occurring amino acid
  misc_feature (17)..(17): Xaa can be any naturally occurring amino acid
  misc_feature (22)..(22): Xaa can be any naturally occurring amino acid
  misc_feature (36)..(36): Xaa can be any naturally occurring amino acid
  misc_feature (40)..(40): Xaa can be any naturally occurring amino acid
  misc_feature (54)..(54): Xaa can be any naturally occurring amino acid
  misc_feature (61)..(61): Xaa can be any naturally occurring amino acid
  misc_feature (75)..(75): Xaa can be any naturally occurring amino acid
  misc_feature (100)..(100): Xaa can be any naturally occurring amino acid
  misc_feature (105)..(105): Xaa can be any naturally occurring amino acid
  Coding DNA Sequence Number=SeqID_4972
CXLFDQVSRSFYDRDLXHSYDXVCVRAHTPYLQRTXSHIXYIHSLTSMSLCCTXNVSMIIXYEQAKRLTASSCNXLCSSSMYRTLRRDMKSARDHTSALXSSYIXHHI

SEQ ID NO: 7230 - protein, 120 aa, Glycine max
  misc_feature (13)..(13): Xaa can be any naturally occurring amino acid
  Coding DNA Sequence Number=SeqID_4974
YHRPVSVKTLAHXVKAAANKIMTSRTDAYYNNKFYDSVEPTALDYRVLRRLVIIRALAYIHERRQVTQVDIAACCPYLYHTEATASCAPTLSSRSTPENSWWGGVPYCCRLRCGVGRRGR

SEQ ID NO: 7231 - protein, 108 aa, Glycine max
  misc_feature (7)..(7): Xaa can be any naturally occurring amino acid
  misc_feature (55)..(55): Xaa can be any naturally occurring amino acid
  misc_feature (76)..(76): Xaa can be any naturally occurring amino acid
  misc_feature (90)..(90): Xaa can be any naturally occurring amino acid
  misc_feature (108)..(108): Xaa can be any naturally occurring amino acid
  Coding DNA Sequence Number=SeqID_4976
YLNSQRXVWSNAAHSTCRAHSDTVLTYTIYALRDKRDTKLVPCATPYTVNLYVVXTVTDDRRTYMGAVPRPRSSDXIHASSTDVYHAMCXCALTVYRYLYLTDISRMX

SEQ ID NO: 7232 - protein, 202 aa, Glycine max
  misc_feature (14)..(16): Xaa can be any naturally occurring amino acid
  misc_feature (24)..(24): Xaa can be any naturally occurring amino acid
  misc_feature (44)..(45): Xaa can be any naturally occurring amino acid
  misc_feature (69)..(70): Xaa can be any naturally occurring amino acid
  misc_feature (86)..(86): Xaa can be any naturally occurring amino acid
  misc_feature (94)..(94): Xaa can be any naturally occurring amino acid
  misc_feature (105)..(105): Xaa can be any naturally occurring amino acid
  misc_feature (109)..(109): Xaa can be any naturally occurring amino acid
  misc_feature (128)..(128): Xaa can be any naturally occurring amino acid
  misc_feature (133)..(133): Xaa can be any naturally occurring amino acid
  misc_feature (141)..(141): Xaa can be any naturally occurring amino acid
  misc_feature (146)..(146): Xaa can be any naturally occurring amino acid
  misc_feature (150)..(150): Xaa can be any naturally occurring amino acid
  misc_feature (153)..(153): Xaa can be any naturally occurring amino acid
  misc_feature (168)..(168): Xaa can be any naturally occurring amino acid
  misc_feature (170)..(170): Xaa can be any naturally occurring amino acid
  misc_feature (175)..(175): Xaa can be any naturally occurring amino acid
  misc_feature (178)..(178): Xaa can be any naturally occurring amino acid
  misc_feature (194)..(195): Xaa can be any naturally occurring amino acid
  misc_feature (202)..(202): Xaa can be any naturally occurring amino acid
  Coding DNA Sequence Number=SeqID_4978
QSAYASLYPAWSRXXXIYLTNSTXYAHQLMTRLSTPSNSILLGXXQRGTIPTPPSTHEYYHLESHASLXXRYEHHMLQISLDHYVXTILCIVYXQNQVSKPRQRXCVDXRWSRRESDLSSALSVRSAXCRLHXSRLTYALXALALXTTRXLIXDDERYDRHTELRLGXCXTRYQXQLXYLCDTKRRIYRILFRXXLYVLNSX

SEQ ID NO: 7233 - protein, 133 aa, Glycine max
  misc_feature (16)..(16): Xaa can be any naturally occurring amino acid
  misc_feature (25)..(25): Xaa can be any naturally occurring amino acid
  misc_feature (45)..(45): Xaa can be any naturally occurring amino acid
  misc_feature (57)..(57): Xaa can be any naturally occurring amino acid
  misc_feature (66)..(66): Xaa can be any naturally occurring amino acid
  misc_feature (74)..(74): Xaa can be any naturally occurring amino acid
  Coding DNA Sequence Number=SeqID_4980
VYARVFSTPRVVEYKXSTTTKHTHXRTATQLYLSCRWQDFKNIIXLILVLAYKTQLXEMLREELIXLLPILYGXEEGAGSARHSYTRRHGSPGHRCICIAYTEHPTQETREPAIMSYPRPVVCVIYYSLYTFV

SEQ ID NO: 7234 - protein, 114 aa, Glycine max
  Coding DNA Sequence Number=SeqID_4981
SSTMVYAARERGVLYGGEHARPAPRDDDTLYNTAALHDIELIKDSDARCRAASVFLLLLSSQSRAHAHSDIDITSPTALAFTTWSFMAPSFGGEVLYRTHPVTCVETGLTHLND

SEQ ID NO: 7235 - protein, 56 aa, Glycine max
  Coding DNA Sequence Number=SeqID_4983
KVSCGVQVSSAIRVRVLIPTILGSSERPKQRGGAEERRSTRLHVRGLRPRAKKKKK

SEQ ID NO: 7236 - protein, 65 aa, Glycine max
  Coding DNA Sequence Number=SeqID_4985
CSEHTPFSTLSVKLYRFAIHRTIACSFPFLSLRPMNFISWHHWHSAYLLLGCVFYLCVKSLNSRT

SEQ ID NO: 7237 - protein, 86 aa, Glycine max
  Coding DNA Sequence Number=SeqID_4987
  Homolog annotation: Hit_ID=Q6ZDP9; Match level="QueryCoverage=100%, HitCoverage=18%, E-value=4e-07, Identity=37%"; Hit description =Putative uncharacterized protein P0589E08.14
DFDKGIWVKKYSMPSHVARFGNPFLMLDDGRIFFNRLDYGLGFFSAGEHGEGFLQSYDPTNDTSGEALKLKESKSIGVYTGSLLSL

SEQ ID NO: 7238 - protein, 148 aa, Glycine max
  misc_feature (3)..(4): Xaa can be any naturally occurring amino acid
  misc_feature (7)..(7): Xaa can be any naturally occurring amino acid
  misc_feature (10)..(11): Xaa can be any naturally occurring amino acid
  misc_feature (18)..(18): Xaa can be any naturally occurring amino acid
  misc_feature (20)..(26): Xaa can be any naturally occurring amino acid
  misc_feature (29)..(29): Xaa can be any naturally occurring amino acid
  misc_feature (41)..(42): Xaa can be any naturally occurring amino acid
  misc_feature (44)..(44): Xaa can be any naturally occurring amino acid
  misc_feature (47)..(47): Xaa can be any naturally occurring amino acid
  misc_feature (51)..(51): Xaa can be any naturally occurring amino acid
  misc_feature (55)..(56): Xaa can be any naturally occurring amino acid
  misc_feature (65)..(65): Xaa can be any naturally occurring amino acid
  misc_feature (70)..(70): Xaa can be any naturally occurring amino acid
  misc_feature (118)..(118): Xaa can be any naturally occurring amino acid
  misc_feature (129)..(129): Xaa can be any naturally occurring amino acid
  misc_feature (132)..(132): Xaa can be any naturally occurring amino acid
  Coding DNA Sequence Number=SeqID_4989
  Subcellular localization annotation: CTP_CleavageSite=67; ConfidenceScore=5.12e-01
DHXXAAXSAXXGRASGPXPXXXXXXXAAXLRVQGRWRVGGXXGXCFXNQKXLSRXXGGGPTPFPXAKCHXEGGGCNLSIPTRPGASACRTRSPRHGRSTAVERLSLDGRDYRRGSSTXLYRIPCGTLIXDAXSSTNNILYLFVQSYVS

SEQ ID NO: 7239 - protein, 87 aa, Glycine max; identical to SEQ ID NO: 6372
  misc_feature (67)..(67): Xaa can be any naturally occurring amino acid
  Coding DNA Sequence Number=SeqID_4991

SEQ ID NO: 7240 - protein, 125 aa, Glycine max
  misc_feature (7)..(8): Xaa can be any naturally occurring amino acid
  misc_feature (18)..(18): Xaa can be any naturally occurring amino acid
  Coding DNA Sequence Number=SeqID_4561
TSNSSVXXPQHNPHWQEXKHTYLYFLLSSCVLRVRPYNYILCSEGYSVCLYIHLSSDIISKVFDDWAPYIRDTDGVHLGASKIFIYMLYSREAHIHLALCERTWTTYMLVMLYKIRDASHALYRF

SEQ ID NO: 7241 - protein, 70 aa, Glycine max
  Coding DNA Sequence Number=SeqID_4563
SSQLRRPPPQNLRRILNNSMLKRLSTLSTFSNIKSLSAKPILPYSDFYFDPPPSEAWKHFPYIPFFSANT

SEQ ID NO: 7242 - protein, 138 aa, Glycine max
  Coding DNA Sequence Number=SeqID_4565
CPLPRRRADYTISLQYNIRLHLIYSHTLHNYVLDLLHIRALNQRRTVGRQRQCLLWYTRAGSCHHTLLRSLSLLTRNMLLYLPQSYYHSSTRVCTSVLYIVLYVLSLTAACVRAHFTNNTKKHVPHTHKSPSRLLCIS

SEQ ID NO: 7243 - protein, 106 aa, Glycine max
  misc_feature (74)..(74): Xaa can be any naturally occurring amino acid
  Coding DNA Sequence Number=SeqID_4567
  Gene Ontology: Mol. function=magnesium ion binding; Cellular component=chloroplast; Biological process=photosynthesis, light harvesting
  Homolog annotation: Hit_ID=A5B523; Match level="QueryCoverage=100%, HitCoverage=36%, E-value=2e-33, Identity=64%"; Hit description =Putative uncharacterized protein
  Pfam annotation: Domain name=Chloroa_b-bind; Domain location=1-70; Score=-47.2; E_value=0.067; Accession=PF00504.12; Description =Chlorophyll A-B binding protein
VIAEIALVGGSHYYLIINGLNFENKLHPDGTFDPLGLANDLDPAALLKVKEINHGRLAMSAMLGFYFHPYRTGXGPADNLATHLTHPFSNKSLTALSGSPQRSPSL

SEQ ID NO: 7244 - protein, 125 aa, Glycine max; identical to SEQ ID NO: 6081
  misc_feature (70)..(70): Xaa can be any naturally occurring amino acid
  misc_feature (99)..(99): Xaa can be any naturally occurring amino acid
  misc_feature (116)..(116): Xaa can be any naturally occurring amino acid
  Coding DNA Sequence Number=SeqID_4568
  Subcellular localization annotation: CTP_CleavageSite=31; ConfidenceScore=5.38e-01

SEQ ID NO: 7245 - protein, 122 aa, Glycine max
  misc_feature (48)..(48): Xaa can be any naturally occurring amino acid
  misc_feature (60)..(60): Xaa can be any naturally occurring amino acid
  misc_feature (78)..(78): Xaa can be any naturally occurring amino acid
  Coding DNA Sequence Number=SeqID_4570
  Gene Ontology: Mol. function=binding
  Homolog annotation: Hit_ID=Q9ZUV4; Match level="QueryCoverage=84%, HitCoverage=17%, E-value=8e-26, Identity=57%"; Hit description =Nodulin-like protein
LGQIGNSLGYPRKSLTTFVSLVSIWNYLGRAFSGFASEYLLAQYQVPXPLVVTLGMPFFXVGTFLIAFGIPNPFYFFXKNIGFWFGAHLPFMFAIYLENLGLKTSPLFPIFGQGKPPWLFHL

SEQ ID NO: 7246 - protein, 121 aa, Glycine max
  misc_feature (27)..(28): Xaa can be any naturally occurring amino acid
  misc_feature (91)..(91): Xaa can be any naturally occurring amino acid
  misc_feature (96)..(96): Xaa can be any naturally occurring amino acid
  Coding DNA Sequence Number=SeqID_4571
  Homolog annotation: Hit_ID=Q2HW86; Match level="QueryCoverage=82%, HitCoverage=15%, E-value=9e-30, Identity=63%"; Hit description =Putative uncharacterized protein
VSRGEETTQHEKHAEIFQNAHEGKEQXXFVDYGWANIGSFDDLDRIFSNDDPIFGHASLDSSNELWSSKDVSNNVAPLPLDTPSSSGALRXRTESXEITEEYVHVVMITGPQHERGVWIPV

SEQ ID NO: 7247 - protein, 141 aa, Glycine max
  misc_feature (134)..(134): Xaa can be any naturally occurring amino acid
  misc_feature (139)..(139): Xaa can be any naturally occurring amino acid
  Coding DNA Sequence Number=SeqID_4572
  Gene Ontology: Mol. function=structural constituent of ribosome; Cellular component=ribonucleoprotein complex; Biological process =translation
  Homolog annotation: Hit_ID=P16181; Match level="QueryCoverage=100%, HitCoverage=88%, E-value=2e-64, Identity=83%"; Hit description=40S ribosomal protein S11-1
  Pfam annotation: Domain name=Ribosomal_S17; Domain location=74-141; Score=129.5; E_value=9.9e-36; Accession=PF00366.10; Description =Ribosomal protein S17
MAEQTEKAFLKQPKVFLSSKKSGKGKRPGKGGNRFWKNIGLGFKTPRDAIDGHYIDKKCPFTGTVSVRGRILAGTCHSAKMQRTIIVRRNYLHFVKKYQRYEKRHSNIPAHVSPCFRVKEGDHVIIGQCRPLSXTVRFXVL

SEQ ID NO: 7248 - protein, 86 aa, Glycine max
  Coding DNA Sequence Number=SeqID_142
TIIESVVTLLTWLNHSHFVWLFIGLRENTSFSREGKNTKYNNNMDSTLFLFHNSQLILDAQQLSSHIELFNYIFHNKVQLSFSQII

SEQ ID NO: 7249 - protein, 75 aa, Glycine max
  misc_feature (67)..(67): Xaa can be any naturally occurring amino acid
  Coding DNA Sequence Number=SeqID_144
LRKQREKTRLLRSRGGSQLEMMAHRRPPERRSAEPNENPRLELPWHALLHGSSRALGFTRAHQGRFXFSFWVSFE

SEQ ID NO: 7250 - protein, 222 aa, Glycine max
  misc_feature (25)..(25): Xaa can be any naturally occurring amino acid
  misc_feature (167)..(167): Xaa can be any naturally occurring amino acid
  misc_feature (222)..(222): Xaa can be any naturally occurring amino acid
  Coding DNA Sequence Number=SeqID_1429
  Gene Ontology: Mol. function=RNA binding; Cellular component =cytoplasm; Biological process=mRNA catabolic process, deadenylation -dependent decay
  Homolog annotation: Hit_ID=A7QQT8; Match level="QueryCoverage=81%, HitCoverage=43%, E-value=7e-55, Identity=60%"; Hit description =Chromosome undetermined scaffold_144, whole genome shotgun sequence
  Pfam annotation: Domain name=PUF; Domain location=102-136; Score =38.1; E_value=3.2e-08; Accession=PF00806.9; Description=Pumilio -family RNA binding repeat
  Pfam annotation: Domain name=PUF; Domain location=138-172; Score =21.5; E_value=0.0031; Accession=PF00806.9; Description=Pumilio -family RNA binding repeat
  Pfam module annotation: Pfam domain module=PUF::PUF; Domain location =102-136::138-172
  Subcellular localization annotation: CTP_CleavageSite=57; ConfidenceScore=5.27e-01
MTSRRGGVSIPSYFGHMPNMGFVMXHPSSPLPSPVLSGYPEGSPGLPGVRNEINLSPASGRNGGIISGWQVPRSFDSAHDPKIVNFLEDLKSGKSRRLELSDIIGHIVEFSSDQHGSRFIQQKLESCSVEEKTLMFKEVLPHTSKLMTDIFNNYIIQKFFKYKNPEXKRELTDRLMYQILPLSLQIYNYHSSQRTLKIIQLGQKAQLVHDLDRSRMRWVREX

SEQ ID NO: 7251 - protein, 263 aa, Glycine max
  misc_feature (34)..(34): Xaa can be any naturally occurring amino acid
  misc_feature (63)..(63): Xaa can be any naturally occurring amino acid
  misc_feature (141)..(141): Xaa can be any naturally occurring amino acid
  Coding DNA Sequence Number=SeqID_1430
  Homolog annotation: Hit_ID=A7Q3C7; Match level="QueryCoverage=50%, HitCoverage=27%, E-value=6e-44, Identity=74%"; Hit description =Chromosome chr13 scaffold_48, whole genome shotgun sequence
  Subcellular localization annotation: CTP_CleavageSite=30; ConfidenceScore=5.30e-01
LLHAPAPTHVRSGHPLKKVQLRAGGGRRIVAAQXRPRANDGFVNSVQKLQRREISSQRDRSFXMSDAQERFRNIRLQEEYHTHDPKGPSSMMLPLLRKGPKSIEIVAARDIVSALAQSGACAGFIRETMQRICFLNGTPEXKVIRSPFYNKKTRAPFIKVIRICVTTAEALWKPLKAPRDGNLCRQGYPQNAWVIGPFWESPRSSGKWRRASERGLRSKQKGEGELTPILTPGQPPRQGIWTREKPIRMAGTSISGKRKGSKD

SEQ ID NO: 7252 - protein, 161 aa, Glycine max
  misc_feature (48)..(48): Xaa can be any naturally occurring amino acid
  misc_feature (67)..(67): Xaa can be any naturally occurring amino acid
  misc_feature (112)..(112): Xaa can be any naturally occurring amino acid
  misc_feature (139)..(139): Xaa can be any naturally occurring amino acid
  Coding DNA Sequence Number=SeqID_1431
  Gene Ontology: Mol. function=hydrolase activity, acting on ester bonds; Biological process=lipid metabolic process
  Homolog annotation: Hit_ID=A7NSS0; Match level="QueryCoverage=83%, HitCoverage=37%, E-value=6e-44, Identity=64%"; Hit description =Chromosome chr18 scaffold_1, whole genome shotgun sequence
  Subcellular localization annotation: CTP_CleavageSite=74; ConfidenceScore=5.18e-01
LGIRPAQFFFFFLVFGHLSPFAFIISSVLAFGDSVVDPRNGNNKKTLXKCNFPPFFLDFQGGNPTGXFCNGKIPSDLLVEQLGIKEYSSAYLDPNLKSSDLVTGVCFASGAXRYDPLTPKITLVLSLSTQLDLFREYIXKLKGICGESRTNYILSNSLYSC

SEQ ID NO: 7253 - protein, 145 aa, Glycine max
  misc_feature (8)..(8): Xaa can be any naturally occurring amino acid
  misc_feature (16)..(16): Xaa can be any naturally occurring amino acid
  misc_feature (18)..(18): Xaa can be any naturally occurring amino acid
  misc_feature (32)..(32): Xaa can be any naturally occurring amino acid
  misc_feature (42)..(42): Xaa can be any naturally occurring amino acid
  misc_feature (50)..(50): Xaa can be any naturally occurring amino acid
  misc_feature (57)..(57): Xaa can be any naturally occurring amino acid
  misc_feature (79)..(79): Xaa can be any naturally occurring amino acid
  misc_feature (91)..(91): Xaa can be any naturally occurring amino acid
  misc_feature (114)..(114): Xaa can be any naturally occurring amino acid
  Coding DNA Sequence Number=SeqID_1432
SIRSHYLXPDLCRWCXTXQHLHLYIHHETRTXDDARYSTQHXLGCYMRLXHHTRCAXEWRSLHIVHLTCAVRVTTHYTXNTTAISVYRAVXCLVALRLIIYIIHGHISLLSSRXRRADTSLQIPTSLPTPSSVQTLSSVMRITEE

SEQ ID NO: 7254 - protein, 105 aa, Glycine max
  misc_feature (2)..(2): Xaa can be any naturally occurring amino acid
  misc_feature (19)..(19): Xaa can be any naturally occurring amino acid
  misc_feature (28)..(28): Xaa can be any naturally occurring amino acid
  misc_feature (40)..(40): Xaa can be any naturally occurring amino acid
  Coding DNA Sequence Number=SeqID_1434
  Subcellular localization annotation: CTP_CleavageSite=51; ConfidenceScore=5.74e-01
IXVAAVLSLLLISSYFSAXFSAHATCSXSLSSSSSACPAXSGRARGCGLLRRAHVVSCLFLFFWLLVNIAFRCVSRATQLSPARQHPIKRPCHADCTRSCISHLF

SEQ ID NO: 7255 - protein, 123 aa, Glycine max; identical to SEQ ID NO: 6669
  misc_feature (3)..(6): Xaa can be any naturally occurring amino acid
  misc_feature (8)..(10): Xaa can be any naturally occurring amino acid
  misc_feature (12)..(12): Xaa can be any naturally occurring amino acid
  misc_feature (23)..(26): Xaa can be any naturally occurring amino acid
  misc_feature (29)..(31): Xaa can be any naturally occurring amino acid
  misc_feature (34)..(34): Xaa can be any naturally occurring amino acid
  misc_feature (38)..(38): Xaa can be any naturally occurring amino acid
  misc_feature (50)..(50): Xaa can be any naturally occurring amino acid
  misc_feature (56)..(58): Xaa can be any naturally occurring amino acid
  misc_feature (60)..(61): Xaa can be any naturally occurring amino acid
  misc_feature (64)..(65): Xaa can be any naturally occurring amino acid
  misc_feature (68)..(69): Xaa can be any naturally occurring amino acid
  misc_feature (78)..(78): Xaa can be any naturally occurring amino acid
  misc_feature (83)..(87): Xaa can be any naturally occurring amino acid
  misc_feature (118)..(118): Xaa can be any naturally occurring amino acid
  Coding DNA Sequence Number=SeqID_1436

SEQ ID NO: 7256 - protein, 74 aa, Glycine max
  Coding DNA Sequence Number=SeqID_4573
  Gene Ontology: Mol. function=nucleotide binding; Cellular component =mitochondrion; Biological process=small GTPase mediated signal transduction
  Homolog annotation: Hit_ID=Q40525; Match level="QueryCoverage=98%, HitCoverage=35%, E-value=1e-25, Identity=80%"; Hit description=Nt -rab6 protein
  Pfam annotation: Domain name=Ras; Domain location=2-74; Score=-36.3; E_value=1.2e-06; Accession=PF00071.12; Description=Ras family
AVYSIIRRQTFLNTSRWIEEVRIERGSDAIIVHVGNKTDLVNKRQVSTEEGEAKSRELNVMFIEASAKAGFNIK

SEQ ID NO: 7257 - protein, 136 aa, Glycine max
  misc_feature (5)..(6): Xaa can be any naturally occurring amino acid
  misc_feature (14)..(14): Xaa can be any naturally occurring amino acid
  misc_feature (22)..(22): Xaa can be any naturally occurring amino acid
  misc_feature (25)..(25): Xaa can be any naturally occurring amino acid
  misc_feature (27)..(27): Xaa can be any naturally occurring amino acid
  misc_feature (32)..(32): Xaa can be any naturally occurring amino acid
  misc_feature (34)..(34): Xaa can be any naturally occurring amino acid
  misc_feature (41)..(41): Xaa can be any naturally occurring amino acid
  misc_feature (43)..(43): Xaa can be any naturally occurring amino acid
  misc_feature (48)..(48): Xaa can be any naturally occurring amino acid
  misc_feature (52)..(52): Xaa can be any naturally occurring amino acid
  misc_feature (61)..(61): Xaa can be any naturally occurring amino acid
  misc_feature (64)..(64): Xaa can be any naturally occurring amino acid
  misc_feature (67)..(67): Xaa can be any naturally occurring amino acid
  misc_feature (75)..(75): Xaa can be any naturally occurring amino acid
  misc_feature (79)..(80): Xaa can be any naturally occurring amino acid
  misc_feature (82)..(82): Xaa can be any naturally occurring amino acid
  misc_feature (85)..(85): Xaa can be any naturally occurring amino acid
  misc_feature (91)..(91): Xaa can be any naturally occurring amino acid
  misc_feature (95)..(95): Xaa can be any naturally occurring amino acid
  misc_feature (105)..(105): Xaa can be any naturally occurring amino acid
  misc_feature (109)..(109): Xaa can be any naturally occurring amino acid
  misc_feature (123)..(123): Xaa can be any naturally occurring amino acid
  misc_feature (126)..(126): Xaa can be any naturally occurring amino acid
  misc_feature (133)..(133): Xaa can be any naturally occurring amino acid
  Coding DNA Sequence Number=SeqID_4574
TVTDXXYTHTRRLXNCAPGVIXSTXVXERLRXSXSTMRLYXRXRQYTXYHLXRTSTIYALXMSXDVXLLQLYSTXYRYXXMXATXNNHTAXLSAXDDHWMTMMNXYTVXFYISDELRVYTLLXTDXYERFTSXMTM

SEQ ID NO: 7258 - protein, 101 aa, Glycine max
  misc_feature (1)..(91): Xaa can be any naturally occurring amino acid
  Coding DNA Sequence Number=SeqID_4576
XXXXXXXXXXXXXXXXXXXXXXXXXXXXXXXXXXXXXXXXXXXXXXXXXXXXXXXXXXXXXXXXXXXXXXXXXXXXXXXXXXXXXXXXXXXVIKRVRKGLG

SEQ ID NO: 7259 - protein, 145 aa, Glycine max
  misc_feature (95)..(95): Xaa can be any naturally occurring amino acid
  Coding DNA Sequence Number=SeqID_4578
  Gene Ontology: Cellular component=microtubule organizing center; Biological process=microtubule cytoskeleton organization and biogenesis
  Homolog annotation: Hit_ID=A7PKP5; Match level="QueryCoverage=92%, HitCoverage=11%, E-value=7e-33, Identity=50%"; Hit description =Chromosome chr7 scaffold_20, whole genome shotgun sequence
HCNLSDISWRRFQHSLKHQVKDMRDIEYVHLCYVTDALHICFLSNETKPVATIIKSMLQQALEFRSCFKSLNDLSESTVNQLNLHSLINFSQVDXIKTRFESNIKDLYILHSKSSKYEELGLSRFWGYLNYNEYHSLKITKDVGC

SEQ ID NO: 7260 - protein, 163 aa, Glycine max
  misc_feature (5)..(5): Xaa can be any naturally occurring amino acid
  misc_feature (8)..(8): Xaa can be any naturally occurring amino acid
  misc_feature (11)..(11): Xaa can be any naturally occurring amino acid
  misc_feature (45)..(45): Xaa can be any naturally occurring amino acid
  misc_feature (61)..(61): Xaa can be any naturally occurring amino acid
  misc_feature (68)..(68): Xaa can be any naturally occurring amino acid
  misc_feature (70)..(70): Xaa can be any naturally occurring amino acid
  misc_feature (79)..(79): Xaa can be any naturally occurring amino acid
  misc_feature (83)..(83): Xaa can be any naturally occurring amino acid
  misc_feature (88)..(88): Xaa can be any naturally occurring amino acid
  misc_feature (103)..(103): Xaa can be any naturally occurring amino acid
  misc_feature (109)..(110): Xaa can be any naturally occurring amino acid
  misc_feature (114)..(114): Xaa can be any naturally occurring amino acid
  misc_feature (125)..(125): Xaa can be any naturally occurring amino acid
  misc_feature (131)..(131): Xaa can be any naturally occurring amino acid
  misc_feature (133)..(133): Xaa can be any naturally occurring amino acid
  misc_feature (137)..(137): Xaa can be any naturally occurring amino acid
  misc_feature (143)..(143): Xaa can be any naturally occurring amino acid
  misc_feature (145)..(148): Xaa can be any naturally occurring amino acid
  misc_feature (152)..(152): Xaa can be any naturally occurring amino acid
  misc_feature (154)..(154): Xaa can be any naturally occurring amino acid
  Coding DNA Sequence Number=SeqID_4579
TAHSXGAXTDXVALVLWSSGRVTVVSCVVHCRVCWRLYACLGDSXERDARASSPQSAPSSXEIDIAIXSXRLSMPSNRXISMXSRSYXSQVSRTHVPICSCYXRTMPNXXVRYXATTETPRWTRXDAREAXTXQRAXHDENSXGXXXXISHXTXTSAIRCLML

SEQ ID NO: 7261 - protein, 234 aa, Glycine max
  misc_feature (83)..(83): Xaa can be any naturally occurring amino acid
  misc_feature (107)..(107): Xaa can be any naturally occurring amino acid
  misc_feature (165)..(165): Xaa can be any naturally occurring amino acid
  misc_feature (179)..(179): Xaa can be any naturally occurring amino acid
  misc_feature (187)..(187): Xaa can be any naturally occurring amino acid
  Coding DNA Sequence Number=SeqID_4581
  Gene Ontology: Mol. function=structural constituent of ribosome; Cellular component=ribonucleoprotein complex; Biological process =translation
  Homolog annotation: Hit_ID=A9PB01; Match level="QueryCoverage=79%, HitCoverage=88%, E-value=3e-45, Identity=55%"; Hit description =Putative uncharacterized protein
  Pfam annotation: Domain name=Ribosomal_S9; Domain location=93-206; Score=0.3; E_value=6.4e-07; Accession=PF00380.9; Description =Ribosomal protein S9S16
  Subcellular localization annotation: CTP_CleavageSite=47; ConfidenceScore=5.92e-01
MAVSLSALTTSLSSLSFSSHISQRPSTLSFARTESLSASVSRFSKTPSSLVVSRHRTRGTGHRTPQDLRPVDGSPGSFAAHTXHTQPIAECRAIARVVLQAGNRLIXIKYRDAKEYLRANPLWLQYIKVPIITFGYDSDYECFCQSLRVAGMSGEPQAISLGMAXPLLKVSEDHRVPLXREGLLTRXPRVVEHERKVGLKKARKAPLIFQAWKVRDVKMDGSGLSFFLVSLEMS

SEQ ID NO: 7262 - protein, 163 aa, Glycine max
  misc_feature (18)..(18): Xaa can be any naturally occurring amino acid
  misc_feature (51)..(51): Xaa can be any naturally occurring amino acid
  misc_feature (100)..(100): Xaa can be any naturally occurring amino acid
  misc_feature (111)..(111): Xaa can be any naturally occurring amino acid
  misc_feature (136)..(136): Xaa can be any naturally occurring amino acid
  Coding DNA Sequence Number=SeqID_4582
GGRMSEDAADKARRHVSXAIIKVEAERMEWRRWSTRSDSEPRRATRSAMFXSSLIYVCVSMLTLCTQYATQTAPPAHTHSGARILAPLLVVPSRTADVRXLCIRQMIYRHXIYAIITVTRPMIWVILLSTLAMSTXVHSVCAGHTYAFILSLLTIYVSNVDIQ

SEQ ID NO: 7263 - protein, 106 aa, Glycine max
  misc_feature (4)..(4): Xaa can be any naturally occurring amino acid
  misc_feature (95)..(95): Xaa can be any naturally occurring amino acid
  Coding DNA Sequence Number=SeqID_4584
TILXMFSRRRMTMLYLTRSARTAFEDFFSVSCQQGIRKKGCCYTPPPGGGAGAAPAAPPPHNTRKRRGGEPPDRNKPASRPRAPAETTGPPPPGXPPRNAPPAPAG

SEQ ID NO: 7264 - protein, 41 aa, Glycine max
  Coding DNA Sequence Number=SeqID_4585
YSKQLLKVQFHSVQYMQSSGSSSHHTMNPEHSTQSRRTERS

SEQ ID NO: 7265 - protein, 159 aa, Glycine max
  Coding DNA Sequence Number=SeqID_4587
  Gene Ontology: Mol. function=intramolecular transferase activity, phosphotransferases; Cellular component=extracellular region; Biological process=metabolic process
  Homolog annotation: Hit_ID=Q9SZY5; Match level="QueryCoverage=100%, HitCoverage=100%, E-value=3e-79, Identity=89%"; Hit description=SAH7 protein
  Pfam annotation: Domain name=Pollen_Ole_e_I; Domain location=29-149; Score=148.2; E_value=2.3e-41; Accession=PF01190.8; Description =Pollen proteins Ole e I family
  Subcellular localization annotation: CTP_CleavageSite=45; ConfidenceScore=5.25e-01
MSKAILLVALCFLPALAMSARPNKNPFVVRGRVYCDTCLAGFETSASTFIPGAVVRLECKDRRTMELTYRHEARTDSTGSYKILVSEDHEDQFCDTMLVSSSQLRCSNVSPGHDRARVTLTRFNGIASDERFANNLGFLRDAASPGCAEIMKQYQETED

SEQ ID NO: 7266 - protein, 75 aa, Glycine max
  misc_feature (20)..(20): Xaa can be any naturally occurring amino acid
  misc_feature (24)..(24): Xaa can be any naturally occurring amino acid
  misc_feature (26)..(26): Xaa can be any naturally occurring amino acid
  Coding DNA Sequence Number=SeqID_4588
SYVGPPPEWHRQLKKGVMVXFKLXVXCGIEESQFPTILFVTLGTGEIRQHHRGGEELLHVDERYTTNSVGEELPI

SEQ ID NO: 7267 - protein, 118 aa, Glycine max
  misc_feature (4)..(4): Xaa can be any naturally occurring amino acid
  misc_feature (21)..(25): Xaa can be any naturally occurring amino acid
  misc_feature (28)..(31): Xaa can be any naturally occurring amino acid
  misc_feature (34)..(35): Xaa can be any naturally occurring amino acid
  misc_feature (44)..(44): Xaa can be any naturally occurring amino acid
  misc_feature (65)..(65): Xaa can be any naturally occurring amino acid
  misc_feature (103)..(104): Xaa can be any naturally occurring amino acid
  Coding DNA Sequence Number=SeqID_4590
  Subcellular localization annotation: CTP_CleavageSite=66; ConfidenceScore=5.10e-01
CVWXLVCLWRGGGAAVSPRLXXXXXIPXXXXTTXXYFFPPRRGXRRRPRVPTPPHLSTTTTYPRXRAADGTKGTRARRRWVWAGRTIAPKQQSRRGARRCELXXMYHLLYATILTAHV

SEQ ID NO: 7268 - protein, 85 aa, Glycine max
  Coding DNA Sequence Number=SeqID_4592
  Subcellular localization annotation: CTP_CleavageSite=24; ConfidenceScore=5.05e-01
GRSSYIGLLFVDDIVSVRPIVVVVCINSSSFFPSSRRCFHYFEGGFFLTIVVVFIISMTGYFVTAVVVWIISTFVDFVKAYRCRD

SEQ ID NO: 7269 - protein, 95 aa, Glycine max
  Coding DNA Sequence Number=SeqID_4594
IKHPLGGGGSELGPGNFLTNQVGEYSWKKLLNPFFPLGVFEKSVKEFSSNPGGGKKKTIPPFESLIRGGVSPPIQIEHWFFMQDRELGAFNPRCS

SEQ ID NO: 7270 - protein, 97 aa, Glycine max
  misc_feature (23)..(25): Xaa can be any naturally occurring amino acid
  misc_feature (30)..(32): Xaa can be any naturally occurring amino acid
  misc_feature (34)..(35): Xaa can be any naturally occurring amino acid
  misc_feature (44)..(44): Xaa can be any naturally occurring amino acid
  misc_feature (55)..(55): Xaa can be any naturally occurring amino acid
  misc_feature (58)..(58): Xaa can be any naturally occurring amino acid
  misc_feature (60)..(61): Xaa can be any naturally occurring amino acid
  misc_feature (63)..(64): Xaa can be any naturally occurring amino acid
  misc_feature (68)..(70): Xaa can be any naturally occurring amino acid
  misc_feature (73)..(73): Xaa can be any naturally occurring amino acid
  Coding DNA Sequence Number=SeqID_4596
  Gene Ontology: Mol. function=fructokinase activity; Biological process=carbohydrate metabolic process
  Homolog annotation: Hit_ID=A9P8P5; Match level="QueryCoverage=73%, HitCoverage=21%, E-value=4e-18, Identity=70%"; Hit description =Putative uncharacterized protein
SSSHRITDLIVSFGEMLIDFVPXXXGGSLXXXPXXLKAPGGAPXNVAIAVARLGXKAXFXXKXXDDEXXXMLXGILKENVWRIRRGYIKGPRGMIYL

SEQ ID NO: 7271 - protein, 145 aa, Glycine max
  misc_feature (10)..(11): Xaa can be any naturally occurring amino acid
  misc_feature (36)..(36): Xaa can be any naturally occurring amino acid
  misc_feature (42)..(42): Xaa can be any naturally occurring amino acid
  misc_feature (53)..(53): Xaa can be any naturally occurring amino acid
  misc_feature (87)..(87): Xaa can be any naturally occurring amino acid
  misc_feature (100)..(100): Xaa can be any naturally occurring amino acid
  misc_feature (109)..(109): Xaa can be any naturally occurring amino acid
  misc_feature (112)..(112): Xaa can be any naturally occurring amino acid
  misc_feature (126)..(126): Xaa can be any naturally occurring amino acid
  misc_feature (131)..(131): Xaa can be any naturally occurring amino acid
  misc_feature (143)..(143): Xaa can be any naturally occurring amino acid
  misc_feature (145)..(145): Xaa can be any naturally occurring amino acid
  Coding DNA Sequence Number=SeqID_4597
KMGARVLKIXXRELAHREARALDDDAWRSWAHLDQXKLTHTXVRILSCILRTXRLECDIYHRSAAATPVTIPNTLLASYLFVIHTHXTARLISIYLLRRXCCDASFHAXYYXLAPVRCVLAMNYIXTQHSXALSLSRCVSYSXRX

SEQ ID NO: 7272 - protein, 261 aa, Glycine max
  misc_feature (3)..(3): Xaa can be any naturally occurring amino acid
  misc_feature (87)..(88): Xaa can be any naturally occurring amino acid
  misc_feature (119)..(119): Xaa can be any naturally occurring amino acid
  misc_feature (176)..(176): Xaa can be any naturally occurring amino acid
  misc_feature (183)..(183): Xaa can be any naturally occurring amino acid
  misc_feature (190)..(190): Xaa can be any naturally occurring amino acid
  misc_feature (196)..(196): Xaa can be any naturally occurring amino acid
  misc_feature (198)..(198): Xaa can be any naturally occurring amino acid
  misc_feature (201)..(201): Xaa can be any naturally occurring amino acid
  misc_feature (220)..(220): Xaa can be any naturally occurring amino acid
  misc_feature (245)..(245): Xaa can be any naturally occurring amino acid
  misc_feature (249)..(249): Xaa can be any naturally occurring amino acid
  misc_feature (251)..(251): Xaa can be any naturally occurring amino acid
  misc_feature (254)..(254): Xaa can be any naturally occurring amino acid
  misc_feature (256)..(256): Xaa can be any naturally occurring amino acid
  Coding DNA Sequence Number=SeqID_4599
  Subcellular localization annotation: CTP_CleavageSite=75; ConfidenceScore=5.44e-01
EAXRKALHILAHNYTSGPLTPITEVSTSLLSSVRVSLRSCVIRLKRPRPALSAHPPSRRERAASRRRDAPRQRERCSMSRRHTPAPXXRPRRPPTIPRAHTAVAPRLRSAATMFACWRXDDDTMLRLDSTTRRPSLLDALNSTHTACRSRAAFSTSPLEMHRYESDRVLSTSSPRXRSARVRXSPTAVTXESRHEXYXSQXSSRSRSAPSHDDTTVAARXQSRAHENTRRIAHVRSALARPRASXARRXHXAHXAXDDARH

SEQ ID NO: 7273 - protein, 120 aa, Glycine max; identical to SEQ ID NO: 6496
  misc_feature (10)..(10): Xaa can be any naturally occurring amino acid
  misc_feature (26)..(27): Xaa can be any naturally occurring amino acid
  misc_feature (37)..(38): Xaa can be any naturally occurring amino acid
  misc_feature (40)..(40): Xaa can be any naturally occurring amino acid
  misc_feature (42)..(42): Xaa can be any naturally occurring amino acid
  misc_feature (45)..(45): Xaa can be any naturally occurring amino acid
  misc_feature (52)..(52): Xaa can be any naturally occurring amino acid
  misc_feature (83)..(83): Xaa can be any naturally occurring amino acid
  misc_feature (88)..(89): Xaa can be any naturally occurring amino acid
  misc_feature (92)..(92): Xaa can be any naturally occurring amino acid
  misc_feature (98)..(98): Xaa can be any naturally occurring amino acid
  misc_feature (107)..(110): Xaa can be any naturally occurring amino acid
  misc_feature (112)..(115): Xaa can be any naturally occurring amino acid
  Coding DNA Sequence Number=SeqID_4601

SEQ ID NO: 7274 - protein, 122 aa, Glycine max
  misc_feature (93)..(93): Xaa can be any naturally occurring amino acid
  misc_feature (97)..(97): Xaa can be any naturally occurring amino acid
  Coding DNA Sequence Number=SeqID_4603
  Gene Ontology: Mol. function=serine-type endopeptidase inhibitor activity
  Homolog annotation: Hit_ID=P01070; Match level="QueryCoverage=98%, HitCoverage=55%, E-value=4e-38, Identity=68%"; Hit description =Trypsin inhibitor A precursor
  Pfam annotation: Domain name=Kunitz_legume; Domain location=3-121; Score=-17.8; E_value=0.00072; Accession=PF00197.9; Description =Trypsin and protease inhibitor
NYECNPDDTCGTYYILTDITAFGRIIACPTGNERYPLTAVQSRNELDTGIGTIISCPFRIRFIAEGNPLRLKIDSLAVIMLCVGITTEWSVVXDLPXRPCCQNCEKQDAADGLVLIDRLPPD

SEQ ID NO: 7275 - protein, 112 aa, Glycine max
  misc_feature (25)..(25): Xaa can be any naturally occurring amino acid
  misc_feature (46)..(46): Xaa can be any naturally occurring amino acid
  misc_feature (58)..(58): Xaa can be any naturally occurring amino acid
  misc_feature (69)..(69): Xaa can be any naturally occurring amino acid
  misc_feature (99)..(99): Xaa can be any naturally occurring amino acid
  misc_feature (105)..(106): Xaa can be any naturally occurring amino acid
  Coding DNA Sequence Number=SeqID_4604
VISLRSRTQARGEWPDESTLCLASXAPNSCIPLSLTAHSPCLRAHXVQPRTLQVCRTXIVVADSYTTSXRSHSLRHHKINAASVRSAATHTLVRLNRSXLLRCYXXSRLESE

SEQ ID NO: 7276 - protein, 140 aa, Glycine max
  misc_feature (126)..(126): Xaa can be any naturally occurring amino acid
  Coding DNA Sequence Number=SeqID_4606
  Gene Ontology: Mol. function=structural constituent of ribosome; Cellular component=ribonucleoprotein complex; Biological process =translation
  Homolog annotation: Hit_ID=Q9LT09; Match level="QueryCoverage=100%, HitCoverage=88%, E-value=4e-76, Identity=99%"; Hit description=50S ribosomal protein L24
  Pfam annotation: Domain name=KOW; Domain location=17-48; Score=47.0; E_value=6.7e-11; Accession=PF00467.19; Description=KOW motif
MGWKAAEKLIRHWKILRGDNVMIIRGKDKGETGTIKRVIRSQNRVIVEGKNLIKKHIKGGPDHEGGIFTVEAPLHASNVQVVDPVTGRPCKVGVKYLEDGTKVRVARGTGTSGSIIPRPEILKIRXTPRPTTAGPKDTPM

SEQ ID NO: 7277 - protein, 231 aa, Glycine max
  misc_feature (1)..(5): Xaa can be any naturally occurring amino acid
  misc_feature (7)..(10): Xaa can be any naturally occurring amino acid
  misc_feature (13)..(14): Xaa can be any naturally occurring amino acid
  misc_feature (16)..(25): Xaa can be any naturally occurring amino acid
  misc_feature (29)..(30): Xaa can be any naturally occurring amino acid
  misc_feature (32)..(35): Xaa can be any naturally occurring amino acid
  misc_feature (37)..(41): Xaa can be any naturally occurring amino acid
  misc_feature (43)..(44): Xaa can be any naturally occurring amino acid
  misc_feature (47)..(49): Xaa can be any naturally occurring amino acid
  misc_feature (52)..(53): Xaa can be any naturally occurring amino acid
  misc_feature (55)..(56): Xaa can be any naturally occurring amino acid
  misc_feature (58)..(63): Xaa can be any naturally occurring amino acid
  misc_feature (65)..(65): Xaa can be any naturally occurring amino acid
  misc_feature (67)..(69): Xaa can be any naturally occurring amino acid
  misc_feature (223)..(223): Xaa can be any naturally occurring amino acid
  Coding DNA Sequence Number=SeqID_4607
XXXXXGXXXXFFXXEXXXXXXXXXXYYIXXLXXXXYXXXXXFXXNIXXXYIXXFXXTXXXXXXIXLXXXIDLTYQPSPHRPHLDLATATPRSASSPSTRSSLYPHISTCPRHPPHSNHPPLTPTPPTHPKTHLTYPTTHTTTHPNSPTPRQPTTPTPTCHPPHLPHVYSTLHPPPLVANHDPSHPLYPHHTYSPLHTRTYYTRHPPDSTLYNAPPPYPHTRTXTRLTSTHL

SEQ ID NO: 7278 - protein, 118 aa, Glycine max
  misc_feature (1)..(1): Xaa can be any naturally occurring amino acid
  misc_feature (42)..(42): Xaa can be any naturally occurring amino acid
  misc_feature (54)..(54): Xaa can be any naturally occurring amino acid
  misc_feature (71)..(71): Xaa can be any naturally occurring amino acid
  misc_feature (84)..(84): Xaa can be any naturally occurring amino acid
  misc_feature (88)..(88): Xaa can be any naturally occurring amino acid
  misc_feature (103)..(103): Xaa can be any naturally occurring amino acid
  misc_feature (106)..(106): Xaa can be any naturally occurring amino acid
  misc_feature (109)..(109): Xaa can be any naturally occurring amino acid
  Coding DNA Sequence Number=SeqID_385
XVISTPCLPRHTQRTQYPRSALYMITHEVSYATLTTRLDIIXIVMYTSQRYLTXATNRAVMCRIVRHLFSXRALARASLLAGMXMSCXLYSSAAILCSEPRRXSEXASXYRARACVVM

SEQ ID NO: 7279 - protein, 83 aa, Glycine max
  misc_feature (28)..(28): Xaa can be any naturally occurring amino acid
  misc_feature (32)..(33): Xaa can be any naturally occurring amino acid
  misc_feature (37)..(37): Xaa can be any naturally occurring amino acid
  misc_feature (43)..(43): Xaa can be any naturally occurring amino acid
  misc_feature (45)..(45): Xaa can be any naturally occurring amino acid
  misc_feature (52)..(53): Xaa can be any naturally occurring amino acid
  Coding DNA Sequence Number=SeqID_387
LIYQAENLMEKIKEFKAQLLYAHHKQHXSPIXXETIXKKTLRXLXQLFMLRXXISSLPFTFKKQPFTYTVSNINLPPLMPSKR

SEQ ID NO: 7280 - protein, 160 aa, Glycine max
  Coding DNA Sequence Number=SeqID_389
  Gene Ontology: Mol. function=structural constituent of ribosome; Cellular component=intracellular; Biological process=translation
  Homolog annotation: Hit_ID=Q7XEQ3; Match level="QueryCoverage=73%, HitCoverage=83%, E-value=8e-30, Identity=62%"; Hit description=40S ribosomal protein S17-4, putative, expressed
  Pfam annotation: Domain name=Ribosomal_S17e; Domain location=1-122; Score=83.4; E_value=7.3e-22; Accession=PF00833.8; Description =Ribosomal S17
  Subcellular localization annotation: CTP_CleavageSite=26; ConfidenceScore=5.63e-01
MGPAPTKTGRKPSRQSIRNTFSRMTPASPTKRRLLREASSLRWNPPPNRVAASPTHWIAPIQAAPVAATSLKLQEEERERRMDFVPEKSALEVDEIRVDKETMDMLAFLGMADLPGVERAPETTSSAAPARPPSDPPRAGAPAFLPPLRPRPPSSCLVSF

SEQ ID NO: 7281 - protein, 138 aa, Glycine max
  misc_feature (7)..(7): Xaa can be any naturally occurring amino acid
  misc_feature (133)..(133): Xaa can be any naturally occurring amino acid
  Coding DNA Sequence Number=SeqID_390
MDKTNIXDAAHAIHHITMTADVTSLNTPPHTHHYYATSVILVPRCYYYAIISYDMRRYTNIRIRTASLVDSFVSTFYLLHLLVVSCLVLRLTASVHVTCVILSLCHTIVCGLLPLRLSAHRISHARISAMTVXYHTSS

SEQ ID NO: 7282 - protein, 129 aa, Glycine max
  misc_feature (4)..(4): Xaa can be any naturally occurring amino acid
  misc_feature (37)..(37): Xaa can be any naturally occurring amino acid
  misc_feature (45)..(46): Xaa can be any naturally occurring amino acid
  misc_feature (53)..(55): Xaa can be any naturally occurring amino acid
  misc_feature (62)..(62): Xaa can be any naturally occurring amino acid
  misc_feature (72)..(72): Xaa can be any naturally occurring amino acid
  misc_feature (80)..(80): Xaa can be any naturally occurring amino acid
  misc_feature (96)..(96): Xaa can be any naturally occurring amino acid
  misc_feature (98)..(98): Xaa can be any naturally occurring amino acid
  Coding DNA Sequence Number=SeqID_392
MSVXDLTAMTISEYDMILHIMLYKYHIMLAPYVTSWXALLSVVSXXSVRDHPXXXPACGCRXSTIRLCRIAXVICYTSCXCAVTTLACHLARAQRXRXAYAQSRVVTLQARRAIQHLLSRAYTSSWSHC

SEQ ID NO: 7283 - protein, 182 aa, Glycine max
  Coding DNA Sequence Number=SeqID_394
QALLKTPTFAADLSAKRHSLLSPHRAHSSDARIRGAHVHVGRHARNNAPRVADHGTHRVHSAHVSIVNYRRCRPPREQCSHGVDECSCLEWQRQRVVAESALRGEQRGEPYVRDAVLSTRATRPCCRTYLYHTALALAASRCPRALSSYSLLAGRVTDRDACQAMRSEYTRGLATAGSREYE

SEQ ID NO: 7284 - protein, 220 aa, Glycine max
  misc_feature (1)..(1): Xaa can be any naturally occurring amino acid
  misc_feature (3)..(3): Xaa can be any naturally occurring amino acid
  misc_feature (10)..(10): Xaa can be any naturally occurring amino acid
  misc_feature (120)..(120): Xaa can be any naturally occurring amino acid
  misc_feature (125)..(125): Xaa can be any naturally occurring amino acid
  misc_feature (168)..(168): Xaa can be any naturally occurring amino acid
  Coding DNA Sequence Number=SeqID_396
XMXTMTYLSXVLSFERATRCAMTRRAPSRDSTRERMTPYFVAYLYNQTVQKAAALFNCASLSYIQTDTDTLHATYPLVILKSIVIVLFRVQRITFSRSVVQPCVHNYLLLTPVYKYTRGXYNCDXLHADTSPSSRDRDLIRTRGDGDIYIGAIVPPHPQCSGVVFEMXPLSRAHNNNSNVTRTSPVTSTCCLHNRDSYTEHLCCLVVYYYKRRRNNIYRR

SEQ ID NO: 7285 - protein, 104 aa, Glycine max; identical to SEQ ID NO: 6499
  misc_feature (10)..(10): Xaa can be any naturally occurring amino acid
  misc_feature (20)..(20): Xaa can be any naturally occurring amino acid
  misc_feature (31)..(31): Xaa can be any naturally occurring amino acid
  misc_feature (34)..(34): Xaa can be any naturally occurring amino acid
  misc_feature (47)..(47): Xaa can be any naturally occurring amino acid
  misc_feature (56)..(56): Xaa can be any naturally occurring amino acid
  misc_feature (65)..(65): Xaa can be any naturally occurring amino acid
  misc_feature (79)..(80): Xaa can be any naturally occurring amino acid
  misc_feature (86)..(86): Xaa can be any naturally occurring amino acid
  misc_feature (90)..(90): Xaa can be any naturally occurring amino acid
  misc_feature (97)..(98): Xaa can be any naturally occurring amino acid
  misc_feature (100)..(100): Xaa can be any naturally occurring amino acid
  misc_feature (102)..(104): Xaa can be any naturally occurring amino acid
  Coding DNA Sequence Number=SeqID_4609

SEQ ID NO: 7286 - protein, 175 aa, Glycine max
  Coding DNA Sequence Number=SeqID_4611
  Subcellular localization annotation: CTP_CleavageSite=45; ConfidenceScore=5.03e-01
SNHQRSPQELTSNNNRFHRVTTCTPHAQSLGESYGGSASTACRSRSQKVRDGKGDRGHRGREAHGRCGAAVLFRFDLVRGVLRWRVGGGHVGRVRRGRGRGVRRGPGLLLLPLAGGLGGGRRCGAFGSRGRRGHGGGRSGRRSRGRRAAKATVSPRLPSVRQDDRLSVPCPTALP

SEQ ID NO: 7287 - protein, 109 aa, Glycine max
  misc_feature (26)..(26): Xaa can be any naturally occurring amino acid
  Coding DNA Sequence Number=SeqID_4613
  Gene Ontology: Mol. function=protein binding; Biological process =regulation of transcription
  Homolog annotation: Hit_ID=Q9M3H9; Match level="QueryCoverage=99%, HitCoverage=26%, E-value=1e-27, Identity=56%"; Hit description=Tubby- like protein
YNDNNQVGLADKRIRRATGTDLDIFXAADDFTRAIYKYEGKLRSNILVTKLTVYDSQAPHDCAIQSNCQSSRRFYSKQVSPRVPACIYVSSTVYYELNVLCTRWPRKMH

SEQ ID NO: 7288 - protein, 125 aa, Glycine max
  misc_feature (3)..(3): Xaa can be any naturally occurring amino acid
  misc_feature (15)..(15): Xaa can be any naturally occurring amino acid
  misc_feature (21)..(21): Xaa can be any naturally occurring amino acid
  misc_feature (43)..(43): Xaa can be any naturally occurring amino acid
  misc_feature (46)..(46): Xaa can be any naturally occurring amino acid
  misc_feature (52)..(52): Xaa can be any naturally occurring amino acid
  misc_feature (64)..(64): Xaa can be any naturally occurring amino acid
  misc_feature (71)..(71): Xaa can be any naturally occurring amino acid
  misc_feature (94)..(94): Xaa can be any naturally occurring amino acid
  Coding DNA Sequence Number=SeqID_4614
RSXAGHTTQHCTTTXYSASEXLRHAHYAHHTRQMSDDHTIHDXLSXSTLYVXRDHVRHRLIMHXRAGLSAXTMINTSHEVLSSTQICAHRYHCXRASKTDYYTAIIMNQHIHAELEIEIYMTYTT

SEQ ID NO: 7289 - protein, 105 aa, Glycine max
  Coding DNA Sequence Number=SeqID_4616
  Gene Ontology: Mol. function=hydrolase activity, acting on glycosyl bonds; Biological process=cell wall organization and biogenesis
  Homolog annotation: Hit_ID=Q2HZ18; Match level="QueryCoverage=55%, HitCoverage=17%, E-value=1e-17, Identity=67%"; Hit description =Polygalacturonase precursor
VASAVVHRVSLVSSKITSFENYFQLIFYGLHASQELVSFEVDGTLQAPDGPRCWPTEDSHSHWLVLYRLDQMTVTGKGTIEGYGEQRRDLPCEPHREINHLTKHM

SEQ ID NO: 7290 - protein, 115 aa, Glycine max
  misc_feature (49)..(49): Xaa can be any naturally occurring amino acid
  Coding DNA Sequence Number=SeqID_4617
GMLIAEASDETSGEGQKCARACARGRETTRSGKRNRIYHYSRMVPVCAXFLNTYIRRRDSAKPRPRSPSEKLRPGQKRGRSMRNRRVEINMRWGERARAGPRIHRQCYAVSRHVA

SEQ ID NO: 7291 - protein, 207 aa, Glycine max
  misc_feature (207)..(207): Xaa can be any naturally occurring amino acid
  Coding DNA Sequence Number=SeqID_4619
  Gene Ontology: Mol. function=glutamate-cysteine ligase activity; Cellular component=membrane; Biological process=glutathione biosynthetic process
  Homolog annotation: Hit_ID=A9HT41; Match level="QueryCoverage=99%, HitCoverage=42%, E-value=3e-82, Identity=71%"; Hit description =Putative uncharacterized protein
  Pfam annotation: Domain name=DUF404; Domain location=1-207; Score =261.3; E_value=2e-75; Accession=PF04169.4; Description=Domain of unknown function (DUF404)
ETPSETLSARRAQAELFFRRLGVTFAVYGEAEADERIIPFDIIPRVIAQNEWRQIEAGARQRVAALNAFLADIYGPQECLKAGVIPEELIYTNPQYRVEAAGLKPPKGVWVHVAGIDIVRTGPSEFFVLEDNARTPSGVSYMLENREAMMRLTPELFSRHRVAPVETYTDSLLATLRSVAPAGAGADPTVVILTPGRFNSAFYEHSX

SEQ ID NO: 7292 - protein, 112 aa, Glycine max; identical to SEQ ID NO: 6550
  misc_feature (2)..(3): Xaa can be any naturally occurring amino acid
  misc_feature (6)..(7): Xaa can be any naturally occurring amino acid
  misc_feature (31)..(31): Xaa can be any naturally occurring amino acid
  misc_feature (33)..(35): Xaa can be any naturally occurring amino acid
  misc_feature (82)..(82): Xaa can be any naturally occurring amino acid
  misc_feature (104)..(104): Xaa can be any naturally occurring amino acid
  Coding DNA Sequence Number=SeqID_4620

SEQ ID NO: 7293 - protein, 77 aa, Glycine max
  Coding DNA Sequence Number=SeqID_4621
MVTLSLAFCYRCCTTSHGCQSIGQCRDAKQLKEEVCPGSNWGGGVAVPSTVFCCIAPDIVNGLITDLVSLLIATVLY

SEQ ID NO: 7294 - protein, 102 aa, Glycine max
  misc_feature (19)..(19): Xaa can be any naturally occurring amino acid
  misc_feature (25)..(25): Xaa can be any naturally occurring amino acid
  misc_feature (35)..(35): Xaa can be any naturally occurring amino acid
  misc_feature (73)..(73): Xaa can be any naturally occurring amino acid
  Coding DNA Sequence Number=SeqID_4623
  Gene Ontology: Mol. function=structural molecule activity; Cellular component=protein complex; Biological process=microtubule-based movement
  Homolog annotation: Hit_ID=P50262; Match level="QueryCoverage=100%, HitCoverage=22%, E-value=3e-36, Identity=70%"; Hit description =Tubulin beta-4 chain
MREILHIQGGQCGDQIGAXFWEVIXDEHGIYHTGXVSGHSELQKERINVYYNEASGGRFVALTGLMDLEPSTXDWVRSWPFGQIFRTDNFVIRQTGDSNNWA

SEQ ID NO: 7295 - protein, 185 aa, Glycine max
  misc_feature (181)..(182): Xaa can be any naturally occurring amino acid
  Coding DNA Sequence Number=SeqID_4624
SYVGPPPIQKTLYQPSIIIPFSMKTLSFVLISTLFAYLLAQDCNNPLLNAFNLTGLDTPQSGAGLAFCGNLQNGQTCCSAETVQSFQSRLDNLTTSLQDLAGQRDVYMTELYANYSSEFQRAADDLTDYSDEISRLQRDNSTVGNETRYQYNGLNRIARALDNIDNNFRSAIQDYQQRRAXXFNT

SEQ ID NO: 7296 - protein, 198 aa, Glycine max
  misc_feature (48)..(48): Xaa can be any naturally occurring amino acid
  misc_feature (170)..(170): Xaa can be any naturally occurring amino acid
  misc_feature (179)..(179): Xaa can be any naturally occurring amino acid
  misc_feature (193)..(193): Xaa can be any naturally occurring amino acid
  Coding DNA Sequence Number=SeqID_4626
  Gene Ontology: Mol. function=structural constituent of ribosome; Cellular component=ribonucleoprotein complex; Biological process =translation
  Homolog annotation: Hit_ID=P49210; Match level="QueryCoverage=83%, HitCoverage=87%, E-value=4e-30, Identity=49%"; Hit description=60S ribosomal protein L9
  Subcellular localization annotation: CTP_CleavageSite=36; ConfidenceScore=5.68e-01
LSPRPSPLPSPPPPPPPPPTPPRSQPPSPAKRKTILASYTMEILVGGXTVKETVNMISSISPCRRLTRNFKYLNLNLHVQEGVSDVKAYAWIFTLKTSDASRTAICHVQNLITGFTSVYHYKMRFVYAHFPINACIAAVKPSIQIRNFLGHRNVRHVHMFERDTILRCGXLTDDIVIEXNDIEVISASALSSXEMHVK

SEQ ID NO: 7297 - protein, 99 aa, Glycine max
  Coding DNA Sequence Number=SeqID_4627
YSADPINCRIRDRDLQECQIRARERNTSQYRGIHITATSTNMIYSYNFNTETPTRRSSSCGTTCVVFSTNKAMVYALRERKRKKEKEWSGSEERKRVEW

SEQ ID NO: 7298 - protein, 134 aa, Glycine max
  misc_feature (11)..(12): Xaa can be any naturally occurring amino acid
  misc_feature (20)..(20): Xaa can be any naturally occurring amino acid
  misc_feature (67)..(67): Xaa can be any naturally occurring amino acid
  Coding DNA Sequence Number=SeqID_4629
SLPPLKKERLXXTLEKQCRXLKLRGKEGPTRMARNVPRKDNRPGPGAAQCFPEKKDETRTRGNNQEXGENETRRLMFYSPPKAQIATRGGMGMTARGEPSKAAPYPDCGSAHESRLRSLCMLGRSRPQDLVRGP

SEQ ID NO: 7299 - protein, 139 aa, Glycine max
  Coding DNA Sequence Number=SeqID_4631
YYTTQRNKKEPAMDVTPTTTAETPRAAAPLSAAGPEGAILPYEESLPRGPATATSPSPGEAAASSSVVPMVSSDTGASTSVVGVEGALEGDDEGDGEEAAAARPRTAKNTRLNTTKTFWRPILLCSLLQRRFLLIYFSI

SEQ ID NO: 7300 - protein, 108 aa, Glycine max
  misc_feature (102)..(102): Xaa can be any naturally occurring amino acid
  Coding DNA Sequence Number=SeqID_4633
  Gene Ontology: Mol. function=protein binding; Cellular component =chloroplast; Biological process=iron-sulfur cluster assembly
  Homolog annotation: Hit_ID=A2ZNT6; Match level="QueryCoverage=79%, HitCoverage=17%, E-value=2e-34, Identity=81%"; Hit description =Putative uncharacterized protein
VNRYAQQTDAGQQTKCLLLSPKAVVNVKPNLQIIADDVKCTHGAAISGDLDPNELFYFQARGVDAKTATDALLFSFGAQVINRIPFKAVEKKALAQLKELLXVSRQDN

SEQ ID NO: 7301 - protein, 120 aa, Glycine max
  misc_feature (4)..(4): Xaa can be any naturally occurring amino acid
  misc_feature (8)..(9): Xaa can be any naturally occurring amino acid
  misc_feature (13)..(14): Xaa can be any naturally occurring amino acid
  misc_feature (17)..(17): Xaa can be any naturally occurring amino acid
  misc_feature (20)..(20): Xaa can be any naturally occurring amino acid
  misc_feature (24)..(24): Xaa can be any naturally occurring amino acid
  misc_feature (28)..(28): Xaa can be any naturally occurring amino acid
  misc_feature (33)..(33): Xaa can be any naturally occurring amino acid
  misc_feature (42)..(46): Xaa can be any naturally occurring amino acid
  misc_feature (48)..(49): Xaa can be any naturally occurring amino acid
  misc_feature (57)..(57): Xaa can be any naturally occurring amino acid
  misc_feature (75)..(75): Xaa can be any naturally occurring amino acid
  misc_feature (85)..(85): Xaa can be any naturally occurring amino acid
  misc_feature (89)..(90): Xaa can be any naturally occurring amino acid
  misc_feature (92)..(92): Xaa can be any naturally occurring amino acid
  misc_feature (115)..(115): Xaa can be any naturally occurring amino acid
  misc_feature (120)..(120): Xaa can be any naturally occurring amino acid
  Coding DNA Sequence Number=SeqID_4634
RDVXFICXXYSVXXTQXGEXNNIXTIIXTRYNXIAPASYSQXXXXXPXXPPPPAQPXHYVYYYYFIIYILKIATXYSRHARALIXTTLXXWXLSVYIYTQLRNYYTTPHISHHEXDVCEX

SEQ ID NO: 7302 - protein, 159 aa, Glycine max
  misc_feature (73)..(73): Xaa can be any naturally occurring amino acid
  misc_feature (127)..(127): Xaa can be any naturally occurring amino acid
  Coding DNA Sequence Number=SeqID_4636
LGIDGVDEETYQHTIIRPETRQPRTNTPPPLTTRVDRGGGRGGNTTTVTALYADRRASRAWSVCGRCRCVGWXQLRQEEGCLRTGWYVIHVCGLSGRGRPGRGVPRLPPRHLTARPASRAWVGVGLXADSTSIHLISTRGRYVGVAVPSRSTLQCTHEG

SEQ ID NO: 7303 - protein, 161 aa, Glycine max
  misc_feature (106)..(106): Xaa can be any naturally occurring amino acid
  Coding DNA Sequence Number=SeqID_4638
  Gene Ontology: Mol. function=endonuclease activity; Cellular component=cytoplasm; Biological process=response to biotic stimulus
  Homolog annotation: Hit_ID=Q10MP7; Match level="QueryCoverage=100%, HitCoverage=100%, E-value=5e-66, Identity=78%"; Hit description =Pathogenesis-related protein 1, putative, expressed
  Pfam annotation: Domain name=Bet_v_I; Domain location=2-156; Score =87.5; E_value=4.3e-23; Accession=PF00407.9; Description=Pathogenesis- related protein Bet v I family
MASTNSWTHEIESPVAASRLFRAGVMDWHTLAPKLVPQIVASAHPVEGEGGIGSVRQFNFTSAMPFNLMKERLEFIDVDKCECKSALIEGGGIGTAIETGTSHIKXVEPAANGGSVVKVESTYKLLPGVEVNDEITKAKDSVTAIFKAAEAYLIANPDAYN

SEQ ID NO: 7304 - protein, 170 aa, Glycine max
  misc_feature (125)..(125): Xaa can be any naturally occurring amino acid
  misc_feature (150)..(150): Xaa can be any naturally occurring amino acid
  Coding DNA Sequence Number=SeqID_4639
  Gene Ontology: Mol. function=oxidoreductase activity; Cellular component=membrane; Biological process=electron transport
  Homolog annotation: Hit_ID=O49859; Match level="QueryCoverage=89%, HitCoverage=28%, E-value=5e-50, Identity=64%"; Hit description =Cytochrome P450 82A4
LVFCRNPSCRIRHEAHLTFNTVLRMVVGKRLFGARTMDDEKAQRCVKAVKEFMRLMGVFTVADAIPFLRWFDFGGYEKAMKETAKDLDEIFGEWVEEHKQNRAFGENNVGGIQDFMDVMLSLFDXKNLDWVDADTIIKCPFLSVISGGTXTNITTLSWARCLISRNPIVL

SEQ ID NO: 7305 - protein, 151 aa, Glycine max
  misc_feature (149)..(149): Xaa can be any naturally occurring amino acid
  Coding DNA Sequence Number=SeqID_4640
PPLCSSLHSAHRSVRVRERERDRESSSMAREMEKARKATSPKTSSTSSGPKSPARSGGSPPHKKNVTEARPKNEQQNFRKGGQDSATHDESKRRSPTLQTSPKRSTKHEQPLSYCRLHTEERAIRRAGYNYQIASKINTEEIIRRFVDXLS

SEQ ID NO: 7306 - protein, 118 aa, Glycine max
  Coding DNA Sequence Number=SeqID_4641
  Gene Ontology: Mol. function=ribulose-bisphosphate carboxylase activity; Cellular component=chloroplast
  Homolog annotation: Hit_ID=O98997; Match level="QueryCoverage=100%, HitCoverage=26%, E-value=4e-20, Identity=47%"; Hit description =Ribulose bisphosphate carboxylase/oxygenase activase, chloroplast precursor
  Subcellular localization annotation: CTP_CleavageSite=58; ConfidenceScore=5.74e-01
MAASVSTVGAVNRALLNLNGSGPGVSAPSSSFFGSSLKKVIGSRVPNTYISSGSLKIVAVEENTEIEETQQTDMDRWNGLAYDIIDDQQDITIGKGLADSLLSGPLDAATHYAVMSSY

SEQ ID NO: 7307 - protein, 125 aa, Glycine max
  misc_feature (25)..(25): Xaa can be any naturally occurring amino acid
  misc_feature (64)..(64): Xaa can be any naturally occurring amino acid
  misc_feature (95)..(95): Xaa can be any naturally occurring amino acid
  Coding DNA Sequence Number=SeqID_4642
  Gene Ontology: Mol. function=aminoacyl-tRNA ligase activity; Cellular component=cytoplasm; Biological process=tRNA aminoacylation for protein translation
  Homolog annotation: Hit_ID=A7PS28; Match level="QueryCoverage=90%, HitCoverage=16%, E-value=3e-24, Identity=53%"; Hit description=Lysyl- tRNA synthetase
MPAARPFVTHHNDLIMTLFMRIASXLYLHSECAVGGLDRVYDIGYLFRSAGLTSTHYPDTTTCXHSMADHDYNDSTDPADQMVHGMNDPSRCCYXILHHAPWIDMQPIGNDFTTPLMCRVNILWT

SEQ ID NO: 7308 - protein, 131 aa, Glycine max
  Coding DNA Sequence Number=SeqID_4643
  Gene Ontology: Mol. function=sequence-specific DNA binding; Cellular component=nucleus; Biological process=transcription from RNA polymerase II promoter
  Homolog annotation: Hit_ID=UPI000069FDDF; Match level="QueryCoverage =100%, HitCoverage=41%, E-value=9e-54, Identity=83%"; Hit description= Short stature homeobox protein (Short stature homeobox-containing protein) ...
  Homolog annotation: Hit description=(Pseudoautosomal homeobox -containing osteogenic protein).
MEELTAFVSKSFDQKSKESNGGGGGGGGSSKKETITYREVLETGLARVRELGNFETNLQDITDTSNHCPLHLYKEHGADSDKDKLKDYGSARVSEGIYECKEKRDDVKSEDEDGQTKLKQRRSQTNFTLEQ

SEQ ID NO: 7309 - protein, 73 aa, Glycine max
  Coding DNA Sequence Number=SeqID_4644
  Gene Ontology: Cellular component=integral to membrane
  Homolog annotation: Hit_ID=A5AT49; Match level="QueryCoverage=97%, HitCoverage=14%, E-value=1e-28, Identity=84%"; Hit description =Putative uncharacterized protein
MPPGGILTALYAFHSHDISRGILALAFLLVVFNCLSSFQIYSMPAFDSCEAGYTSGTNRPCSIWVRSGLRVLY

SEQ ID NO: 7310 - protein, 570 aa, Glycine max
  Coding DNA Sequence Number=SeqID_4645
  Gene Ontology: Mol. function=signal transducer activity; Cellular component=cytoplasm; Biological process=keratinization
  Homolog annotation: Hit_ID=Q235Y4; Match level="QueryCoverage=94%, HitCoverage=42%, E-value=1e-113, Identity=42%"; Hit description =Putative uncharacterized protein
MTHHAASIEEELQIDTHAFEALEKDFQDVLQELAADASLEHFRRQYEKLHRALMFSHENEKKLLKKCKDLNQDIVGNAGKVQVALELTKEEAQNVTILRQEMDKAYRVIENFRDKEEHNKKKMEGLHEQIRQLRSLVDQGNSIAAGQNSTNSELIAQNQRLADEKDRLVTELASTKNELITSLEKLKTLEVDNQTFENDVKQLKIKINDLEEKKQKEADRQKKFQDEMENLKKRLDVSMGEGDRKEKEVMKAQEEIELLKDERRILEKEKKEKMERIKQLQNDMEKQSLHIESVQKFNSDLNTKSHELEQTITKQAGEINEKISKLAQQEREINKLKREKEGIRNQKIEAERAKELAQNSIEQLERIIDDTKRLAEEDRKLIEQLKASRNLLNKEINRAESNNKKQGNDLIISHKANKEKDNEIVNQAKEVEILKKRISELEKEKEKYGITAAQANAKYFHALEEIKLKDNLISEFQKKNIETEAKLKQQQNLYEAVRSDRNLYSKNLTETQDEIAEIKRKYKIVNHQISQLKEEIDAKEAALTQEHFELKKKSKEYEESQKEIEKKKKK

SEQ ID NO: 7311 - protein, 161 aa, Glycine max
  misc_feature (13)..(13): Xaa can be any naturally occurring amino acid
  misc_feature (150)..(150): Xaa can be any naturally occurring amino acid
  Coding DNA Sequence Number=SeqID_4646
  Homolog annotation: Hit_ID=Q7RBU8; Match level="QueryCoverage=75%, HitCoverage=10%, E-value=1e-08, Identity=28%"; Hit description =Putative uncharacterized protein PY06038
VSLQMRESELKNXQEECQKERDELREEREMIEEVKEVLRIEKETLIKKKASLKEVVKNIQSKTAKQLAEKDLQLLLMDKKIESKKKVLEDEWGKLDVMKREVKHAQEAISNEWRKINTDIQELERLYSHCEMSKEEVMREKKDIKGKYEXQYREVEKKKKK

SEQ ID NO: 7312 - protein, 107 aa, Glycine max
  misc_feature (3)..(3): Xaa can be any naturally occurring amino acid
  misc_feature (8)..(8): Xaa can be any naturally occurring amino acid
  misc_feature (24)..(24): Xaa can be any naturally occurring amino acid
  misc_feature (33)..(33): Xaa can be any naturally occurring amino acid
  misc_feature (76)..(76): Xaa can be any naturally occurring amino acid
  misc_feature (79)..(79): Xaa can be any naturally occurring amino acid
  misc_feature (82)..(82): Xaa can be any naturally occurring amino acid
  misc_feature (87)..(88): Xaa can be any naturally occurring amino acid
  misc_feature (92)..(92): Xaa can be any naturally occurring amino acid
  misc_feature (94)..(95): Xaa can be any naturally occurring amino acid
  misc_feature (100)..(100): Xaa can be any naturally occurring amino acid
  misc_feature (103)..(104): Xaa can be any naturally occurring amino acid
  Coding DNA Sequence Number=SeqID_4647
VHXGRGWXPSGGLRPAAVQLLNAXLDPRLDPLXPIKKNQMIAVRTSSDDGGNIRISSASSTGRRPQVLPNFRSNRXNSXEAXLGAFXXHSHXKXXYMCVXAQXXLLN

SEQ ID NO: 7313 - protein, 89 aa, Glycine max
  Coding DNA Sequence Number=SeqID_4649
  Homolog annotation: Hit_ID=Q06765; Match level="QueryCoverage=100%, HitCoverage=32%, E-value=3e-35, Identity=82%"; Hit description=ADR6 protein
  Pfam annotation: Domain name=BURP; Domain location=1-89; Score=-44.0; E_value=6.5e-06; Accession=PF03181.6; Description=BURP domain
KSIRVLSSSFVNMQDLYTVKGVQNLGDTAVMCNRLYVRTAVFDCHEVRETSAFMVPLVDGEGTKTQALAICHSNTYGMNHQMLHRVMGV

SEQ ID NO: 7314 - protein, 104 aa, Glycine max
  misc_feature (69)..(69): Xaa can be any naturally occurring amino acid
  Coding DNA Sequence Number=SeqID_4650
  Gene Ontology: Mol. function=catalytic activity; Biological process =cellular metabolic process
  Homolog annotation: Hit_ID=Q8S4X1; Match level="QueryCoverage=81%, HitCoverage=13%, E-value=3e-20, Identity=59%"; Hit description=UOS1
LLSELSSYLKRRVFTIGFHNFSEPENLSAYDGLEFRLKGDGRTYKIIVRTRSDWDALGYTARSDTDKRXWHSTPAPPRSCSLFASMNCVHAAPFDTSIVASLRL

SEQ ID NO: 7315 - protein, 78 aa, Glycine max
  misc_feature (67)..(67): Xaa can be any naturally occurring amino acid
  Coding DNA Sequence Number=SeqID_4651
PMVKVHSHCRVQRVLQGTCYSLPETKKGASSIVADAFTINIFVACQEPSRLEIMRITPNTTNPVDVXKHSPIITCYQG

SEQ ID NO: 7316 - protein, 154 aa, Glycine max
  misc_feature (21)..(21): Xaa can be any naturally occurring amino acid
  misc_feature (44)..(44): Xaa can be any naturally occurring amino acid
  misc_feature (51)..(51): Xaa can be any naturally occurring amino acid
  misc_feature (53)..(53): Xaa can be any naturally occurring amino acid
  misc_feature (58)..(58): Xaa can be any naturally occurring amino acid
  misc_feature (78)..(78): Xaa can be any naturally occurring amino acid
  misc_feature (97)..(97): Xaa can be any naturally occurring amino acid
  misc_feature (99)..(99): Xaa can be any naturally occurring amino acid
  misc_feature (110)..(110): Xaa can be any naturally occurring amino acid
  misc_feature (127)..(127): Xaa can be any naturally occurring amino acid
  misc_feature (129)..(129): Xaa can be any naturally occurring amino acid
  misc_feature (134)..(134): Xaa can be any naturally occurring amino acid
  misc_feature (136)..(136): Xaa can be any naturally occurring amino acid
  misc_feature (147)..(147): Xaa can be any naturally occurring amino acid
  Coding DNA Sequence Number=SeqID_4652
DIPTIALRVPRISSSTLSNEXIDNYGVAYESVMPTLQRISRRQXDVCYVSXMXQLHIXTAAVIRDRSSSELTTRSSTXQPHSAHCILPTRLICMMFXYXCSPLVLSQLSXHRSHIAITRSKRRDTAXYXVHASXTXDQTALASKSLXSSSLHIE

SEQ ID NO: 7317 - protein, 174 aa, Glycine max
  misc_feature (31)..(31): Xaa can be any naturally occurring amino acid
  misc_feature (76)..(76): Xaa can be any naturally occurring amino acid
  misc_feature (87)..(87): Xaa can be any naturally occurring amino acid
  misc_feature (100)..(100): Xaa can be any naturally occurring amino acid
  misc_feature (130)..(130): Xaa can be any naturally occurring amino acid
  misc_feature (137)..(137): Xaa can be any naturally occurring amino acid
  misc_feature (154)..(154): Xaa can be any naturally occurring amino acid
  Coding DNA Sequence Number=SeqID_4654
  Gene Ontology: Mol. function=protein serine/threonine kinase activity; Cellular component=cytoplasm; Biological process=protein amino acid phosphorylation
  Homolog annotation: Hit_ID=A7PFE8; Match level="QueryCoverage=100%, HitCoverage=56%, E-value=1e-56, Identity=66%"; Hit description =Chromosome chr11 scaffold_14, whole genome shotgun sequence
  Pfam annotation: Domain name=Pkinase; Domain location=1-173; Score= -72.4; E_value=0.00028; Accession=PF00069.15; Description=Protein kinase domain
  Pfam annotation: Domain name=Pkinase_Tyr; Domain location=1-175; Score=-121.5; E_value=5.7e-05; Accession=PF07714.7; Description =Protein tyrosine kinase
  Pfam module annotation: Pfam domain module=Pkinase::Pkinase_Tyr; Domain location=1-173::1-175
FIGACRKPMVWCIVTEYAKGGSVRQFINERXKRAQLPLKLAVKQALDVARGMAYVHGLGFIHTDLKSDNVLIVGDXSIKIADFGVRXLEELTVRMTPDTXTYSRMAREMIQRRPYTQIVDLYSYVIDLSXLITDIHXIENITTVQAASAVDTRXVTPVLDNKCLAYLRDIMNSC

SEQ ID NO: 7318 - protein, 108 aa, Glycine max
  misc_feature (73)..(73): Xaa can be any naturally occurring amino acid
  misc_feature (89)..(89): Xaa can be any naturally occurring amino acid
  misc_feature (95)..(96): Xaa can be any naturally occurring amino acid
  Coding DNA Sequence Number=SeqID_4655
VYHHITTRLLLIVLHVYRKILHSLSLSPYLSTAVLRTRCVTSRIHIQLTHMSRSLDVSNIIDVSAILTHARHXLSHSHSSMRLDSLTYXSIAPHXXQRLQATYMSTDL

SEQ ID NO: 7319 - protein, 85 aa, Glycine max
  Coding DNA Sequence Number=SeqID_4657
EPSSFSPSTSSPPSPLTNPCNITTNHSETHHVDTDELMSLQTTMEPPKDSHDTTAHNHKRGLIQPCSPSSKPDLRTNPLIYPNQK

SEQ ID NO: 7320 - protein, 139 aa, Glycine max; identical to SEQ ID NO: 6523
  misc_feature (5)..(5): Xaa can be any naturally occurring amino acid
  misc_feature (7)..(7): Xaa can be any naturally occurring amino acid
  misc_feature (9)..(11): Xaa can be any naturally occurring amino acid
  misc_feature (13)..(14): Xaa can be any naturally occurring amino acid
  misc_feature (16)..(16): Xaa can be any naturally occurring amino acid
  misc_feature (18)..(18): Xaa can be any naturally occurring amino acid
  misc_feature (23)..(23): Xaa can be any naturally occurring amino acid
  misc_feature (25)..(25): Xaa can be any naturally occurring amino acid
  misc_feature (28)..(28): Xaa can be any naturally occurring amino acid
  misc_feature (30)..(30): Xaa can be any naturally occurring amino acid
  misc_feature (40)..(40): Xaa can be any naturally occurring amino acid
  misc_feature (47)..(48): Xaa can be any naturally occurring amino acid
  misc_feature (52)..(55): Xaa can be any naturally occurring amino acid
  misc_feature (57)..(57): Xaa can be any naturally occurring amino acid
  misc_feature (62)..(65): Xaa can be any naturally occurring amino acid
  misc_feature (67)..(67): Xaa can be any naturally occurring amino acid
  misc_feature (69)..(70): Xaa can be any naturally occurring amino acid
  misc_feature (75)..(77): Xaa can be any naturally occurring amino acid
  misc_feature (85)..(85): Xaa can be any naturally occurring amino acid
  misc_feature (91)..(91): Xaa can be any naturally occurring amino acid
  misc_feature (98)..(98): Xaa can be any naturally occurring amino acid
  misc_feature (100)..(100): Xaa can be any naturally occurring amino acid
  misc_feature (105)..(105): Xaa can be any naturally occurring amino acid
  misc_feature (108)..(108): Xaa can be any naturally occurring amino acid
  misc_feature (110)..(110): Xaa can be any naturally occurring amino acid
  misc_feature (112)..(113): Xaa can be any naturally occurring amino acid
  misc_feature (117)..(118): Xaa can be any naturally occurring amino acid
  misc_feature (128)..(128): Xaa can be any naturally occurring amino acid
  misc_feature (132)..(134): Xaa can be any naturally occurring amino acid
  misc_feature (138)..(138): Xaa can be any naturally occurring amino acid
  Coding DNA Sequence Number=SeqID_4659

SEQ ID NO: 7321 - protein, 136 aa, Glycine max
  misc_feature (28)..(28): Xaa can be any naturally occurring amino acid
  Coding DNA Sequence Number=SeqID_4661
  Gene Ontology: Mol. function=hydrolase activity; Cellular component =cytoplasm; Biological process=response to biotic stimulus
  Homolog annotation: Hit_ID=Q43453; Match level="QueryCoverage=100%, HitCoverage=85%, E-value=2e-45, Identity=69%"; Hit description=G.max mRNA from stress-induced gene
  Pfam annotation: Domain name=Bet_v_I; Domain location=1-132; Score =7.1; E_value=7.9e-07; Accession=PF00407.9; Description=Pathogenesis -related protein Bet v I family
LTDDDNPFPKDVEAFTNVENLNGNGGPXTIKNITFLYDEDSKFVLHHIQSADDAQSWDTLYNVHGGVALPYTLENITFYCKLAAGANGCPAGKLTVKYQTKRDAQPNPDDLKIWKATSDALFQACDAYLLCNPHYN

SEQ ID NO: 7322 - protein, 131 aa, Glycine max
  misc_feature (4)..(4): Xaa can be any naturally occurring amino acid
  misc_feature (9)..(9): Xaa can be any naturally occurring amino acid
  misc_feature (15)..(15): Xaa can be any naturally occurring amino acid
  misc_feature (50)..(50): Xaa can be any naturally occurring amino acid
  misc_feature (72)..(72): Xaa can be any naturally occurring amino acid
  misc_feature (86)..(86): Xaa can be any naturally occurring amino acid
  misc_feature (90)..(90): Xaa can be any naturally occurring amino acid
  misc_feature (104)..(104): Xaa can be any naturally occurring amino acid
  misc_feature (109)..(109): Xaa can be any naturally occurring amino acid
  misc_feature (118)..(118): Xaa can be any naturally occurring amino acid
  misc_feature (123)..(123): Xaa can be any naturally occurring amino acid
  misc_feature (126)..(126): Xaa can be any naturally occurring amino acid
  Coding DNA Sequence Number=SeqID_4662
LVAXYIYAXSADAHXCRRVAYAHNPAMCIADVAPRASYLYSRSSQRDLYXISLLLTICLTHYSTQRYARGVXVLVSVRAAFRGAGXLLVXTRAYIRRCQRGIYXTCHTXLSSHIVTRXYIHAXGVXHASSR

SEQ ID NO: 7323 - protein, 213 aa, Glycine max
  misc_feature (155)..(155): Xaa can be any naturally occurring amino acid
  misc_feature (157)..(157): Xaa can be any naturally occurring amino acid
  misc_feature (189)..(190): Xaa can be any naturally occurring amino acid
  Coding DNA Sequence Number=SeqID_4664
  Gene Ontology: Mol. function=polynucleotide adenylyltransferase activity; Cellular component=nucleus; Biological process=RNA 3'-end processing
  Homolog annotation: Hit_ID=A7P724; Match level="QueryCoverage=92%, HitCoverage=26%, E-value=7e-89, Identity=81%"; Hit description =Chromosome chr9 scaffold_7, whole genome shotgun sequence
  Pfam annotation: Domain name=NTP_transf_2; Domain location=56-153; Score=30.8; E_value=5e-06; Accession=PF01909.13; Description =Nucleotidyltransferase domain
  Pfam annotation: Domain name=PAP_central; Domain location=1-208; Score=-24.1; E_value=8.2e-11; Accession=PF04928.8; Description =Poly(A) polymerase central domain
  Pfam module annotation: Pfam domain module=NTP_transf_2::PAP_central; Domain location=56-153::1-208
KPISMAGPSATDLQRTRELEKFLAASGLYESKDEAAKREEVLHRLGEIVKSWVKQLTRLRGYTGQMVEDANAIILTFGSYRLGVHGPGADLDTLCIGPSYVTREEDFFYTLHDILANVEEVTELQPIPDAHVPVMKFKFDGISIDLLYASISRLXVXPEDLDISDVSVLHNVDEPTVRSLNGCRVADQXXKLVPNVEHSRPPRRAPPPPPIAS

SEQ ID NO: 7324 - protein, 110 aa, Glycine max
  misc_feature (8)..(8): Xaa can be any naturally occurring amino acid
  misc_feature (10)..(10): Xaa can be any naturally occurring amino acid
  misc_feature (100)..(100): Xaa can be any naturally occurring amino acid
  misc_feature (102)..(102): Xaa can be any naturally occurring amino acid
  misc_feature (110)..(110): Xaa can be any naturally occurring amino acid
  Coding DNA Sequence Number=SeqID_4665
HPPTPAAXPXTPPRRKKINDTSSHLYLWYLRTTFSCRLSHLIQNEAHYAHIHLHFLTTPLPIQSLSPDHRRACLSHLSCHVYFCSVAPLRRCVGESVNAXRXRGVSGLAX

SEQ ID NO: 7325 - protein, 86 aa, Glycine max
  Coding DNA Sequence Number=SeqID_4667
SEHNTLINNALNSIWTITLFPTPHSSGLPPPERRGTIYRSEPLTFDFNPLNFQHTTVIFNSTAFSCNNQILNAYIHKFFPSPKFFR

SEQ ID NO: 7326 - protein, 113 aa, Glycine max
  Coding DNA Sequence Number=SeqID_4668
  Subcellular localization annotation: CTP_CleavageSite=21; ConfidenceScore=5.39e-01
PVTRPYPLPLCAPPLSRLAPRSQVRRRSLLAPPSPARGHSLVPLPSPHKKGGKWGARKKRSTCGRQADAWLLLQLAYSSDCDLPRICFGSTDFTACSYERDGEDIEMTLVVAF

SEQ ID NO: 7327 - protein, 138 aa, Glycine max; identical to SEQ ID NO: 6808
  misc_feature (1)..(1): Xaa can be any naturally occurring amino acid
  misc_feature (52)..(52): Xaa can be any naturally occurring amino acid
  misc_feature (56)..(56): Xaa can be any naturally occurring amino acid
  misc_feature (80)..(80): Xaa can be any naturally occurring amino acid
  Coding DNA Sequence Number=SeqID_4669

SEQ ID NO: 7328 - protein, 154 aa, Glycine max; identical to SEQ ID NO: 6810
  misc_feature (79)..(79): Xaa can be any naturally occurring amino acid
  misc_feature (103)..(103): Xaa can be any naturally occurring amino acid
  misc_feature (113)..(113): Xaa can be any naturally occurring amino acid
  misc_feature (124)..(124): Xaa can be any naturally occurring amino acid
  misc_feature (134)..(134): Xaa can be any naturally occurring amino acid
  Coding DNA Sequence Number=SeqID_4671

SEQ ID NO: 7329 - protein, 119 aa, Glycine max; identical to SEQ ID NO: 6812
  Coding DNA Sequence Number=SeqID_4673

SEQ ID NO: 7330 - protein, 136 aa, Glycine max
  misc_feature (9)..(10): Xaa can be any naturally occurring amino acid
  misc_feature (13)..(15): Xaa can be any naturally occurring amino acid
  misc_feature (17)..(17): Xaa can be any naturally occurring amino acid
  misc_feature (21)..(32): Xaa can be any naturally occurring amino acid
  misc_feature (34)..(36): Xaa can be any naturally occurring amino acid
  misc_feature (40)..(40): Xaa can be any naturally occurring amino acid
  misc_feature (51)..(51): Xaa can be any naturally occurring amino acid
  misc_feature (63)..(63): Xaa can be any naturally occurring amino acid
  misc_feature (75)..(75): Xaa can be any naturally occurring amino acid
  misc_feature (80)..(85): Xaa can be any naturally occurring amino acid
  misc_feature (91)..(91): Xaa can be any naturally occurring amino acid
  misc_feature (113)..(113): Xaa can be any naturally occurring amino acid
  misc_feature (121)..(121): Xaa can be any naturally occurring amino acid
  Coding DNA Sequence Number=SeqID_4675
GGGGGVGGXXGGXXXLXVFVXXXXXXXXXXXXPXXXTLPXPGPPLISRAAXLLLRWWSATLCXGTWCLPAAGAWXGSGCXXXXXXAAHAPXLKERETRASENTSEKEGARRAXVLDDELSXAVRSLNISLYYTHTS

SEQ ID NO: 7331 - protein, 161 aa, Glycine max; identical to SEQ ID NO: 6813
  misc_feature (4)..(4): Xaa can be any naturally occurring amino acid
  misc_feature (8)..(8): Xaa can be any naturally occurring amino acid
  misc_feature (11)..(12): Xaa can be any naturally occurring amino acid
  misc_feature (30)..(30): Xaa can be any naturally occurring amino acid
  misc_feature (34)..(34): Xaa can be any naturally occurring amino acid
  misc_feature (41)..(41): Xaa can be any naturally occurring amino acid
  misc_feature (54)..(54): Xaa can be any naturally occurring amino acid
  misc_feature (75)..(75): Xaa can be any naturally occurring amino acid
  misc_feature (83)..(83): Xaa can be any naturally occurring amino acid
  misc_feature (86)..(87): Xaa can be any naturally occurring amino acid
  misc_feature (89)..(89): Xaa can be any naturally occurring amino acid
  misc_feature (91)..(91): Xaa can be any naturally occurring amino acid
  misc_feature (96)..(96): Xaa can be any naturally occurring amino acid
  misc_feature (102)..(103): Xaa can be any naturally occurring amino acid
  misc_feature (110)..(110): Xaa can be any naturally occurring amino acid
  misc_feature (114)..(114): Xaa can be any naturally occurring amino acid
  misc_feature (116)..(117): Xaa can be any naturally occurring amino acid
  misc_feature (119)..(119): Xaa can be any naturally occurring amino acid
  misc_feature (122)..(122): Xaa can be any naturally occurring amino acid
  misc_feature (125)..(126): Xaa can be any naturally occurring amino acid
  misc_feature (135)..(135): Xaa can be any naturally occurring amino acid
  misc_feature (139)..(139): Xaa can be any naturally occurring amino acid
  misc_feature (157)..(161): Xaa can be any naturally occurring amino acid
  Coding DNA Sequence Number=SeqID_4677

SEQ ID NO: 7332 - protein, 92 aa, Glycine max; identical to SEQ ID NO: 6533
  misc_feature (5)..(5): Xaa can be any naturally occurring amino acid
  misc_feature (7)..(12): Xaa can be any naturally occurring amino acid
  misc_feature (63)..(65): Xaa can be any naturally occurring amino acid
  Coding DNA Sequence Number=SeqID_4679

SEQ ID NO: 7333 - protein, 116 aa, Glycine max; identical to SEQ ID NO: 6904
  misc_feature (29)..(29): Xaa can be any naturally occurring amino acid
  misc_feature (39)..(40): Xaa can be any naturally occurring amino acid
  misc_feature (54)..(54): Xaa can be any naturally occurring amino acid
  misc_feature (69)..(69): Xaa can be any naturally occurring amino acid
  misc_feature (88)..(88): Xaa can be any naturally occurring amino acid
  misc_feature (100)..(102): Xaa can be any naturally occurring amino acid
  misc_feature (105)..(111): Xaa can be any naturally occurring amino acid
  misc_feature (113)..(113): Xaa can be any naturally occurring amino acid
  Coding DNA Sequence Number=SeqID_4681

SEQ ID NO: 7334 - protein, 121 aa, Glycine max; identical to SEQ ID NO: 6535
  misc_feature (12)..(12): Xaa can be any naturally occurring amino acid
  misc_feature (20)..(20): Xaa can be any naturally occurring amino acid
  misc_feature (26)..(26): Xaa can be any naturally occurring amino acid
  misc_feature (73)..(73): Xaa can be any naturally occurring amino acid
  misc_feature (85)..(85): Xaa can be any naturally occurring amino acid
  misc_feature (97)..(98): Xaa can be any naturally occurring amino acid
  misc_feature (113)..(113): Xaa can be any naturally occurring amino acid
  Coding DNA Sequence Number=SeqID_4683

SEQ ID NO: 7335 - protein, 147 aa, Glycine max
  misc_feature (1)..(1): Xaa can be any naturally occurring amino acid
  misc_feature (14)..(14): Xaa can be any naturally occurring amino acid
  misc_feature (16)..(16): Xaa can be any naturally occurring amino acid
  misc_feature (21)..(21): Xaa can be any naturally occurring amino acid
  misc_feature (43)..(43): Xaa can be any naturally occurring amino acid
  misc_feature (47)..(47): Xaa can be any naturally occurring amino acid
  misc_feature (52)..(53): Xaa can be any naturally occurring amino acid
  misc_feature (65)..(65): Xaa can be any naturally occurring amino acid
  misc_feature (77)..(77): Xaa can be any naturally occurring amino acid
  misc_feature (79)..(79): Xaa can be any naturally occurring amino acid
  misc_feature (90)..(90): Xaa can be any naturally occurring amino acid
  misc_feature (105)..(106): Xaa can be any naturally occurring amino acid
  misc_feature (125)..(125): Xaa can be any naturally occurring amino acid
  misc_feature (131)..(131): Xaa can be any naturally occurring amino acid
  misc_feature (135)..(136): Xaa can be any naturally occurring amino acid
  Coding DNA Sequence Number=SeqID_4685
  Subcellular localization annotation: CTP_CleavageSite=48; ConfidenceScore=5.60e-01
XQYLPTPQRRAQTXTXPQRKXSKLPGQVHNRQAGVTTTSLRAXDALXRSALXXNSFAAPPRPHRXSTHAAGERVNKXRXTARSVEKDPCXRGANTRAGDQSAQHXXHTSVCHISAPDMTVDSNTXTSDGVXQGGXXPLKHTTPSRVC

SEQ ID NO: 7336 - protein, 142 aa, Glycine max
  Coding DNA Sequence Number=SeqID_1438
  Homolog annotation: Hit_ID=Q2A9V8; Match level="QueryCoverage=45%, HitCoverage=17%, E-value=2e-10, Identity=56%"; Hit description =Nuclear RNA binding protein, putative
KKLLKGFGRERRKIFSNPKRWGEGKSFPPSGLEVFAPAVLQGRVIGGGVFFPSGGPGKANCKRILGKKKRKAKKLLTINEFLKRVNGEPYNPRGGSPGRGGRSGGLGQRDGKVNGGGNQRNGGAFAPCPGFGDRAQFPSLGK

SEQ ID NO: 7337 - protein, 157 aa, Glycine max
  misc_feature (18)..(18): Xaa can be any naturally occurring amino acid
  misc_feature (23)..(23): Xaa can be any naturally occurring amino acid
  misc_feature (27)..(27): Xaa can be any naturally occurring amino acid
  misc_feature (29)..(29): Xaa can be any naturally occurring amino acid
  misc_feature (36)..(36): Xaa can be any naturally occurring amino acid
  Coding DNA Sequence Number=SeqID_1439
  Gene Ontology: Mol. function=structural constituent of ribosome; Cellular component=ribonucleoprotein complex; Biological process =translation
  Homolog annotation: Hit_ID=A9P8K6; Match level="QueryCoverage=100%, HitCoverage=98%, E-value=5e-50, Identity=62%"; Hit description =Putative uncharacterized protein
  Pfam annotation: Domain name=Ribosomal_S17; Domain location=77-143; Score=64.9; E_value=2.7e-16; Accession=PF00366.10; Description =Ribosomal protein S17
MAEQTKKAFLKQPKVFLXTKKTXKGKXPXKGGNRFXKSIELEFKTPKEAIKRTYIDKKYPFTDNVSIHNHILTKTYHSTKINKTIIIRKNYLHFIKKYQKYEKKHSNIPTHISPTFHIKERNHIIINQYQPLSKTVKFNILKIIPPTSSINTKKTFT

SEQ ID NO: 7338 - protein, 193 aa, Glycine max
  misc_feature (177)..(177): Xaa can be any naturally occurring amino acid
  Coding DNA Sequence Number=SeqID_1440
  Homolog annotation: Hit_ID=Q23DM1; Match level="QueryCoverage=93%, HitCoverage=18%, E-value=9e-15, Identity=27%"; Hit description =Putative uncharacterized protein
MMMYESLSTPHVLPSYDQENTPPQACNPEDHSAPRDCRSECRNERNTYVLAERLADTNQEVLQTSQEQGKTSSQKVGDENSQADALKKDQLAQLMQNKKLQKYTVKQLLHISKSQIDFGTTFPGQILDESLDIINKSNQNLVVQISLECENPDFQDTDEYVYSIRRSHLYEFNDKHXLIMAPYSSASFRVTLK

SEQ ID NO: 7339 - protein, 146 aa, Glycine max; identical to SEQ ID NO: 6672
  misc_feature (12)..(12): Xaa can be any naturally occurring amino acid
  Coding DNA Sequence Number=SeqID_1441

SEQ ID NO: 7340 - protein, 198 aa, Glycine max
  misc_feature (57)..(57): Xaa can be any naturally occurring amino acid
  Coding DNA Sequence Number=SeqID_1443
  Gene Ontology: Mol. function=actin binding; Cellular component =integral to membrane; Biological process=actin cytoskeleton organization and biogenesis
  Homolog annotation: Hit_ID=O76753; Match level="QueryCoverage=95%, HitCoverage=89%, E-value=1e-27, Identity=32%"; Hit description=Actin binding protein
  Pfam annotation: Domain name=Filamin; Domain location=1-96; Score =91.3; E_value=3.1e-24; Accession=PF00630.9; Description =FilaminABP280 repeat
  Pfam annotation: Domain name=Filamin; Domain location=104-189; Score =40.3; E_value=6.8e-09; Accession=PF00630.9; Description =FilaminABP280 repeat
  Pfam module annotation: Pfam domain module=Filamin::Filamin; Domain location=1-96::104-189
DASKSLVYGPGVENTLLNTKPGKFTIEARDKDGKKMTKGGDDFDVKVTDANGQQLDXQLVDNGDGTYSVEYKPKGTGKHKVDVRLKDKPVGNTPVTVNVKEGASYDNTHIDSFSFVIRTKTQANEDKKEGGESFNVKIVNSGSHEEVKKVNIKDIGDGTYVVSYSLPDPGNYEISVLLNDHHIKGSPWKQHMQKKKKK

SEQ ID NO: 7341 - protein, 62 aa, Glycine max
  Coding DNA Sequence Number=SeqID_1444
SSFELILVYVSIKSFRHKSILFYKSLHGIRAAVDSWVYLLILLQLQLKLVKLQTLKKKKKKK

SEQ ID NO: 7342 - protein, 135 aa, Glycine max
  Coding DNA Sequence Number=SeqID_1446
  Gene Ontology: Mol. function=actin binding; Cellular component =intracellular; Biological process=actin filament depolymerization
  Homolog annotation: Hit_ID=A0BKA4; Match level="QueryCoverage=98%, HitCoverage=97%, E-value=4e-24, Identity=42%"; Hit description =Chromosome undetermined scaffold_111, whole genome shotgun sequence
  Pfam annotation: Domain name=Cofilin_ADF; Domain location=9-136; Score=112.2; E_value=1.6e-30; Accession=PF00241.10; Description =Cofilintropomyosin-type actin-binding pr
MDAGFKTTEECIQAFDKLKMHKNVRYLVFKVVGSEVVLESQGERNTDWEEFVKALPREQSRYVVYDFSYKTEDKPPRDVSKLIFIYWSPDEAPAKDKMLSATAKGAFRKALMGVARDFQAKDISDLEYKEVREKL

SEQ ID NO: 7343 - protein, 107 aa, Glycine max
  Coding DNA Sequence Number=SeqID_1447
  Gene Ontology: Cellular component=mitochondrion
  Homolog annotation: Hit_ID=Q53L24; Match level="QueryCoverage=99%, HitCoverage=71%, E-value=6e-47, Identity=83%"; Hit description =Expressed protein
  Pfam annotation: Domain name=DUF842; Domain location=1-104; Score =129.8; E_value=8e-36; Accession=PF05811.3; Description=Eukaryotic protein of unknown function (DUF842)
  Pfam annotation: Domain name=zf-Tim10_DDP; Domain location=35-99; Score=-4.8; E_value=0.025; Accession=PF02953.6; Description=Tim10DDP family zinc finger
  Pfam module annotation: Pfam domain module=DUF842::zf-Tim10_DDP; Domain location=1-104::35-99
LQKEYFKCAHDCFDRRRTQEGITSCVENCGVPALSANNVVETEMAKFQERLNRSLMVCQDKFEAAKLQKMKTDATNELESCVNRSIDDSIRVLPHLVEQIKSTINMK

SEQ ID NO: 7344 - protein, 134 aa, Glycine max
  misc_feature (11)..(11): Xaa can be any naturally occurring amino acid
  misc_feature (75)..(75): Xaa can be any naturally occurring amino acid
  Coding DNA Sequence Number=SeqID_4687
  Gene Ontology: Mol. function=DNA binding; Cellular component =chromosome; Biological process=nucleosome assembly
  Homolog annotation: Hit_ID=P59169; Match level="QueryCoverage=100%, HitCoverage=98%, E-value=4e-50, Identity=78%"; Hit description =Histone H3.3
  Pfam annotation: Domain name=Histone; Domain location=56-130; Score =98.8; E_value=1.7e-26; Accession=PF00125.14; Description=Core histone H2AH2BH3H4
RSKQTARKCTXGKAPKKRFASKAARYCAPTTGGVKKPHRYRSGTDALLEIKKYHMSTELLITKVPFQRLVREIDXDFKTDLRCQSLAVLALREAGEAYLGGLSEDTNLCAIHANRVTIMPGDIHLARTIRGERA

SEQ ID NO: 7345 - protein, 137 aa, Glycine max
  Coding DNA Sequence Number=SeqID_4688
  Gene Ontology: Mol. function=structural constituent of ribosome; Cellular component=large ribosomal subunit; Biological process =translation
  Homolog annotation: Hit_ID=A0BCI5; Match level="QueryCoverage=98%, HitCoverage=73%, E-value=1e-47, Identity=65%"; Hit description =Chromosome undetermined scaffold_10, whole genome shotgun sequence
  Pfam annotation: Domain name=Ribosomal_L22; Domain location=2-105; Score=76.7; E_value=7.6e-20; Accession=PF00237.9; Description =Ribosomal protein L22pL17e
MKDVLGHKRCVPFTRFRNHTGRTGQAKEFGFTQGRWPEKSVKLILSLLQNIQSNAAVKGLEEDKLVVSHVQVNRAQKGRRRTYRAHGRIGPYLSSNCHIELFCTTQETDVKKEANKNAVPRLSKKQIAKTRLRTGEN

SEQ ID NO: 7346 - protein, 110 aa, Glycine max
  Coding DNA Sequence Number=SeqID_4689
RRDRVHRTRRRRPPLCDAHTTLELHSPSRCTQLTGKFCDTASCHTARRSAARSQHAAKKTGTVRTCLCTPLDAPALLLSQRTLQIYTTRYISLSAVAHINEWSTCLAYII

SEQ ID NO: 7347 - protein, 74 aa, Glycine max
  misc_feature (45)..(45): Xaa can be any naturally occurring amino acid
  Coding DNA Sequence Number=SeqID_4691
  Gene Ontology: Mol. function=threonine endopeptidase activity; Cellular component=proteasome core complex; Biological process =ubiquitin-dependent protein catabolic process
  Homolog annotation: Hit_ID=A9NK08; Match level="QueryCoverage=94%, HitCoverage=27%, E-value=7e-19, Identity=72%"; Hit description =Putative uncharacterized protein
MARYDRAITVFSPVGHLSQVEYALKAVRKGIAAVGVRGTDNVVLXLRNYKSTVKLQDSMSVRKILFQNYHFPFP

SEQ ID NO: 7348 - protein, 146 aa, Glycine max; identical to SEQ ID NO: 6554
  misc_feature (2)..(2): Xaa can be any naturally occurring amino acid
  misc_feature (9)..(9): Xaa can be any naturally occurring amino acid
  misc_feature (11)..(11): Xaa can be any naturally occurring amino acid
  misc_feature (18)..(20): Xaa can be any naturally occurring amino acid
  misc_feature (29)..(31): Xaa can be any naturally occurring amino acid
  misc_feature (42)..(42): Xaa can be any naturally occurring amino acid
  misc_feature (54)..(54): Xaa can be any naturally occurring amino acid
  misc_feature (56)..(56): Xaa can be any naturally occurring amino acid
  misc_feature (58)..(58): Xaa can be any naturally occurring amino acid
  misc_feature (62)..(62): Xaa can be any naturally occurring amino acid
  misc_feature (64)..(64): Xaa can be any naturally occurring amino acid
  misc_feature (71)..(72): Xaa can be any naturally occurring amino acid
  misc_feature (75)..(75): Xaa can be any naturally occurring amino acid
  misc_feature (79)..(79): Xaa can be any naturally occurring amino acid
  misc_feature (81)..(81): Xaa can be any naturally occurring amino acid
  misc_feature (84)..(84): Xaa can be any naturally occurring amino acid
  misc_feature (91)..(91): Xaa can be any naturally occurring amino acid
  misc_feature (99)..(99): Xaa can be any naturally occurring amino acid
  misc_feature (102)..(102): Xaa can be any naturally occurring amino acid
  misc_feature (104)..(104): Xaa can be any naturally occurring amino acid
  misc_feature (107)..(107): Xaa can be any naturally occurring amino acid
  misc_feature (113)..(114): Xaa can be any naturally occurring amino acid
  misc_feature (119)..(121): Xaa can be any naturally occurring amino acid
  misc_feature (124)..(124): Xaa can be any naturally occurring amino acid
  misc_feature (133)..(133): Xaa can be any naturally occurring amino acid
  misc_feature (139)..(139): Xaa can be any naturally occurring amino acid
  misc_feature (143)..(143): Xaa can be any naturally occurring amino acid
  misc_feature (146)..(146): Xaa can be any naturally occurring amino acid
  Coding DNA Sequence Number=SeqID_4692
  Subcellular localization annotation: CTP_CleavageSite=21; ConfidenceScore=5.12e-01

SEQ ID NO: 7349 - protein, 114 aa, Glycine max
  misc_feature (89)..(89): Xaa can be any naturally occurring amino acid
  Coding DNA Sequence Number=SeqID_4693
SLPPMDPSSSLPPSLHLAIAALLGASFMALSAFYIHRHTVDHVLHRLVELRRKPLATSDDEDDDGDAETDADLRSYRGALSRSVDDSSXVLRSYRISSSMPNVVSATDWFREDA

SEQ ID NO: 7350 - protein, 160 aa, Glycine max
  misc_feature (79)..(79): Xaa can be any naturally occurring amino acid
  misc_feature (91)..(91): Xaa can be any naturally occurring amino acid
  misc_feature (151)..(151): Xaa can be any naturally occurring amino acid
  Coding DNA Sequence Number=SeqID_4694
EVQALLEAGEFSEDDFEEEELSPEEKNRVGPVSQFAKANYTLLERVSLKLNETNNNKIESELGVVDKLEESLILADMIXKYTDEICSGMYXPQEVDNIISNTKELKRQVELFLNVIETLDDEIPKLQAKKLVVVVRTLVGNLCAKICNENXKNQTKKKKK

SEQ ID NO: 7351 - protein, 135 aa, Glycine max
  misc_feature (70)..(70): Xaa can be any naturally occurring amino acid
  misc_feature (72)..(72): Xaa can be any naturally occurring amino acid
  misc_feature (103)..(103): Xaa can be any naturally occurring amino acid
  Coding DNA Sequence Number=SeqID_4696
  Gene Ontology: Mol. function=receptor activity
  Homolog annotation: Hit_ID=A0EJF1; Match level="QueryCoverage=96%, HitCoverage=20%, E-value=1e-27, Identity=53%"; Hit description=Beta -glucan-binding protein 2
  Subcellular localization annotation: CTP_CleavageSite=47; ConfidenceScore=5.18e-01
MYGNYIFPQTEGTGLPNPSPYFCSNLGSSPLPTNSLFTNFAIPYRSQAEYIRPYLRKASSFSLSDSYPCXLXHTALWYHCCVPDITISAAETHSHQLNRESSXYSDLSGTLDITYSNLRMCLSRGSPSITALVTS

SEQ ID NO: 7352 - protein, 62 aa, Glycine max
  Coding DNA Sequence Number=SeqID_4697
FSLFFTDSAFTLFVYLLLFPFIFFIRTLEKLTEFTCEIGVLICNILDWRCQMKMILIDENRS

SEQ ID NO: 7353 - protein, 97 aa, Glycine max; identical to SEQ ID NO: 6555
  misc_feature (2)..(2): Xaa can be any naturally occurring amino acid
  misc_feature (10)..(10): Xaa can be any naturally occurring amino acid
  misc_feature (14)..(14): Xaa can be any naturally occurring amino acid
  misc_feature (34)..(34): Xaa can be any naturally occurring amino acid
  misc_feature (52)..(52): Xaa can be any naturally occurring amino acid
  misc_feature (91)..(91): Xaa can be any naturally occurring amino acid
  Coding DNA Sequence Number=SeqID_4699

SEQ ID NO: 7354 - protein, 153 aa, Glycine max
  Coding DNA Sequence Number=SeqID_4701
LCGGMGGGGALLREVMMGAADACFEVASDVWRNLSLSHASAAVLVISHLPDAFVGTFLRAGAYWKCVGHAVSPFSRPSLSPEAPAEGFRPPQFMLGVGRPLGFSRWAPQAGPCAPSCRRSCTRRLCGRGWAVGHFLGMRPAPPPCPESADQLG

SEQ ID NO: 7355 - protein, 142 aa, Glycine max
  Coding DNA Sequence Number=SeqID_4703
GWAAGVGGRVWKGFVRAVGEAPSWDPPPGGSRAVVLPGPFVGGRYPGNVGAPVVAGEAWFLRALWGHDEDPVSVGAQGGVPSEGGRESPEEGGAPTLRPRPPFLRAPRLGRVSINFQLGVDQVFFRPGKIGAVKRPRNVMGV

SEQ ID NO: 7356 - protein, 101 aa, Glycine max; identical to SEQ ID NO: 6560
  misc_feature (18)..(18): Xaa can be any naturally occurring amino acid
  misc_feature (51)..(51): Xaa can be any naturally occurring amino acid
  misc_feature (56)..(56): Xaa can be any naturally occurring amino acid
  misc_feature (63)..(63): Xaa can be any naturally occurring amino acid
  misc_feature (95)..(95): Xaa can be any naturally occurring amino acid
  Coding DNA Sequence Number=SeqID_4705
  Subcellular localization annotation: CTP_CleavageSite=88; ConfidenceScore=5.02e-01

SEQ ID NO: 7357 - protein, 129 aa, Glycine max
  misc_feature (2)..(2): Xaa can be any naturally occurring amino acid
  misc_feature (11)..(11): Xaa can be any naturally occurring amino acid
  misc_feature (13)..(14): Xaa can be any naturally occurring amino acid
  misc_feature (18)..(18): Xaa can be any naturally occurring amino acid
  misc_feature (44)..(44): Xaa can be any naturally occurring amino acid
  misc_feature (61)..(61): Xaa can be any naturally occurring amino acid
  misc_feature (65)..(65): Xaa can be any naturally occurring amino acid
  misc_feature (70)..(70): Xaa can be any naturally occurring amino acid
  misc_feature (76)..(76): Xaa can be any naturally occurring amino acid
  misc_feature (78)..(78): Xaa can be any naturally occurring amino acid
  misc_feature (88)..(88): Xaa can be any naturally occurring amino acid
  misc_feature (97)..(97): Xaa can be any naturally occurring amino acid
  misc_feature (99)..(99): Xaa can be any naturally occurring amino acid
  misc_feature (112)..(112): Xaa can be any naturally occurring amino acid
  misc_feature (124)..(127): Xaa can be any naturally occurring amino acid
  Coding DNA Sequence Number=SeqID_4707
SXTVYCTSPMXYXXVTTXTYDAVVTVSLLHDVYRALGHRYDRRXCRRDHNTTRAARRTESXHVCXCNGCXYSALIXSXAHTTRCLVSXDYRQSLPVXVXLLIVDMTGSLITXSACRCRADTREXXXXVM

SEQ ID NO: 7358 - protein, 96 aa, Glycine max
  Coding DNA Sequence Number=SeqID_4709
  Homolog annotation: Hit_ID=A2WLZ1; Match level="QueryCoverage=95%, HitCoverage=55%, E-value=8e-10, Identity=35%"; Hit description =Putative uncharacterized protein
ADVSRRAALCAENAVDLVREHHIAVGVVAVTHIEDVVHTRHSLFVCVPQKKALAHILTHMAPHVLCDRDVAAFLEAHKIEHIRGLEHKDLLMDLPL

SEQ ID NO: 7359 - protein, 101 aa, Glycine max; identical to SEQ ID NO: 7099
  misc_feature (43)..(43): Xaa can be any naturally occurring amino acid
  misc_feature (55)..(55): Xaa can be any naturally occurring amino acid
  misc_feature (101)..(101): Xaa can be any naturally occurring amino acid
  Coding DNA Sequence Number=SeqID_4710

SEQ ID NO: 7360 - protein, 71 aa, Glycine max
  Coding DNA Sequence Number=SeqID_4712
LTVLFTIAKHVYLALENGIPIALLFFSRKKVKAYSSGISSTLLTIAPKARRIIVNVQDCHLLWTTFSKVFY

SEQ ID NO: 7361 - protein, 110 aa, Glycine max
  misc_feature (56)..(56): Xaa can be any naturally occurring amino acid
  Coding DNA Sequence Number=SeqID_4714
RLAQLSTAESAAYVYSHVGTVIVERSDVESTSSRTPPHYCYPRAYGSRYTLNCIQXVLELRGHRVRAWRYISRAHYLTCRTVCVTHINTDHTCGCIPHDRSGAKCCYTLY

SEQ ID NO: 7362 - protein, 143 aa, Glycine max; identical to SEQ ID NO: 7190
  misc_feature (10)..(10): Xaa can be any naturally occurring amino acid
  misc_feature (21)..(23): Xaa can be any naturally occurring amino acid
  misc_feature (30)..(30): Xaa can be any naturally occurring amino acid
  misc_feature (32)..(32): Xaa can be any naturally occurring amino acid
  misc_feature (45)..(47): Xaa can be any naturally occurring amino acid
  misc_feature (101)..(101): Xaa can be any naturally occurring amino acid
  Coding DNA Sequence Number=SeqID_4716

SEQ ID NO: 7363 - protein, 169 aa, Glycine max
  misc_feature (7)..(7): Xaa can be any naturally occurring amino acid
  misc_feature (12)..(12): Xaa can be any naturally occurring amino acid
  misc_feature (23)..(23): Xaa can be any naturally occurring amino acid
  misc_feature (39)..(39): Xaa can be any naturally occurring amino acid
  misc_feature (43)..(43): Xaa can be any naturally occurring amino acid
  misc_feature (48)..(48): Xaa can be any naturally occurring amino acid
  misc_feature (55)..(55): Xaa can be any naturally occurring amino acid
  misc_feature (58)..(58): Xaa can be any naturally occurring amino acid
  misc_feature (94)..(94): Xaa can be any naturally occurring amino acid
  misc_feature (119)..(119): Xaa can be any naturally occurring amino acid
  misc_feature (121)..(121): Xaa can be any naturally occurring amino acid
  misc_feature (139)..(139): Xaa can be any naturally occurring amino acid
  misc_feature (142)..(142): Xaa can be any naturally occurring amino acid
  Coding DNA Sequence Number=SeqID_4717
LFTNNEXIVTVXTHLCCDVVCGXAVRGDLTHLCVLLVWXCRAXGVVSXSHASLIXNLXARELFACDLSYLCAMRACWWMCALHLSLSTRCDSYXYLLLCSLADSGLVCGCVACVWLSHXLXNVGEYTITYILNRVCPTXFLXLCVIKNFSHTPLICRLWVVSLLCVCGI

SEQ ID NO: 7364 - protein, 156 aa, Glycine max
  misc_feature (30)..(30): Xaa can be any naturally occurring amino acid
  misc_feature (42)..(42): Xaa can be any naturally occurring amino acid
  misc_feature (66)..(66): Xaa can be any naturally occurring amino acid
  Coding DNA Sequence Number=SeqID_4719
  Gene Ontology: Mol. function=protein binding
  Homolog annotation: Hit_ID=A7QIM9; Match level="QueryCoverage=99%, HitCoverage=73%, E-value=4e-22, Identity=43%"; Hit description =Chromosome chr9 scaffold_104, whole genome shotgun sequence
  Pfam annotation: Domain name=DUF567; Domain location=20-155; Score= -16.8; E_value=0.0023; Accession=PF04525.3; Description=Protein of unknown function (DUF567)
EEHGHGNKEENQRTGGKTTRTHAGEGATDXEGKGQPAHRDDXHGPDTRDRDEQRRTEPNCFFFLTXRRKRPSLFQRREGFKGERMDGDKPIFSVRRASIIGRSRASLTVEMYDNPGEEYQIDGGFSQRLLPGSNVTKESVGEIRRKVDPISSCVLG

SEQ ID NO: 7365 - protein, 165 aa, Glycine max; identical to SEQ ID NO: 7191
  misc_feature (32)..(32): Xaa can be any naturally occurring amino acid
  Coding DNA Sequence Number=SeqID_4720

SEQ ID NO: 7366 - protein, 113 aa, Glycine max
  misc_feature (87)..(87): Xaa can be any naturally occurring amino acid
  Coding DNA Sequence Number=SeqID_4722
  Gene Ontology: Mol. function=RNA binding; Cellular component =spliceosome; Biological process=nuclear mRNA splicing, via spliceosome
  Homolog annotation: Hit_ID=A7QIL5; Match level="QueryCoverage=97%, HitCoverage=10%, E-value=1e-31, Identity=63%"; Hit description =Chromosome chr9 scaffold_104, whole genome shotgun sequence
VDSESQAAEANYVTAVTTETTNDHGEELIGTTTSPYEQAGCGSKTDWRVRAISATKRCQRENHIYVNSEDIEETGYTDIMPESSGKXWICIGELVTRMSGHMCGGEAAENAEV

SEQ ID NO: 7367 - protein, 86 aa, Glycine max; identical to SEQ ID NO: 6576
  misc_feature (30)..(30): Xaa can be any naturally occurring amino acid
  misc_feature (32)..(32): Xaa can be any naturally occurring amino acid
  misc_feature (41)..(41): Xaa can be any naturally occurring amino acid
  misc_feature (43)..(43): Xaa can be any naturally occurring amino acid
  Coding DNA Sequence Number=SeqID_4723

SEQ ID NO: 7368 - protein, 153 aa, Glycine max
  misc_feature (27)..(27): Xaa can be any naturally occurring amino acid
  misc_feature (34)..(34): Xaa can be any naturally occurring amino acid
  misc_feature (64)..(65): Xaa can be any naturally occurring amino acid
  misc_feature (78)..(78): Xaa can be any naturally occurring amino acid
  Coding DNA Sequence Number=SeqID_4725
LACAADVLCCLFYVLYSGRWAGRRSRXMRGGGSXVMRVEHHAILPSWPRYVSPDVSRVDSQRSXXVAPLLVMPLYKEXLFYFTTPWRPVPRYRVSCVVCAMTVLKHRHIIQYLFTSIRCAWSCMLTPPPCWPACAVLVVCEVVCGVWMMLCYR

SEQ ID NO: 7369 - protein, 138 aa, Glycine max; identical to SEQ ID NO: 7281
  misc_feature (7)..(7): Xaa can be any naturally occurring amino acid
  misc_feature (133)..(133): Xaa can be any naturally occurring amino acid
  Coding DNA Sequence Number=SeqID_4727

SEQ ID NO: 7370 - protein, 88 aa, Glycine max
  Coding DNA Sequence Number=SeqID_397
LHGKGHILVFWSFTLFCSLDNLALLITFTILARSLIFGFSLSKINAPIKSESNLVIECSCFSFCDSVSHMTDHEFSQLCFYPNKKKIK

SEQ ID NO: 7371 - protein, 164 aa, Glycine max
  Coding DNA Sequence Number=SeqID_399
RKYYIRVIVITVFLFIGAATAEDAAAEAHESPTLPPVSTAPPGPAVDAPPPAPPRPPPRTCPPAPRGRKTQETNPPPPPPPRPGSPSPAPSQRDAPAPAPPPHTPSPPPFGPRTPARPPLPPPPPPPPSRPTPPAVVPPLLPPSSPPPSFPRSPPFSVRSPPPP

SEQ ID NO: 7372 - protein, 79 aa, Glycine max
  Coding DNA Sequence Number=SeqID_401
QEESLPHLRYEILSFLPSNNFMKNMVIFSLTSLSASLIHHHHLLKIDQFLHLHLVVSHIPLQMFGTVKSPTQPRATMLG

SEQ ID NO: 7373 - protein, 379 aa, Glycine max
  Coding DNA Sequence Number=SeqID_403
  Gene Ontology: Mol. function=Rho GTPase activator activity; Cellular component=intracellular; Biological process=signal transduction
  Homolog annotation: Hit_ID=Q3E875; Match level="QueryCoverage=100%, HitCoverage=100%, E-value=1e-144, Identity=68%"; Hit description =Uncharacterized Rho GTPase-activating protein At5g61530
  Pfam annotation: Domain name=RhoGAP; Domain location=155-299; Score =119.7; E_value=8.7e-33; Accession=PF00620.17; Description=RhoGAP domain
  Subcellular localization annotation: CTP_CleavageSite=79; ConfidenceScore=5.08e-01
MPSIMSPQWQDKAAGFFSSSGVKLKEAKESAGTFVGEVTKDTKSNVAEVAGRVGSMVKSRWALLQQPSTRHAVQDRFISAAATTGTLLRRGFSGTKDKVVVGKSKVEEGAKITAQKSKTILTDIERWQKGVASTDVFGVPIEVTVQRQDCCKPIPQILINCADYLIVSGLNSPHLFKSEGDKKVIHQLVSLYNQDSTASVPEGTNPVDVAALVKYYLASLPEPLTTLELYNEIRSARSSIYSMRNILKRLSSVNYMTLEFITALLLRVSQKSLLNKMDARSLAMEMAPVIMWQKERRPEFYHQYWNQVSKSLSNKTVDPTPGSYTAWDMLADDGEATDASSPIPLDDGTPVDFGAIEVVQLLTEHHNAIFTDANETVWK

SEQ ID NO: 7374 - protein, 134 aa, Glycine max
  misc_feature (3)..(3): Xaa can be any naturally occurring amino acid
  misc_feature (11)..(11): Xaa can be any naturally occurring amino acid
  misc_feature (31)..(31): Xaa can be any naturally occurring amino acid
  Coding DNA Sequence Number=SeqID_404
  Subcellular localization annotation: CTP_CleavageSite=61; ConfidenceScore=5.07e-01
DRXRHANFEAXKGLMPYGGLVAGIDGMNKKXPSISTSVSTAAGSKAGSTCFKSGLHTSNPSLNKESVYKTRDLLETKRDQLFNDKSPGRKSGNRIEDREEVDSERIKLEQMMKKELQDIEMKYKNMFRNLEKET

SEQ ID NO: 7375 - protein, 114 aa, Glycine max
  misc_feature (8)..(8): Xaa can be any naturally occurring amino acid
  misc_feature (14)..(14): Xaa can be any naturally occurring amino acid
  misc_feature (16)..(16): Xaa can be any naturally occurring amino acid
  misc_feature (75)..(75): Xaa can be any naturally occurring amino acid
  Coding DNA Sequence Number=SeqID_406
  Subcellular localization annotation: CTP_CleavageSite=45; ConfidenceScore=5.12e-01
TPLHSDAXSCSDCXVXAAPGTPTHAAKPPGDRLGRLVGCRSVDCSGALERDSARRRAAQATRTSVYTRDAPPANXVASTRGRGACGPRIFVHVDILSRPCRECCPRNSRRGPWF

SEQ ID NO: 7376 - protein, 68 aa, Glycine max
  Coding DNA Sequence Number=SeqID_408
  Subcellular localization annotation: CTP_CleavageSite=42; ConfidenceScore=5.04e-01
IKIDFRMKRVLTLKGGFFTKLYVTNRFGKIQGTSTKMMASLVIMTRAPLFLHNKKLKKILENFCHSVL

SEQ ID NO: 7377 - protein, 188 aa, Glycine max
  Coding DNA Sequence Number=SeqID_4729
  Gene Ontology: Mol. function=protein binding
  Homolog annotation: Hit_ID=Q9M0U9; Match level="QueryCoverage=68%, HitCoverage=42%, E-value=3e-41, Identity=64%"; Hit description=F -box/LRR-repeat protein 20
  Pfam annotation: Domain name=F-box; Domain location=25-73; Score =36.0; E_value=1.3e-07; Accession=PF00646.23; Description=F-box domain
MASSSSNSPPLSTSMSQLMKPEQPRNWAELPPELISSILLRLNSIQILEKAQKVCRSWRRVCKDPSMWRKIDMDNDGDLGSMGYDPEIMCRHAVDRSQGGLLEIDLWYFGTDELLNYIADRSSNLKSLRLIMCYPIADEGFVEEPVNETCPLALNNLQGSHNRRNVSETALEYWHGKPLPPILNKLEG

SEQ ID NO: 7378 - protein, 87 aa, Glycine max; identical to SEQ ID NO: 6583
  Coding DNA Sequence Number=SeqID_4730

SEQ ID NO: 7379 - protein, 98 aa, Glycine max
  misc_feature (17)..(17): Xaa can be any naturally occurring amino acid
  misc_feature (24)..(24): Xaa can be any naturally occurring amino acid
  misc_feature (55)..(55): Xaa can be any naturally occurring amino acid
  misc_feature (71)..(71): Xaa can be any naturally occurring amino acid
  Coding DNA Sequence Number=SeqID_4732
  Gene Ontology: Mol. function=electron transporter, transferring electrons within the cyclic electron transport pathway of photosynthesis activity; Cellular component=plasma membrane light -harvesting complex; Biological ...
  Gene Ontology: Cellular component=process=photosynthesis, light reaction
  Homolog annotation: Hit_ID=P56761; Match level="QueryCoverage=94%, HitCoverage=26%, E-value=3e-16, Identity=48%"; Hit description =Photosystem II D2 protein (Photosystem Q(A) protein)
AFMHDWLPMDRFASGGXASGYILXPCSYIRSRGSFTRTTYVTQWATHGSDTPYTXGCILLSDAIPTRANRXGHSLLLLQRTDAHADYTQLRELGGKRT

SEQ ID NO: 7380 - protein, 68 aa, Glycine max
  Coding DNA Sequence Number=SeqID_4733
CYYSRHDFKVVFIISDEINLLTTETRHLRLVHDIEDRVKLGYVGPIKHSCFLVTVMKMILSYFYPHKS

SEQ ID NO: 7381 - protein, 189 aa, Glycine max
  misc_feature (124)..(124): Xaa can be any naturally occurring amino acid
  misc_feature (139)..(139): Xaa can be any naturally occurring amino acid
  misc_feature (154)..(154): Xaa can be any naturally occurring amino acid
  misc_feature (158)..(158): Xaa can be any naturally occurring amino acid
  misc_feature (162)..(162): Xaa can be any naturally occurring amino acid
  misc_feature (169)..(169): Xaa can be any naturally occurring amino acid
  misc_feature (178)..(178): Xaa can be any naturally occurring amino acid
  misc_feature (187)..(188): Xaa can be any naturally occurring amino acid
  Coding DNA Sequence Number=SeqID_4735
VCGVAERFLLLLPADSPIFQALDGPGRQYGEVESFSHDIKEEEFESNPMGNCSNDQHEQPVENVGINTLAVRQLHTDMDDDHLHNLKKERATDSSVEEHRIAVTKNIPPEVIYTMRGVRCQICXYACKGFDCVAKLIAXTQECHPGKASPRFLXDCKXKIHXTKLWQRXALLKCRVHXHFHIWFANXXP

SEQ ID NO: 7382 - protein, 96 aa, Glycine max
  Coding DNA Sequence Number=SeqID_4737
  Subcellular localization annotation: CTP_CleavageSite=61; ConfidenceScore=5.53e-01
KNLSKLLAFSNHQKKLSLLSNTNGDLKGFRRCSRRGDYLRRSYRRFRSGRGSSSESYVRICCFLAVDRFSWCCSRRSSCFRLCSSDLSLCDRDSYF

SEQ ID NO: 7383 - protein, 140 aa, Glycine max; identical to SEQ ID NO: 6585
  misc_feature (19)..(19): Xaa can be any naturally occurring amino acid
  misc_feature (22)..(22): Xaa can be any naturally occurring amino acid
  misc_feature (30)..(30): Xaa can be any naturally occurring amino acid
  misc_feature (38)..(38): Xaa can be any naturally occurring amino acid
  misc_feature (44)..(44): Xaa can be any naturally occurring amino acid
  misc_feature (55)..(55): Xaa can be any naturally occurring amino acid
  misc_feature (67)..(67): Xaa can be any naturally occurring amino acid
  misc_feature (73)..(73): Xaa can be any naturally occurring amino acid
  misc_feature (75)..(75): Xaa can be any naturally occurring amino acid
  misc_feature (83)..(83): Xaa can be any naturally occurring amino acid
  misc_feature (89)..(89): Xaa can be any naturally occurring amino acid
  misc_feature (95)..(95): Xaa can be any naturally occurring amino acid
  misc_feature (102)..(102): Xaa can be any naturally occurring amino acid
  misc_feature (108)..(108): Xaa can be any naturally occurring amino acid
  misc_feature (112)..(112): Xaa can be any naturally occurring amino acid
  misc_feature (123)..(123): Xaa can be any naturally occurring amino acid
  misc_feature (132)..(132): Xaa can be any naturally occurring amino acid
  misc_feature (139)..(139): Xaa can be any naturally occurring amino acid
  Coding DNA Sequence Number=SeqID_4739

SEQ ID NO: 7384 - protein, 241 aa, Glycine max
  misc_feature (85)..(85): Xaa can be any naturally occurring amino acid
  misc_feature (112)..(112): Xaa can be any naturally occurring amino acid
  misc_feature (162)..(162): Xaa can be any naturally occurring amino acid
  Coding DNA Sequence Number=SeqID_4741
  Gene Ontology: Mol. function=protein binding; Cellular component =nucleus; Biological process=regulation of transcription, DNA -dependent
  Homolog annotation: Hit_ID=A0SEK9; Match level="QueryCoverage=96%, HitCoverage=56%, E-value=2e-72, Identity=59%"; Hit description =Putative retinoblastoma binding protein
YGLSWSPFKNGYLLSGSHDHKVCLWDVPAAASQDKVLDAFHVYEGHENVVEDVSWNLKDENTRFSGGNHCKPTILNYRTTNPQQXQSAPHDTEVNFLSFNPSDDWLLPSTSXHSKSGLCDTRQLAPPLHVSTSHTDEAVHNESYPNHENVPLSSGADRRLMXRDLNRACATQQTSGDGEGGPPELLFSHGGHKWKISDRSWNRNQPWVITSVAEDNSFHVWHMADSIYHDGDDDNMSTGND

SEQ ID NO: 7385 - protein, 206 aa, Glycine max
  misc_feature (65)..(206): Xaa can be any naturally occurring amino acid
  Coding DNA Sequence Number=SeqID_4742
  Homolog annotation: Hit_ID=A9PJC0; Match level="QueryCoverage=29%, HitCoverage=26%, E-value=3e-13, Identity=59%"; Hit description =Putative uncharacterized protein
SIFAHVLFISPEKVAFCSERSMKVFTRTGQYIGIRYKVVIPLKKIKCVNQSQNIQNPTQKYIEIXXXXXXXXXXXXXXXXXXXXXXXXXXXXXXXXXXXXXXXXXXXXXXXXXXXXXXXXXXXXXXXXXXXXXXXXXXXXXXXXXXXXXXXXXXXXXXXXXXXXXXXXXXXXXXXXXXXXXXXXXXXXXXXXXXXXXXXXXXXXXX

SEQ ID NO: 7386 - protein, 142 aa, Glycine max
  misc_feature (46)..(46): Xaa can be any naturally occurring amino acid
  misc_feature (49)..(49): Xaa can be any naturally occurring amino acid
  Coding DNA Sequence Number=SeqID_4743
  Gene Ontology: Mol. function=oxidoreductase activity, acting on NADH or NADPH; Cellular component=mitochondrial respiratory chain; Biological process=ATP synthesis coupled electron transport
  Homolog annotation: Hit_ID=A7PR42; Match level="QueryCoverage=100%, HitCoverage=18%, E-value=1e-36, Identity=59%"; Hit description=NADH -ubiquinone oxidoreductase 75 kDa subunit
VVIPDWNGLNVLLFHAAQAAALDLGLVPQSEKSLEYGKFVYLMGAXDDXNLDQIPDDAFDVYQGHHGDKSVYVADYILPPTAFSEKEGTYANTDRCARQTLTADPTGGYSLHDRKIILSLYAASGSPVSYDTVEARRAPLST

SEQ ID NO: 7387 - protein, 136 aa, Glycine max
  misc_feature (127)..(128): Xaa can be any naturally occurring amino acid
  Coding DNA Sequence Number=SeqID_4744
  Subcellular localization annotation: CTP_CleavageSite=37; ConfidenceScore=5.47e-01
EKTPPPKKKISPPGWVFFFAAVFMGGPPPIFFFPPPRGRKKTPFFFKPPPNRPAENFFPLPHGPPKFFPPLKKRFFWGHTPGLGPFGPLHAVKNFPLELNWGFGKAIQRQWVFPKPKDLLSFLSISXXTAIKMDSW

SEQ ID NO: 7388 - protein, 114 aa, Glycine max
  misc_feature (39)..(39): Xaa can be any naturally occurring amino acid
  misc_feature (42)..(43): Xaa can be any naturally occurring amino acid
  misc_feature (59)..(59): Xaa can be any naturally occurring amino acid
  misc_feature (68)..(68): Xaa can be any naturally occurring amino acid
  Coding DNA Sequence Number=SeqID_4746
QKRSLSLLHERRMVNGSQIDTRDNEIYVTVNRDVVVSCXNKXXKTQTHPTTSSSVIILXITYNLDSIXNNTHTLHIQSQAPLCVVFVVVQRIYSPTQHTRQDRPYILCVCYGDE

SEQ ID NO: 7389 - protein, 227 aa, Glycine max
  misc_feature (1)..(9): Xaa can be any naturally occurring amino acid
  Coding DNA Sequence Number=SeqID_4748
XXXXXXXXXRGGERSEGTRYGGGIPDGGGGGGGRGGESPEGRGPGLGFHPATLAGRVSHYGGTRGGGGGGRGPRGPGPAIRHSSTSWGASGGRKDSLVIDIADRAMAVGAGVVVPRDAAAGERPAVPDVRPAPLAAPAPEQGQAGRGGRVLLQPARRRQRRRAGPRRAPAEDTQDTSGVELIRKLHSSLTHWLASPITGGSIHTCVHSFLDFFFFHSLFAKDFGQEF

SEQ ID NO: 7390 - protein, 139 aa, Glycine max
  Coding DNA Sequence Number=SeqID_4750
SRLDNLTKDTWTITYALLSNVIPIITTRYRAILYILTLSPHTTLDSVFINAQLILSDRLSHLACARSPSYHLLPYSALQQMAPGQLHSQLFSPRRNQIMFCKPLTSHHRSMLPLSHPSLLYTYIWLTSRLTNHDTTIFP

SEQ ID NO: 7391 - protein, 174 aa, Glycine max
  misc_feature (3)..(3): Xaa can be any naturally occurring amino acid
  misc_feature (9)..(9): Xaa can be any naturally occurring amino acid
  misc_feature (13)..(14): Xaa can be any naturally occurring amino acid
  misc_feature (16)..(16): Xaa can be any naturally occurring amino acid
  misc_feature (23)..(23): Xaa can be any naturally occurring amino acid
  misc_feature (30)..(30): Xaa can be any naturally occurring amino acid
  misc_feature (33)..(34): Xaa can be any naturally occurring amino acid
  misc_feature (36)..(36): Xaa can be any naturally occurring amino acid
  misc_feature (51)..(51): Xaa can be any naturally occurring amino acid
  misc_feature (53)..(53): Xaa can be any naturally occurring amino acid
  misc_feature (57)..(57): Xaa can be any naturally occurring amino acid
  misc_feature (63)..(63): Xaa can be any naturally occurring amino acid
  misc_feature (66)..(66): Xaa can be any naturally occurring amino acid
  misc_feature (69)..(69): Xaa can be any naturally occurring amino acid
  misc_feature (73)..(73): Xaa can be any naturally occurring amino acid
  misc_feature (76)..(77): Xaa can be any naturally occurring amino acid
  misc_feature (83)..(83): Xaa can be any naturally occurring amino acid
  misc_feature (95)..(96): Xaa can be any naturally occurring amino acid
  misc_feature (98)..(99): Xaa can be any naturally occurring amino acid
  misc_feature (114)..(115): Xaa can be any naturally occurring amino acid
  misc_feature (120)..(121): Xaa can be any naturally occurring amino acid
  misc_feature (123)..(126): Xaa can be any naturally occurring amino acid
  misc_feature (128)..(129): Xaa can be any naturally occurring amino acid
  misc_feature (134)..(134): Xaa can be any naturally occurring amino acid
  misc_feature (136)..(138): Xaa can be any naturally occurring amino acid
  misc_feature (146)..(146): Xaa can be any naturally occurring amino acid
  misc_feature (149)..(150): Xaa can be any naturally occurring amino acid
  misc_feature (162)..(162): Xaa can be any naturally occurring amino acid
  misc_feature (166)..(168): Xaa can be any naturally occurring amino acid
  misc_feature (173)..(174): Xaa can be any naturally occurring amino acid
  Coding DNA Sequence Number=SeqID_4752
IAXTRIVIXNVVXXLXCNDCIMXRSADAQXHIXXIXQMAVVLDRLLVMQLXCXCIDXRRSGYXMMXSSXRLFXELXXRTPRRXRERATHASSFAXXSXXLMITRRLTVLLDAIXXSSHAXXIXXXXIXXSVTGXMXXXTRYQHTTXSRXXSTGCSHGRSRRXAYTXXXCKKYXX

SEQ ID NO: 7392 - protein, 141 aa, Glycine max; identical to SEQ ID NO: 6596
  misc_feature (2)..(2): Xaa can be any naturally occurring amino acid
  misc_feature (5)..(6): Xaa can be any naturally occurring amino acid
  misc_feature (15)..(15): Xaa can be any naturally occurring amino acid
  misc_feature (19)..(20): Xaa can be any naturally occurring amino acid
  misc_feature (22)..(22): Xaa can be any naturally occurring amino acid
  misc_feature (27)..(28): Xaa can be any naturally occurring amino acid
  misc_feature (43)..(43): Xaa can be any naturally occurring amino acid
  misc_feature (61)..(61): Xaa can be any naturally occurring amino acid
  misc_feature (90)..(91): Xaa can be any naturally occurring amino acid
  misc_feature (95)..(96): Xaa can be any naturally occurring amino acid
  misc_feature (107)..(107): Xaa can be any naturally occurring amino acid
  misc_feature (124)..(124): Xaa can be any naturally occurring amino acid
  misc_feature (134)..(134): Xaa can be any naturally occurring amino acid
  Coding DNA Sequence Number=SeqID_4753

SEQ ID NO: 7393 - protein, 197 aa, Glycine max; identical to SEQ ID NO: 6907
  misc_feature (1)..(4): Xaa can be any naturally occurring amino acid
  misc_feature (10)..(12): Xaa can be any naturally occurring amino acid
  misc_feature (19)..(21): Xaa can be any naturally occurring amino acid
  misc_feature (24)..(25): Xaa can be any naturally occurring amino acid
  misc_feature (28)..(28): Xaa can be any naturally occurring amino acid
  misc_feature (32)..(37): Xaa can be any naturally occurring amino acid
  misc_feature (40)..(41): Xaa can be any naturally occurring amino acid
  misc_feature (44)..(50): Xaa can be any naturally occurring amino acid
  misc_feature (54)..(55): Xaa can be any naturally occurring amino acid
  misc_feature (59)..(63): Xaa can be any naturally occurring amino acid
  misc_feature (67)..(67): Xaa can be any naturally occurring amino acid
  misc_feature (71)..(71): Xaa can be any naturally occurring amino acid
  misc_feature (74)..(78): Xaa can be any naturally occurring amino acid
  misc_feature (80)..(80): Xaa can be any naturally occurring amino acid
  misc_feature (82)..(85): Xaa can be any naturally occurring amino acid
  misc_feature (89)..(89): Xaa can be any naturally occurring amino acid
  misc_feature (93)..(94): Xaa can be any naturally occurring amino acid
  misc_feature (96)..(105): Xaa can be any naturally occurring amino acid
  misc_feature (107)..(107): Xaa can be any naturally occurring amino acid
  misc_feature (111)..(115): Xaa can be any naturally occurring amino acid
  misc_feature (123)..(123): Xaa can be any naturally occurring amino acid
  misc_feature (144)..(145): Xaa can be any naturally occurring amino acid
  misc_feature (155)..(155): Xaa can be any naturally occurring amino acid
  misc_feature (157)..(158): Xaa can be any naturally occurring amino acid
  misc_feature (171)..(172): Xaa can be any naturally occurring amino acid
  misc_feature (176)..(176): Xaa can be any naturally occurring amino acid
  misc_feature (180)..(180): Xaa can be any naturally occurring amino acid
  misc_feature (193)..(193): Xaa can be any naturally occurring amino acid
  Coding DNA Sequence Number=SeqID_4755

SEQ ID NO: 7394 - protein, 150 aa, Glycine max
  misc_feature (54)..(54): Xaa can be any naturally occurring amino acid
  misc_feature (58)..(58): Xaa can be any naturally occurring amino acid
  misc_feature (77)..(77): Xaa can be any naturally occurring amino acid
  misc_feature (86)..(86): Xaa can be any naturally occurring amino acid
  misc_feature (102)..(102): Xaa can be any naturally occurring amino acid
  Coding DNA Sequence Number=SeqID_4757
SLLYCGSTLRLSADHTTREMISYYDDGYRRAPSYCDTYATRRVCSLVSAYSILXARYXVHLYIILRYSTRSGVSWYXAQSRMYICXTLRAEYRCIRQFVDAXCIATRRLSTWSESIYLVRSIPRNSSCIVQTSLLLDRLDTRSTSVSLIE

SEQ ID NO: 7395 - protein, 115 aa, Glycine max
  Coding DNA Sequence Number=SeqID_4759
  Gene Ontology: Mol. function=lipid binding; Cellular component =cellular_component; Biological process=lipid transport
  Homolog annotation: Hit_ID=Q9LDB4; Match level="QueryCoverage=86%, HitCoverage=86%, E-value=9e-28, Identity=60%"; Hit description=Non -specific lipid-transfer protein 6 precursor
  Pfam annotation: Domain name=Tryp_alpha_amyl; Domain location=24-111; Score=97.3; E_value=4.9e-26; Accession=PF00234.12; Description =Protease inhibitorseed storageLTP f
MRSLFLLALFLVLAFHHGEAAVTCNNVVGDLYPCLSYVMQGGNAPSTNCCNGVRTLNSQAQTTADRQSVCRCIKNAIGGASYSSSNLNNALSLPAKCGVNLPFSISPSTNCNSIH

SEQ ID NO: 7396 - protein, 62 aa, Glycine max
  misc_feature (41)..(41): Xaa can be any naturally occurring amino acid
  misc_feature (58)..(58): Xaa can be any naturally occurring amino acid
  Coding DNA Sequence Number=SeqID_4760
  Homolog annotation: Hit_ID=Q8LEK1; Match level="QueryCoverage=96%, HitCoverage=43%, E-value=3e-21, Identity=78%"; Hit description =Putative uncharacterized protein
  Pfam annotation: Domain name=Cupin_3; Domain location=6-60; Score =12.7; E_value=0.00097; Accession=PF05899.3; Description=Protein of unknown function (DUF861)
FPEFKLTQLGVRQWPKWGCPPSKFPWTYESKETCYLLGGKXVKVTPSGANESVEIAAXDFVE

SEQ ID NO: 7397 - protein, 172 aa, Glycine max
  Coding DNA Sequence Number=SeqID_4761
KSKQAVQNKNPVGKTVQYEKAEPVNRPNPFTKPTSGPSGDYPVSNLREPVQQQAQPYVFYQPKYTQAPVFEKEQDYSDFHDERVNQTEQNLLHNDQNLLNNNQNNQDLMNNDAYQAEEDTGRKNIYPRLDTLNAGTYPSYNPYRVDAKPTDDAFARIRGERTEHHEYSHSDY

SEQ ID NO: 7398 - protein, 136 aa, Glycine max
  misc_feature (121)..(121): Xaa can be any naturally occurring amino acid
  misc_feature (124)..(125): Xaa can be any naturally occurring amino acid
  Coding DNA Sequence Number=SeqID_4763
NKVDYFSPKNKIRQRKFLVAKKKKEKKAEEEGSGAAADSCKCKASGANANENNKCVCVAYNNLRKSQEEFFKNNDDGVVDDGEEEGFESVVVEEEKGESLLGNGEVSGLVVKRKRERLMEXARXXVLPQVGLGKLC

SEQ ID NO: 7399 - protein, 139 aa, Glycine max; identical to SEQ ID NO: 6605
  Coding DNA Sequence Number=SeqID_4765

SEQ ID NO: 7400 - protein, 130 aa, Glycine max
  Coding DNA Sequence Number=SeqID_4767
PIYSYHYLGTSERSILHHVYFICTPPPHVASQGGSLAFTLRRPSCTSFPSRPYSHISHTHIMTPTTCCNACCYRLHLSSLLILHIIHTTFLLILSPPHRHRSLCPCRSSRSGTCVSSTHIIICNTYNCLC

SEQ ID NO: 7401 - protein, 124 aa, Glycine max
  misc_feature (15)..(15): Xaa can be any naturally occurring amino acid
  misc_feature (17)..(17): Xaa can be any naturally occurring amino acid
  misc_feature (27)..(27): Xaa can be any naturally occurring amino acid
  misc_feature (37)..(37): Xaa can be any naturally occurring amino acid
  misc_feature (54)..(54): Xaa can be any naturally occurring amino acid
  misc_feature (62)..(62): Xaa can be any naturally occurring amino acid
  misc_feature (70)..(70): Xaa can be any naturally occurring amino acid
  misc_feature (98)..(98): Xaa can be any naturally occurring amino acid
  misc_feature (124)..(124): Xaa can be any naturally occurring amino acid
  Coding DNA Sequence Number=SeqID_4769
HEIITMTIVYHYSTXHXSKTISLHRLXSISVARLSSXVFCDSLNTDYRHALPLXYSALITVXHRSHTHAXRTATVPLLDRQETRSISVPYTATEYLSXIVNDDRIYRYMRDVLTLILRTARCPX

SEQ ID NO: 7402 - protein, 110 aa, Glycine max
  Coding DNA Sequence Number=SeqID_4771
  Gene Ontology: Mol. function=hydrogen ion transmembrane transporter activity; Biological process=proton transport
  Homolog annotation: Hit_ID=O82628; Match level="QueryCoverage=100%, HitCoverage=100%, E-value=6e-31, Identity=68%"; Hit description =Vacuolar proton pump subunit G 1
  Pfam annotation: Domain name=V-ATPase_G; Domain location=5-109; Score= 189.6; E_value=8e-54; Accession=PF03179.5; Description=Vacuolar (H+) -ATPase G subunit
MESSRGQGGIQQLLAAEQEAQHIVNAARTAKMARLKQAKEEAEKEIAEYKAKTEQDFQRKLEETSGDSGANVKRLEQETDAKIEQLKNEASRISNDVVEMLLKHVTTVKN

SEQ ID NO: 7403 - protein, 139 aa, Glycine max
  misc_feature (91)..(91): Xaa can be any naturally occurring amino acid
  misc_feature (102)..(102): Xaa can be any naturally occurring amino acid
  Coding DNA Sequence Number=SeqID_4772
  Subcellular localization annotation: CTP_CleavageSite=63; ConfidenceScore=5.26e-01
PPAGGGAWGGAGAVPLSGWGGGGGPLPPFPGGGVCSVSRNLPKRVIRMEGGAGKLVFCCCFVRCAECASRSRRGGGDLLGAPSLSYEIPQXRLPGGLNNSCXGGRVGRGRDTNLGRLWRRARLRLNNGHGKRKLRDPKR

SEQ ID NO: 7404 - protein, 171 aa, Glycine max
  misc_feature (3)..(3): Xaa can be any naturally occurring amino acid
  misc_feature (12)..(12): Xaa can be any naturally occurring amino acid
  misc_feature (19)..(19): Xaa can be any naturally occurring amino acid
  misc_feature (30)..(30): Xaa can be any naturally occurring amino acid
  misc_feature (39)..(42): Xaa can be any naturally occurring amino acid
  misc_feature (50)..(50): Xaa can be any naturally occurring amino acid
  misc_feature (87)..(87): Xaa can be any naturally occurring amino acid
  misc_feature (117)..(117): Xaa can be any naturally occurring amino acid
  misc_feature (134)..(134): Xaa can be any naturally occurring amino acid
  misc_feature (136)..(136): Xaa can be any naturally occurring amino acid
  misc_feature (138)..(138): Xaa can be any naturally occurring amino acid
  misc_feature (147)..(148): Xaa can be any naturally occurring amino acid
  misc_feature (155)..(155): Xaa can be any naturally occurring amino acid
  misc_feature (159)..(160): Xaa can be any naturally occurring amino acid
  misc_feature (163)..(163): Xaa can be any naturally occurring amino acid
  misc_feature (165)..(165): Xaa can be any naturally occurring amino acid
  Coding DNA Sequence Number=SeqID_4774
LYXCHYIISIYXSYIYLNXNNIIYILFQQXYIYDILKKXXXXYDRHHTDXHNIYHRHNNKNKKTHPTQSYARLTRVFMYTFVLFECXSRRSWFSAYCVIYIYIILHVGYTRVKITLXTSHLQYTYECRRMCVCXYXIXRYLTIYVLXXRLISIYXIHIXXINXLXISLVRS

SEQ ID NO: 7405 - protein, 149 aa, Glycine max
  misc_feature (28)..(28): Xaa can be any naturally occurring amino acid
  misc_feature (112)..(112): Xaa can be any naturally occurring amino acid
  misc_feature (118)..(118): Xaa can be any naturally occurring amino acid
  misc_feature (125)..(125): Xaa can be any naturally occurring amino acid
  Coding DNA Sequence Number=SeqID_4776
LRTTVVCIGPRARPWTPVRPHPDLKRLXMLLLGRYLHIQSILLVYTLSNLSWRVVCTACFVYTSSTTSDLCCLFCFSSLAGHPPAAHIHSRSVARANTCSVGFGLSSSLSCXLVAPCXATVHTSXCRDPCLSCCAGSFVCVCGGVRSAR

SEQ ID NO: 7406 - protein, 135 aa, Glycine max; identical to SEQ ID NO: 6288
  misc_feature (53)..(53): Xaa can be any naturally occurring amino acid
  misc_feature (59)..(59): Xaa can be any naturally occurring amino acid
  misc_feature (80)..(80): Xaa can be any naturally occurring amino acid
  misc_feature (114)..(114): Xaa can be any naturally occurring amino acid
  misc_feature (125)..(125): Xaa can be any naturally occurring amino acid
  Coding DNA Sequence Number=SeqID_4345

SEQ ID NO: 7407 - protein, 86 aa, Glycine max; identical to SEQ ID NO: 6291
  misc_feature (12)..(12): Xaa can be any naturally occurring amino acid
  misc_feature (20)..(21): Xaa can be any naturally occurring amino acid
  misc_feature (23)..(23): Xaa can be any naturally occurring amino acid
  misc_feature (31)..(32): Xaa can be any naturally occurring amino acid
  misc_feature (52)..(52): Xaa can be any naturally occurring amino acid
  misc_feature (57)..(57): Xaa can be any naturally occurring amino acid
  misc_feature (65)..(66): Xaa can be any naturally occurring amino acid
  Coding DNA Sequence Number=SeqID_4347

SEQ ID NO: 7408 - protein, 109 aa, Glycine max
  misc_feature (73)..(73): Xaa can be any naturally occurring amino acid
  Coding DNA Sequence Number=SeqID_4349
DQQRGGLTSGRQFSAACLVFFTSLRVDDLILIRAACATLIVVFVRCLFVLVLDITHIAVDSLYYRLLLVLLSXRLVHSVRRGGCVTIGGLPPPPPLTSSVFSLLLCKLT

SEQ ID NO: 7409 - protein, 153 aa, Glycine max; identical to SEQ ID NO: 6079
  misc_feature (24)..(24): Xaa can be any naturally occurring amino acid
  misc_feature (41)..(41): Xaa can be any naturally occurring amino acid
  misc_feature (82)..(82): Xaa can be any naturally occurring amino acid
  misc_feature (89)..(89): Xaa can be any naturally occurring amino acid
  misc_feature (153)..(153): Xaa can be any naturally occurring amino acid
  Coding DNA Sequence Number=SeqID_4351

SEQ ID NO: 7410 - protein, 428 aa, Glycine max
  Coding DNA Sequence Number=SeqID_4353
  Gene Ontology: Mol. function=protein transporter activity; Cellular component=clathrin adaptor complex; Biological process=intracellular protein transport
  Homolog annotation: Hit_ID=A2Y726; Match level="QueryCoverage=99%, HitCoverage=99%, E-value=0.0, Identity=81%"; Hit description =Putative uncharacterized protein
  Pfam annotation: Domain name=Adap_comp_sub; Domain location=159-427; Score=470.9; E_value=1.7e-138; Accession=PF00928.11; Description =Adaptor complexes medium subunit family
  Pfam annotation: Domain name=Clat_adaptor_s; Domain location=4-142; Score=-57.5; E_value=0.019; Accession=PF01217.10; Description =Clathrin adaptor complex small chain
  Pfam module annotation: Pfam domain module=Adap_comp_sub::Clat _adaptor_s; Domain location=159-427::4-142
MAGAASALFLLDIKGRVLIWRDYRGDVSALDAERFFTKLIEKQADPQAQDPVVHDNGVTYMFIQHSNVYLMIATRHNCNAASLLFFLHRIVDVFKHYFEELEEESLRDNFVVVYELLDEIMDFGYPQYTEAQILSEFIKTDAYRMEVTQRPPMAVTNAVSWRSEGINYKKNEVFLDVVESVNILVNSNGQIIRSDVVGALKMRTYLSGMPECKLGLNDRVLLEAQGRTTKGKAIDLEDIKFHQCVRLARFENDRTISFIPPDGSFDLMTYRLSTQVKPLIWVEANVEKHSKSRIEIMVKARSQFKERSTATNVEIELPVPVDATNPNVRTSMGSASYAPEKDALIWKIRSFPGGKEYMLRAEFHLPSITDEEATPERKAPIRVKFEIPYFTVSGIQVRYLKIIEKSGYQALPWVRYITMAGEYELRLI

SEQ ID NO: 7411 - protein, 92 aa, Glycine max
  misc_feature (1)..(1): Xaa can be any naturally occurring amino acid
  misc_feature (4)..(4): Xaa can be any naturally occurring amino acid
  misc_feature (26)..(26): Xaa can be any naturally occurring amino acid
  misc_feature (63)..(63): Xaa can be any naturally occurring amino acid
  misc_feature (67)..(67): Xaa can be any naturally occurring amino acid
  misc_feature (91)..(91): Xaa can be any naturally occurring amino acid
  Coding DNA Sequence Number=SeqID_4354
XIHXSANDSRSYILSTQIHTHHTVSXVPTLYTVYTKALARTNFSHIKRSIYLLLLTLLSRSKXYLSXVLCCHGVSRGNEIILIGCASHANXV

SEQ ID NO: 7412 - protein, 125 aa, Glycine max; identical to SEQ ID NO: 6998
  misc_feature (96)..(96): Xaa can be any naturally occurring amino acid
  misc_feature (102)..(102): Xaa can be any naturally occurring amino acid
  misc_feature (122)..(122): Xaa can be any naturally occurring amino acid
  Coding DNA Sequence Number=SeqID_4356

SEQ ID NO: 7413 - protein, 136 aa, Glycine max
  misc_feature (8)..(8): Xaa can be any naturally occurring amino acid
  misc_feature (11)..(11): Xaa can be any naturally occurring amino acid
  misc_feature (83)..(83): Xaa can be any naturally occurring amino acid
  Coding DNA Sequence Number=SeqID_4357
TRRWAARXLEXIVYPHGHGRYRGWTSFLSQPCHTTEITTTQAADHTVRMIPAIPKGYTTRPECLPGKDDVPLRPRVPSHREDXPPQAYPAQGYPPPYAPPQYAQPPPQQHQNSSGPGCLEGCLAALCCCCLLDACF

SEQ ID NO: 7414 - protein, 103 aa, Glycine max
  misc_feature (2)..(3): Xaa can be any naturally occurring amino acid
  misc_feature (6)..(7): Xaa can be any naturally occurring amino acid
  misc_feature (16)..(16): Xaa can be any naturally occurring amino acid
  misc_feature (18)..(18): Xaa can be any naturally occurring amino acid
  misc_feature (20)..(21): Xaa can be any naturally occurring amino acid
  misc_feature (23)..(23): Xaa can be any naturally occurring amino acid
  misc_feature (26)..(26): Xaa can be any naturally occurring amino acid
  misc_feature (28)..(28): Xaa can be any naturally occurring amino acid
  misc_feature (35)..(35): Xaa can be any naturally occurring amino acid
  misc_feature (73)..(73): Xaa can be any naturally occurring amino acid
  misc_feature (75)..(75): Xaa can be any naturally occurring amino acid
  Coding DNA Sequence Number=SeqID_4359
MXXFRXXAGATIMSSXIXPXXLXSGXSXEWTDTFXRNSMPDYAKLKLPSLREQKWSSPRCGRSRTSGSPGLQXAXSYHTYQSALPGAFASGPSPELFSEIGIL

SEQ ID NO: 7415 - protein, 76 aa, Glycine max
  Coding DNA Sequence Number=SeqID_4361
  Gene Ontology: Mol. function=hydrolase activity, acting on ester bonds; Cellular component=anchored to membrane
  Homolog annotation: Hit_ID=Q8RYH0; Match level="QueryCoverage=84%, HitCoverage=85%, E-value=2e-24, Identity=89%"; Hit description=GPI -anchored protein-like
MNGGIGGTAEGAPRPSTDWGPIIVAVILFVVLSPGLLFQLPARTRVVELGNMATSAIAILVHAVIFFCILTLVVVA

SEQ ID NO: 7416 - protein, 157 aa, Glycine max
  Coding DNA Sequence Number=SeqID_4362
  Gene Ontology: Mol. function=protein binding; Cellular component =nucleus; Biological process=double-strand break repair
  Homolog annotation: Hit_ID=A7NX21; Match level="QueryCoverage=84%, HitCoverage=51%, E-value=6e-50, Identity=66%"; Hit description =Chromosome chr5 scaffold_2, whole genome shotgun sequence
MEDVTERFSCSKLLVPKGEPIFVKATWFPTHFHLAVTDGITAWHCHPSEEEVKQRAAQWDLPVSEYLNLSERYLGLQQPGSVYALDDAGDGHKRLSWTFEKEGMTLLWRWKCLLSPDSKKSNVEILDFLMGSNINLRVNGCKVLQLNLYTLFVSLCF

SEQ ID NO: 7417 - protein, 126 aa, Glycine max
  Coding DNA Sequence Number=SeqID_4363
  Gene Ontology: Mol. function=protein binding; Cellular component =ribonucleoprotein complex; Biological process=translation
  Homolog annotation: Hit_ID=Q9LTF2; Match level="QueryCoverage=77%, HitCoverage=54%, E-value=5e-47, Identity=93%"; Hit description=40S ribosomal protein S10-3
  Pfam annotation: Domain name=S10_plectin; Domain location=3-99; Score= 253.4; E_value=4.9e-73; Accession=PF03501.5; Description=PlectinS10 domain
MIMSEENRREICKYLFKEGVLFAKKDFNLAKHPLIESVPNLQVIKLMQSFKSKEYVRETFAWMHYYWFLTNEGIEFLRTYLNLPSDVVPATLKKSAKPIGRPFGGGPPGDRPRGPRFEGGDRPRYG

SEQ ID NO: 7418 - protein, 155 aa, Glycine max
  misc_feature (97)..(97): Xaa can be any naturally occurring amino acid
  misc_feature (138)..(138): Xaa can be any naturally occurring amino acid
  misc_feature (144)..(145): Xaa can be any naturally occurring amino acid
  misc_feature (147)..(148): Xaa can be any naturally occurring amino acid
  misc_feature (153)..(153): Xaa can be any naturally occurring amino acid
  Coding DNA Sequence Number=SeqID_4364
  Subcellular localization annotation: CTP_CleavageSite=7; ConfidenceScore=5.11e-01
CDYTFVHSVMQGCSRCVFYFSVPIRSLRTFFTLYWLQLSIVSFYATPRCRRSEMSRCTSLILHTGTATYFHYPCGGNNMACRASNTLGLMVYPPSVXVALVSEKKTPSTPVSLFFVKMGGYARPRMLILFFLFFFFYXIPFLLXXLXXPPSLXPP

SEQ ID NO: 7419 - protein, 161 aa, Glycine max
  Coding DNA Sequence Number=SeqID_4366
FVPKPVADKGSLHVVVNSQRIRYTTREVNRLLALSPDARLASSDGAWERERADEREADQRQGHRVPPPGRHLKQRLPDGPQQLGHQPPPHQPRYGQPAPAAAVPAPPAELHRPAAAPSSQPRPLSPRAAAPPHHRGQPCRHAEKHTLVLCCTLFGSAIASC

SEQ ID NO: 7420 - protein, 157 aa, Glycine max
  misc_feature (43)..(43): Xaa can be any naturally occurring amino acid
  Coding DNA Sequence Number=SeqID_4367
RPNLFFILAIIALRNPDPNYSTPAIPPHHLHRSSHHPTLILAXELLFTTMNRNTIMRSRSRIISVSCSDAAHQHYAPVCLLSFHFMTNLSLLFLTYLTVTLKILFDLALYRPNLSLPPTPLIIRKCLGNFSMKPPKSNATPPVFSLPLAADTRPGFI

SEQ ID NO: 7421 - protein, 150 aa, Glycine max
  misc_feature (148)..(148): Xaa can be any naturally occurring amino acid
  Coding DNA Sequence Number=SeqID_4369
  Gene Ontology: Mol. function=RNA binding
  Homolog annotation: Hit_ID=A2Q574; Match level="QueryCoverage=91%, HitCoverage=36%, E-value=3e-22, Identity=44%"; Hit description =Cyclin-like F-box
  Pfam annotation: Domain name=F-box; Domain location=14-61; Score =36.7; E_value=8.5e-08; Accession=PF00646.23; Description=F-box domain
MIMTRSKTQQMKEDRLSGLPDEILFIIMSFIMIKDAVKTCILSKRWRNLWKFLPNLTLHSNDFRSHSVFFEFVSRILSCSDQNHTLHSLDFHGPFYGKPIVMTNLMGYAVYHNIQHLNINVPYNISLSARVFSCPSLKSLRISVSHNXLK

SEQ ID NO: 7422 - protein, 119 aa, Glycine max
  misc_feature (98)..(98): Xaa can be any naturally occurring amino acid
  misc_feature (100)..(100): Xaa can be any naturally occurring amino acid
  Coding DNA Sequence Number=SeqID_4370
  Homolog annotation: Hit_ID=Q6Z2A9; Match level="QueryCoverage=97%, HitCoverage=48%, E-value=4e-20, Identity=49%"; Hit description =Putative uncharacterized protein OJ1034_C08.37-1
MPPRKKRGARPAANQPPPSPPKPPGPDASVEEKLRWSADQEFVRRKAAIRAIQAAETESILSRLHLVRSYISKEQLETPALQFFQENLPNVSVVRNEXQXELELKWKDWDDLINGDQRH

SEQ ID NO: 7423 - protein, 161 aa, Glycine max
  Coding DNA Sequence Number=SeqID_4371
RRVAIYILSIQLIRPPTEGRLFIMHDTITRRYIRLYQQHYIVLYYIAARARPGAHVFPPHLITPAPRAYLIYRPARYFIYPTSIRRHAHIGRGSNKLVRRQRGGPYIVPTSCLGGLFAHAQHVFFLQQYSRSYLLLVRPGWQSKLTPSYVYNTHDTPGSWR

SEQ ID NO: 7424 - protein, 112 aa, Glycine max
  misc_feature (14)..(14): Xaa can be any naturally occurring amino acid
  misc_feature (50)..(51): Xaa can be any naturally occurring amino acid
  misc_feature (55)..(55): Xaa can be any naturally occurring amino acid
  misc_feature (60)..(60): Xaa can be any naturally occurring amino acid
  misc_feature (73)..(73): Xaa can be any naturally occurring amino acid
  misc_feature (75)..(75): Xaa can be any naturally occurring amino acid
  misc_feature (81)..(81): Xaa can be any naturally occurring amino acid
  Coding DNA Sequence Number=SeqID_1448
YYTMRVYTYKHTYXNPYNNLELWRIIKEILKMNPVVGSGTSYRVTHLTSXXNAHXRPTKXYSVDPAPARIHLXQXTKGGGXFIVYINYAHTTPSRYSSPNLVDLLFLRGVYR

SEQ ID NO: 7425 - protein, 49 aa, Glycine max
  Coding DNA Sequence Number=SeqID_1450
  Homolog annotation: Hit_ID=A7QDL5; Match level="QueryCoverage=95%, HitCoverage=24%, E-value=5e-12, Identity=74%"; Hit description =Chromosome chr10 scaffold_81, whole genome shotgun sequence
MDKATLLAEVISQVKELKKNAAEVSKGFLIPKDADEVKVEPYNDHEGGE

SEQ ID NO: 7426 - protein, 82 aa, Glycine max
  misc_feature (3)..(3): Xaa can be any naturally occurring amino acid
  misc_feature (8)..(8): Xaa can be any naturally occurring amino acid
  misc_feature (13)..(13): Xaa can be any naturally occurring amino acid
  misc_feature (18)..(18): Xaa can be any naturally occurring amino acid
  misc_feature (27)..(27): Xaa can be any naturally occurring amino acid
  misc_feature (36)..(36): Xaa can be any naturally occurring amino acid
  misc_feature (42)..(42): Xaa can be any naturally occurring amino acid
  misc_feature (45)..(45): Xaa can be any naturally occurring amino acid
TAXRLLRXHGKCXVVEAXPQKAEAQCXLPLCKAGKXFNAVAXLKXMDSLTFGSPKFLRHLMDPSSKKKKKNSFGREFFLVPN

SEQ ID NO: 7427 - protein, 136 aa, Glycine max
  Coding DNA Sequence Number=SeqID_1452
  Gene Ontology: Mol. function=nucleic acid binding; Cellular component= nucleolus; Biological process=ribosomal large subunit biogenesis and assembly
  Homolog annotation: Hit_ID=Q9LZ65; Match level="QueryCoverage=77%, HitCoverage=47%, E-value=3e-50, Identity=90%"; Hit description=Rna binding protein-like
  Pfam annotation: Domain name=RRM_1; Domain location=64-135; Score =70.4; E_value=5.9e-18; Accession=PF00076.12; Description=RNA recognition motif. (a.k.a. RRM, R
  Subcellular localization annotation: CTP_CleavageSite=49; ConfidenceScore=5.33e-01
MGAKAKKALKKNMKKITASAAASSSSQLAAPKNPKPSADFLPLEGGPARKAPATKPIENKATVLYIGRLPHGFYETEIEAFFTQFGTVKRVRVARNKKTGKSKHFGFIQFEDPEVAEIAAGAMNDYLLLEHMLQVR

SEQ ID NO: 7428 - protein, 112 aa, Glycine max
  misc_feature (11)..(11): Xaa can be any naturally occurring amino acid
  misc_feature (19)..(19): Xaa can be any naturally occurring amino acid
  misc_feature (28)..(28): Xaa can be any naturally occurring amino acid
  misc_feature (52)..(52): Xaa can be any naturally occurring amino acid
  misc_feature (55)..(55): Xaa can be any naturally occurring amino acid
  misc_feature (69)..(69): Xaa can be any naturally occurring amino acid
  misc_feature (85)..(85): Xaa can be any naturally occurring amino acid
  Coding DNA Sequence Number=SeqID_1453
LVVNRCSVVGXVCVGWSAXHHIAREKRXVLCASSCVCTVGVIAIEREVIHDXLEXGGSGVLHKALGCDXSTTVAASLFDLITYSXYSLHTIDHLTDLSHPDTTRCACSAIGM

SEQ ID NO: 7429 - protein, 613 aa, Glycine max
  misc_feature (142)..(142): Xaa can be any naturally occurring amino acid
  Coding DNA Sequence Number=SeqID_1455
  Homolog annotation: Hit_ID=O22799; Match level="QueryCoverage=94%, HitCoverage=94%, E-value=1e-109, Identity=43%"; Hit description =Uncharacterized protein At2g33490
  Pfam annotation: Domain name=BAR; Domain location=1-220; Score=-29.6; E_value=0.0033; Accession=PF03114.8; Description=BAR domain
  Pfam annotation: Domain name=Extensin_2; Domain location=268-603; Score=-141.2; E_value=0.092; Accession=PF04554.4; Description =Extensin-like region
  Pfam module annotation: Pfam domain module=BAR::Extensin_2; Domain location=1-220::268-603
MKSSLSKLKKIALHKTVSKDKKDFPPTVKFDELALAAKDMQDMRDCYDSLLAAAAATQNSAHEFAESLQDMGTCLLEKTALNDDEESQLLLGMLGSVQLELQKLVDSYRSHIVLTITNPSESLLNELRTVEDMKRQCDEKRXEKGKSKSGKGESFTLQQLQAAHAEYEEEATLCAFRLKSLKQGQSRSLLTQAARHHAAQLNFFRKGLKSLEAVEPHVRMIAVRQHIDYQFSGLEDDGGESDNNDDGNDFDIIEGGELSFDYRANKQGPYIVSTSPNTAEVEESGCSYVRASTPETAETSLDKNQGDFKVSNRVSSYSAPILAEKKFDPAEKVRQLLASSAAKSNAYVLPTPVNIKETKTSSAPHISASGSLHNLWHSSPLDEKKNEKDVDSKLSEPTIPRAHSVLKESNSDTTYTQLPRPSADGLSPPQVDLFSATDTKKIKRQAFSGPLTNKPLSVKPVSGGFPRLPVPQPSSPKASPNASPPLVSSPRISELHELPRPPGNQSSKPRVGHSAPLVLKNPEAAMTNKFPSVVFSAASPLPTPPVSRSFSIPSSGQRVVALNVSNTKYLDTPQVSKVDKAVSPPLTPMSQRASNISDLASHSSEIQVDAGGS

SEQ ID NO: 7430 - protein, 121 aa, Glycine max
  misc_feature (1)..(1): Xaa can be any naturally occurring amino acid
  misc_feature (9)..(9): Xaa can be any naturally occurring amino acid
  misc_feature (27)..(27): Xaa can be any naturally occurring amino acid
  misc_feature (62)..(62): Xaa can be any naturally occurring amino acid
  misc_feature (84)..(84): Xaa can be any naturally occurring amino acid
  misc_feature (105)..(105): Xaa can be any naturally occurring amino acid
  misc_feature (107)..(107): Xaa can be any naturally occurring amino acid
  Coding DNA Sequence Number=SeqID_1456
XHTHSHIRXDRVALIYLLLCSYVSYAXATSRTMCQLCALNRHTLTTSPRMHTPAHAHSRTRXYSYHTRFISSAHLIILTYIIAXALYSLFISLCTLSRISARQEXHXIPFIYICIIMYASK

SEQ ID NO: 7431 - protein, 143 aa, Glycine max
  misc_feature (118)..(118): Xaa can be any naturally occurring amino acid
  Coding DNA Sequence Number=SeqID_1458
  Gene Ontology: Mol. function=glutathione transferase activity; Cellular component=cytoplasm; Biological process=aromatic amino acid family metabolic process
  Homolog annotation: Hit_ID=Q9FQD3; Match level="QueryCoverage=100%, HitCoverage=65%, E-value=1e-62, Identity=78%"; Hit description =Glutathione S-transferase GST 25
  Pfam annotation: Domain name=GST_N; Domain location=1-73; Score=56.5; E_value=9e-14; Accession=PF02798.10; Description=Glutathione S -transferase, N-terminal domain
TLFSYWRSSCSHRVRIALNLKGLKYEYKPVNLLKGEQSHPEFLHLNPVGCVPILVNDHIGLYNSFTIIMYLEDKYPHNPLLPHNIYERAINCQATSVISSTVQPLYNVSLLNYMGRKXNPNEELPWAQTVIRIYCEALKKLCK

SEQ ID NO: 7432 - protein, 105 aa, Glycine max
  misc_feature (64)..(64): Xaa can be any naturally occurring amino acid
  Coding DNA Sequence Number=SeqID_4373
  Gene Ontology: Mol. function=structural constituent of ribosome; Cellular component=intracellular; Biological process=translation
  Homolog annotation: Hit_ID=Q3SC82; Match level="QueryCoverage=100%, HitCoverage=70%, E-value=2e-28, Identity=64%"; Hit description =Cytoplasmic ribosomal protein S13
  Pfam annotation: Domain name=Ribosomal_S13_N; Domain location=1-54; Score=57.1; E_value=6e-14; Accession=PF08069.3; Description =Ribosomal S13S15 N-terminal domain
RGQGISSSALPYYRTPAIWLKICLLDVYKNICKYANNGLTSSNIAVILRDCYGIAHVNSVTGSXILRILKAHRLAPEIPDDLYHLDYRCVSIQEAILRRKHKRTK

SEQ ID NO: 7433 - protein, 109 aa, Glycine max
  Coding DNA Sequence Number=SeqID_4374
  Subcellular localization annotation: CTP_CleavageSite=34; ConfidenceScore=5.21e-01
SRRQHISSRYLRTARSHSYARSHHSTSPLDQTIASALPQSLRLPLSSLLPLTPSSLPQSLPLIAPQFHLSSPLCSPMKLHLFTTASTSTFHIRSSTNPCTNDLTNTSPF

SEQ ID NO: 7434 - protein, 63 aa, Glycine max
  Coding DNA Sequence Number=SeqID_4376
LILAILSSKQHGRRCTPYKGAQRFRVSLGTDILATPAMQAPGHGAELHPLEMEDLVRTIKVLL

SEQ ID NO: 7435 - protein, 125 aa, Glycine max
  Coding DNA Sequence Number=SeqID_4378
  Subcellular localization annotation: CTP_CleavageSite=60; ConfidenceScore=5.20e-01
KPVLLGLEKREWRDSRCSSPLPSAARPTPPPPRGRPSGTGRGCCWSAAPRSPPGPSAPTSAAWRTAWPTACSQTTGSPVDSTGVSGLRDGARTTEGRGDSSGKRTSSTRGATGGRAPAESGYQNG

SEQ ID NO: 7436 - protein, 107 aa, Glycine max
  misc_feature (2)..(7): Xaa can be any naturally occurring amino acid
  misc_feature (9)..(9): Xaa can be any naturally occurring amino acid
  misc_feature (11)..(12): Xaa can be any naturally occurring amino acid
  misc_feature (21)..(23): Xaa can be any naturally occurring amino acid
  misc_feature (36)..(37): Xaa can be any naturally occurring amino acid
  misc_feature (39)..(39): Xaa can be any naturally occurring amino acid
  misc_feature (42)..(42): Xaa can be any naturally occurring amino acid
  misc_feature (44)..(44): Xaa can be any naturally occurring amino acid
  misc_feature (53)..(54): Xaa can be any naturally occurring amino acid
  misc_feature (60)..(60): Xaa can be any naturally occurring amino acid
  misc_feature (67)..(67): Xaa can be any naturally occurring amino acid
  misc_feature (70)..(70): Xaa can be any naturally occurring amino acid
  misc_feature (73)..(73): Xaa can be any naturally occurring amino acid
  misc_feature (75)..(75): Xaa can be any naturally occurring amino acid
  misc_feature (78)..(79): Xaa can be any naturally occurring amino acid
  misc_feature (89)..(89): Xaa can be any naturally occurring amino acid
  misc_feature (95)..(97): Xaa can be any naturally occurring amino acid
  misc_feature (101)..(102): Xaa can be any naturally occurring amino acid
  misc_feature (106)..(107): Xaa can be any naturally occurring amino acid
  Coding DNA Sequence Number=SeqID_4380
YXXXXXXRXPXXCRESVTLNXXXDGNMIHILQSLLXXIXYSXTXYHHITTPKXXTPDRLXHTNILTXLMXAAXRXTHXXLSWLHLLYCXPSLYFXXXTFYXXLLCXX

SEQ ID NO: 7437 - protein, 102 aa, Glycine max
  misc_feature (32)..(32): Xaa can be any naturally occurring amino acid
  misc_feature (41)..(41): Xaa can be any naturally occurring amino acid
  Coding DNA Sequence Number=SeqID_4381
  Gene Ontology: Mol. function=superoxide dismutase activity; Cellular component=chloroplast; Biological process=superoxide metabolic process
  Homolog annotation: Hit_ID=P28759; Match level="QueryCoverage=73%, HitCoverage=30%, E-value=2e-23, Identity=73%"; Hit description =Superoxide dismutase [Fe], chloroplast precursor
  Pfam annotation: Domain name=Sod_Fe_N; Domain location=8-85; Score =29.8; E_value=4.5e-08; Accession=PF00081.12; Description =Ironmanganese superoxide dismutases, alpha-
AESSSKAKIQLYPTPYYVNGLEPLMNQQTLEXHWGKHHKTXEEILNKQRVGTELEGKSLEEIIGTSYKLGDILPAFYMAAQACLARNQKLLFMFHNHGLGIS

SEQ ID NO: 7438 - protein, 90 aa, Glycine max
  misc_feature (66)..(66): Xaa can be any naturally occurring amino acid
  misc_feature (71)..(71): Xaa can be any naturally occurring amino acid
  Coding DNA Sequence Number=SeqID_4382
QPTHADRPKQLRPRRGPAAVWEHQRVIDTGASLISRAHNYSPRDICVRAPRRRYMYRVITTPQTAXAHANXDYTITHLRAQISHEYVWSY

SEQ ID NO: 7439 - protein, 143 aa, Glycine max
  misc_feature (15)..(15): Xaa can be any naturally occurring amino acid
  misc_feature (53)..(53): Xaa can be any naturally occurring amino acid
  misc_feature (104)..(104): Xaa can be any naturally occurring amino acid
  Coding DNA Sequence Number=SeqID_4384
  Gene Ontology: Mol. function=4 iron, 4 sulfur cluster binding; Cellular component=integral to membrane; Biological process=protein -chromophore linkage
  Homolog annotation: Hit_ID=P56766; Match level="QueryCoverage=64%, HitCoverage=12%, E-value=4e-29, Identity=70%"; Hit description =Photosystem I P700 chlorophyll a apoprotein A1
GGDNLVAVAGKVVLXAYSYRNRHLLVHHSHALTIHATVLIRLKGVPYAGSSRXSSDTAYLGFGFPCHGPVTGGTCQVSARVHVFIGQFWMIYANSVVIFHLSWXMQSHVWGRISDQWSQSYRYPCQRFVRPVPLPLKGGPVVS

SEQ ID NO: 7440 - protein, 160 aa, Glycine max
  misc_feature (45)..(45): Xaa can be any naturally occurring amino acid
  misc_feature (73)..(73): Xaa can be any naturally occurring amino acid
  misc_feature (93)..(93): Xaa can be any naturally occurring amino acid
  misc_feature (113)..(113): Xaa can be any naturally occurring amino acid
  Coding DNA Sequence Number=SeqID_4385
  Gene Ontology: Mol. function=binding
  Homolog annotation: Hit_ID=A7P1V9; Match level="QueryCoverage=98%, HitCoverage=28%, E-value=2e-36, Identity=50%"; Hit description =Chromosome chr19 scaffold_4, whole genome shotgun sequence
VVLLVQILGSADLAERDADHRALMSLLGLDVAAPFTALFKHIGTXQDSSTDDVMLEKGIDFARDNVFPIQAKXLKPQEEMERHITALITKECXDVSAILLLMLMDFLMSLILXEETAPVERMKELIGLIEGQADLDTQFNVSNADHIDRTILCLYMALTF

SEQ ID NO: 7441 - protein, 123 aa, Glycine max
  misc_feature (87)..(87): Xaa can be any naturally occurring amino acid
  misc_feature (94)..(94): Xaa can be any naturally occurring amino acid
  misc_feature (100)..(100): Xaa can be any naturally occurring amino acid
  Coding DNA Sequence Number=SeqID_4386
  Homolog annotation: Hit_ID=A7PNK9; Match level="QueryCoverage=100%, HitCoverage=24%, E-value=6e-39, Identity=63%"; Hit description =Chromosome chr8 scaffold_23, whole genome shotgun sequence
MGDSCLTSMSMENHHPSTLLSMDSSASSHEELDLEMNRQIILTRPADINLPLSAERSPPAQPWNSEPCDILDVGLGYSRYETESVLXLTKAGRXCAKRVXSLWSAWCLSFFFKPAVNDSPTAR

SEQ ID NO: 7442 - protein, 91 aa, Glycine max; identical to SEQ ID NO: 6312
  Coding DNA Sequence Number=SeqID_4387

SEQ ID NO: 7443 - protein, 138 aa, Glycine max
  Coding DNA Sequence Number=SeqID_4389
  Gene Ontology: Mol. function=nucleic acid binding; Biological process= RNA splicing
  Homolog annotation: Hit_ID=A7PWS9; Match level="QueryCoverage=39%, HitCoverage=13%, E-value=2e-20, Identity=85%"; Hit description =Chromosome chr19 scaffold_35, whole genome shotgun sequence
  Subcellular localization annotation: CTP_CleavageSite=59; ConfidenceScore=6.01e-01
MAKPSRGRRSPSASGSSSRSSSRSRSRSGSSRSRSLSSSSPSRSVSSGSRSPPRRGKSSAGAARRGRSPPPPKGASSPSKKATTPIQESLVLHVDCLSRNVNEGHLKEIFGNFGEVVHVELAMDRAVNLPKGYAYVEF

SEQ ID NO: 7444 - protein, 119 aa, Glycine max
  misc_feature (30)..(30): Xaa can be any naturally occurring amino acid
  misc_feature (50)..(51): Xaa can be any naturally occurring amino acid
  misc_feature (56)..(56): Xaa can be any naturally occurring amino acid
  misc_feature (102)..(103): Xaa can be any naturally occurring amino acid
  misc_feature (110)..(111): Xaa can be any naturally occurring amino acid
  Coding DNA Sequence Number=SeqID_4390
  Subcellular localization annotation: CTP_CleavageSite=55; ConfidenceScore=5.59e-01
DDVCARSRSRRTALAAPTLMRASRPHVACXPRSSKSRASLSTVRARACRXXEAISXASSSSYSLILMVLYATQLRDICSTAIYIDTILYSRSTLGSAEQHRXXQCILDGXXDTLTPLAM

SEQ ID NO: 7445 - protein, 117 aa, Glycine max
  misc_feature (53)..(54): Xaa can be any naturally occurring amino acid
  misc_feature (57)..(61): Xaa can be any naturally occurring amino acid
  misc_feature (63)..(69): Xaa can be any naturally occurring amino acid
  Coding DNA Sequence Number=SeqID_4392
YYCDIIFHAGVSCCDLTYTYLSVVPDAVACRWCRLSCSLYLCCEVLYMICGCXXLGXXXXXLXXXXXXXKRSGVGVCVCLYAPPRPLTTLRCVLCATHSLLSSLMCRTSLRISSLVL

SEQ ID NO: 7446 - protein, 98 aa, Glycine max
  misc_feature (5)..(5): Xaa can be any naturally occurring amino acid
  misc_feature (7)..(7): Xaa can be any naturally occurring amino acid
  misc_feature (9)..(9): Xaa can be any naturally occurring amino acid
  misc_feature (12)..(12): Xaa can be any naturally occurring amino acid
  misc_feature (15)..(15): Xaa can be any naturally occurring amino acid
  misc_feature (21)..(23): Xaa can be any naturally occurring amino acid
  misc_feature (25)..(25): Xaa can be any naturally occurring amino acid
  misc_feature (27)..(27): Xaa can be any naturally occurring amino acid
  misc_feature (34)..(36): Xaa can be any naturally occurring amino acid
  misc_feature (46)..(46): Xaa can be any naturally occurring amino acid
  misc_feature (49)..(49): Xaa can be any naturally occurring amino acid
  misc_feature (56)..(56): Xaa can be any naturally occurring amino acid
  misc_feature (60)..(60): Xaa can be any naturally occurring amino acid
  misc_feature (63)..(63): Xaa can be any naturally occurring amino acid
  misc_feature (66)..(68): Xaa can be any naturally occurring amino acid
  misc_feature (82)..(82): Xaa can be any naturally occurring amino acid
  misc_feature (90)..(91): Xaa can be any naturally occurring amino acid
  misc_feature (94)..(94): Xaa can be any naturally occurring amino acid
  Coding DNA Sequence Number=SeqID_4393
GLYYXHXTXLCXMTXCESLTXXXEXRXAMIRMEXXXCVIDRTRVRXTMXLVCCTYXTARXRRXERXXXLVLLDAYASSSHHXAYVAEIAXXASXRIRL

SEQ ID NO: 7447 - protein, 107 aa, Glycine max
  Coding DNA Sequence Number=SeqID_4395
LFPPHQCVGHDSRSVNFNQNWVTGAPPSQVACTSDPAPLLCPLCTHQISYRRDAFLGAPLTRSAGGVLRPHYIGRALSVQRPNITLSAAVTVSMLSAIYRYPRLGRN

SEQ ID NO: 7448 - protein, 164 aa, Glycine max; identical to SEQ ID NO: 6319
  misc_feature (1)..(6): Xaa can be any naturally occurring amino acid
  misc_feature (13)..(13): Xaa can be any naturally occurring amino acid
  misc_feature (17)..(17): Xaa can be any naturally occurring amino acid
  misc_feature (24)..(24): Xaa can be any naturally occurring amino acid
  misc_feature (57)..(57): Xaa can be any naturally occurring amino acid
  misc_feature (133)..(133): Xaa can be any naturally occurring amino acid
  misc_feature (140)..(140): Xaa can be any naturally occurring amino acid
  misc_feature (153)..(153): Xaa can be any naturally occurring amino acid
  Coding DNA Sequence Number=SeqID_4397
  Subcellular localization annotation: CTP_CleavageSite=49; ConfidenceScore=5.54e-01

SEQ ID NO: 7449 - protein, 244 aa, Glycine max
  misc_feature (33)..(33): Xaa can be any naturally occurring amino acid
  misc_feature (59)..(59): Xaa can be any naturally occurring amino acid
  misc_feature (62)..(62): Xaa can be any naturally occurring amino acid
  misc_feature (80)..(80): Xaa can be any naturally occurring amino acid
  misc_feature (95)..(95): Xaa can be any naturally occurring amino acid
  misc_feature (118)..(118): Xaa can be any naturally occurring amino acid
  misc_feature (121)..(121): Xaa can be any naturally occurring amino acid
  misc_feature (123)..(123): Xaa can be any naturally occurring amino acid
  misc_feature (154)..(154): Xaa can be any naturally occurring amino acid
  misc_feature (158)..(158): Xaa can be any naturally occurring amino acid
  misc_feature (163)..(163): Xaa can be any naturally occurring amino acid
  misc_feature (165)..(165): Xaa can be any naturally occurring amino acid
  misc_feature (190)..(190): Xaa can be any naturally occurring amino acid
  misc_feature (194)..(194): Xaa can be any naturally occurring amino acid
  misc_feature (210)..(213): Xaa can be any naturally occurring amino acid
  misc_feature (216)..(216): Xaa can be any naturally occurring amino acid
  misc_feature (225)..(225): Xaa can be any naturally occurring amino acid
  Coding DNA Sequence Number=SeqID_4399
SLTPPSDTTLLYQTRESRLARSFEHTQVYRGMXHTTKRKTTGSALDHRKEKERDRRGEXIGXHAASVDTTPGAVQRKPAXRARRRSPLSSRTPLXLRSCVACSRVAAVVGYIRKTLPXSGXEXRVVRVNRHCYLLRAREAAWCVFTNNHCHTHXEQPXRHFLXNXVCLLERVEFGLCCVECVRGVACCPXYIFXFFLPFIYIYHLSYLNXXXXYSXGVSISSVYXLCMNLVRYNINIYLYLFCH

SEQ ID NO: 7450 - protein, 118 aa, Glycine max
  misc_feature (9)..(12): Xaa can be any naturally occurring amino acid
  misc_feature (14)..(14): Xaa can be any naturally occurring amino acid
  misc_feature (103)..(104): Xaa can be any naturally occurring amino acid
  Coding DNA Sequence Number=SeqID_4401
HIHLSSQCXXXXSXLPSHTHIITITLTLLKFLNIQIHFYYIYIHLYTSSPNFIYILLSSLTLLYRSSLPLSSSSHPNLSHYLITTYKAHSLPNNIIHSYIHIXXQFLYYITSSSTSSL

SEQ ID NO: 7451 - protein, 106 aa, Glycine max; identical to SEQ ID NO: 6325
  misc_feature (22)..(22): Xaa can be any naturally occurring amino acid
  misc_feature (31)..(31): Xaa can be any naturally occurring amino acid
  misc_feature (54)..(54): Xaa can be any naturally occurring amino acid
  misc_feature (60)..(61): Xaa can be any naturally occurring amino acid
  misc_feature (97)..(97): Xaa can be any naturally occurring amino acid
  misc_feature (100)..(100): Xaa can be any naturally occurring amino acid
  misc_feature (102)..(102): Xaa can be any naturally occurring amino acid
  misc_feature (104)..(104): Xaa can be any naturally occurring amino acid
  misc_feature (106)..(106): Xaa can be any naturally occurring amino acid
  Coding DNA Sequence Number=SeqID_4403
  Subcellular localization annotation: CTP_CleavageSite=28; ConfidenceScore=5.06e-01

SEQ ID NO: 7452 - protein, 199 aa, Glycine max
  Coding DNA Sequence Number=SeqID_4405
  Subcellular localization annotation: CTP_CleavageSite=54; ConfidenceScore=5.09e-01
MHAHHTSTHTTECTTSYSDTPTHEAHAITHPWPVRASMPSARTASLADARAGSRAAARATSLADARATSMADMWAASMARGGELSGCAGDEHGDVQAGSMARGGSSLHRRLLSAGVRRLLPSGARRPLRSGSQRPLPSSMAREGHYRGAPSSGVGQPTLLGARCCRSLSLGTSKHGRAVMRIPGSGEWHGRAWQSGGGE

SEQ ID NO: 7453 - protein, 108 aa, Glycine max
  misc_feature (72)..(72): Xaa can be any naturally occurring amino acid
  misc_feature (88)..(88): Xaa can be any naturally occurring amino acid
  Coding DNA Sequence Number=SeqID_4407
  Subcellular localization annotation: CTP_CleavageSite=91; ConfidenceScore=5.27e-01
LCGFFLITPRYTVYSPHLCVLSLLFLSSSTSRRSSLWSLLLPYMLRREHSLKIYSTQSQSPLSPSLHPRRSXCATCRLREGGSLVAYXGSCASLRTQRNAESQLLKPT

SEQ ID NO: 7454 - protein, 224 aa, Glycine max
  misc_feature (200)..(224): Xaa can be any naturally occurring amino acid
  Coding DNA Sequence Number=SeqID_4409
  Subcellular localization annotation: CTP_CleavageSite=15; ConfidenceScore=5.07e-01
QLRRPPPPITNLFLSQNNLSNNMNKLSIAVLLFSSLYLATALNDAPWAPLQRGIYENSPFLTGLSDFGGQNTLGQAFESGLFNTVEGGVGQILNAWYQRDERGFTYIAEPQLVLQDGSLQNSKYGMRVDPNNGRRDIIYWSIQQLLEENNLPTGTNITWDADTDAVTVTTFNGIDQFLQYQGFQPLNNSTDPDVVVDSPXXXXXXXXXXXXXXXXXXXXXXXXX

SEQ ID NO: 7455 - protein, 122 aa, Glycine max
  misc_feature (86)..(86): Xaa can be any naturally occurring amino acid
  Coding DNA Sequence Number=SeqID_4411
  Gene Ontology: Mol. function=methyltransferase activity
  Homolog annotation: Hit_ID=A5CBT0; Match level="QueryCoverage=91%, HitCoverage=17%, E-value=3e-29, Identity=60%"; Hit description =Putative uncharacterized protein
MAAMLLLLPPNTKQTKALLERCSNVKELMQIYGQLLKKGTIRNQLTVSTLLASYARIELGNLAYTPMVFDSISSPNTVIWNTMIRXIYSNSNDPEAALLLYHQMLNNSVPDNSYTFPFLLKA

SEQ ID NO: 7456 - protein, 114 aa, Glycine max
  misc_feature (21)..(21): Xaa can be any naturally occurring amino acid
  misc_feature (33)..(33): Xaa can be any naturally occurring amino acid
  misc_feature (52)..(52): Xaa can be any naturally occurring amino acid
  misc_feature (60)..(60): Xaa can be any naturally occurring amino acid
  misc_feature (68)..(68): Xaa can be any naturally occurring amino acid
  misc_feature (70)..(70): Xaa can be any naturally occurring amino acid
  misc_feature (87)..(87): Xaa can be any naturally occurring amino acid
  misc_feature (95)..(95): Xaa can be any naturally occurring amino acid
  Coding DNA Sequence Number=SeqID_4412
MTFAYVHRQASYRRPPPSIVXVYMCSASLARAXIRVLLDHASEPAHTSCVSXPLNLLYIXRLAVSSRXDXVPTRVRTTTLLCSIELXHYHDVTTXTMCGDVEMSDSATDTRYTD

SEQ ID NO: 7457 - protein, 108 aa, Glycine max
  misc_feature (49)..(49): Xaa can be any naturally occurring amino acid
  misc_feature (59)..(59): Xaa can be any naturally occurring amino acid
  Coding DNA Sequence Number=SeqID_4414
  Subcellular localization annotation: CTP_CleavageSite=51; ConfidenceScore=5.15e-01
KPLAATPTLIRFADSFPRFPPLWQSKPEEGPVTRIRPFANKFVVNPCFXPNAQTLEMRXIILGHTIPQLHFLIKIQRSLSVMPYLSLKPRDQLPFFHSNTTYYRKLRE

SEQ ID NO: 7458 - protein, 90 aa, Glycine max
  misc_feature (11)..(11): Xaa can be any naturally occurring amino acid
  misc_feature (48)..(48): Xaa can be any naturally occurring amino acid
  misc_feature (55)..(55): Xaa can be any naturally occurring amino acid
  misc_feature (71)..(71): Xaa can be any naturally occurring amino acid
  Coding DNA Sequence Number=SeqID_4416
VRVVVECITSXYDICGYHILLVVGIGIESHACVYLSKHTYVSVYSTSXTVVRCVXVCIYQYIDMSERYTHXQIRFVTYVISIQLSYRCHE

SEQ ID NO: 7459 - protein, 204 aa, Glycine max
  misc_feature (200)..(200): Xaa can be any naturally occurring amino acid
  Coding DNA Sequence Number=SeqID_409
  Gene Ontology: Mol. function=protein binding
  Homolog annotation: Hit_ID=A7PHA4; Match level="QueryCoverage=80%, HitCoverage=86%, E-value=1e-28, Identity=50%"; Hit description =Chromosome chr17 scaffold_16, whole genome shotgun sequence
  Subcellular localization annotation: CTP_CleavageSite=47; ConfidenceScore=5.39e-01
MHNNTSNATRMLDPATELLPPPTSPTISSIPSTAPVTESPVSFLQYRSTTLGRLIGVNFPNFVLRVPSLLRIPYSAIEIVSGAMRIADATKKKKKANSAATTAETRRSWWQLCRYFVARPASLGEFLEVERRFGDGAFYGTAAELEGMVAGNQQRNGSRVLFSDGRVLPPQADVDDGAPPPESLCNRFPVSLAGICSGGXGVVL

SEQ ID NO: 7460 - protein, 117 aa, Glycine max
  Coding DNA Sequence Number=SeqID_410
  Gene Ontology: Mol. function=protein binding; Cellular component =nucleus; Biological process=regulation of transcription, DNA -dependent
  Homolog annotation: Hit_ID=A7PLD0; Match level="QueryCoverage=77%, HitCoverage=10%, E-value=5e-25, Identity=63%"; Hit description =Chromosome chr7 scaffold_20, whole genome shotgun sequence
MDCYSKGTNEVRRRSRFLRRRGRVRRLKYTWKSAAYHSIRKRITERKDQPLRQYNPMWFQSAWWKQCPCLSNETCWEKYWGCPKGLKNDFRACFWLKNMAKPPWPRFFAKGELDPNV

SEQ ID NO: 7461 - protein, 112 aa, Glycine max
  misc_feature (6)..(6): Xaa can be any naturally occurring amino acid
  misc_feature (11)..(11): Xaa can be any naturally occurring amino acid
  misc_feature (17)..(18): Xaa can be any naturally occurring amino acid
  misc_feature (36)..(36): Xaa can be any naturally occurring amino acid
  misc_feature (64)..(64): Xaa can be any naturally occurring amino acid
  misc_feature (80)..(80): Xaa can be any naturally occurring amino acid
  misc_feature (97)..(97): Xaa can be any naturally occurring amino acid
  Coding DNA Sequence Number=SeqID_411
YMYRAXRVCVXKTPTTXXPHGHCACVIIIYISFTLXLLSSLYLYLMSVCLVFVSICCLVRINMXRASFAACVHSLRSLHXHPPASHPTQRAVTSHSXICLYNRVSVLFSCVL

SEQ ID NO: 7462 - protein, 149 aa, Glycine max
  Coding DNA Sequence Number=SeqID_413
  Gene Ontology: Mol. function=oxidoreductase activity; Cellular component=extracellular region; Biological process=hydrogen peroxide catabolic process
  Homolog annotation: Hit_ID=Q96522; Match level="QueryCoverage=100%, HitCoverage=46%, E-value=6e-68, Identity=86%"; Hit description =Peroxidase 45 precursor
  Pfam annotation: Domain name=peroxidase; Domain location=42-149; Score=13.3; E_value=1.6e-07; Accession=PF00141.13; Description =Peroxidase
  Subcellular localization annotation: CTP_CleavageSite=43; ConfidenceScore=5.41e-01
MEKKTNQTIFSIFSLLLFSSCVSAQLRTGFYQRSCPNVENIVRNAVRQKFQQTFVTAPATLRLFFHDCFVRGCDASILLASPSERDHPDDMSLAGDGFDTVVKAKQAVDRDPNCRNKVSCADILALATREVVVLTGGPSYPVELGRRDG

SEQ ID NO: 7463 - protein, 133 aa, Glycine max
  misc_feature (93)..(93): Xaa can be any naturally occurring amino acid
  Coding DNA Sequence Number=SeqID_414
  Gene Ontology: Mol. function=serine-type endopeptidase activity; Cellular component=intracellular; Biological process=protein modification process
  Homolog annotation: Hit_ID=Q5UGI3; Match level="QueryCoverage=97%, HitCoverage=94%, E-value=4e-25, Identity=48%"; Hit description =Ubiquitin C splice variant
  Pfam annotation: Domain name=ubiquitin; Domain location=6-67; Score =53.2; E_value=8.7e-13; Accession=PF00240.13; Description=Ubiquitin family
  Pfam annotation: Domain name=ubiquitin; Domain location=74-133; Score= 22.8; E_value=0.0013; Accession=PF00240.13; Description=Ubiquitin family
  Pfam module annotation: Pfam domain module=ubiquitin::ubiquitin; Domain location=6-67::74-133
MDVLIKNPTGSTTPLRVYPSDTVRDVKAKIQEQYPLFFGGVQLDDSLTLANYNIQHESTIDLREKMNMKVYVTETVAGRTITINVNSLDTVDXLKSKIQDLEGFPKAQQCLVFASTRLDDGNRTMIGHNIGMS

SEQ ID NO: 7464 - protein, 123 aa, Glycine max
  Coding DNA Sequence Number=SeqID_415
EVKELNKPVAERQIAVINLTAKYKACPSRRPFARGVLNWLSSSSWWLVLWTRGRLPPLASCSTLLGRMKLLALPYVGLPARPRWGTCLFGFPFFLDPYCFCVIFRGLFLLALLRLPPLCCRSC

SEQ ID NO: 7465 - protein, 167 aa, Glycine max
  Coding DNA Sequence Number=SeqID_417
  Gene Ontology: Mol. function=cyanate hydratase activity; Biological process=cyanate metabolic process
  Homolog annotation: Hit_ID=Q9FWK4; Match level="QueryCoverage=96%, HitCoverage=95%, E-value=1e-69, Identity=81%"; Hit description =Cyanate hydratase
  Pfam annotation: Domain name=Cyanate_lyase; Domain location=80-153; Score=169.0; E_value=1.3e-47; Accession=PF02560.5; Description =Cyanate lyase C-terminal domain
MEESGASAAAVVPRLLAAKEESGKSFSDIAAETGLTNVYVAQLLRRQAQLKPDMAPAFRAAVPALTDELVELMMRPPFRSYHPDIVHEPAIYRLNEAVMHFGESIKEIINEDFGDGIMSAIDFYCSVDKIQGADGKDRVVLTFDGKYLPHTEQKAANMMSKLPCKAP

SEQ ID NO: 7466 - protein, 203 aa, Glycine max
  Coding DNA Sequence Number=SeqID_418
  Gene Ontology: Mol. function=magnesium ion binding; Cellular component=integral to membrane; Biological process=photosynthesis, light harvesting
  Homolog annotation: Hit_ID=Q1EP45; Match level="QueryCoverage=92%, HitCoverage=72%, E-value=3e-87, Identity=82%"; Hit description =Chlorophyll A-B binding protein (CAB), putative
  Pfam annotation: Domain name=Chloroa_b-bind; Domain location=62-202; Score=152.9; E_value=8.5e-43; Accession=PF00504.12; Description =Chlorophyll A-B binding protein
  Subcellular localization annotation: CTP_CleavageSite=30; ConfidenceScore=5.59e-01
MAAASSMALSSPSLAGKAVKLGPSAPEVGRVSMRKTVTKQVSSGSPWYGPDRVKYLGPFSGEPPSYLTGEFPGDYGWDTAGLSADPETFAKNRELEVIHSRWAMLGALGCVFPELLSRNGVKFGEAVWFKAGSQIFIEGGLDYLCNPSLIHAQSILAIWATQVILMCAVEGYRMAGGSLGEVTDPIYPVGCFDAYGLAVDAKA

SEQ ID NO: 7467 - protein, 114 aa, Glycine max; identical to SEQ ID NO: 7388
  misc_feature (39)..(39): Xaa can be any naturally occurring amino acid
  misc_feature (42)..(43): Xaa can be any naturally occurring amino acid
  misc_feature (59)..(59): Xaa can be any naturally occurring amino acid
  misc_feature (68)..(68): Xaa can be any naturally occurring amino acid
  Coding DNA Sequence Number=SeqID_419

SEQ ID NO: 7468 - protein, 151 aa, Glycine max
  Coding DNA Sequence Number=SeqID_4417
  Homolog annotation: Hit_ID=Q8IBC1; Match level="QueryCoverage=64%, HitCoverage=5%, E-value=2e-07, Identity=32%"; Hit description =Putative uncharacterized protein MAL8P1.11
  Subcellular localization annotation: CTP_CleavageSite=42; ConfidenceScore=5.49e-01
MYQQPSSYTNQVPTTGLTGNTNQLAGGFNNANVDPLRNNLNNANQLGGFNNANVDPLRNNLHNANPMTGGFNNAGVDPLRNNYNNTTNPMTGGFNNAGQMAGDFNQAPGTFNTYSTKQTILDKLPGKNKNTMGFGTVTFRPIEARLNHDTD

SEQ ID NO: 7469 - protein, 146 aa, Glycine max
  misc_feature (55)..(55): Xaa can be any naturally occurring amino acid
  Coding DNA Sequence Number=SeqID_4418
CEKQSRSHSITRMNDGAPPPGPHASVTLDITGLIVLLTRRHPYARQSKGIHNSAXGVLCCVPCASTCYPRPNGLGETYSLRPSRGVRNSKRACCLLIFNRQRGFAIAAPLGQHGGVLSTQGNRNLALASSIYELVRNHEKKSPTVH

SEQ ID NO: 7470 - protein, 145 aa, Glycine max
  Coding DNA Sequence Number=SeqID_4420
  Subcellular localization annotation: CTP_CleavageSite=48; ConfidenceScore=5.11e-01
VSSNSSSLFSPGTTLAEVNNMFGTSSSSQGQWLNYRYPPEAISFTHANVSMAHGLKLEQEENKGNLSHSVSSLYPSHMESARILSDNNNSAFDNSNFGLLDPNNISSTSSNNNRHNNNVVEILKFWPVGPQHVKHFHHIQNSLQQ

SEQ ID NO: 7471 - protein, 59 aa, Glycine max
  Coding DNA Sequence Number=SeqID_4422
  Gene Ontology: Mol. function=protein binding; Cellular component =nucleus; Biological process=red or far red light signaling pathway
  Homolog annotation: Hit_ID=A7QX53; Match level="QueryCoverage=100%, HitCoverage=10%, E-value=2e-10, Identity=62%"; Hit description =Chromosome undetermined scaffold_213, whole genome shotgun sequence
EATAPGIASMLCAHGTEVESRIRPMGYVAYGLPATCSSGVALTKIIVATTLQSRVLTWN

SEQ ID NO: 7472 - protein, 88 aa, Glycine max
  Coding DNA Sequence Number=SeqID_4423
  Gene Ontology: Mol. function=nucleic acid binding; Cellular component= ribonucleoprotein complex; Biological process=mRNA metabolic process
  Homolog annotation: Hit_ID=Q8LAK5; Match level="QueryCoverage=100%, HitCoverage=100%, E-value=2e-40, Identity=96%"; Hit description =Small nuclear ribonucleoprotein homolog
  Pfam annotation: Domain name=LSM; Domain location=19-85; Score=79.5; E_value=1.1e-20; Accession=PF01423.12; Description=LSM domain
MASTKVQRIMTQPINLIFRFLQSKARIQIWLFEQKDLRIEGRITGFDEYMNLVLDEAEEVSIKKNTRKQLGRILLKGDNITLMMNTGK

SEQ ID NO: 7473 - protein, 74 aa, Glycine max
  Coding DNA Sequence Number=SeqID_4424
  Homolog annotation: Hit_ID=Q6QB11; Match level="QueryCoverage=100%, HitCoverage=100%, E-value=3e-32, Identity=85%"; Hit description =Little protein 1
MALVPGCVQCGTRSNPCRCKVVGPTLGFVAFVVTGVIEWPLGAAVYLFRHRKGRRIMGHPARVVYPRVSRAIPI

SEQ ID NO: 7474 - protein, 130 aa, Glycine max
  misc_feature (24)..(24): Xaa can be any naturally occurring amino acid
  Coding DNA Sequence Number=SeqID_4425
SCTSVLKCCRYDYINRGRQPYRQXAQHICVGRSAPLPHPPQRRYIEANNKPSRLSIYIRDSARNAHAESRATHLHRRSRRISADDCPTREGVRPRTGTSARVVARRWSHYACIYNDIQTAADVRWECVTL

SEQ ID NO: 7475 - protein, 60 aa, Glycine max
  Coding DNA Sequence Number=SeqID_4427
ITRNFHFSLSLSQRDSSFFPGYLEKQNVKICCIGAGYVGGPTMPVIALSAHPFESLLVNL

SEQ ID NO: 7476 - protein, 87 aa, Glycine max
  Coding DNA Sequence Number=SeqID_4428
FFFFFSDIAIKAKHHLNDNEHRTIHKNLDIVSNIKSTSSTNTDRDLPFLKPLIILRSESPSPDHSNRQSSKGLTRAVAIRFNYSGGE

SEQ ID NO: 7477 - protein, 181 aa, Glycine max
  misc_feature (7)..(7): Xaa can be any naturally occurring amino acid
  misc_feature (124)..(124): Xaa can be any naturally occurring amino acid
  Coding DNA Sequence Number=SeqID_4429
AACQYDXRSTQRIVVSTSPVWWSTTRKAGQSSVAFPALPCDAEVRQGEARLDYITTPSAMKSIIYSLHRRRGVVRREREITPQYQVCIIHIEPMLIGTIGATPYVEDTRMYMQAERGSLSHNRXARSPRHNIIRALKRAQRVPPDWRRRIESRGLQLVIIQPQRRVSGTPRELLESRAAIK

SEQ ID NO: 7478 - protein, 140 aa, Glycine max
  Coding DNA Sequence Number=SeqID_4431
  Gene Ontology: Mol. function=structural constituent of ribosome; Cellular component=ribonucleoprotein complex; Biological process =translation
  Homolog annotation: Hit_ID=P49690; Match level="QueryCoverage=100%, HitCoverage=100%, E-value=1e-75, Identity=99%"; Hit description=60S ribosomal protein L23
  Pfam annotation: Domain name=Ribosomal_L14; Domain location=19-140; Score=193.0; E_value=7.2e-55; Accession=PF00238.10; Description =Ribosomal protein L14pL23e
MSKRGRGGTSGNKFRMSLGLPVAATVNCADNTGAKNLYIISVKGIKGRLNRLPSACVGDMVMATVKKGKPDLRKKVMPAVIVRQRKPWRRKDGVFMYFEDNAGVIVNPKGEMKGSAITGPIGKECADLWPRIASAANAIV

SEQ ID NO: 7479 - protein, 135 aa, Glycine max; identical to SEQ ID NO: 6354
  misc_feature (16)..(16): Xaa can be any naturally occurring amino acid
  misc_feature (18)..(18): Xaa can be any naturally occurring amino acid
  misc_feature (22)..(22): Xaa can be any naturally occurring amino acid
  misc_feature (52)..(52): Xaa can be any naturally occurring amino acid
  misc_feature (88)..(88): Xaa can be any naturally occurring amino acid
  misc_feature (135)..(135): Xaa can be any naturally occurring amino acid
  Coding DNA Sequence Number=SeqID_4432

SEQ ID NO: 7480 - protein, 200 aa, Glycine max
  misc_feature (143)..(143): Xaa can be any naturally occurring amino acid
  misc_feature (181)..(181): Xaa can be any naturally occurring amino acid
  misc_feature (189)..(189): Xaa can be any naturally occurring amino acid
  misc_feature (194)..(194): Xaa can be any naturally occurring amino acid
  misc_feature (200)..(200): Xaa can be any naturally occurring amino acid
  Coding DNA Sequence Number=SeqID_4434
  Gene Ontology: Mol. function=protein binding; Cellular component =nucleus; Biological process=imaginal disc-derived wing margin morphogenesis
  Homolog annotation: Hit_ID=Q0IG22; Match level="QueryCoverage=96%, HitCoverage=36%, E-value=1e-58, Identity=64%"; Hit description=Cdc73 domain protein
APPPPPYLNGETATAASIDKSAPLEIPTQVKRTAETESVETMAKKPRLEELQVQRVKEQLAARLDAPKEASVTIDNIKSLSEAMSVEKIAAIKAKRLAKKRTTIKGTDEPGLGSDLRGMLDFDVDVTKDILSRERQWRTRTTXLQSTGKIFAKNILAILSSIKAREEGRNRPPQPTPAITXRATPMRTXPQPAXYNRYDX

SEQ ID NO: 7481 - protein, 234 aa, Glycine max
  misc_feature (219)..(220): Xaa can be any naturally occurring amino acid
  misc_feature (228)..(228): Xaa can be any naturally occurring amino acid
  Coding DNA Sequence Number=SeqID_4435
TSHAFSVQPTYPHHPRHNTTPCCTQCETIYTNGHSRAHLYHHNSASITGWSNHYISLTVVLPQTISYVTRLTFTNTSTTSPHPYCYPNISHASPSAHRLYTPPVAARSLQLNQYLATPDLHIQRLTISIQAVSELDTRHDTTTQTRPSLDNDSIYSDTHHDIETTTNNTKSNHSHHRHARTHSHSRHEHNTILLLIIHTHCPHTSSTPLIRTCNIHLHXXLRIRLGKXLNFDTL

SEQ ID NO: 7482 - protein, 97 aa, Glycine max
  misc_feature (3)..(3): Xaa can be any naturally occurring amino acid
  misc_feature (12)..(12): Xaa can be any naturally occurring amino acid
  misc_feature (51)..(53): Xaa can be any naturally occurring amino acid
  misc_feature (66)..(69): Xaa can be any naturally occurring amino acid
  misc_feature (73)..(73): Xaa can be any naturally occurring amino acid
  misc_feature (76)..(79): Xaa can be any naturally occurring amino acid
  misc_feature (82)..(84): Xaa can be any naturally occurring amino acid
  misc_feature (87)..(88): Xaa can be any naturally occurring amino acid
  misc_feature (91)..(92): Xaa can be any naturally occurring amino acid
  Coding DNA Sequence Number=SeqID_4437
LHXERPHEVRGXLSNSSRAYQRSRLCVLTATIPPTTASVRLVRAARRAAGXXXTIVYTYTIPYDTXXXXRAAXCTXXXXKQXXXKRXXGEXXQNNKT

SEQ ID NO: 7483 - protein, 99 aa, Glycine max
  misc_feature (78)..(78): Xaa can be any naturally occurring amino acid
  Coding DNA Sequence Number=SeqID_4439
  Gene Ontology: Mol. function=catalytic activity; Biological process =cellular metabolic process
  Homolog annotation: Hit_ID=A7QWT7; Match level="QueryCoverage=74%, HitCoverage=27%, E-value=6e-16, Identity=58%"; Hit description =Chromosome chr4 scaffold_208, whole genome shotgun sequence
  Subcellular localization annotation: CTP_CleavageSite=32; ConfidenceScore=5.14e-01
MRTVLSRLSRGAPSISRLNATAVSISGRNLCTDSNKVAQPFKVEEAETVNVPPPPTEKLLVLGGNGVVGSHIWREPLXRGLSVASLSRPRPSSLHDSWA

SEQ ID NO: 7484 - protein, 96 aa, Glycine max
  Coding DNA Sequence Number=SeqID_4440
VSSVATTGLCRLMYLTYVSRVRVVQICRRATERGRARAGITRVESEATYQHVLLRKSSRETATYLCAFIHVFELCIVSRAEKAEYAQQEWRPYAFW

SEQ ID NO: 7485 - protein, 142 aa, Glycine max
  Coding DNA Sequence Number=SeqID_4441
  Gene Ontology: Mol. function=pyridoxal phosphate binding; Cellular component=mitochondrion; Biological process=cysteine biosynthetic process from serine
  Homolog annotation: Hit_ID=A5YT86; Match level="QueryCoverage=79%, HitCoverage=30%, E-value=2e-42, Identity=78%"; Hit description =Cysteine synthase
CLSCEHHAHARCSSTSLAAAMLLSTSSVSITDYPSLAQRIKDLPNDLPGTNIKKHASQIIVRTPLGYLSQGTAGGGAYVAVKQEMMRPTAIIKDRPPYATITDADEKYLITPGKTTLIEPTVSTMGIIMAFMVAMKGYKMVL

SEQ ID NO: 7486 - protein, 351 aa, Glycine max
  Coding DNA Sequence Number=SeqID_4442
  Gene Ontology: Mol. function=oxidoreductase activity; Cellular component=cytosol; Biological process=metabolic process
  Homolog annotation: Hit_ID=Q53LC7; Match level="QueryCoverage=98%, HitCoverage=96%, E-value=1e-125, Identity=67%"; Hit description =Oxidoreductase, zinc-binding dehydrogenase family
  Pfam annotation: Domain name=ADH_zinc_N; Domain location=162-310; Score=108.3; E_value=2.3e-29; Accession=PF00107.16; Description=Zinc- binding dehydrogenase
MADHGDEMTTNKKVVLRRYVTGYPTAEDMEVVVTSHVRLRVPEGSTAAVVVKNLYLSCDPWMRGRMSKHDDGDAVPAEDFVLGEALVNFTVGEVLDSTHPEFDAGDLVWGMSAWEEYTLITQTEGLFKINHPELPLSHYTGVLGLAGLTAYAGLFEVGKPKQGESVFVSAASGAVGQIVGQLAKIAGCYVVGSAGSDEKVNLLKSKMGFDDAFNYKLEGDDLGAALGRRLPGGINVYFDNVGGATLDAALLRMRPGGRVVACGMISQYNLLEHQGVRNLWCIIPKRVRVEGFSCMDYHHLYPRFEEEMAGYIKAGKVTVVEDVVRGIERAPEALLGLFSGRNVGKLLVALA

SEQ ID NO: 7487 - protein, 89 aa, Glycine max
  misc_feature (22)..(22): Xaa can be any naturally occurring amino acid
  misc_feature (49)..(49): Xaa can be any naturally occurring amino acid
  misc_feature (57)..(57): Xaa can be any naturally occurring amino acid
  Coding DNA Sequence Number=SeqID_4443
  Gene Ontology: Mol. function=protein serine/threonine kinase activity; Cellular component=integral to membrane; Biological process=protein amino acid phosphorylation
  Homolog annotation: Hit_ID=A3B815; Match level="QueryCoverage=50%, HitCoverage=4%, E-value=5e-12, Identity=75%"; Hit description =Putative uncharacterized protein
  Pfam annotation: Domain name=LRRNT_2; Domain location=15-55; Score =12.2; E_value=0.047; Accession=PF08263.3; Description=Leucine rich repeat N-terminal domain
RRPRCGGSSVVGSGGIGDGEAXMSVKAGFGNAANTLVDWDGGRDHCAWXGVVACDTXSFAVLRLMWRLLTKEDLQAFDDMLSKMKSTAS

SEQ ID NO: 7488 - protein, 142 aa, Glycine max
  misc_feature (40)..(40): Xaa can be any naturally occurring amino acid
  misc_feature (60)..(60): Xaa can be any naturally occurring amino acid
  Coding DNA Sequence Number=SeqID_4444
LNCYIASAHNHLLIYMYLFARVCSGCHLIRLSTYIYTSIXYSMFSICFDVCVPHGATRRXLCSHASSHIMCTLYYHISSLSTSFIFISMLYNRLHYVLHTMHTSDCSQLLLCCSLSTRLTVRSDHNIQHIYLTMDSYGIIIV

SEQ ID NO: 7489 - protein, 92 aa, Glycine max
  misc_feature (53)..(53): Xaa can be any naturally occurring amino acid
  Coding DNA Sequence Number=SeqID_4446
VDSRVSSAATSRDVARGPAMCIFEYFVSEGEVVLLSDYPVALSYILHIYLSAXSWRRSATEGRCAYLYWLCDSLYIILTRIRLRLHPISIHT

SEQ ID NO: 7490 - protein, 174 aa, Glycine max; identical to SEQ ID NO: 6375
  misc_feature (3)..(3): Xaa can be any naturally occurring amino acid
  misc_feature (20)..(20): Xaa can be any naturally occurring amino acid
  misc_feature (24)..(24): Xaa can be any naturally occurring amino acid
  misc_feature (40)..(40): Xaa can be any naturally occurring amino acid
  misc_feature (67)..(67): Xaa can be any naturally occurring amino acid
  misc_feature (83)..(83): Xaa can be any naturally occurring amino acid
  misc_feature (87)..(87): Xaa can be any naturally occurring amino acid
  misc_feature (95)..(95): Xaa can be any naturally occurring amino acid
  misc_feature (99)..(99): Xaa can be any naturally occurring amino acid
  misc_feature (110)..(110): Xaa can be any naturally occurring amino acid
  misc_feature (116)..(117): Xaa can be any naturally occurring amino acid
  misc_feature (124)..(124): Xaa can be any naturally occurring amino acid
  misc_feature (133)..(133): Xaa can be any naturally occurring amino acid
  misc_feature (139)..(139): Xaa can be any naturally occurring amino acid
  misc_feature (141)..(141): Xaa can be any naturally occurring amino acid
  misc_feature (144)..(146): Xaa can be any naturally occurring amino acid
  misc_feature (152)..(152): Xaa can be any naturally occurring amino acid
  misc_feature (154)..(154): Xaa can be any naturally occurring amino acid
  misc_feature (160)..(162): Xaa can be any naturally occurring amino acid
  misc_feature (170)..(170): Xaa can be any naturally occurring amino acid
  Coding DNA Sequence Number=SeqID_4448

SEQ ID NO: 7491 - protein, 91 aa, Glycine max
  Coding DNA Sequence Number=SeqID_4450
  Gene Ontology: Mol. function=oxidoreductase activity; Cellular component=mitochondrial matrix; Biological process=metabolic process
  Homolog annotation: Hit_ID=Q8RVW2; Match level="QueryCoverage=100%, HitCoverage=39%, E-value=6e-19, Identity=51%"; Hit description =Aldehyde dehydrogenase
GRCFCACCPTFDHEMVYDESDVKAVARAGERVVGDPFNGGIEQGPYTDSNHLVKMTAVIRSGVVSVATLETGGYKLAYIDCYLRPTVFSDV

SEQ ID NO: 7492 - protein, 112 aa, Glycine max
  misc_feature (40)..(40): Xaa can be any naturally occurring amino acid
  Coding DNA Sequence Number=SeqID_4451
  Gene Ontology: Mol. function=oxidoreductase activity; Biological process=ethylene biosynthetic process
  Homolog annotation: Hit_ID=Q2VJ13; Match level="QueryCoverage=99%, HitCoverage=36%, E-value=2e-29, Identity=54%"; Hit description=ACC oxidase
LWGFFHLLNPGIPHDIFDAVKRLTCHRYRTCVENRFTELXSNDGLDAVPTDVHDMDCYTTFHLTDLPESNVSDIPDLIDEHWNAMKDLAVKTDILSDPLLDLFSENPDLDTG

SEQ ID NO: 7493 - protein, 163 aa, Glycine max
  misc_feature (10)..(10): Xaa can be any naturally occurring amino acid
  misc_feature (57)..(57): Xaa can be any naturally occurring amino acid
  Coding DNA Sequence Number=SeqID_4452
LMIDIYPVSXSTHELFMFRVDYVNHMTTRAHLTRCARARTSVYSRRICDGGRVIAAXRHTILLSPYIVKTQCTATEYRLTSARATLRLLRIRVYVAAQTSGHHHGVSWRTMIQDVSIATSEERMKFISSHRRNQMCHYTTSCTDQTPVLVVSTSPHHPCILMS

SEQ ID NO: 7494 - protein, 142 aa, Glycine max
  misc_feature (11)..(11): Xaa can be any naturally occurring amino acid
  misc_feature (72)..(72): Xaa can be any naturally occurring amino acid
  misc_feature (102)..(102): Xaa can be any naturally occurring amino acid
  Coding DNA Sequence Number=SeqID_4453
  Gene Ontology: Mol. function=ATP-dependent helicase activity; Cellular component=cellulose and pectin-containing cell wall; Biological process=translation
  Homolog annotation: Hit_ID=Q8VWS9; Match level="QueryCoverage=100%, HitCoverage=85%, E-value=5e-50, Identity=72%"; Hit description =Putative DEAD/DEAH box helicase
MDGLAPEGSQXDARQYDSKMSDLLSSDGQDFFTCYDEDYDSFDAMGSQENLRQGIYAYGFEKPSASRERAIXSPFCKGLDVIQQDQPVTAKTATFGSGILQXLDYSSTQCTHLYVAPDRELAQHIEKVMRALADDLGVNAHA

SEQ ID NO: 7495 - protein, 153 aa, Glycine max
  Coding DNA Sequence Number=SeqID_4454
  Subcellular localization annotation: CTP_CleavageSite=54; ConfidenceScore=5.42e-01
PAQAPQHAARRRLAGGGRYAGVCGRGRWPGSGRRRVPRGGGLRAPASPPRPAPRRGARGGGRGWGRGVFAPSALFFTSEDTPEGRSVACNGSKGATSLMPIVATSLQHWSSPSLDPRSFSCSCSFLFLNSITEQEFRSRYDMIHAIIYICRVN

SEQ ID NO: 7496 - protein, 158 aa, Glycine max; identical to SEQ ID NO: 6382
  misc_feature (5)..(6): Xaa can be any naturally occurring amino acid
  misc_feature (9)..(9): Xaa can be any naturally occurring amino acid
  misc_feature (31)..(31): Xaa can be any naturally occurring amino acid
  misc_feature (46)..(46): Xaa can be any naturally occurring amino acid
  misc_feature (56)..(56): Xaa can be any naturally occurring amino acid
  misc_feature (66)..(66): Xaa can be any naturally occurring amino acid
  misc_feature (75)..(75): Xaa can be any naturally occurring amino acid
  misc_feature (77)..(77): Xaa can be any naturally occurring amino acid
  misc_feature (80)..(80): Xaa can be any naturally occurring amino acid
  misc_feature (110)..(111): Xaa can be any naturally occurring amino acid
  misc_feature (115)..(115): Xaa can be any naturally occurring amino acid
  misc_feature (123)..(123): Xaa can be any naturally occurring amino acid
  misc_feature (125)..(125): Xaa can be any naturally occurring amino acid
  misc_feature (129)..(129): Xaa can be any naturally occurring amino acid
  misc_feature (134)..(134): Xaa can be any naturally occurring amino acid
  misc_feature (139)..(140): Xaa can be any naturally occurring amino acid
  misc_feature (147)..(150): Xaa can be any naturally occurring amino acid
  misc_feature (152)..(152): Xaa can be any naturally occurring amino acid
  Coding DNA Sequence Number=SeqID_4456

SEQ ID NO: 7497 - protein, 100 aa, Glycine max
  misc_feature (1)..(1): Xaa can be any naturally occurring amino acid
  misc_feature (3)..(3): Xaa can be any naturally occurring amino acid
  misc_feature (8)..(8): Xaa can be any naturally occurring amino acid
  misc_feature (11)..(11): Xaa can be any naturally occurring amino acid
  misc_feature (19)..(19): Xaa can be any naturally occurring amino acid
  misc_feature (30)..(37): Xaa can be any naturally occurring amino acid
  misc_feature (40)..(40): Xaa can be any naturally occurring amino acid
  misc_feature (42)..(42): Xaa can be any naturally occurring amino acid
  misc_feature (94)..(94): Xaa can be any naturally occurring amino acid
  Coding DNA Sequence Number=SeqID_4458
XLXLPHSXTPXPHTAQHRXAYACRTQRRIXXXXXXXXWRXVXRDCTCPHLVVVPNTRQRAVLRAGIHDTSLSYTRIARRREEDSKYILLNDNKXTDIIID

SEQ ID NO: 7498 - protein, 127 aa, Glycine max
  misc_feature (106)..(106): Xaa can be any naturally occurring amino acid
  Coding DNA Sequence Number=SeqID_4460
  Gene Ontology: Cellular component=extracellular region; Biological process=cellulose and pectin-containing cell wall organization and biogenesis
  Homolog annotation: Hit_ID=Q6J4U6; Match level="QueryCoverage=88%, HitCoverage=43%, E-value=3e-29, Identity=53%"; Hit description =Expansin 1
MRHEENNGCANNVLCIAFIITLTWAVEARIPGIYSGGAWQSAHTTFYRGSNTSSTIGGACRYRNLYSQGYSINTTTLSTALFNNKLNYDTYWKINCAGEKRSTTPXSAAIFMTAANFARPTVVLLTT

SEQ ID NO: 7499 - protein, 82 aa, Glycine max; identical to SEQ ID NO: 7426
  misc_feature (3)..(3): Xaa can be any naturally occurring amino acid
  misc_feature (8)..(8): Xaa can be any naturally occurring amino acid
  misc_feature (13)..(13): Xaa can be any naturally occurring amino acid
  misc_feature (18)..(18): Xaa can be any naturally occurring amino acid
  misc_feature (27)..(27): Xaa can be any naturally occurring amino acid
  misc_feature (36)..(36): Xaa can be any naturally occurring amino acid
  misc_feature (42)..(42): Xaa can be any naturally occurring amino acid
  misc_feature (45)..(45): Xaa can be any naturally occurring amino acid
  Coding DNA Sequence Number=SeqID_4461
  Coding DNA Sequence Number=SeqID_4461
  Gene Ontology: Mol. function=catalytic activity; Cellular component =nucleus; Biological process=DNA repair
  Homolog annotation: Hit_ID=A7PRG5; Match level="QueryCoverage=78%, HitCoverage=17%, E-value=8e-10, Identity=64%"; Hit description =Chromosome chr14 scaffold_27, whole genome shotgun sequence

SEQ ID NO: 7500 - protein, 127 aa, Glycine max
  Coding DNA Sequence Number=SeqID_4462
  Subcellular localization annotation: CTP_CleavageSite=58; ConfidenceScore=5.93e-01
GGMGSPPTGGSGSSGTVTGGTGSFGTVTGGTGSLGTVTGGTGSFGTVTGGTGSLGTVTGGTGSLGTVTGGTGSLGTVTGGLMEGFPPFLWLQEPHEKDCWGKKIMQMRMKQRERDESLDDSMLRRVD

SEQ ID NO: 7501 - protein, 169 aa, Glycine max
  Coding DNA Sequence Number=SeqID_4464
  Gene Ontology: Mol. function=hydroxymethylbilane synthase activity; Cellular component=chloroplast; Biological process=tetrapyrrole biosynthetic process
  Homolog annotation: Hit_ID=Q43082; Match level="QueryCoverage=69%, HitCoverage=31%, E-value=4e-30, Identity=62%"; Hit description =Porphobilinogen deaminase, chloroplast precursor
  Pfam annotation: Domain name=Porphobil_deam; Domain location=31-169; Score=-133.6; E_value=0.0076; Accession=PF01379.11; Description =Porphobilinogen deaminase, dipyromethane cofactor binding domain
RIRTAAGAKCGIRASIAGEQQTSQTKAARRRSGTRGRPPALAQAYETRDKPMASHAEPAEEGATQNARRKTTGDKRRAQPHADTGGKGLFTKEKDEARINGEQDNAGHATKEGATHPPEKTMPPRNPPTRRTEETAGKTGAEEAPGGPPAGNTAATATTDRQGTQHAQR

SEQ ID NO: 7502 - protein, 86 aa, Glycine max
  Coding DNA Sequence Number=SeqID_4465
REILMQNLFIAVANSPCGAIRGVGQLYGKGQTGGGVLFLNYEQPGGKGEFFFKRDFSWVTTWFSPVAKVLNRAGSRRFVIRILIRP

SEQ ID NO: 7503 - protein, 77 aa, Glycine max; identical to SEQ ID NO: 6187
  misc_feature (39)..(40): Xaa can be any naturally occurring amino acid
  Coding DNA Sequence Number=SeqID_4467

SEQ ID NO: 7504 - protein, 183 aa, Glycine max
  Coding DNA Sequence Number=SeqID_4469
LARRDPCPRRSFASCVHITNVPPPTILVWDPSPTKINLTWPSTPNQTISSGWKRCQLDNRTFVRAPQPPKQTQFRHFLTHLCMRRAFQEGTSSPPSVRSSYDRAVYRRSLGPCPRRCRTARSSHRLARHLPPFTTPESFAPANSRLASIVILPLPYLMRSTEYVRGKILPAARTFYEIGMLLR

SEQ ID NO: 7505 - protein, 255 aa, Glycine max; identical to SEQ ID NO: 6189
  misc_feature (19)..(19): Xaa can be any naturally occurring amino acid
  misc_feature (56)..(56): Xaa can be any naturally occurring amino acid
  misc_feature (78)..(78): Xaa can be any naturally occurring amino acid
  misc_feature (83)..(83): Xaa can be any naturally occurring amino acid
  misc_feature (86)..(86): Xaa can be any naturally occurring amino acid
  misc_feature (97)..(97): Xaa can be any naturally occurring amino acid
  misc_feature (103)..(103): Xaa can be any naturally occurring amino acid
  misc_feature (110)..(110): Xaa can be any naturally occurring amino acid
  misc_feature (130)..(130): Xaa can be any naturally occurring amino acid
  misc_feature (139)..(139): Xaa can be any naturally occurring amino acid
  misc_feature (200)..(200): Xaa can be any naturally occurring amino acid
  misc_feature (224)..(224): Xaa can be any naturally occurring amino acid
  misc_feature (230)..(230): Xaa can be any naturally occurring amino acid
  misc_feature (232)..(232): Xaa can be any naturally occurring amino acid
  misc_feature (242)..(242): Xaa can be any naturally occurring amino acid
  misc_feature (244)..(244): Xaa can be any naturally occurring amino acid
  Coding DNA Sequence Number=SeqID_4471

SEQ ID NO: 7506 - protein, 150 aa, Glycine max
  misc_feature (13)..(13): Xaa can be any naturally occurring amino acid
  misc_feature (35)..(35): Xaa can be any naturally occurring amino acid
  misc_feature (41)..(41): Xaa can be any naturally occurring amino acid
  misc_feature (48)..(48): Xaa can be any naturally occurring amino acid
  misc_feature (64)..(65): Xaa can be any naturally occurring amino acid
  misc_feature (103)..(103): Xaa can be any naturally occurring amino acid
  misc_feature (114)..(114): Xaa can be any naturally occurring amino acid
  Coding DNA Sequence Number=SeqID_4473
RVSSTLSINIAPXSRSSQSQYRIRGIHPDSDTFLXLFLHIXLLLVILXPHVSRVMVYIYHTVSXXPPIHITPTQYHNRSPRRQLSALLLLSDSHHHSLFFSCXHFSVSTVIGHXPCEWRRIARRLLISLDDLRDLYIINISSHTHRYYQQ

SEQ ID NO: 7507 - protein, 126 aa, Glycine max
  misc_feature (23)..(23): Xaa can be any naturally occurring amino acid
  Coding DNA Sequence Number=SeqID_4475
  Gene Ontology: Mol. function=inorganic diphosphatase activity; Cellular component=cytoplasm; Biological process=phosphate metabolic process
  Homolog annotation: Hit_ID=Q2HTA8; Match level="QueryCoverage=95%, HitCoverage=54%, E-value=1e-57, Identity=90%"; Hit description =Inorganic pyrophosphatase
  Pfam annotation: Domain name=Pyrophosphatase; Domain location=52-126; Score=-9.3; E_value=3.2e-07; Accession=PF00719.9; Description =Inorganic pyrophosphatase
FLPFRFQKMSEEQQRPAPRLNEXILSSLSRRSVAAHPWHDLEIGPGAPQIFNVVVEITKGSKVKYELDKKTGLIKVDRILYSSVVYPHNYGFVPRTLCEDNDPIDVLVIMQEPVLPGCFLRARAIG

SEQ ID NO: 7508 - protein, 115 aa, Glycine max
  misc_feature (82)..(82): Xaa can be any naturally occurring amino acid
  Coding DNA Sequence Number=SeqID_4476
KRRGCLKNPPPCVAPAFGGCRPSRGGPFRGKLIFEREPHWPTVPIQTTHEGNCNQGLLHFACPNCPLEGLHLLAIKENEQIXSNRCTRKGNGSWFSLRPYRVSGSTFRPSKGCLA

SEQ ID NO: 7509 - protein, 124 aa, Glycine max
  misc_feature (99)..(99): Xaa can be any naturally occurring amino acid
  Coding DNA Sequence Number=SeqID_4477
GGAAHTWRARWGSYKTGGRIHKSVDSYGRGEKSCEFDNRGRLASSVSTLCLGVPIHNACVVSRTILLIRIGCFIKGVLDGRRRIFYRLHTCTLIWIIIXSFTYLSHSLFQPLGSHRTSRTHLHG

SEQ ID NO: 7510 - protein, 61 aa, Glycine max
  Coding DNA Sequence Number=SeqID_4479
LTIFGAQILKFCSIINVLCLYDIERHTNKGTTYRRKISVNVNSLFIVVLVFYTYYCRRGQG

SEQ ID NO: 7511 - protein, 145 aa, Glycine max
  misc_feature (4)..(4): Xaa can be any naturally occurring amino acid
  misc_feature (88)..(88): Xaa can be any naturally occurring amino acid
  misc_feature (132)..(132): Xaa can be any naturally occurring amino acid
  Coding DNA Sequence Number=SeqID_4481
  Subcellular localization annotation: CTP_CleavageSite=43; ConfidenceScore=5.03e-01
NRSXDNKHITPHIRASHVSALPTARTYSFSLLHTCTLPPYSCVFVYLSAAFWLCLHIFSLHRTETYVTMRYARHSYYITSRKNNKLTXSVHYMRAHQPLAPISHTHSWSSVFLLIHVSVVYCCAYSLFASVXTRRDVRACVYESD

SEQ ID NO: 7512 - protein, 121 aa, Glycine max
  misc_feature (1)..(2): Xaa can be any naturally occurring amino acid
  misc_feature (7)..(7): Xaa can be any naturally occurring amino acid
  misc_feature (42)..(42): Xaa can be any naturally occurring amino acid
  misc_feature (75)..(76): Xaa can be any naturally occurring amino acid
  misc_feature (81)..(81): Xaa can be any naturally occurring amino acid
  misc_feature (86)..(86): Xaa can be any naturally occurring amino acid
  Coding DNA Sequence Number=SeqID_1459
XXDRIKXGWPIPHFVESPFPALLVGKENQEEKDSIPNLQNYXGKALKSKKYFGSKGQVSLGRFHPWAPHGWVNQXXFFLFXKGAPXRWRFFCKPPPKNIFWENPPPIFFPTRFFSGGGRQL

SEQ ID NO: 7513 - protein, 161 aa, Glycine max
  misc_feature (39)..(39): Xaa can be any naturally occurring amino acid
  misc_feature (154)..(154): Xaa can be any naturally occurring amino acid
  Coding DNA Sequence Number=SeqID_1461
YLISFTTHPHSTLLTHPLTLSSRYIIYTHMHKTIYVSLXLHPHTVLLRYSLTRSPCLLSEPISIHLLSLSYVDTTSLHTSLRQLCAVSKTIHLSHPAYITYIILLLSYWSVVSILYICYDYCLSGALNTILARLHPTHTPDNDISMYMHSLLVXYGGRGVC

SEQ ID NO: 7514 - protein, 302 aa, Glycine max; identical to SEQ ID NO: 6684
  misc_feature (96)..(96): Xaa can be any naturally occurring amino acid
  misc_feature (111)..(111): Xaa can be any naturally occurring amino acid
  misc_feature (137)..(137): Xaa can be any naturally occurring amino acid
  misc_feature (165)..(165): Xaa can be any naturally occurring amino acid
  misc_feature (196)..(197): Xaa can be any naturally occurring amino acid
  misc_feature (285)..(285): Xaa can be any naturally occurring amino acid
  misc_feature (292)..(292): Xaa can be any naturally occurring amino acid
  Coding DNA Sequence Number=SeqID_1463

SEQ ID NO: 7515 - protein, 58 aa, Glycine max
  Coding DNA Sequence Number=SeqID_1465
YKRKGKLCRLYSCTAIVSDDFVKGACNYYALFSSLGSVQVQLVVSSHCDTPRKKKKKK

SEQ ID NO: 7516 - protein, 196 aa, Glycine max
  misc_feature (33)..(33): Xaa can be any naturally occurring amino acid
  misc_feature (41)..(41): Xaa can be any naturally occurring amino acid
  misc_feature (100)..(100): Xaa can be any naturally occurring amino acid
  misc_feature (146)..(146): Xaa can be any naturally occurring amino acid
  Coding DNA Sequence Number=SeqID_1467
  Gene Ontology: Mol. function=calcium ion binding; Cellular component =oxygen evolving complex; Biological process=photosynthesis
  Homolog annotation: Hit_ID=A9PFR3; Match level="QueryCoverage=99%, HitCoverage=84%, E-value=2e-22, Identity=37%"; Hit description =Putative uncharacterized protein
  Pfam annotation: Domain name=PsbQ; Domain location=34-195; Score =32.4; E_value=1.9e-07; Accession=PF05757.2; Description=Oxygen evolving enhancer protein 3 (PsbQ)
  Subcellular localization annotation: CTP_CleavageSite=69; ConfidenceScore=5.28e-01
MAQAMASMTSLRGSSQAVLEGSLGSTRWNGGGXRGVGSVTXTGLTGGAHQQQVNGGEVQTSRRALLSLVAAGGAGGSFVQTLLSDAKPIKVGPPPPPSGXLPGTLNSDEPRHLQLSLIDTFFLRPLSATDSPQCARGVSQELVGVXKLIEPEAWPCGADGLRLKDKYLRWDLDSWLSCGGWDADRVTRGAASRLFP

SEQ ID NO: 7517 - protein, 71 aa, Glycine max
  misc_feature (24)..(24): Xaa can be any naturally occurring amino acid
  Coding DNA Sequence Number=SeqID_1468
  Gene Ontology: Mol. function=symporter activity; Cellular component =integral to membrane; Biological process=auxin mediated signaling pathway
  Homolog annotation: Hit_ID=Q8H0E1; Match level="QueryCoverage=98%, HitCoverage=14%, E-value=2e-09, Identity=47%"; Hit description=AUX1 -like auxin transport protein
  Subcellular localization annotation: CTP_CleavageSite=58; ConfidenceScore=5.12e-01
KKGKCRAILVRSPVAIPIWFSPIXFPLSLGTVSKSCTAYLVRFAVRIIPGSAHRLTYRSASPRNECPKSVP

SEQ ID NO: 7518 - protein, 183 aa, Glycine max; identical to SEQ ID NO: 6687
  misc_feature (3)..(3): Xaa can be any naturally occurring amino acid
  misc_feature (18)..(18): Xaa can be any naturally occurring amino acid
  misc_feature (36)..(36): Xaa can be any naturally occurring amino acid
  misc_feature (43)..(43): Xaa can be any naturally occurring amino acid
  misc_feature (52)..(52): Xaa can be any naturally occurring amino acid
  misc_feature (55)..(55): Xaa can be any naturally occurring amino acid
  misc_feature (57)..(58): Xaa can be any naturally occurring amino acid
  misc_feature (61)..(63): Xaa can be any naturally occurring amino acid
  misc_feature (65)..(65): Xaa can be any naturally occurring amino acid
  misc_feature (76)..(77): Xaa can be any naturally occurring amino acid
  misc_feature (79)..(79): Xaa can be any naturally occurring amino acid
  misc_feature (97)..(97): Xaa can be any naturally occurring amino acid
  misc_feature (112)..(112): Xaa can be any naturally occurring amino acid
  misc_feature (126)..(126): Xaa can be any naturally occurring amino acid
  misc_feature (138)..(138): Xaa can be any naturally occurring amino acid
  misc_feature (157)..(157): Xaa can be any naturally occurring amino acid
  misc_feature (159)..(159): Xaa can be any naturally occurring amino acid
  misc_feature (166)..(166): Xaa can be any naturally occurring amino acid
  misc_feature (168)..(168): Xaa can be any naturally occurring amino acid
  misc_feature (171)..(172): Xaa can be any naturally occurring amino acid
  misc_feature (180)..(180): Xaa can be any naturally occurring amino acid
  Coding DNA Sequence Number=SeqID_1469

SEQ ID NO: 7519 - protein, 117 aa, Glycine max
  Coding DNA Sequence Number=SeqID_1471
GLSVYCLYSEMTKKHIQGDARVAVTTSAAATQTEKATVKAKAAYQPNLPSATGVHGGGDAGGRGRGGLAFGGGGAFTGTLCPRDLAPLAAVLRPPWAPSAANGTALHTLATPLVPTV

SEQ ID NO: 7520 - protein, 81 aa, Glycine max
  Coding DNA Sequence Number=SeqID_4483
RRPKRIRMKDHSRACDAIPVLFSSDSSYAPKDEPAHIYSYLHGNVMSTYDNIRDLVFLTLFAVAIILIGHHTLSARARRAH

SEQ ID NO: 7521 - protein, 105 aa, Glycine max
  misc_feature (59)..(59): Xaa can be any naturally occurring amino acid
  misc_feature (81)..(81): Xaa can be any naturally occurring amino acid
  Coding DNA Sequence Number=SeqID_4485
  Gene Ontology: Mol. function=phosphoric monoester hydrolase activity; Cellular component=chromosome, pericentric region
  Homolog annotation: Hit_ID=A7QQJ7; Match level="QueryCoverage=97%, HitCoverage=21%, E-value=2e-31, Identity=60%"; Hit description =Chromosome undetermined scaffold_143, whole genome shotgun sequence
KNLPELSEIEVNGQPALIPKQSPRRRSMAVVLDLDETLVHSTLEPCDDADFTFTGFFNXKEYTLYGEQRPYLHTFLKKVSXMLEVGMFTTSQIICAEQLLDIWER

SEQ ID NO: 7522 - protein, 140 aa, Glycine max; identical to SEQ ID NO: 6404
  misc_feature (1)..(1): Xaa can be any naturally occurring amino acid
  misc_feature (4)..(4): Xaa can be any naturally occurring amino acid
  misc_feature (8)..(8): Xaa can be any naturally occurring amino acid
  misc_feature (30)..(32): Xaa can be any naturally occurring amino acid
  misc_feature (117)..(117): Xaa can be any naturally occurring amino acid
  misc_feature (120)..(120): Xaa can be any naturally occurring amino acid
  misc_feature (128)..(128): Xaa can be any naturally occurring amino acid
  Coding DNA Sequence Number=SeqID_4486

SEQ ID NO: 7523 - protein, 151 aa, Glycine max
  Coding DNA Sequence Number=SeqID_4488
  Gene Ontology: Mol. function=peptidyl-prolyl cis-trans isomerase activity; Cellular component=cytoplasm; Biological process=protein folding
  Homolog annotation: Hit_ID=Q9SKQ0; Match level="QueryCoverage=98%, HitCoverage=85%, E-value=2e-69, Identity=85%"; Hit description =Peptidyl-prolyl cis-trans isomerase CYP19-2
  Pfam annotation: Domain name=Pro_isomerase; Domain location=5-151; Score=364.9; E_value=1.4e-106; Accession=PF00160.11; Description =Cyclophilin type peptidyl-prolyl cis-tr
MAFPKVFFDMTVDGKPAGRIVMELYTDKTPKTAENFRALCTGEKGVGSKGKPLHFKGSSFHRVIPNFMCQGGDFTAGNGTGGESIYGEKFADENFERKHTGPGILSMANAGPNTNGSQFFICTVKTDWLDGKHVVFGQVVEGLDVVKAIEK

SEQ ID NO: 7524 - protein, 90 aa, Glycine max
  Coding DNA Sequence Number=SeqID_4489
  Homolog annotation: Hit_ID=Q9FEF9; Match level="QueryCoverage=100%, HitCoverage=100%, E-value=9e-38, Identity=83%"; Hit description =Putative uncharacterized protein At2g20820
MASFARRAMSLAQIPSARAPASVCQRRGLAGAADHHGSTKVDFWKQPTNPGNWKEEHFVLISLSGWGMLFYGGYKLFTGGKGEKPVEAAQ

SEQ ID NO: 7525 - protein, 149 aa, Glycine max
  misc_feature (1)..(1): Xaa can be any naturally occurring amino acid
  misc_feature (12)..(13): Xaa can be any naturally occurring amino acid
  misc_feature (19)..(20): Xaa can be any naturally occurring amino acid
  misc_feature (22)..(23): Xaa can be any naturally occurring amino acid
  misc_feature (25)..(26): Xaa can be any naturally occurring amino acid
  misc_feature (30)..(30): Xaa can be any naturally occurring amino acid
  misc_feature (33)..(34): Xaa can be any naturally occurring amino acid
  misc_feature (37)..(37): Xaa can be any naturally occurring amino acid
  misc_feature (41)..(41): Xaa can be any naturally occurring amino acid
  misc_feature (49)..(49): Xaa can be any naturally occurring amino acid
  misc_feature (55)..(55): Xaa can be any naturally occurring amino acid
  misc_feature (58)..(58): Xaa can be any naturally occurring amino acid
  misc_feature (63)..(63): Xaa can be any naturally occurring amino acid
  misc_feature (69)..(70): Xaa can be any naturally occurring amino acid
  misc_feature (72)..(72): Xaa can be any naturally occurring amino acid
  misc_feature (79)..(80): Xaa can be any naturally occurring amino acid
  misc_feature (84)..(84): Xaa can be any naturally occurring amino acid
  misc_feature (87)..(87): Xaa can be any naturally occurring amino acid
  misc_feature (89)..(89): Xaa can be any naturally occurring amino acid
  misc_feature (95)..(95): Xaa can be any naturally occurring amino acid
  misc_feature (98)..(98): Xaa can be any naturally occurring amino acid
  misc_feature (101)..(101): Xaa can be any naturally occurring amino acid
  misc_feature (110)..(110): Xaa can be any naturally occurring amino acid
  misc_feature (113)..(113): Xaa can be any naturally occurring amino acid
  misc_feature (116)..(116): Xaa can be any naturally occurring amino acid
  misc_feature (120)..(120): Xaa can be any naturally occurring amino acid
  misc_feature (122)..(122): Xaa can be any naturally occurring amino acid
  misc_feature (128)..(128): Xaa can be any naturally occurring amino acid
  misc_feature (131)..(131): Xaa can be any naturally occurring amino acid
  misc_feature (133)..(133): Xaa can be any naturally occurring amino acid
  misc_feature (135)..(135): Xaa can be any naturally occurring amino acid
  misc_feature (137)..(139): Xaa can be any naturally occurring amino acid
  misc_feature (143)..(143): Xaa can be any naturally occurring amino acid
  misc_feature (146)..(146): Xaa can be any naturally occurring amino acid
  Coding DNA Sequence Number=SeqID_4490
XARNYEKIRHDXXYIDAHXXSXXYXXASMXATXXARXITPXVHRVSMRXSSTDKXTTXDDECXADQVAXXTXLRHPRHXXCASXRAXRXLIVDQXDRXCDXRQTSYRAYXTSXTHXRQPXTXTHITYXLVXTXLXCXXXVRTXRQXIYH

SEQ ID NO: 7526 - protein, 124 aa, Glycine max
  misc_feature (103)..(103): Xaa can be any naturally occurring amino acid
  Coding DNA Sequence Number=SeqID_4492
  Gene Ontology: Mol. function=catalytic activity; Cellular component =mitochondrial matrix; Biological process=metabolic process
  Homolog annotation: Hit_ID=Q2H5C3; Match level="QueryCoverage=79%, HitCoverage=25%, E-value=3e-45, Identity=88%"; Hit description =Putative uncharacterized protein
  Pfam annotation: Domain name=Transket_pyr; Domain location=3-123; Score=-0.5; E_value=2.7e-06; Accession=PF02779.14; Description =Transketolase, pyrimidine binding domain
MRSSAALIPDYFVTTMVLTNMSLQCEFMTFNFAMQAIDQVVNSAAKTLYMSGGIQPCNITFRGPNGFAAGVAAQHSQDYSAWYGSVPGLKVVSPWSAEDAKGXLKTAIRDPNPGVSSRGGPVPN

SEQ ID NO: 7527 - protein, 92 aa, Glycine max
  misc_feature (11)..(11): Xaa can be any naturally occurring amino acid
  misc_feature (17)..(17): Xaa can be any naturally occurring amino acid
  misc_feature (27)..(27): Xaa can be any naturally occurring amino acid
  misc_feature (56)..(56): Xaa can be any naturally occurring amino acid
  misc_feature (78)..(78): Xaa can be any naturally occurring amino acid
  Coding DNA Sequence Number=SeqID_4493
VIIFAATHKLXARDIYXKTLYIVVYQXIIRRAILQRISCNTNIVTAPCGRSGLSAXTNYLHRPVRPVLWTCAAYTYMXRSDNSVMLARTRAL

SEQ ID NO: 7528 - protein, 698 aa, Glycine max
  misc_feature (250)..(250): Xaa can be any naturally occurring amino acid
  Coding DNA Sequence Number=SeqID_4495
  Gene Ontology: Mol. function=hydrolase activity, acting on glycosyl bonds; Cellular component=beta-galactosidase complex; Biological process=carbohydrate metabolic process
  Homolog annotation: Hit_ID=B0FZE9; Match level="QueryCoverage=99%, HitCoverage=83%, E-value=0.0, Identity=78%"; Hit description=Beta -galactosidase
  Pfam annotation: Domain name=Gal_Lectin; Domain location=620-697; Score=144.9; E_value=2.2e-40; Accession=PF02140.8; Description =Galactose binding lectin domain
  Pfam annotation: Domain name=Glyco_hydro_35; Domain location=1-202; Score=197.5; E_value=3.3e-56; Accession=PF01301.10; Description =Glycosyl hydrolases family 35
  Pfam module annotation: Pfam domain module=Gal_Lectin::Glyco_hydro _35; Domain location=620-697::1-202
IAFRTDNEPFKAAMQKFTEKIVSIMKEEKLFQTQGGPIIMSQIENEYGPVEWEIGAPGKAYTKWFSQMAVGLDTGVPWIMCKQQDTPDPLIDTCNGYYCENFTPNKKYKPKMWTENWTGWYTEFGGAVPRRPAEDMAFSVARFVQNGGSFVNYYMYHGGTNFDRTSSGLFIATSYDYDGPIDEYGLLNEPKWGHLRDLHKAIKLCEPALVSVDPTVTWPGNNLEVHVFKTSGACAAFLANYDTKSSAAVXIGNGQYDLPPWSISILPDCQTAVFNTARLGAQSSLMKMTAVNSAFDWQSYNEEAASSNEDDSLTAYALWEQINVTRDSTDYLWYMTDVNIDANEGFIKNGQSPVLTVMSAGHALHVFINGQLSGTVYGGLDSHKLTFSDSVKLRVGNNKISLLSITVGLPNVGPYFETWNAGVLGPVTLKGLNEGTRDLSKQKWSYKIGLKGEALNLNTVSGSSSVEWVQGSLLTKKQPLTWYKTTFSTPAGNDPLALDMISMGKGQVWINGRSIGRHWPGYIARGNCGDCYYAGTYTDKKCRTNCGEPSQRWYHIPRSWLNPSGNYLVVFEEWGGDPTGITLVKRTTASVCADIYQGQPTLKNRQMLDSGKVVRPKAHLWCPPGKNISQIKFASYGLPQGTCGNFREGSCHAHKSYDAPQKNCIGKQSCLVTVAPEVFGGDPCPGIAKKLSLEALCG

SEQ ID NO: 7529 - protein, 189 aa, Glycine max
  misc_feature (27)..(27): Xaa can be any naturally occurring amino acid
  misc_feature (50)..(50): Xaa can be any naturally occurring amino acid
  Coding DNA Sequence Number=SeqID_4496
LRAAAGALCGRPLAINYICRRPRCPSXTRVRHVWALQWECWCLARYIHIXLQDGLRHGHLQDGPAYARATQCLHTPFRGETSMQDFLLMRVLSCYLLIHGASIPHRPCRAAVSPSHLIAALFLPSSSQHRLPIPMCGGNGKKKAKTQNIARGTGPASPPRLPACAGPTLSPTSPYHHPSPLHQQPTSKE

SEQ ID NO: 7530 - protein, 122 aa, Glycine max
  misc_feature (20)..(20): Xaa can be any naturally occurring amino acid
  misc_feature (24)..(24): Xaa can be any naturally occurring amino acid
  misc_feature (27)..(27): Xaa can be any naturally occurring amino acid
  misc_feature (69)..(69): Xaa can be any naturally occurring amino acid
  misc_feature (73)..(73): Xaa can be any naturally occurring amino acid
  Coding DNA Sequence Number=SeqID_4498
  Subcellular localization annotation: CTP_CleavageSite=37; ConfidenceScore=5.49e-01
SRTQSVCVGLATSDLACVAXGASXKSXNGITKQRRNRCSMKYSHSTSSIRGLPRGRHASYLNACARTRXDGGXTVMIIVLDIESYTKVYTLLDRCPTHIGHICHHHNRPTVIIYSVVHLCLM

SEQ ID NO: 7531 - protein, 134 aa, Glycine max; identical to SEQ ID NO: 6411
  misc_feature (9)..(9): Xaa can be any naturally occurring amino acid
  misc_feature (60)..(61): Xaa can be any naturally occurring amino acid
  misc_feature (63)..(64): Xaa can be any naturally occurring amino acid
  misc_feature (76)..(77): Xaa can be any naturally occurring amino acid
  misc_feature (91)..(91): Xaa can be any naturally occurring amino acid
  misc_feature (104)..(116): Xaa can be any naturally occurring amino acid
  misc_feature (118)..(119): Xaa can be any naturally occurring amino acid
  misc_feature (121)..(127): Xaa can be any naturally occurring amino acid
  Coding DNA Sequence Number=SeqID_4500

SEQ ID NO: 7532 - protein, 171 aa, Glycine max
  misc_feature (46)..(46): Xaa can be any naturally occurring amino acid
  Coding DNA Sequence Number=SeqID_4501
  Homolog annotation: Hit_ID=A7R299; Match level="QueryCoverage=69%, HitCoverage=16%, E-value=3e-34, Identity=61%"; Hit description =Chromosome undetermined scaffold_410, whole genome shotgun sequence
FCNFLNDLCVNLNLLDKACELLDLGLPLEIYTDKQSKSQTQWSLHXKSLSLGASLAALHVWINDLSKTLESGEDLPPLLGIKPGHGKHRYSDKGLANVVKSHLKELNAPSHKAPKKVGWFLPPQVPPKSGLEFRKLVPAKFLISRVLRKAPTFFPIKKVIPGNNIPPSFFA

SEQ ID NO: 7533 - protein, 121 aa, Glycine max
  misc_feature (35)..(35): Xaa can be any naturally occurring amino acid
  misc_feature (71)..(71): Xaa can be any naturally occurring amino acid
  misc_feature (74)..(74): Xaa can be any naturally occurring amino acid
  Coding DNA Sequence Number=SeqID_4502
RACHMHIFYYDILHTPISPLALYIPSSPLSASTFXLACHFSVVAIIHSHSQVSAHLRLPYRARVCSHTTTXVLXICFCNQCLSISVARYSTINRPPSQYRRPTAASLTSKQAVRRRSLRVM

SEQ ID NO: 7534 - protein, 200 aa, Glycine max
  misc_feature (3)..(14): Xaa can be any naturally occurring amino acid
  misc_feature (18)..(18): Xaa can be any naturally occurring amino acid
  misc_feature (22)..(24): Xaa can be any naturally occurring amino acid
  misc_feature (31)..(32): Xaa can be any naturally occurring amino acid
  misc_feature (34)..(34): Xaa can be any naturally occurring amino acid
  misc_feature (40)..(40): Xaa can be any naturally occurring amino acid
  misc_feature (44)..(44): Xaa can be any naturally occurring amino acid
  misc_feature (55)..(55): Xaa can be any naturally occurring amino acid
  misc_feature (84)..(84): Xaa can be any naturally occurring amino acid
  misc_feature (98)..(98): Xaa can be any naturally occurring amino acid
  misc_feature (147)..(147): Xaa can be any naturally occurring amino acid
  Coding DNA Sequence Number=SeqID_4504
FFXXXXXXXXXXXXSTPXIITXXXIKFGCCXXPXGARDNXISSXNTILYLSTLYXSLSHLTFVTLHHPPQENREGGMLIIFIPXILLSPLSYISPFYXYILVSLIYTSNVYLSLSSLLPSFIQIICLKKVNDICSCPKHQSRVLAYXFFFSSLGCFFFPSPPPSRNERGGVGVSLSPLSSEICLLPSLLLDLHMQYFSLL

SEQ ID NO: 7535 - protein, 163 aa, Glycine max
  misc_feature (3)..(3): Xaa can be any naturally occurring amino acid
  misc_feature (12)..(12): Xaa can be any naturally occurring amino acid
  misc_feature (32)..(32): Xaa can be any naturally occurring amino acid
  misc_feature (120)..(120): Xaa can be any naturally occurring amino acid
  misc_feature (146)..(149): Xaa can be any naturally occurring amino acid
  misc_feature (162)..(162): Xaa can be any naturally occurring amino acid
  Coding DNA Sequence Number=SeqID_4506
  Subcellular localization annotation: CTP_CleavageSite=74; ConfidenceScore=5.01e-01
LVXIVRSQAARXCGAAPHHTSPVISAHDICPXGAARALSRGRAPVRASPQLLRLRCRPGRHTREEGTNQIPGPRGMRQRVQHHTQKVQRRHSFTLHAPARTGKPQPSKACSPPLLTLHPXPKRSGAQLALCTTPYRHPRSAPRGGXXXXLWAITPLTISQYXN

SEQ ID NO: 7536 - protein, 143 aa, Glycine max
  misc_feature (6)..(7): Xaa can be any naturally occurring amino acid
  misc_feature (118)..(118): Xaa can be any naturally occurring amino acid
  misc_feature (124)..(124): Xaa can be any naturally occurring amino acid
  Coding DNA Sequence Number=SeqID_4508
TRRFFXXGVFFYRGPPPPPPIKGPLCSLFQKETSLKNLPPREGFKKGKPPPKGAATKKNSPFGEFVPIGLKPKYFFGWERPFFCPVVGFGKIGPWSGVNPDIPLFSYIKECLVAVGFXLQKEYXQDRHWRTLPAGYQTAAAPE

SEQ ID NO: 7537 - protein, 167 aa, Glycine max
  misc_feature (141)..(141): Xaa can be any naturally occurring amino acid
  Coding DNA Sequence Number=SeqID_4509
EFIMIYTIMLVLSYGLQHLFNHSTSFISLDRLLRTMSMCGVAKNICFRVLFIVYYICMYVMREYITIRLVRALVGCAHRRATTCGLAWWMWPTSLNWCRLIEIQERCVVVGGNDGRTVWLWEHVCFVVRASRGRFFVHVIXFNYYIFVIIYHVCTHLFQLVVIKNTK

SEQ ID NO: 7538 - protein, 124 aa, Glycine max
  misc_feature (40)..(40): Xaa can be any naturally occurring amino acid
  misc_feature (46)..(47): Xaa can be any naturally occurring amino acid
  misc_feature (54)..(54): Xaa can be any naturally occurring amino acid
  misc_feature (67)..(67): Xaa can be any naturally occurring amino acid
  misc_feature (86)..(86): Xaa can be any naturally occurring amino acid
  misc_feature (89)..(89): Xaa can be any naturally occurring amino acid
  misc_feature (92)..(93): Xaa can be any naturally occurring amino acid
  misc_feature (95)..(96): Xaa can be any naturally occurring amino acid
  misc_feature (98)..(98): Xaa can be any naturally occurring amino acid
  misc_feature (101)..(103): Xaa can be any naturally occurring amino acid
  misc_feature (105)..(105): Xaa can be any naturally occurring amino acid
  Coding DNA Sequence Number=SeqID_4511
  Gene Ontology: Mol. function=DNA binding; Cellular component=nucleus; Biological process=regulation of transcription
  Homolog annotation: Hit_ID=A7R052; Match level="QueryCoverage=63%, HitCoverage=58%, E-value=7e-17, Identity=56%"; Hit description =Chromosome chr10 scaffold_297, whole genome shotgun sequence
  Subcellular localization annotation: CTP_CleavageSite=41; ConfidenceScore=5.45e-01
MKKGEALSETSLPPSTMSSSSSSLVTTLVDNNNPTQPSQXRAARRXXTSDHHLXEISLKTPMVRPYXRSKMPRLRWTPDLHRCFVXAAXRLXXEXXAXPKXXXQXMNAKALTISRSAQMPMTRG

SEQ ID NO: 7539 - protein, 33 aa, Glycine max
  Coding DNA Sequence Number=SeqID_4512
IVMYTHCLVIQSLQESVGNIPDFSSLQFNSSMN

SEQ ID NO: 7540 - protein, 174 aa, Glycine max
  misc_feature (22)..(22): Xaa can be any naturally occurring amino acid
  misc_feature (90)..(90): Xaa can be any naturally occurring amino acid
  misc_feature (136)..(136): Xaa can be any naturally occurring amino acid
  misc_feature (151)..(151): Xaa can be any naturally occurring amino acid
  misc_feature (174)..(174): Xaa can be any naturally occurring amino acid
  Coding DNA Sequence Number=SeqID_4513
CRYLLSSSLALLLTHCGGIRYXGRPRARAPSFLHTEPFVCGGCVIIYCRTSNMFIACECVQTLIAISLAHPHLYPVIALIDRLCVHSRTXHMTSSLFTYIYIHCSEYGPSSCVGLERFRRSQCAYPIRRDLETVMXFMSCIHARTCICVRXSNAAHSTTYACNSHIDTHTHPTX

SEQ ID NO: 7541 - protein, 184 aa, Glycine max
  misc_feature (183)..(183): Xaa can be any naturally occurring amino acid
  Coding DNA Sequence Number=SeqID_4515
  Gene Ontology: Mol. function=ATP-dependent helicase activity; Cellular component=cytoplasm; Biological process=translation
  Homolog annotation: Hit_ID=P90529; Match level="QueryCoverage=97%, HitCoverage=45%, E-value=3e-70, Identity=71%"; Hit description=IfdA
  Pfam annotation: Domain name=DEAD; Domain location=48-184; Score =123.7; E_value=5.3e-34; Accession=PF00270.19; Description=DEADDEAH box helicase
APPPLKDENLMKQEFEGNYEEVVDNFDNMNLLEDLLRGVYAYGFEKPSAIQQRAIMPLVKGVDIIAQAQSGTGKTATFTVGILQRLDFSVPDCQALVLAPTRELAQQIQKVVIALGDYLNAKCHACIGGTRVSDDITKLRNGVHIVVGTPGRVLDMLCRNVLRPDRIKMFILDEADEMLSRGXK

SEQ ID NO: 7542 - protein, 126 aa, Glycine max
  misc_feature (7)..(7): Xaa can be any naturally occurring amino acid
  misc_feature (11)..(11): Xaa can be any naturally occurring amino acid
  misc_feature (13)..(13): Xaa can be any naturally occurring amino acid
  misc_feature (66)..(66): Xaa can be any naturally occurring amino acid
  misc_feature (82)..(82): Xaa can be any naturally occurring amino acid
  misc_feature (94)..(94): Xaa can be any naturally occurring amino acid
  Coding DNA Sequence Number=SeqID_4516
STEHHRXHINXVXSGCAHAVRARTSGAVSEPRFTDAVRYVSLARSPLFLQYHVLLYTRLISVVAYXVSPSIASMRPAPLLLXISLTHLYCAASXRLRLHARSLSTLTLSSFDTYSLYVVIVLMMTI

SEQ ID NO: 7543 - protein, 76 aa, Glycine max
  Coding DNA Sequence Number=SeqID_4518
RATYSLSRVVIEPSVVAQCARAIEPSRDNRRSDVWLWCIPQPLAITEHYSPCFIDQMKSLSQLILLLTHVPISAIT

SEQ ID NO: 7544 - protein, 183 aa, Glycine max
  Coding DNA Sequence Number=SeqID_4520
  Gene Ontology: Mol. function=transporter activity; Cellular component= integral to membrane; Biological process=sodium ion transport
  Homolog annotation: Hit_ID=Q3KGA9; Match level="QueryCoverage=100%, HitCoverage=39%, E-value=1e-84, Identity=84%"; Hit description =Na+/solute symporter
YALMIGVTSILAIGTVLQVLFGGPFWVSVLLGGGVVVVYSTIGGMWSLTLTDIVQFVIKTVGLMFILLPICLYRVGGWDQLVAQLPASNFSFTEIGWDTIITYFMIYFFGILIGQDIWQRVFTARDEKVAQYAGTFAGFYCILYGLACALIGMAAHVLLPNLDNVNNAFAAIVKASLPDGIRG

SEQ ID NO: 7545 - protein, 88 aa, Glycine max
  misc_feature (32)..(32): Xaa can be any naturally occurring amino acid
  Coding DNA Sequence Number=SeqID_4521
HKKWGMHMERITLENVNGSTVNVGIHPSKVVXTKLKLDKDRKAILDRKAKGRAAADKEKGTKFAPEDIMQTGDESVLPPYHTNKFSLW

SEQ ID NO: 7546 - protein, 129 aa, Glycine max; identical to SEQ ID NO: 6422
  misc_feature (5)..(5): Xaa can be any naturally occurring amino acid
  misc_feature (35)..(35): Xaa can be any naturally occurring amino acid
  Coding DNA Sequence Number=SeqID_4522

SEQ ID NO: 7547 - protein, 211 aa, Glycine max
  Coding DNA Sequence Number=SeqID_4524
  Pfam annotation: Domain name=PB1; Domain location=20-102; Score=45.5; E_value=1.8e-10; Accession=PF00564.15; Description=PB1 domain
SYVGPPPNHFLFYNKNNSSQMTVKICFNNQTHRISKNPVDYTALLQKVIEIFGNQLPQNWTLQYLDSDDDKIMLSTQEDYKTLLEEEAGNSSKSIKIFVLALEENMNQSQVLASLMAESQKKGSVEIIDEPIEEPQEPVKENKAEEEEIIQKEEPIVQEKVIIEQEEPKEEAPVQEEEQPKAQEAQEESDMHPLDKLLFKFLRPQHVVRVR

SEQ ID NO: 7548 - protein, 169 aa, Glycine max; identical to SEQ ID NO: 6423
  misc_feature (63)..(63): Xaa can be any naturally occurring amino acid
  misc_feature (83)..(83): Xaa can be any naturally occurring amino acid
  misc_feature (86)..(86): Xaa can be any naturally occurring amino acid
  Coding DNA Sequence Number=SeqID_4525

SEQ ID NO: 7549 - protein, 86 aa, Glycine max
  Coding DNA Sequence Number=SeqID_4527
WRSSLYIIHTCAINMSIGETSATAHSGRQDTRGKDIMYIFSVLPQIKKFPPLHTYHSHSYLLPTTPRHLVVKRSARAVQHKSAHPI

SEQ ID NO: 7550 - protein, 127 aa, Glycine max
  Coding DNA Sequence Number=SeqID_4529
IWSDTIMKIIPFILIAFFLLLTSFPAQIKAGRRGRRPMPNNPMPAECKHIDDCVAPLINVSQRNNSHCCNAFKSRESIQCMRTLFASNDSFIRFGTVGICKAICPELSNCSYRPKTYRLIPSSGSRK

SEQ ID NO: 7551 - protein, 60 aa, Glycine max
  Coding DNA Sequence Number=SeqID_4531
WQPPRASRCPLSHCRSATREEEHGDAHWKWPLTLTGGGGGEAVILTGHLARSSRRHLYLR

SEQ ID NO: 7552 - protein, 138 aa, Glycine max; identical to SEQ ID NO: 6426
  misc_feature (7)..(7): Xaa can be any naturally occurring amino acid
  misc_feature (24)..(24): Xaa can be any naturally occurring amino acid
  misc_feature (51)..(51): Xaa can be any naturally occurring amino acid
  misc_feature (132)..(132): Xaa can be any naturally occurring amino acid
  Coding DNA Sequence Number=SeqID_4533

SEQ ID NO: 7553 - protein, 134 aa, Glycine max
  Coding DNA Sequence Number=SeqID_4535
  Homolog annotation: Hit_ID=A8FEA0; Match level="QueryCoverage=99%, HitCoverage=41%, E-value=6e-68, Identity=92%"; Hit description=Spore maturation protein CgeB
MKLLYISSGYGGIYHMFDQWVEESFIDSPFSYVKIDRESLPAHMHKIRTFSPDFVLMMIGDHVPSEVLHQFKQEKIPIVLWMTEDPFYTDVSAACAQDARIILTIDEGVLPFYKQLGADHAHYFPIPANTRIFH

SEQ ID NO: 7554 - protein, 118 aa, Glycine max
  Coding DNA Sequence Number=SeqID_4536
  Gene Ontology: Mol. function=pyridoxal phosphate binding; Biological process=metabolic process
  Homolog annotation: Hit_ID=Q3EB02; Match level="QueryCoverage=100%, HitCoverage=100%, E-value=1e-15, Identity=42%"; Hit description =Uncharacterized protein At3g26110.1
MVRLHVALLLLFIAVSTAIVSATDKPSVTTAGPPTATTPTSGDVEAAEAPGDDNAIGTTDDDAPGTPGDDDVAVAGPIGSETSYANYPPPQQTSGSGVTAMIGVVSVAATTVGSFFFF

SEQ ID NO: 7555 - protein, 190 aa, Glycine max
  misc_feature (150)..(150): Xaa can be any naturally occurring amino acid
  Coding DNA Sequence Number=SeqID_421
  Gene Ontology: Mol. function=tubulin-tyrosine ligase activity; Biological process=protein modification process
  Homolog annotation: Hit_ID=Q23QF2; Match level="QueryCoverage=97%, HitCoverage=22%, E-value=7e-31, Identity=40%"; Hit description =Tubulin-tyrosine ligase family protein
APPPYPDGRPYYEKFNYGLINDNDYCELVDFYNLAHPENMFESMNFFTDYSRTGLTRSLVVRKIGVDTMRQVSRYMEKKDFNSAQYHLTPLITNFFTKRVDIHIYHTIGKHFNCATQMYNHIPGHGVLKRKDLIVDSVDSYAARFEGGRXHCFNKKKFFPYSYRLYMEDECKAFFEHINSETYIKSLEKE

SEQ ID NO: 7556 - protein, 142 aa, Glycine max
  misc_feature (118)..(118): Xaa can be any naturally occurring amino acid
  misc_feature (122)..(122): Xaa can be any naturally occurring amino acid
  Coding DNA Sequence Number=SeqID_422
IVVNPCIQMKAVAWLLLACLLPCLLMGQNYLRGEVKDEQGRLLQGVRIQLASTGTYPYYTGNLGSFGIPSSRLIDTITLSYEGYDTLRTAIDTRKPQFFVLKMQPELANFYRARLSSXTNHXQTEPVVPASVMGESYSDIME

SEQ ID NO: 7557 - protein, 121 aa, Glycine max
  misc_feature (29)..(29): Xaa can be any naturally occurring amino acid
  misc_feature (43)..(43): Xaa can be any naturally occurring amino acid
  misc_feature (61)..(61): Xaa can be any naturally occurring amino acid
  Coding DNA Sequence Number=SeqID_424
MRRASDASRMCVIASDVLFARCYGVGLVXTPFVVACCGHFFNXVMRKISCSRALEHEPLAXPAPALWWCLPVIMLIMMYYKFDTRYDVMLIDHPVLSSVRHVDLSAPRLSRGEREMRIDEM

SEQ ID NO: 7558 - protein, 293 aa, Glycine max
  misc_feature (45)..(45): Xaa can be any naturally occurring amino acid
  misc_feature (283)..(283): Xaa can be any naturally occurring amino acid
  Coding DNA Sequence Number=SeqID_426
HVLASCMRRYHYDINYNMQLGETSYTIYLTHPHSYSRPPSSLLHXLHHLTIPSHNTRIRAPSLITSVHARFYWLLDSLGQLLISHTVDFLLLSFLSRLLPHCSSPPPSVSRAWCVAALRSPPLPLSSLPPMLFRASSIVASSSFCSPLFISLPPLSPGLLPLSRRPPHLSLASVSPRSHPLSSPPHSLLLPHHSYLYHDCANRNRISPHETHPHPSHLTLPFICYSIPPSCSDPSSPALTPHPLPSLQPLPLPPHIPSHRHRTLYLYQLALHPSAQINPRPPXIPHPRKLYIP

SEQ ID NO: 7559 - protein, 64 aa, Glycine max
  Coding DNA Sequence Number=SeqID_428
  Gene Ontology: Mol. function=structural constituent of ribosome; Cellular component=ribonucleoprotein complex; Biological process =translation
  Homolog annotation: Hit_ID=Q9SR73; Match level="QueryCoverage=78%, HitCoverage=78%, E-value=2e-20, Identity=98%"; Hit description=40S ribosomal protein S28-1
  Pfam annotation: Domain name=Ribosomal_S28e; Domain location=1-64; Score=156.1; E_value=9.2e-44; Accession=PF01200.9; Description =Ribosomal protein S28e
  Subcellular localization annotation: CTP_CleavageSite=12; ConfidenceScore=5.01e-01
MDSQIKHAVVVKVMGRTGSRGQVTQVRVKFTDSDRFIMRNVKGPVREGDILTLLESEREARRLR

SEQ ID NO: 7560 - protein, 95 aa, Glycine max
  Coding DNA Sequence Number=SeqID_429
VIISCTFLINPSSFKYLNCFIKNFKAHGFIFFDHFDINNLLEHPFGSKRTRGFILFSFPAETHYRIYPPPFPFSKFFQKWFFPITGQPPFSFTRV

SEQ ID NO: 7561 - protein, 99 aa, Glycine max
  Coding DNA Sequence Number=SeqID_431
EPARTQKRCTISPYYVSRRKLVDEHSTGRIFCVLLLLFRCHTRMNLICNIAMASLDVVLCIRDWTILTPIKHIAHVAYISILSRSPYMRIVTWLYHDKP

SEQ ID NO: 7562 - protein, 171 aa, Glycine max
  misc_feature (27)..(27): Xaa can be any naturally occurring amino acid
  misc_feature (38)..(39): Xaa can be any naturally occurring amino acid
  misc_feature (129)..(129): Xaa can be any naturally occurring amino acid
  Coding DNA Sequence Number=SeqID_4537
STTHIMTSKIDVRCCESSRQAARCIDXVCRDLSTCIQXXRGRLVNTRRPSVSDRTQTKHVCTGSARLVISYIYKNRKRGGRDESVRVAGRLVHLTLRVLSRQRNIIIIKRRADSRQPPSSTERTQHAGXGLWSTCILLRLHPEYARESQEQLIAWRARTGQLQRRCHQFGT

SEQ ID NO: 7563 - protein, 153 aa, Glycine max
  misc_feature (69)..(69): Xaa can be any naturally occurring amino acid
  misc_feature (107)..(107): Xaa can be any naturally occurring amino acid
  misc_feature (142)..(142): Xaa can be any naturally occurring amino acid
  Coding DNA Sequence Number=SeqID_4539
FTPVLRYIREPFYRPLSVYGRCIGESRESTRIYRPNTRSIIAGGGVYIHEPGAPQYFIGYIPCRGAGQXPRERCPLFHYCHRSVDILSVYARPAGGGGGADLAASVXHTLIGRYTFVRGINMILPRTSLGAKCAIRTSYITXPPPDGMRLLLI

SEQ ID NO: 7564 - protein, 144 aa, Glycine max
  Coding DNA Sequence Number=SeqID_4541
  Gene Ontology: Mol. function=binding
  Homolog annotation: Hit_ID=Q9T097; Match level="QueryCoverage=100%, HitCoverage=44%, E-value=9e-60, Identity=83%"; Hit description =Putative uncharacterized protein AT4g27750
KPIWSDGPSATPENPSESENGEETDAATMVVEELVTSLNTQRLYRELTLSLRTGLRDACAEFSFLRIRGLRSLLKTLRSIAESDSIIRLFSHTQTVSDLQLVPVLFRHSLKEAEDDRVTSLDHIFSVEPMKITSPSTDDEVAVA

SEQ ID NO: 7565 - protein, 75 aa, Glycine max
  misc_feature (65)..(65): Xaa can be any naturally occurring amino acid
  Coding DNA Sequence Number=SeqID_4542
  Subcellular localization annotation: CTP_CleavageSite=21; ConfidenceScore=5.05e-01
GRGRGGGRRFHVQHHHVSRSVAPAEGSGSFLRLGERGRPSVRGQCVTPRREASGRLIIITRWRVXQAFCNRTTRI

SEQ ID NO: 7566 - protein, 117 aa, Glycine max
  misc_feature (112)..(112): Xaa can be any naturally occurring amino acid
  Coding DNA Sequence Number=SeqID_4544
TSHFSFYFIYYTYFISLMYITGREREERRPSWCGESPHLQMSPFSFLYSPPASPDFRLTLISCKTSHRPISDSLPKPTLIPHNSIPNYTTISTHLSDPRPPNLTTLYISYTXPPPII

SEQ ID NO: 7567 - protein, 75 aa, Glycine max
  misc_feature (22)..(22): Xaa can be any naturally occurring amino acid
  misc_feature (37)..(39): Xaa can be any naturally occurring amino acid
  misc_feature (51)..(52): Xaa can be any naturally occurring amino acid
  misc_feature (57)..(58): Xaa can be any naturally occurring amino acid
  Coding DNA Sequence Number=SeqID_4546
TVDVARVPECVKDLCRATLPIXRTNPTSIYFVLITDXXXGLAHDTFDNIAXXITCSXXSWPNRYSECPCAMPMTP

SEQ ID NO: 7568 - protein, 154 aa, Glycine max
  misc_feature (51)..(51): Xaa can be any naturally occurring amino acid
  misc_feature (91)..(91): Xaa can be any naturally occurring amino acid
  misc_feature (144)..(144): Xaa can be any naturally occurring amino acid
  Coding DNA Sequence Number=SeqID_4548
  Subcellular localization annotation: CTP_CleavageSite=44; ConfidenceScore=5.33e-01
RTHPHPQPHGATVLAPPRADTRPALTAHITPTVYYGARVSSTCRYTMSTPXTSTSLTLLLAYSLSHDVYLICCRHDAALCHILYMISWVHXHDACYSRCTANRAVREEYMSEDSGVESESVCVVHHQHNLLTHPAHALSLSFLXNSRTISAVCA

SEQ ID NO: 7569 - protein, 130 aa, Glycine max; identical to SEQ ID NO: 6443
  misc_feature (3)..(3): Xaa can be any naturally occurring amino acid
  misc_feature (37)..(37): Xaa can be any naturally occurring amino acid
  misc_feature (47)..(47): Xaa can be any naturally occurring amino acid
  misc_feature (99)..(99): Xaa can be any naturally occurring amino acid
  misc_feature (115)..(115): Xaa can be any naturally occurring amino acid
  Coding DNA Sequence Number=SeqID_4549

SEQ ID NO: 7570 - protein, 138 aa, Glycine max
  misc_feature (17)..(17): Xaa can be any naturally occurring amino acid
  misc_feature (20)..(20): Xaa can be any naturally occurring amino acid
  misc_feature (39)..(39): Xaa can be any naturally occurring amino acid
  misc_feature (49)..(49): Xaa can be any naturally occurring amino acid
  Coding DNA Sequence Number=SeqID_4551
MTIRISSMNYEYASYIXREXLTIAYQNTRERSLRSDTHXNESRHENTLXGSPVQHDVIVACALVLMTRHNGMSIFANIITYMYIYFIIAMFVLITCDSMLDSVVVITLTSGTVSHRARVAECHARLSVSALPYLCLVR

SEQ ID NO: 7571 - protein, 134 aa, Glycine max; identical to SEQ ID NO: 6754
  misc_feature (2)..(2): Xaa can be any naturally occurring amino acid
  misc_feature (5)..(5): Xaa can be any naturally occurring amino acid
  misc_feature (13)..(13): Xaa can be any naturally occurring amino acid
  misc_feature (17)..(17): Xaa can be any naturally occurring amino acid
  misc_feature (19)..(19): Xaa can be any naturally occurring amino acid
  misc_feature (21)..(21): Xaa can be any naturally occurring amino acid
  misc_feature (33)..(33): Xaa can be any naturally occurring amino acid
  misc_feature (49)..(49): Xaa can be any naturally occurring amino acid
  misc_feature (64)..(64): Xaa can be any naturally occurring amino acid
  misc_feature (77)..(78): Xaa can be any naturally occurring amino acid
  misc_feature (93)..(93): Xaa can be any naturally occurring amino acid
  misc_feature (103)..(103): Xaa can be any naturally occurring amino acid
  misc_feature (113)..(113): Xaa can be any naturally occurring amino acid
  Coding DNA Sequence Number=SeqID_4553

SEQ ID NO: 7572 - protein, 512 aa, Glycine max
  misc_feature (21)..(21): Xaa can be any naturally occurring amino acid
  misc_feature (31)..(31): Xaa can be any naturally occurring amino acid
  misc_feature (38)..(38): Xaa can be any naturally occurring amino acid
  misc_feature (46)..(46): Xaa can be any naturally occurring amino acid
  misc_feature (72)..(72): Xaa can be any naturally occurring amino acid
  misc_feature (113)..(113): Xaa can be any naturally occurring amino acid
  misc_feature (222)..(222): Xaa can be any naturally occurring amino acid
  misc_feature (302)..(302): Xaa can be any naturally occurring amino acid
  misc_feature (386)..(386): Xaa can be any naturally occurring amino acid
  misc_feature (458)..(460): Xaa can be any naturally occurring amino acid
  misc_feature (471)..(471): Xaa can be any naturally occurring amino acid
  misc_feature (486)..(488): Xaa can be any naturally occurring amino acid
  misc_feature (490)..(490): Xaa can be any naturally occurring amino acid
  misc_feature (493)..(495): Xaa can be any naturally occurring amino acid
  misc_feature (498)..(498): Xaa can be any naturally occurring amino acid
  misc_feature (502)..(504): Xaa can be any naturally occurring amino acid
  misc_feature (507)..(510): Xaa can be any naturally occurring amino acid
  Coding DNA Sequence Number=SeqID_4555
  Subcellular localization annotation: CTP_CleavageSite=37; ConfidenceScore=5.28e-01
SASVRRPPPLYACARPARVSXYVGGRPALSXVSCVCVXAARRVCWXFRACSVYFAAPLRARRARLIFYHLWXARPSRGSSSLCIMISLSALSLSRSSRLSYSCRGAPSVRAAXGVSRGACASARAGGSGAATVELYLSWRASPCLRFSLAPLASRSAASPASSSVRGAARGSPPLSLRFLLSFACASSLAFFRSSFASAARVSLLLSCPLSLRRGLLRVRRXPPCSSLRVACLCTSCCRLAVGALVPAPASRSTALCALTVRCSGVLGRGAACFAWCCARPRFLFPLSLRCPGDRAPRVYFXAAFPAPSCRHRCGGGPAVSSRGVSTSLFRLCSGFFLLSSYPRARSGPRRLRAGLPRLLRLGLPRPAASLSSSCSLPCPLLVSSXRLPCRRPPSRRLPLPLPELFSPRRPPARLSAAAGVFSPHGLFLCAFSFLSLRLFCSLSPFTSPLFCVEKIRXXXLLSPLFFCRSXSAGRFPPSPTLSPSXXXTXIRXXXPAXEAAXXXGPXXXXGG

SEQ ID NO: 7573 - protein, 91 aa, Glycine max
  misc_feature (13)..(13): Xaa can be any naturally occurring amino acid
  misc_feature (57)..(58): Xaa can be any naturally occurring amino acid
  misc_feature (71)..(71): Xaa can be any naturally occurring amino acid
  misc_feature (84)..(85): Xaa can be any naturally occurring amino acid
  Coding DNA Sequence Number=SeqID_4557
YQLWSHVIYIYTXLCIVMPTPTHLACIVSLIVSCAVVCSPIPPLACSHISLPVTSRXXPERQKHNQIDKRXGGRRRGGSEGRAXXGRCRVN

SEQ ID NO: 7574 - protein, 136 aa, Glycine max
  Coding DNA Sequence Number=SeqID_4559
  Gene Ontology: Mol. function=hydrolase activity, hydrolyzing O -glycosyl compounds; Cellular component=chloroplast; Biological process=carbohydrate metabolic process
  Homolog annotation: Hit_ID=Q9XIS5; Match level="QueryCoverage=39%, HitCoverage=6%, E-value=2e-23, Identity=94%"; Hit description=Starch branching enzyme
MMIPNRRVQWRYTHLGLRLIRGKKKCPDYRFSKGAAHRRSSIFMEPACRMARELILFLNIVLDSDDALFGGFSRLNHTAEYFTSEGWYDDRPRSFLIYAPSRTAVVYALADDVEPTLADEAEPALADEAEPEPVDP

SEQ ID NO: 7575 - protein, 124 aa, Glycine max
  misc_feature (19)..(20): Xaa can be any naturally occurring amino acid
  misc_feature (22)..(23): Xaa can be any naturally occurring amino acid
  Coding DNA Sequence Number=SeqID_4560
  Gene Ontology: Mol. function=nucleoside-triphosphatase activity; Cellular component=integral to membrane; Biological process=transport
  Homolog annotation: Hit_ID=Q76CU2; Match level="QueryCoverage=79%, HitCoverage=6%, E-value=4e-25, Identity=54%"; Hit description =Pleiotropic drug resistance protein 1
ARRGGPQDAAGGTRGAAGXXAXXEGWNLFSGIIVVRPKMPVWWERYYWGGGVAWTLYGLIASQFGDITGRKPGEDNKEVKDFVEDYFGFKHDFEGVCAVVVAGIAVAFALIFGVAIKTFNFQKR

SEQ ID NO: 7576 - protein, 201 aa, Glycine max
  misc_feature (154)..(154): Xaa can be any naturally occurring amino acid
  misc_feature (200)..(200): Xaa can be any naturally occurring amino acid
  Coding DNA Sequence Number=SeqID_4129
VECFVSCYLLERCPKHISEISPSLLLHVIQSKKSCEDKAVECTLLGKKQKKPKLCDECDDLYNYDKLICDEEQDLEKLKKCVSSKLMEVFDADSDICDDLFLDLTSSQLVDIITKSISKMSVLKKRKKRNGCKCTKKARTKVPKLKSDIPCYSXEDIENIQWECYLENFNRSDMKFLLKAIRLKLKGIIDMTKSDKECVXF

SEQ ID NO: 7577 - protein, 81 aa, Glycine max
  Coding DNA Sequence Number=SeqID_4131
  Gene Ontology: Mol. function=anion channel activity; Cellular component=membrane of vacuole with cell cycle-independent morphology; Biological process=malate transport
  Homolog annotation: Hit_ID=A5C592; Match level="QueryCoverage=55%, HitCoverage=8%, E-value=6e-11, Identity=66%"; Hit description =Putative uncharacterized protein
MIIFYCSLIFFSYIYTSKICASMVQISVINHYLHGVEYKEVPSKFLTYQAADDQIYNGHRSVVESTSKEDSLVLSTIAIVL

SEQ ID NO: 7578 - protein, 92 aa, Glycine max
  misc_feature (22)..(22): Xaa can be any naturally occurring amino acid
  Coding DNA Sequence Number=SeqID_4132
CIYFVFYSHFPRVLPHTYMTHXVTASGRVYDAIFPPLFLHLYLARLTDYFLLLCVAHSDNIQQSQSRLATSCTCQLTPRRWILARALSSLRV

SEQ ID NO: 7579 - protein, 164 aa, Glycine max; identical to SEQ ID NO: 6129
  misc_feature (112)..(112): Xaa can be any naturally occurring amino acid
  Coding DNA Sequence Number=SeqID_4134

SEQ ID NO: 7580 - protein, 142 aa, Glycine max
  misc_feature (112)..(112): Xaa can be any naturally occurring amino acid
  misc_feature (131)..(131): Xaa can be any naturally occurring amino acid
  Coding DNA Sequence Number=SeqID_4136
  Gene Ontology: Mol. function=nucleoside-triphosphatase activity; Cellular component=integral to membrane; Biological process=protein catabolic process
  Homolog annotation: Hit_ID=A7NYX4; Match level="QueryCoverage=95%, HitCoverage=17%, E-value=6e-48, Identity=72%"; Hit description =Chromosome chr6 scaffold_3, whole genome shotgun sequence
  Pfam annotation: Domain name=Peptidase_M41; Domain location=7-142; Score=23.9; E_value=6.5e-12; Accession=PF01434.8; Description =Peptidase family M41
GSRTQVTIKHFEAAIDRTIGGLEKRNKVITTLERRTVAYQDPCHAASSWTKEHVEPLLKVTINAGSAVAHGFAQYAPNENLLMTKDQVFNTTCMTLGGRAAEQALIGRISTXGAPNDLEKVTNLTYAQVCXYGFSNKLSSVF

SEQ ID NO: 7581 - protein, 127 aa, Glycine max
  Coding DNA Sequence Number=SeqID_4137
  Subcellular localization annotation: CTP_CleavageSite=38; ConfidenceScore=5.21e-01
WKRFFVFWPPPAVFFGDFSPFFFPISKPEIFRGVRPPLSGKKWGFFWGGLKRGGPQQNNLLFSPFPKGAIYISQVQPRVWSSENLKPHLWGLEKKMGSRIKRVNPSVQCRIKTPVEGHVATTAAVLK

SEQ ID NO: 7582 - protein, 208 aa, Glycine max; identical to SEQ ID NO: 6130
  misc_feature (40)..(40): Xaa can be any naturally occurring amino acid
  misc_feature (52)..(52): Xaa can be any naturally occurring amino acid
  misc_feature (113)..(113): Xaa can be any naturally occurring amino acid
  misc_feature (184)..(184): Xaa can be any naturally occurring amino acid
  Coding DNA Sequence Number=SeqID_4139

SEQ ID NO: 7583 - protein, 128 aa, Glycine max
  misc_feature (3)..(3): Xaa can be any naturally occurring amino acid
  misc_feature (100)..(100): Xaa can be any naturally occurring amino acid
  misc_feature (116)..(116): Xaa can be any naturally occurring amino acid
  Coding DNA Sequence Number=SeqID_4141
VYXTKTCTYSPLLILASSLLMVAAWPSYSLTLSCLTAHMPVQTFTRVLYTLQPPLATSFSIYKVLFYVYCIYLLLSYFLLAVSVFTFRTCSGGSRRDRRXRCVSWSACGAATSSLXSVDHPKPYARDE

SEQ ID NO: 7584 - protein, 504 aa, Glycine max
  Coding DNA Sequence Number=SeqID_4143
  Gene Ontology: Mol. function=IMP dehydrogenase activity; Cellular component=integral to membrane; Biological process=GMP biosynthetic process
  Homolog annotation: Hit_ID=UPI00006CFBA8; Match level="QueryCoverage =99%, HitCoverage=84%, E-value=1e-160, Identity=55%"; Hit description= IMP dehydrogenase / GMP reductase domain containing protein
  Pfam annotation: Domain name=CBS; Domain location=106-234; Score =66.0; E_value=1.3e-16; Accession=PF00571.18; Description=CBS domain
  Pfam annotation: Domain name=His_biosynth; Domain location=246-397; Score=-119.7; E_value=0.04; Accession=PF00977.11; Description =Histidine biosynthesis protein
  Pfam annotation: Domain name=IMPDH; Domain location=21-499; Score =568.6; E_value=6.3e-168; Accession=PF00478.15; Description=IMP dehydrogenase  GMP reductase domain
  Pfam annotation: Domain name=NPD; Domain location=46-491; Score= -135.2; E_value=0.032; Accession=PF03060.6; Description=2 -nitropropane dioxygenase
  Pfam module annotation: Pfam domain module=CBS::His_biosynth::IMPDH::N PD; Domain location=106-234::246-397::21-499::46-491
ITTLPSTTLSPMDNLESRISIGLTFNDVLLVPQYSTVNSRSEIDLRTRFSKNVPLNVPIVSSPMDTVTETDMAIEMARWGGLGIVHRYNTIEDQANMISQVKRAESFVITTPYTISQSTTVRAVQALSKAYRVQTFLVTDDTHKPNELADPVQKHKLVGILTGRDLRIALNGDQLVEEIMTPRERLTTTYDPEISLKEAKSLMINNRVEKLPIITEKNDVLGLITLRDIILREQRPLANLDTFGRLRVGAAVGAKDDYLERAKKLIDVGTDVLVVDIANGHAQLCIDAVERLKEQFTVDVVAGSIASREGAENLIKAGADGIRCGIGSGAICTTRLVAGSGVPQLSAIFDAASVCNEAGVPLISDGGNGNSGNMCKALAAGADCVMVGRLIAGCDESPGQVLLKDGKRVKIYRGMAGYGANLSKAQRTNAAEPHSLNFTPEGVEGYIPYCGPLKDVLNQFAQGIKSGMSYCGSHEIMEMKKKAKFIRLSQSAIVESGVHDINKL

SEQ ID NO: 7585 - protein, 112 aa, Glycine max
  misc_feature (29)..(29): Xaa can be any naturally occurring amino acid
  misc_feature (31)..(32): Xaa can be any naturally occurring amino acid
  misc_feature (39)..(39): Xaa can be any naturally occurring amino acid
  misc_feature (59)..(60): Xaa can be any naturally occurring amino acid
  misc_feature (64)..(64): Xaa can be any naturally occurring amino acid
  misc_feature (76)..(76): Xaa can be any naturally occurring amino acid
  misc_feature (95)..(95): Xaa can be any naturally occurring amino acid
  misc_feature (97)..(97): Xaa can be any naturally occurring amino acid
  misc_feature (102)..(102): Xaa can be any naturally occurring amino acid
  misc_feature (105)..(105): Xaa can be any naturally occurring amino acid
  Coding DNA Sequence Number=SeqID_4144
LYKITKMCADFSLQHGRLRQHNIAMRQRXHXXPLVLILXSKMWVCVSIVCVVSCDMWCXXGVCXYLSSHLSVCQFXLSHYVVLCSTHSLHHVSEXDXKTDAXRAXSSHTHTI

SEQ ID NO: 7586 - protein, 96 aa, Glycine max; identical to SEQ ID NO: 6136
  misc_feature (13)..(16): Xaa can be any naturally occurring amino acid
  misc_feature (19)..(19): Xaa can be any naturally occurring amino acid
  misc_feature (34)..(34): Xaa can be any naturally occurring amino acid
  misc_feature (38)..(38): Xaa can be any naturally occurring amino acid
  misc_feature (42)..(42): Xaa can be any naturally occurring amino acid
  misc_feature (51)..(51): Xaa can be any naturally occurring amino acid
  misc_feature (56)..(56): Xaa can be any naturally occurring amino acid
  misc_feature (62)..(64): Xaa can be any naturally occurring amino acid
  misc_feature (66)..(66): Xaa can be any naturally occurring amino acid
  misc_feature (74)..(74): Xaa can be any naturally occurring amino acid
  misc_feature (88)..(91): Xaa can be any naturally occurring amino acid
  Coding DNA Sequence Number=SeqID_4146

SEQ ID NO: 7587 - protein, 143 aa, Glycine max
  Coding DNA Sequence Number=SeqID_4148
  Gene Ontology: Biological process=cell division
  Homolog annotation: Hit_ID=P55343; Match level="QueryCoverage=100%, HitCoverage=100%, E-value=3e-72, Identity=91%"; Hit description =Protein mraZ
  Pfam annotation: Domain name=MraZ; Domain location=1-71; Score=114.2; E_value=3.9e-31; Accession=PF02381.9; Description=MraZ protein
  Pfam annotation: Domain name=MraZ; Domain location=72-142; Score =110.5; E_value=5.2e-30; Accession=PF02381.9; Description=MraZ protein
  Pfam module annotation: Pfam domain module=MraZ::MraZ; Domain location=1-71::72-142
MFMGEYQHTIDTKGRMIIPAKFRDGLGEQFVLTRGLDQCLFGYPMSEWKLIEEKLKALPLTKKDARAFTRFFFSGAVECDLGKQGRINIASNLLQYAKLEKECVVIGVSNRIELWSKSIWEQYTEEQEDSFAEIAENMIGFDI

SEQ ID NO: 7588 - protein, 93 aa, Glycine max
  Coding DNA Sequence Number=SeqID_4149
NLSTISPTIANSCVVKGAIDKGPGAEIGSGRERENQGSGPIFTKEGWWNYPFWWAPDGFLTFRGLWVWTKIFGLGKAPNPCCLPRLVWVPTTN

SEQ ID NO: 7589 - protein, 50 aa, Glycine max
  Coding DNA Sequence Number=SeqID_4151
  Gene Ontology: Mol. function=sugar:hydrogen symporter activity; Cellular component=membrane; Biological process=carbohydrate transport
  Homolog annotation: Hit_ID=A9PBN5; Match level="QueryCoverage=74%, HitCoverage=10%, E-value=7e-12, Identity=83%"; Hit description =Putative uncharacterized protein
MEESFVFQWSVIRSLLSILQWWAFNVTVIIVNKWIFQIPPLLCSTLMLRV

SEQ ID NO: 7590 - protein, 233 aa, Glycine max
  misc_feature (216)..(216): Xaa can be any naturally occurring amino acid
  Coding DNA Sequence Number=SeqID_4152
  Gene Ontology: Mol. function=RNA binding; Cellular component =cytoplasm; Biological process=ribosome biogenesis and assembly
  Homolog annotation: Hit_ID=A0DVI3; Match level="QueryCoverage=91%, HitCoverage=95%, E-value=3e-79, Identity=66%"; Hit description =Chromosome undetermined scaffold_66, whole genome shotgun sequence
  Pfam annotation: Domain name=KH_1; Domain location=154-206; Score =19.9; E_value=0.0052; Accession=PF00013.19; Description=KH domain
METDQSLKNTTQGNPMPKEENGFDDGIEVEMDNLESNNQIDFEKATVENLVKKDEKRRIPVPPHRLTPLRNNWEKIVTTVVENMKLQIRMNTKKKCIEVKASEYTEDKNSVQKCADFLKAFMLGFDLNDAIAMLRLDDLYIESFEIKDVKNLQGDHLSRCIGRISGEKGKTKYAVENSTKTRIVLADSKIHILGSFSNIKMARDAICSLILGSPPXKVYSQLKYIAKRQGEKF

SEQ ID NO: 7591 - protein, 132 aa, Glycine max
  misc_feature (15)..(16): Xaa can be any naturally occurring amino acid
  misc_feature (52)..(52): Xaa can be any naturally occurring amino acid
  misc_feature (56)..(56): Xaa can be any naturally occurring amino acid
  misc_feature (58)..(60): Xaa can be any naturally occurring amino acid
  misc_feature (63)..(63): Xaa can be any naturally occurring amino acid
  misc_feature (66)..(66): Xaa can be any naturally occurring amino acid
  misc_feature (70)..(70): Xaa can be any naturally occurring amino acid
  misc_feature (74)..(74): Xaa can be any naturally occurring amino acid
  misc_feature (76)..(77): Xaa can be any naturally occurring amino acid
  misc_feature (80)..(80): Xaa can be any naturally occurring amino acid
  misc_feature (82)..(82): Xaa can be any naturally occurring amino acid
  misc_feature (92)..(92): Xaa can be any naturally occurring amino acid
  misc_feature (103)..(103): Xaa can be any naturally occurring amino acid
  misc_feature (106)..(106): Xaa can be any naturally occurring amino acid
  misc_feature (110)..(111): Xaa can be any naturally occurring amino acid
  misc_feature (113)..(113): Xaa can be any naturally occurring amino acid
  misc_feature (116)..(116): Xaa can be any naturally occurring amino acid
  misc_feature (118)..(119): Xaa can be any naturally occurring amino acid
  misc_feature (123)..(124): Xaa can be any naturally occurring amino acid
  misc_feature (132)..(132): Xaa can be any naturally occurring amino acid
  Coding DNA Sequence Number=SeqID_4153
YIYVYIYYFYRATGXXSCVTGRALPYHVRHLHMTMLTCVIVHYDVVVSASCXILHXLXXXCVXVVXLLHXVVFXDXXYDXSXLSGTIAGALXQSVATVVSSSXAYXLSVXXLXDYXCXXDDSXXYTLLVLIX

SEQ ID NO: 7592 - protein, 132 aa, Glycine max
  misc_feature (13)..(15): Xaa can be any naturally occurring amino acid
  misc_feature (28)..(28): Xaa can be any naturally occurring amino acid
  misc_feature (31)..(31): Xaa can be any naturally occurring amino acid
  misc_feature (48)..(49): Xaa can be any naturally occurring amino acid
  misc_feature (113)..(113): Xaa can be any naturally occurring amino acid
  misc_feature (128)..(128): Xaa can be any naturally occurring amino acid
  Coding DNA Sequence Number=SeqID_4155
RRVGRKKRKMREXXXLHSLALTSISNYXTSXWDRRCFLAPHTHKCARXXHMFFCATRLTWLGSSLDTLFSANILFNTDNRLIIHNLYQHTSFSYSWVLCIIARGQTVNESVAXTLLSARLHTHIRTAXETRA

SEQ ID NO: 7593 - protein, 128 aa, Glycine max
  misc_feature (1)..(1): Xaa can be any naturally occurring amino acid
  misc_feature (21)..(21): Xaa can be any naturally occurring amino acid
  misc_feature (24)..(24): Xaa can be any naturally occurring amino acid
  misc_feature (46)..(47): Xaa can be any naturally occurring amino acid
  misc_feature (52)..(52): Xaa can be any naturally occurring amino acid
  misc_feature (57)..(57): Xaa can be any naturally occurring amino acid
  misc_feature (66)..(66): Xaa can be any naturally occurring amino acid
  misc_feature (69)..(69): Xaa can be any naturally occurring amino acid
  misc_feature (88)..(88): Xaa can be any naturally occurring amino acid
  misc_feature (98)..(98): Xaa can be any naturally occurring amino acid
  Coding DNA Sequence Number=SeqID_4157
XFSHLYTFYHYCTSIGITTRXGAXRVLPAHLILALSPPHRACVMCXXGVLCXQLCLXEEFVLSVAXLCXLCMLPLARRLRFSVALSIXSTSIVLSCAXHTVVKTLVAAVGLHFYFCSDCYLVSRRVAL

SEQ ID NO: 7594 - protein, 242 aa, Glycine max
  misc_feature (18)..(18): Xaa can be any naturally occurring amino acid
  misc_feature (69)..(69): Xaa can be any naturally occurring amino acid
  misc_feature (78)..(78): Xaa can be any naturally occurring amino acid
  misc_feature (101)..(101): Xaa can be any naturally occurring amino acid
  misc_feature (103)..(103): Xaa can be any naturally occurring amino acid
  misc_feature (131)..(131): Xaa can be any naturally occurring amino acid
  misc_feature (144)..(144): Xaa can be any naturally occurring amino acid
  misc_feature (156)..(156): Xaa can be any naturally occurring amino acid
  misc_feature (164)..(164): Xaa can be any naturally occurring amino acid
  misc_feature (172)..(172): Xaa can be any naturally occurring amino acid
  misc_feature (178)..(178): Xaa can be any naturally occurring amino acid
  misc_feature (220)..(220): Xaa can be any naturally occurring amino acid
  misc_feature (242)..(242): Xaa can be any naturally occurring amino acid
  Coding DNA Sequence Number=SeqID_4159
  Subcellular localization annotation: CTP_CleavageSite=64; ConfidenceScore=5.21e-01
SEHTSFGHAARGLIESRXTLDSVHRAARCVPRTYHTRTSRACVSVSISTIRRRNRAHSNHLVVSCGVGXVRDRPCLMXRIRTSVISHHGTIRADMSHPSSXDXCLTQLSHDLSESHDIHLYDIVIHTYSTXRYLAYSHSHISLXHLSIRRTSSCAXLATLLSSXSITITNQXTACASXPPNRHSSLAYTLDDDSYSAMHRVSDYCTRREAAARHTQRARXHHAMSAQYKQLDQRSTIASIHX

SEQ ID NO: 7595 - protein, 571 aa, Glycine max
  misc_feature (523)..(523): Xaa can be any naturally occurring amino acid
  misc_feature (545)..(547): Xaa can be any naturally occurring amino acid
  misc_feature (552)..(552): Xaa can be any naturally occurring amino acid
  misc_feature (563)..(563): Xaa can be any naturally occurring amino acid
  Coding DNA Sequence Number=SeqID_4161
  Homolog annotation: Hit_ID=A0BWQ2; Match level="QueryCoverage=81%, HitCoverage=77%, E-value=7e-25, Identity=22%"; Hit description =Chromosome undetermined scaffold_132, whole genome shotgun sequence
MTTTHIHETIHEYPAPIITPNYPAIAIEELSQRYKALIEAERKHFMTTEQEYNDFIYKMDMIHQELESKVQGQTRTIDELRRDNEELARRLRELENDYFKKSDTLKKLYYVYNHLTKKLQAAEFDNLDLRTTIDKTSDRNFEINTDLKHAISEKNYLDDRMSDQHSRHTMELNRLNGILVDKDKQILDRDREIDRLNAEMRRILEDLHRQKMDADSLRMNYEGMLRSKDIETAQLRRLLEEQRNLVLTENRSIPIVDLSGNEETIRKLKTSLEEAYRTIEQLSQRKHVEIIERPKVVEKIVEKIVEKHVERSPRRNYGDDDEERVLRSGNKMRSPHRGGEDQDNRWDEDRLERLLAIAEKAFNKKLVHLYYIIWKLLFHIEHLDRLNKKQRRGSTDGQEREKMARSMPTMSLEYGDSVISLYHDLRTGIVDFIFEIFIRSANHAHQKKVNSLILFIINVKELKERNIGFYLLLLDTFMRIRDVVKIHVKTGQRGIEGGIANGISTGGSPDKRKTVDVEFRDMXNSWIQDTLESVKKRRNYDKHDXXXMEYLXLFRLLAIKYRXIYPLRGKA

SEQ ID NO: 7596 - protein, 260 aa, Glycine max
  misc_feature (174)..(174): Xaa can be any naturally occurring amino acid
  misc_feature (201)..(201): Xaa can be any naturally occurring amino acid
  misc_feature (210)..(210): Xaa can be any naturally occurring amino acid
  misc_feature (236)..(236): Xaa can be any naturally occurring amino acid
  Coding DNA Sequence Number=SeqID_4162
  Gene Ontology: Mol. function=aspartic-type endopeptidase activity; Cellular component=endoplasmic reticulum
  Homolog annotation: Hit_ID=O81062; Match level="QueryCoverage=100%, HitCoverage=75%, E-value=4e-78, Identity=57%"; Hit description =Expressed protein
  Pfam annotation: Domain name=Peptidase_A22B; Domain location=47-260; Score=33.4; E_value=1e-12; Accession=PF04258.4; Description=Signal peptide peptidase
MKNTERIANLAVAGLTLAPLIVKVDSNVNVILTACLTVYVGCYRSVKPTPPTETMSNEHAMRFPFVGSAMLLSLFLLFKFLSKDLVNAVLTGYFFLLGIVALSATLLSSVKRFLPKHWNEDPIVWRFPYFHSLEIEFTKSQIIATIPKTFFCAWYALQKHWLANNILDLAFYIXEIKILSLKSFKTNTILLTKLCIYNIFXIFFTPMIIXITKSCNTPINALFPTANSTKPCSILXLNNIIIPNICIPLTLQVNISKRKQ

SEQ ID NO: 7597 - protein, 200 aa, Glycine max
  Coding DNA Sequence Number=SeqID_4163
  Gene Ontology: Mol. function=DNA binding; Biological process=DNA recombination
  Homolog annotation: Hit_ID=A7IDG3; Match level="QueryCoverage=100%, HitCoverage=42%, E-value=1e-93, Identity=88%"; Hit description =Integrase domain protein SAM domain protein
RRGGKTVWQAGRDDVLAFHRARRLSAAPYRISAASWNRSVAALDKLYRWAVEEGIIAISPFSYGATLRRAGGSRAVLAVTTNRARERAARRHDTRYIDLGRYLLFREVGLRGRLPDGSEDATWRGRNGERNALFAELLVTTGLRLTEAGSLLLSELPRLTDPESRSVPFDLPGPIAKGGRPRRIRVPRRVLRLIGDYVDL

SEQ ID NO: 7598 - protein, 126 aa, Glycine max
  misc_feature (46)..(46): Xaa can be any naturally occurring amino acid
  misc_feature (59)..(59): Xaa can be any naturally occurring amino acid
  Coding DNA Sequence Number=SeqID_4164
VRHTSTPINKWSEDPRYIYLYVARHTPTHYAHHHIKHNKTKKQLYXNTTYHPNKYSLFXSRRQCYSSLSCFAYVRDTALHREAARAWCRRGWCLHYSDILSRPPSLCAVIIMVLSLMLCDLVRNRS

SEQ ID NO: 7599 - protein, 108 aa, Glycine max
  misc_feature (71)..(72): Xaa can be any naturally occurring amino acid
  misc_feature (87)..(87): Xaa can be any naturally occurring amino acid
  misc_feature (95)..(95): Xaa can be any naturally occurring amino acid
  misc_feature (105)..(108): Xaa can be any naturally occurring amino acid
  Coding DNA Sequence Number=SeqID_4165
TSVLRCVLSRVRCVPPLTILHMLLLLCTLLQTCAYSTAHSVVTLSLSYPHVRALRVMCVGQDAYCALRAMXXTRDRSALVAISPLCXTSSCMSVXLVVRCVDVCXXXX

SEQ ID NO: 7600 - protein, 115 aa, Glycine max
  misc_feature (40)..(40): Xaa can be any naturally occurring amino acid
  misc_feature (76)..(76): Xaa can be any naturally occurring amino acid
  Coding DNA Sequence Number=SeqID_1473
RGGAAQRTRALFIVQLSNIYLTDEVISYHRAPCSAHYHLXRSSRACCRHCRSSRSHTTLITPALRGALSRPPWLPXSTHPLHYNPHLRRPNNRARWLSSRRLTSADNTHMFNNRI

SEQ ID NO: 7601 - protein, 162 aa, Glycine max
  Coding DNA Sequence Number=SeqID_1475
  Homolog annotation: Hit_ID=Q9FXS9; Match level="QueryCoverage=64%, HitCoverage=100%, E-value=1e-27, Identity=58%"; Hit description =Elicitor inducible protein
  Pfam annotation: Domain name=WI12; Domain location=59-162; Score =213.0; E_value=6.9e-61; Accession=PF07107.2; Description=Wound -induced protein WI12
SRKLFQELDTLADSETKNRDVVLKLYDALRSRDVDSVHRTLTPDLDYWFHGPPPHQFLMRTLTGVSPPFEFSPLSVVSFGSTVIAEGCDAASSVSWIHAWTVSHGVITQVREYSNTSLTVTRIGSVVSGRSAEIRASHCPSVWESKFSGRAGKSVPGLVLAI

SEQ ID NO: 7602 - protein, 71 aa, Glycine max
  Coding DNA Sequence Number=SeqID_1476
PYLIMVIWAKQEKKTFKKRGTFIRLILILETQIKFSRFIYRDHYIYSSRHTRIMIHQTTCVVTCAYLILFI

SEQ ID NO: 7603 - protein, 104 aa, Glycine max
  Coding DNA Sequence Number=SeqID_1477
RPLAQPPHSKYYRYLIHFVLLPFPSLPLHFQSLSHAQLHAMSFILQEINGTILRETSAQVAVCLELYRLCPTMPLSHSRRENSEVILDCRHLLSSSQLPHHVGV

SEQ ID NO: 7604 - protein, 117 aa, Glycine max; identical to SEQ ID NO: 6401
  Coding DNA Sequence Number=SeqID_1479
  Subcellular localization annotation: CTP_CleavageSite=42; ConfidenceScore=5.65e-01

SEQ ID NO: 7605 - protein, 76 aa, Glycine max
  Coding DNA Sequence Number=SeqID_1481
  Subcellular localization annotation: CTP_CleavageSite=71; ConfidenceScore=5.04e-01
MRRRRAQGMPRLLGAYRSRAPGFTAVTAARRSQVALSKSSWEGEGRRLPPDLKRRRRREATGEMEERGGCRLMAHS

SEQ ID NO: 7606 - protein, 118 aa, Glycine max
  misc_feature (72)..(72): Xaa can be any naturally occurring amino acid
  Coding DNA Sequence Number=SeqID_1483
  Gene Ontology: Mol. function=metal ion binding
  Homolog annotation: Hit_ID=A7QSP4; Match level="QueryCoverage=90%, HitCoverage=19%, E-value=1e-28, Identity=59%"; Hit description =Chromosome undetermined scaffold_161, whole genome shotgun sequence
NELFSVKIICVFGLYIWCAAADPADPGVFKSKKYLKIPDSKKLAELKNSKLGGESTSSMHDGNASTVVQVTXSSEQQASEDGMFYCSLCEVEVSRSSILQVLILKCIHYNNAWSFHSV

SEQ ID NO: 7607 - protein, 107 aa, Glycine max
  misc_feature (60)..(60): Xaa can be any naturally occurring amino acid
  misc_feature (77)..(77): Xaa can be any naturally occurring amino acid
  Coding DNA Sequence Number=SeqID_1484
PCHDNNAMAMRKKLTTRALGVYMRIIRSRALSQRLRCVPGSHHVTDTLTIETLILRAQPXFRTHTTYIPKRPVCQTXNAEILTYTPDLCHNSLGCASPLYSTSDRRV

SEQ ID NO: 7608 - protein, 165 aa, Glycine max
  misc_feature (81)..(81): Xaa can be any naturally occurring amino acid
  misc_feature (89)..(89): Xaa can be any naturally occurring amino acid
  Coding DNA Sequence Number=SeqID_4167
  Gene Ontology: Mol. function=cytokinin dehydrogenase activity; Cellular component=extracellular region; Biological process =cytokinin metabolic process
  Homolog annotation: Hit_ID=Q9T0N8; Match level="QueryCoverage=61%, HitCoverage=20%, E-value=3e-21, Identity=51%"; Hit description =Cytokinin dehydrogenase 1 precursor
MAIVYVLLVALITAASHAPHGAHGQTWHGDLAALAAAGKLRSDPNATLAASTDFGNITAALPGGVLFPSSPADVAALLRAXNTTVAWAXTISFRGRGQSVMGAGLALGGGGPHMPSLGGPGLRGGIQRGRGTAKNPPPGGNKRGDQPPGVKLWNAGGGPASRGTE

SEQ ID NO: 7609 - protein, 85 aa, Glycine max
  misc_feature (1)..(1): Xaa can be any naturally occurring amino acid
  misc_feature (14)..(15): Xaa can be any naturally occurring amino acid
  misc_feature (20)..(20): Xaa can be any naturally occurring amino acid
  misc_feature (22)..(22): Xaa can be any naturally occurring amino acid
  misc_feature (31)..(32): Xaa can be any naturally occurring amino acid
  misc_feature (37)..(37): Xaa can be any naturally occurring amino acid
  misc_feature (43)..(43): Xaa can be any naturally occurring amino acid
  misc_feature (52)..(52): Xaa can be any naturally occurring amino acid
  misc_feature (54)..(54): Xaa can be any naturally occurring amino acid
  misc_feature (58)..(58): Xaa can be any naturally occurring amino acid
  misc_feature (65)..(68): Xaa can be any naturally occurring amino acid
  misc_feature (70)..(70): Xaa can be any naturally occurring amino acid
  misc_feature (73)..(73): Xaa can be any naturally occurring amino acid
  misc_feature (78)..(78): Xaa can be any naturally occurring amino acid
  misc_feature (85)..(85): Xaa can be any naturally occurring amino acid
  Coding DNA Sequence Number=SeqID_4168
XVDDYVNSKIIFFXXQLIKXIXLQKNEGEIXXLIKAXNAGKLXNDFHSLKSXLXSRGXGLFIQNXXXXLXPSXMQTTXTAKGTAX

SEQ ID NO: 7610 - protein, 101 aa, Glycine max
  Coding DNA Sequence Number=SeqID_4169
  Gene Ontology: Mol. function=DNA binding; Cellular component =chromosome; Biological process=nucleosome assembly
  Homolog annotation: Hit_ID=P59169; Match level="QueryCoverage=100%, HitCoverage=74%, E-value=2e-25, Identity=61%"; Hit description =Histone H3.3
  Pfam annotation: Domain name=Histone; Domain location=33-101; Score =8.0; E_value=0.024; Accession=PF00125.14; Description=Core histone H2AH2BH3H4
ARKSAPTTGGVNNPHRYRPDTAAPRESTKYQNNTDLPITKLPRHRVARAIAHHIQTELRVQSHAVLASQDTAEADHAALLEDTNPRAIHPQHGTIMPKNIR

SEQ ID NO: 7611 - protein, 126 aa, Glycine max; identical to SEQ ID NO: 6147
  misc_feature (26)..(26): Xaa can be any naturally occurring amino acid
  misc_feature (60)..(60): Xaa can be any naturally occurring amino acid
  misc_feature (83)..(83): Xaa can be any naturally occurring amino acid
  misc_feature (94)..(94): Xaa can be any naturally occurring amino acid
  misc_feature (125)..(125): Xaa can be any naturally occurring amino acid
  Coding DNA Sequence Number=SeqID_4170

SEQ ID NO: 7612 - protein, 137 aa, Glycine max
  Coding DNA Sequence Number=SeqID_4172
  Subcellular localization annotation: CTP_CleavageSite=62; ConfidenceScore=5.83e-01
SNQTMTTASFSSFTGSALTFSGAAATATASTFSVAASTFSTFSVAAATSPAEDDSSTAAATSASAAGAVSLVGSTSDVSLASTEVVSVVSVWFCFSPLSSVLISLATTFSDTGLGTEPSLFMSDSLGLLAQPPIIYL

SEQ ID NO: 7613 - protein, 202 aa, Glycine max
  misc_feature (51)..(51): Xaa can be any naturally occurring amino acid
  misc_feature (90)..(90): Xaa can be any naturally occurring amino acid
  misc_feature (159)..(159): Xaa can be any naturally occurring amino acid
  misc_feature (197)..(197): Xaa can be any naturally occurring amino acid
  Coding DNA Sequence Number=SeqID_4173
YIYIYRIRRDECYIIIIVEIYIYWWIIQSGGVMRAGDDINTISASLQHYIXDVRGKQKEMLCVTAPTHEGWWWGEVVTHGVLGKDVYTSXHHHTHFFMPRMLLAYGVTQVVRCCDVRSLCPYSLSRDSPTQRASARCAHPSHSHRSSMYSWVSVACDPXHSLRVVLSPSSLVISFRLVALASLSEKIALGLGQMRYXCARSS

SEQ ID NO: 7614 - protein, 457 aa, Glycine max
  Coding DNA Sequence Number=SeqID_4175
  Gene Ontology: Mol. function=heat shock protein binding; Cellular component=cytoplasm; Biological process=protein folding
  Homolog annotation: Hit_ID=Q1GFL5; Match level="QueryCoverage=53%, HitCoverage=66%, E-value=7e-16, Identity=26%"; Hit description =Putative uncharacterized protein
  Pfam annotation: Domain name=DnaJ; Domain location=389-452; Score =126.5; E_value=7.5e-35; Accession=PF00226.21; Description=DnaJ domain
MPTLVNLHVYFKRIKPLSIKRLSSCIHQSSHTRSYATSSNNKQYKGLHKTIDTQTAVQNFNSWASDLWFAPREWQAHLGDKIKCHYLPFWHFNGVGTLSYIGRIGFNRTRRVLINNKESYETYIDWRIIPIRHVTNFHFSNNVYASYELERDHVNKLAPWDQDEITNLISSDLNDSNVDTYTVDSGTAYSLGWNEQLYYIVEKACLYDLRNSNVNIGDHYDIHSFDLHESRLQYTMVYFPAYVLQYTYQNSEFQVLMNARSGVIRGYRQYDENKITATVFGAAGLSYLVGSFYLANEVSFFGAVLFVFVPSFIAGIGMRFFPQFMQTYYRPFMKQHGRFSQKIPEGGSESEYEEINQSEEARRQEREERQNQYGRSNRQQSQSQSKSKDLYAVLGVSKNATLPEIKKAYRKKAMENHPDRNPNNKTEAERKFREINAAYQVLSDDRARADYDRYGTY

SEQ ID NO: 7615 - protein, 116 aa, Glycine max
  misc_feature (62)..(63): Xaa can be any naturally occurring amino acid
  misc_feature (91)..(91): Xaa can be any naturally occurring amino acid
  misc_feature (105)..(105): Xaa can be any naturally occurring amino acid
  misc_feature (109)..(109): Xaa can be any naturally occurring amino acid
  Coding DNA Sequence Number=SeqID_4176
IEQCTTMLVHIVSTRTTYNDHHPRSNTIHLTYSIDRRAHRTERTFTAEQNKVNRREHTHTRXXGLRGRAMSHTGRQWLAIFWYVVRWKRIXHIHTHTRLLHHQRXKQIXTYNKHTP

SEQ ID NO: 7616 - protein, 104 aa, Glycine max
  misc_feature (49)..(49): Xaa can be any naturally occurring amino acid
  misc_feature (64)..(64): Xaa can be any naturally occurring amino acid
  Coding DNA Sequence Number=SeqID_4177
  Gene Ontology: Mol. function=glutathione transferase activity; Cellular component=cytoplasm; Biological process=response to stress
  Homolog annotation: Hit_ID=Q9FQE5; Match level="QueryCoverage=100%, HitCoverage=47%, E-value=1e-36, Identity=73%"; Hit description =Glutathione S-transferase GST 13
  Pfam annotation: Domain name=GST_N; Domain location=1-63; Score=17.7; E_value=0.014; Accession=PF02798.10; Description=Glutathione S -transferase, N-terminal domain
GKWASPFSNRLDLALKLKGVPYKYSREDLANKSADLLRYNPVHKKEPVXVHDENTLPETLINEXNINETWKSKYLVPRDPYERALARYSSKTLGDRMSAAISKA

SEQ ID NO: 7617 - protein, 140 aa, Glycine max
  misc_feature (15)..(15): Xaa can be any naturally occurring amino acid
  misc_feature (38)..(38): Xaa can be any naturally occurring amino acid
  misc_feature (70)..(70): Xaa can be any naturally occurring amino acid
  misc_feature (87)..(87): Xaa can be any naturally occurring amino acid
  misc_feature (103)..(103): Xaa can be any naturally occurring amino acid
  misc_feature (120)..(120): Xaa can be any naturally occurring amino acid
  misc_feature (130)..(130): Xaa can be any naturally occurring amino acid
  misc_feature (136)..(136): Xaa can be any naturally occurring amino acid
  misc_feature (140)..(140): Xaa can be any naturally occurring amino acid
  Coding DNA Sequence Number=SeqID_4178
RTREVEKERRNYDQXPPPIYKTTATPRNDTPSHNPPHXCNSVRENYARRALSDNAISAYAAEILAAYIVXQRAEKQQIDWTETSSTXHIAVYNVWRGQHTTQXYVSICYSARSPAISCAXIHIRERGEIXGRTTYXNSAX

SEQ ID NO: 7618 - protein, 124 aa, Glycine max
  misc_feature (68)..(68): Xaa can be any naturally occurring amino acid
  misc_feature (82)..(82): Xaa can be any naturally occurring amino acid
  Coding DNA Sequence Number=SeqID_4180
ERTTQRTYRSANIESILCIHRSASPIILLAIKLLEQLSHITPSLTQPPRLASCTSLRRHCMSSYQTIXISTQCYITDSPTSXALMYMCVFSPAESAYTRHLVYIDDDTLQSIDTIARLYIYDDV

SEQ ID NO: 7619 - protein, 194 aa, Glycine max
  misc_feature (19)..(19): Xaa can be any naturally occurring amino acid
  misc_feature (179)..(180): Xaa can be any naturally occurring amino acid
  Coding DNA Sequence Number=SeqID_4182
VTEDARAHLAATTSDHTKXLYPLYIVYRSDCCRSCPHLMNSARRESIVDLGAGINMFSGRSYYTLDTHQLHNIATGSAHQVASDDTIDRPQDGTYLRADIRYVAATVHALYRRRFTRLSVRRKHYDHEYTKFARQQTAVSSLALSIVFIAYTTAMPHPPTKLLCRTPLSRPTTPATSDXXIHSSAPDTARDKYA

SEQ ID NO: 7620 - protein, 77 aa, Glycine max
  Coding DNA Sequence Number=SeqID_4184
  Gene Ontology: Mol. function=transcription regulator activity; Cellular component=nucleus; Biological process=regulation of transcription
  Homolog annotation: Hit_ID=A2XJY8; Match level="QueryCoverage=81%, HitCoverage=13%, E-value=2e-21, Identity=77%"; Hit description =Putative uncharacterized protein
  Pfam annotation: Domain name=HLH; Domain location=19-68; Score=59.4; E_value=1.2e-14; Accession=PF00010.16; Description=Helix-loop-helix DNA-binding domain
MEDGRALRRMSIPTRRSRSADFHNFSERRRRDKINEKLKALQELLPNCTKTDKVSMLDEAIDYLKSLQLQLQMLVMG

SEQ ID NO: 7621 - protein, 89 aa, Glycine max
  Coding DNA Sequence Number=SeqID_4185
QLEAICGIYSCPSVTEGVGGLAGVVVSTLGFYWADCFHSLPPQYVVLVCIVSEENYSGRSKTLFLNFGNFILLGIQYCGSYLLNSKVGH

SEQ ID NO: 7622 - protein, 66 aa, Glycine max
  Coding DNA Sequence Number=SeqID_4187
  Subcellular localization annotation: CTP_CleavageSite=60; ConfidenceScore=5.47e-01
TWPPSLLQPLSIPSLHWPLKGKRRQSECRRSLKSQLPKPQGSAASRLPSKTLESLLWPTAASAVSG

SEQ ID NO: 7623 - protein, 190 aa, Glycine max
  misc_feature (4)..(4): Xaa can be any naturally occurring amino acid
  misc_feature (7)..(7): Xaa can be any naturally occurring amino acid
  misc_feature (10)..(10): Xaa can be any naturally occurring amino acid
  misc_feature (13)..(13): Xaa can be any naturally occurring amino acid
  misc_feature (36)..(36): Xaa can be any naturally occurring amino acid
  misc_feature (77)..(77): Xaa can be any naturally occurring amino acid
  misc_feature (83)..(83): Xaa can be any naturally occurring amino acid
  misc_feature (86)..(86): Xaa can be any naturally occurring amino acid
  misc_feature (96)..(97): Xaa can be any naturally occurring amino acid
  misc_feature (121)..(121): Xaa can be any naturally occurring amino acid
  misc_feature (142)..(142): Xaa can be any naturally occurring amino acid
  misc_feature (159)..(159): Xaa can be any naturally occurring amino acid
  misc_feature (166)..(166): Xaa can be any naturally occurring amino acid
  misc_feature (179)..(179): Xaa can be any naturally occurring amino acid
  Coding DNA Sequence Number=SeqID_4189
TVVXHPXTLXHFXSSSHLYYLCTPLYYLVVSHPLPXQTHHSTKIAHILGRFIALLILCGLMREIARRCARTHAHSSXGVPISXRVXDISSQDTPFXXETYTATLQIHRHSVHIEEPHSSRXRSPSLTHIHDRYMIHSTKLTXEYTQLMHEHETSLRRRXLAHEYDXQRRRVSSDDVVTXHILRHARTRCV

SEQ ID NO: 7624 - protein, 120 aa, Glycine max
  Coding DNA Sequence Number=SeqID_4193
  Subcellular localization annotation: CTP_CleavageSite=30; ConfidenceScore=5.12e-01
TNSNTAAQSTPSPPAIHWFPPLGSNGHQIYLSLLSSLFGNNEDIASVLVGNGYVTNSAQTSSEKSNMKVSTQYSQDRYLIKTTTLSFVSMAALISFSIFFYFLRFPERVITFSVVLQLKE

SEQ ID NO: 7625 - protein, 115 aa, Glycine max; identical to SEQ ID NO: 6160
  Coding DNA Sequence Number=SeqID_4195

SEQ ID NO: 7626 - protein, 79 aa, Glycine max
  misc_feature (7)..(7): Xaa can be any naturally occurring amino acid
  misc_feature (10)..(10): Xaa can be any naturally occurring amino acid
  misc_feature (12)..(13): Xaa can be any naturally occurring amino acid
  misc_feature (15)..(17): Xaa can be any naturally occurring amino acid
  misc_feature (29)..(29): Xaa can be any naturally occurring amino acid
  misc_feature (48)..(48): Xaa can be any naturally occurring amino acid
  Coding DNA Sequence Number=SeqID_4197
FFFCCFXFFXEXXRXXXKEAARTGDTAKXTTHMTQAFSYIHFRWFSLXAARRERALIGWDVFILTNTSLSCSHSSSVSL

SEQ ID NO: 7627 - protein, 152 aa, Glycine max
  misc_feature (86)..(86): Xaa can be any naturally occurring amino acid
  Coding DNA Sequence Number=SeqID_4199
  Gene Ontology: Mol. function=nutrient reservoir activity; Cellular component=vacuole; Biological process=protein oligomerization
  Homolog annotation: Hit_ID=P04405; Match level="QueryCoverage=98%, HitCoverage=30%, E-value=2e-62, Identity=76%"; Hit description =Glycinin G2 precursor [Contains: Glycinin A2 subunit; Glycinin B1a subunit]
  Pfam annotation: Domain name=Cupin_1; Domain location=1-144; Score =96.7; E_value=7e-26; Accession=PF00190.13; Description=Cupin
TEGGFIETWNPNNKPFQCAGVALSRCTLNRNALRRPYYTNGPQEIYIQQGNGLFGMIFPVCPITYQEPHDSQQRGRRQWPQDRYQXVHRFTERELIALPTGVAWLMYNNDNTSLVSVSIIDTNSSHYQLDQMRMTFYLAAIQVHHLLTTQLH

SEQ ID NO: 7628 - protein, 185 aa, Glycine max
  misc_feature (151)..(151): Xaa can be any naturally occurring amino acid
  misc_feature (159)..(159): Xaa can be any naturally occurring amino acid
  misc_feature (175)..(175): Xaa can be any naturally occurring amino acid
  misc_feature (180)..(180): Xaa can be any naturally occurring amino acid
  Coding DNA Sequence Number=SeqID_4200
  Homolog annotation: Hit_ID=Q9LVM2; Match level="QueryCoverage=100%, HitCoverage=88%, E-value=2e-81, Identity=79%"; Hit description =Genomic DNA, chromosome 5, P1 clone:MCK7
  Subcellular localization annotation: CTP_CleavageSite=45; ConfidenceScore=5.26e-01
MASHAVCIQRVALPCFEASLANKSKTISPFSVNIARRKRRSSGVRCSLVDFIGGDLVKPDIGRWLEDVEKHKAIAIYTPHEGGYEGRYLNRLKEQGYYFLDISARGLGDPETTLLNPYPVCPAHLGKQPIARWYYPPEVDYRLSALPPSAXGLVVWIIXAKVLSKSELQFLALLXPSLRXSVRVI

SEQ ID NO: 7629 - protein, 150 aa, Glycine max
  misc_feature (24)..(25): Xaa can be any naturally occurring amino acid
  Coding DNA Sequence Number=SeqID_4201
  Subcellular localization annotation: CTP_CleavageSite=73; ConfidenceScore=5.33e-01
NIIIRSSSSSSITIAMPIGSFLPXXVMPPRVALPGMLPNPSRPRSRPSGNQCAPDSARLDGDGESGSGGGRVSTSGKPAAGRGRGRGAGSQRRGSAGRTASGGSYSRRRRRRRRRRRLEEQRRASGSEGIGRGEAASYRGPISVTERDRR

SEQ ID NO: 7630 - protein, 140 aa, Glycine max
  misc_feature (140)..(140): Xaa can be any naturally occurring amino acid
  Coding DNA Sequence Number=SeqID_4203
  Subcellular localization annotation: CTP_CleavageSite=78; ConfidenceScore=5.46e-01
SVVIKAKGQNMMYSIPDLFFCRSASVQLFCLPPYPHQCRARPVRPPRPSSTRIGTSTSHLIASRRRLRLPSLSPLECLCAQGAEGGGAPGGHPHYHRLRESPPSINHPAHTTHSSSPTVNLHPPTHPPPCMNTTICDLDX

SEQ ID NO: 7631 - protein, 178 aa, Glycine max
  misc_feature (17)..(17): Xaa can be any naturally occurring amino acid
  misc_feature (53)..(53): Xaa can be any naturally occurring amino acid
  misc_feature (156)..(156): Xaa can be any naturally occurring amino acid
  misc_feature (159)..(159): Xaa can be any naturally occurring amino acid
  Coding DNA Sequence Number=SeqID_4205
  Subcellular localization annotation: CTP_CleavageSite=33; ConfidenceScore=5.19e-01
HRRRSISVRAALGPSVXSLSTFVRISRTSRECSSSPIQSIITILHALRALLTXARRHSHCSSSPTPAPLPRTRAPRRCYILRCAPSHPAQRIRKRDAHTALLRRSSSALPLLSPPISLIAAHLTSNSRSHKRVGQTEMSTIFCRVAQENNASHISXTIXIHIAEFMRIRIVVGHRHSR

SEQ ID NO: 7632 - protein, 106 aa, Glycine max
  Coding DNA Sequence Number=SeqID_4207
  Subcellular localization annotation: CTP_CleavageSite=30; ConfidenceScore=5.04e-01
RPPHSYQTSTLTTKPSRRVCVVESLSRETSCASAFDTYTRLFRTARSGYSTIYLIKYGTGSRWTVCLYDCPMYPHSSYRHLYLAGRKHARSLIDASAAKTKKNRHS

SEQ ID NO: 7633 - protein, 111 aa, Glycine max
  misc_feature (4)..(4): Xaa can be any naturally occurring amino acid
  misc_feature (68)..(68): Xaa can be any naturally occurring amino acid
  misc_feature (84)..(84): Xaa can be any naturally occurring amino acid
  Coding DNA Sequence Number=SeqID_4209
  Subcellular localization annotation: CTP_CleavageSite=72; ConfidenceScore=5.22e-01
RDTXQSRDELRLPMYSAIYARTLSLFPSRPGLAQYSSLASTAARARRRTFMRTHYGGSGACSRRMSVXICTRESRRVHPHKPTXFILLMILVNCHDCDLFFWLCEQSQSCM

SEQ ID NO: 7634 - protein, 155 aa, Glycine max
  Coding DNA Sequence Number=SeqID_4211
  Homolog annotation: Hit_ID=A7R3K2; Match level="QueryCoverage=74%, HitCoverage=60%, E-value=8e-21, Identity=45%"; Hit description =Chromosome undetermined scaffold_533, whole genome shotgun sequence
MKKQIMDESENLCFKKSLMSPPPPPPLPPSPGYGSRKIDGDSITNIQIKKFWRQKQIIEEEHLFAAIKAAARVRARNLSDEDYKRFEESLDIQDPEIEAHEGIKDWWMKSKFAYLNQPALGSSDSLKRKRFSSDVPNYFSFKPCIPLYATSLNVF

SEQ ID NO: 7635 - protein, 330 aa, Glycine max
  misc_feature (78)..(78): Xaa can be any naturally occurring amino acid
  misc_feature (190)..(190): Xaa can be any naturally occurring amino acid
  misc_feature (203)..(203): Xaa can be any naturally occurring amino acid
  misc_feature (211)..(211): Xaa can be any naturally occurring amino acid
  misc_feature (238)..(238): Xaa can be any naturally occurring amino acid
  misc_feature (240)..(240): Xaa can be any naturally occurring amino acid
  misc_feature (271)..(271): Xaa can be any naturally occurring amino acid
  misc_feature (281)..(281): Xaa can be any naturally occurring amino acid
  misc_feature (296)..(296): Xaa can be any naturally occurring amino acid
  misc_feature (303)..(303): Xaa can be any naturally occurring amino acid
  misc_feature (326)..(326): Xaa can be any naturally occurring amino acid
  Coding DNA Sequence Number=SeqID_4212
SALSLAVILMHSTALCESHDQSPPPTTLSQHRRAYWQASEACHERIRAKDKNDRRLPPHTFRSRSHPPHPRTPTRRRXNHNHRTTHPRQHRREPTPQHTWAPQKQNHKQPTPRPRARGTAGIPRQRRRAPQHGTLTTKTHQNPRPTALDNNRLEDKARHAHHTVHNSEHQHAKLEVRRTPRTHTHTTRTXMRRDSQPLFHHYXHAHADTNXHGTKRRSRTHNPHTRREERATARSAHXAXDDDATRAAPVYPQLYDNRRPQHEHNDIEVSXHANAAHHRAXHRSQPRDSPDGTAEXRASTHMXTAHATRRAHLHASHYDARARPPXTAHD

SEQ ID NO: 7636 - protein, 171 aa, Glycine max
  misc_feature (122)..(122): Xaa can be any naturally occurring amino acid
  Coding DNA Sequence Number=SeqID_4213
  Gene Ontology: Mol. function=threonine endopeptidase activity; Cellular component=proteasome core complex; Biological process =ubiquitin-dependent protein catabolic process
  Homolog annotation: Hit_ID=Q9LST4; Match level="QueryCoverage=62%, HitCoverage=41%, E-value=3e-48, Identity=87%"; Hit description=Beta 7 subunit of 20S proteasome
KKEAEHAQKGKGKRGAHHTTPPKPDRQTEPAPASDEASQAKPRSNPPPPESMDGSHSHAAGGGEGTQRTLNPYVTGNSVIAMKYKDGVIMACDTGASYGSTLRYKSVERIKEVGKHSLIGGXVGEFSDFQEILRYLDELTLNDHMWDDGNSLGPKEIHAYLTRVMYNRRNK

SEQ ID NO: 7637 - protein, 126 aa, Glycine max
  misc_feature (124)..(125): Xaa can be any naturally occurring amino acid
  Coding DNA Sequence Number=SeqID_4214
  Gene Ontology: Mol. function=structural constituent of ribosome; Cellular component=ribonucleoprotein complex; Biological process =translation
  Homolog annotation: Hit_ID=Q9S9P1; Match level="QueryCoverage=81%, HitCoverage=71%, E-value=6e-48, Identity=91%"; Hit description=40S ribosomal protein S12-1
  Pfam annotation: Domain name=Ribosomal_L7Ae; Domain location=29-124; Score=114.0; E_value=4.6e-31; Accession=PF01248.16; Description =Ribosomal protein L7AeL30eS12eGadd45 family
MSGEEAAPVVVPPVAEPAAIIPEDMDLLTALELTLRKARAHGGVVRGLHESAKLIEKRVAQLCVLAEDCNQPDYVKLVKALCADHNINLLTVPSAKTLGEWAGLCKIDSEGNARKVVGCSCLVXXD

SEQ ID NO: 7638 - protein, 207 aa, Glycine max
  misc_feature (125)..(125): Xaa can be any naturally occurring amino acid
  misc_feature (148)..(148): Xaa can be any naturally occurring amino acid
  misc_feature (166)..(166): Xaa can be any naturally occurring amino acid
  misc_feature (171)..(171): Xaa can be any naturally occurring amino acid
  misc_feature (187)..(188): Xaa can be any naturally occurring amino acid
  Coding DNA Sequence Number=SeqID_4215
  Gene Ontology: Mol. function=oxidoreductase activity; Cellular component=integral to membrane; Biological process=metabolic process
  Homolog annotation: Hit_ID=A7PCV0; Match level="QueryCoverage=100%, HitCoverage=64%, E-value=1e-70, Identity=68%"; Hit description =Chromosome chr17 scaffold_12, whole genome shotgun sequence
  Pfam annotation: Domain name=adh_short; Domain location=38-177; Score= -44.9; E_value=0.011; Accession=PF00106.15; Description=short chain dehydrogenase
MKATLRYLAGLAGRSGFGSNSTAEQVSEDCFSLLPSNLTDLITGATSGNGAEPVRVLAKRGVRVVIGARDLRKAKEVREKIQKGSPHAEVDLLEIDLSSFASVQRFCCLFIALELPLNILINNAXMYSQSMEFSEEKIEMTFATNYLXHTLLSKMLLATIIDTAQXTGIQXWSIDGSSVIHSWVKRXXFSFNDMLCGKKYNGTRAYA

SEQ ID NO: 7639 - protein, 95 aa, Glycine max
  misc_feature (28)..(28): Xaa can be any naturally occurring amino acid
  misc_feature (83)..(83): Xaa can be any naturally occurring amino acid
  Coding DNA Sequence Number=SeqID_4216
  Subcellular localization annotation: CTP_CleavageSite=47; ConfidenceScore=5.08e-01
HTYYHSKASTHLLANAPSRSHFSPIDIXRYWWLQGVSNIRSAHAGVSVESVSHLASRRNRVTAVRTPHHQFTIAFGECMFECXGLMMTKKHEHHI

SEQ ID NO: 7640 - protein, 330 aa, Glycine max
  misc_feature (164)..(164): Xaa can be any naturally occurring amino acid
  misc_feature (314)..(314): Xaa can be any naturally occurring amino acid
  Coding DNA Sequence Number=SeqID_4218
  Gene Ontology: Mol. function=transferase activity, transferring nitrogenous groups; Cellular component=mitochondrial inner membrane; Biological process=biosynthetic process
  Homolog annotation: Hit_ID=A7Q8X9; Match level="QueryCoverage=99%, HitCoverage=68%, E-value=1e-118, Identity=64%"; Hit description =Chromosome chr9 scaffold_65, whole genome shotgun sequence
  Pfam annotation: Domain name=Aminotran_1_2; Domain location=104-330; Score=-102.4; E_value=0.036; Accession=PF00155.11; Description =Aminotransferase class I and II
METPSACWDNWVGEALETLYSLKVLRSLRPICLRSSQPREFGADDDAFQVFDEMQHWDRSSVEVEIAETTFSRWMHDTPSSGDEIVCSATGGDGEAGASYEKFKKLILFSGNDYLGLSSHPTIGKAVAKAAQEHGMGPRGSALICGYTNYHRLLESSLADLKKXKRGFAANMALMTAIGSIGTLLAGNSIPSEDEKIAVFSDALNHASIIDGIRLTERQKSVKVYVYRHCDMSHLNMLVSNGGLGKKVVGTDSLCSMDGDYAPMVELADLRKRHGFLLVIDDAHGTFVCGKNGGGVAEEFNCEKDVDICIGSLXKAAGCHGRFIACTVSI

SEQ ID NO: 7641 - protein, 175 aa, Glycine max; identical to SEQ ID NO: 6192
  misc_feature (63)..(63): Xaa can be any naturally occurring amino acid
  misc_feature (114)..(114): Xaa can be any naturally occurring amino acid
  Coding DNA Sequence Number=SeqID_4219

SEQ ID NO: 7642 - protein, 129 aa, Glycine max
  Coding DNA Sequence Number=SeqID_4221
  Subcellular localization annotation: CTP_CleavageSite=74; ConfidenceScore=5.09e-01
TARAPRPLYTYLILTHLIIFSHVYLRVAASRAVFRRSFFIISSRRRRAAIRPIHALSPPCYFAVCPGSVPPPVRLSPLRHRLFSRSCVLLCSRVTSSRSSLCRGNIYVVRYYYNVLCGSLSLAHLYSRV

SEQ ID NO: 7643 - protein, 403 aa, Glycine max
  Coding DNA Sequence Number=SeqID_4223
LSKGREIIMESDYRIGDLQKLFEFMVSFFNNELQKGKELDILEQDKLIDCLRGKIPRHSFRFLEPVVGKEDESSKTRIHYRNFMRSNFEASNPDHSDRREQFDDRFKVSDKEGVDLVKKQVYNLDLKIEKSLYRKLHLKNNHFPFSFKNYREYLETRQNLNAENLNLPTHLQGEQVGYLSSYKGDILLSTTCKISRNSGKISDLVGISLNLSVGLSYKAIQEFFRSNPTCFEEFIKIFPAILRGMWHFDALVDQRNNHLFAQLAELLFYTEGARYLTSIAHIIMWLITEYYSERTPQNRTLLNLPFSLEEIMPVLRYVRGQHTYTNENIHYFYDYNLGLDMKSELLSEYLKKCSNLQNLYFRIIKEKFNFHEDDNYTFLKLLLIHLFFSKAPFFENITPEPKK

SEQ ID NO: 7644 - protein, 151 aa, Glycine max
  misc_feature (5)..(5): Xaa can be any naturally occurring amino acid
  misc_feature (9)..(9): Xaa can be any naturally occurring amino acid
  misc_feature (21)..(21): Xaa can be any naturally occurring amino acid
  misc_feature (23)..(23): Xaa can be any naturally occurring amino acid
  misc_feature (26)..(26): Xaa can be any naturally occurring amino acid
  misc_feature (38)..(38): Xaa can be any naturally occurring amino acid
  misc_feature (41)..(41): Xaa can be any naturally occurring amino acid
  misc_feature (50)..(51): Xaa can be any naturally occurring amino acid
  misc_feature (56)..(56): Xaa can be any naturally occurring amino acid
  misc_feature (61)..(61): Xaa can be any naturally occurring amino acid
  misc_feature (63)..(64): Xaa can be any naturally occurring amino acid
  misc_feature (91)..(91): Xaa can be any naturally occurring amino acid
  misc_feature (124)..(125): Xaa can be any naturally occurring amino acid
  misc_feature (131)..(131): Xaa can be any naturally occurring amino acid
  misc_feature (138)..(138): Xaa can be any naturally occurring amino acid
  Coding DNA Sequence Number=SeqID_433
GGSGXRDNXMGLYTVSHTIIXIXSSXYAIVLMLYSIIXLFXHPPAPRPGXXERWHXYFTIXPXXSSLAVYPACVSIVYGATTTRGDDVGMXTIQSTTHTRRVFFAVGRVERWCVCRSLPSCSLXXCVCRTXSARLCAXASVSLRSISTSYL

SEQ ID NO: 7645 - protein, 140 aa, Glycine max
  misc_feature (52)..(52): Xaa can be any naturally occurring amino acid
  Coding DNA Sequence Number=SeqID_435
  Gene Ontology: Mol. function=malate synthase activity; Cellular component=glyoxysome; Biological process=tricarboxylic acid cycle
  Homolog annotation: Hit_ID=P45458; Match level="QueryCoverage=100%, HitCoverage=24%, E-value=1e-46, Identity=65%"; Hit description =Malate synthase, glyoxysomal
FLHTQGAGFGPFFYLPMMDHSKEAKIWNNVLDKPDNVACIVIGSMQATVLIXTLPAVFQISEIQYELKDHSARLNCGHWDHIFCYVKTFQPHTYRLLPETDLLVMTLLFMKRSSDLYLMTCHTHSVHAMGGIGIHMPLIE

SEQ ID NO: 7646 - protein, 119 aa, Glycine max
  misc_feature (3)..(4): Xaa can be any naturally occurring amino acid
  misc_feature (11)..(14): Xaa can be any naturally occurring amino acid
  misc_feature (16)..(19): Xaa can be any naturally occurring amino acid
  misc_feature (23)..(24): Xaa can be any naturally occurring amino acid
  misc_feature (28)..(29): Xaa can be any naturally occurring amino acid
  misc_feature (33)..(33): Xaa can be any naturally occurring amino acid
  misc_feature (37)..(37): Xaa can be any naturally occurring amino acid
  misc_feature (42)..(43): Xaa can be any naturally occurring amino acid
  misc_feature (49)..(49): Xaa can be any naturally occurring amino acid
  misc_feature (60)..(62): Xaa can be any naturally occurring amino acid
  misc_feature (68)..(68): Xaa can be any naturally occurring amino acid
  misc_feature (72)..(73): Xaa can be any naturally occurring amino acid
  misc_feature (77)..(78): Xaa can be any naturally occurring amino acid
  misc_feature (81)..(83): Xaa can be any naturally occurring amino acid
  misc_feature (98)..(98): Xaa can be any naturally occurring amino acid
  misc_feature (119)..(119): Xaa can be any naturally occurring amino acid
  Coding DNA Sequence Number=SeqID_436
GWXXWVPSSLXXXXRXXXXAGKXXHKKXXHHTXHSRXPAIYXXIIRFSXLLPTGRMHSIXXXRSCALXITHXXNKEXXRKXXXLSMFVVYHIILLIKXKTTRLVSLTQTEKVGRDLCIX

SEQ ID NO: 7647 - protein, 237 aa, Glycine max
  Coding DNA Sequence Number=SeqID_438
  Gene Ontology: Mol. function=catalytic activity; Cellular component =intracellular; Biological process=base-excision repair
  Homolog annotation: Hit_ID=A9PFT1; Match level="QueryCoverage=94%, HitCoverage=62%, E-value=5e-76, Identity=65%"; Hit description =Putative uncharacterized protein
  Pfam annotation: Domain name=DUF676; Domain location=27-236; Score =228.5; E_value=1.5e-65; Accession=PF05057.5; Description=Protein of unknown function (DUF676)
MEGKEVCASESAVDGSRDVWSSEPSLASSADHLVVMVNGILGRETDWKYAAEKFVKELPDKVFVHCSERNVSMHTLDGVDVMGERLAEEVLEVIKRKPNMRKISFVAHSVGGLVARYAIGRLYRPPEKGSMADSCNDESKEGSVGTIGGLEAMNFIAVATPHLGSRGNNQVPFLLGVRAFEKFATYVIHFILKRMGRKIFITYEDERINTLFVLMVQHNYHLCFISWLCTLQASSVL

SEQ ID NO: 7648 - protein, 82 aa, Glycine max
  misc_feature (59)..(59): Xaa can be any naturally occurring amino acid
  Coding DNA Sequence Number=SeqID_439
  Gene Ontology: Mol. function=binding; Cellular component =mitochondrial inner membrane; Biological process=transport
  Homolog annotation: Hit_ID=A9PJ11; Match level="QueryCoverage=98%, HitCoverage=24%, E-value=8e-15, Identity=50%"; Hit description =Putative uncharacterized protein
  Pfam annotation: Domain name=Mito_carr; Domain location=17-78; Score=- 14.7; E_value=0.07; Accession=PF00153.17; Description=Mitochondrial carrier protein
VDILSQKLMDQGVGDSRNIKVLSFWYINRIVAFRMILGREGLTCLLSGLGISIKTYAPXNAVWWATYSVCQRMVWGGVGYYL

SEQ ID NO: 7649 - protein, 88 aa, Glycine max
  misc_feature (20)..(28): Xaa can be any naturally occurring amino acid
  misc_feature (33)..(33): Xaa can be any naturally occurring amino acid
  misc_feature (36)..(36): Xaa can be any naturally occurring amino acid
  misc_feature (41)..(41): Xaa can be any naturally occurring amino acid
  misc_feature (43)..(43): Xaa can be any naturally occurring amino acid
  misc_feature (46)..(46): Xaa can be any naturally occurring amino acid
  misc_feature (49)..(88): Xaa can be any naturally occurring amino acid
  Coding DNA Sequence Number=SeqID_440
LIRRMWTCDNGIKNASRQKXXXXXXXXXKKKKXFLXPGDHXSXRRXGGXXXXXXXXXXXXXXXXXXXXXXXXXXXXXXXXXXXXXXXX

SEQ ID NO: 7650 - protein, 130 aa, Glycine max
  misc_feature (17)..(17): Xaa can be any naturally occurring amino acid
  misc_feature (94)..(94): Xaa can be any naturally occurring amino acid
  misc_feature (96)..(96): Xaa can be any naturally occurring amino acid
  misc_feature (128)..(128): Xaa can be any naturally occurring amino acid
  Coding DNA Sequence Number=SeqID_442
KCLYRILRVHQHRLHIXISYVCSRSLDTSSYQYCPLLFFVLHTPTTISPSLFSPLTSLHPCISLPPHIPVLYFWYMRTSTLSRGPLDSISPRTXTXDCRAHIPRRLRPTHLLLGSTKLTVRHAHTLHXCV

SEQ ID NO: 7651 - protein, 176 aa, Glycine max
  misc_feature (22)..(22): Xaa can be any naturally occurring amino acid
  misc_feature (150)..(150): Xaa can be any naturally occurring amino acid
  Coding DNA Sequence Number=SeqID_444
LVTVFLVVSSLRARSARLPPIXGYRHYHDLNITNTTRQNTLRLATPTVATNTSTAGSELDKPTSTVHTLLPSIPHSHSLCLCETVRSSGCMLVCFPVTLLSIFRCFVILFFIKSNINHKASPPQTHQPTPSSTSTHRTRGILDHPRARPXPHPAERSHPAMTRRVSHMSGDRLLYI

SEQ ID NO: 7652 - protein, 103 aa, Glycine max; identical to SEQ ID NO: 6203
  misc_feature (101)..(101): Xaa can be any naturally occurring amino acid
  Coding DNA Sequence Number=SeqID_4225

SEQ ID NO: 7653 - protein, 152 aa, Glycine max
  misc_feature (65)..(65): Xaa can be any naturally occurring amino acid
  misc_feature (95)..(95): Xaa can be any naturally occurring amino acid
  misc_feature (97)..(97): Xaa can be any naturally occurring amino acid
  misc_feature (113)..(113): Xaa can be any naturally occurring amino acid
  misc_feature (115)..(115): Xaa can be any naturally occurring amino acid
  misc_feature (119)..(119): Xaa can be any naturally occurring amino acid
  misc_feature (121)..(121): Xaa can be any naturally occurring amino acid
  Coding DNA Sequence Number=SeqID_4227
  Gene Ontology: Mol. function=transferase activity, transferring hexosyl groups; Biological process=carbohydrate biosynthetic process
  Homolog annotation: Hit_ID=A7P336; Match level="QueryCoverage=86%, HitCoverage=38%, E-value=1e-12, Identity=42%"; Hit description =Chromosome chr1 scaffold_5, whole genome shotgun sequence
MPPTLSLSLVLVVLFFAAVDAHFPATGELPTFREAPAFRNGRECRNRPRSDSVIHIAMTLDATYXSEAPSAEGSPCGSNASCPEETSVFHFICRXRXGRKGGPAHHSPRTFPXLXSFSXLXHSMGELRPAGRSSLTLIRGAGWDQPLNYARM

SEQ ID NO: 7654 - protein, 103 aa, Glycine max; identical to SEQ ID NO: 6205
  misc_feature (27)..(27): Xaa can be any naturally occurring amino acid
  misc_feature (61)..(61): Xaa can be any naturally occurring amino acid
  misc_feature (92)..(92): Xaa can be any naturally occurring amino acid
  Coding DNA Sequence Number=SeqID_4228
  Subcellular localization annotation: CTP_CleavageSite=38; ConfidenceScore=5.27e-01

SEQ ID NO: 7655 - protein, 159 aa, Glycine max
  Coding DNA Sequence Number=SeqID_4230
SSRTASAQNLLASPHAGPPPIFAGPLLLDLGRGGVAVLVEALVHAVEILVLEHDGVAGEALAQCRRGLDARVLVDGGGLALLLLVKLGVPLLHVIGVAHVHGDHELLEAPAVGDVMPDHLGVDEVHGFVQGVLHGRTSGQKVPHGPALISGSINRLARG

SEQ ID NO: 7656 - protein, 122 aa, Glycine max
  misc_feature (11)..(11): Xaa can be any naturally occurring amino acid
  misc_feature (51)..(51): Xaa can be any naturally occurring amino acid
  misc_feature (71)..(71): Xaa can be any naturally occurring amino acid
  misc_feature (109)..(109): Xaa can be any naturally occurring amino acid
  Coding DNA Sequence Number=SeqID_4232
  Subcellular localization annotation: CTP_CleavageSite=70; ConfidenceScore=5.18e-01
REDVSSHLPQXNTPPLSLRTNNGIIPVTLSVAVSWYVYTHSFHNQRTVTMXPSCTRYMTPSRLDLFTALVXGHVSTITSHYTIPCVYSLDTARIGHEARYYTTVDSDHXCPEPCERSDTVLD

SEQ ID NO: 7657 - protein, 149 aa, Glycine max
  Coding DNA Sequence Number=SeqID_4234
  Subcellular localization annotation: CTP_CleavageSite=41; ConfidenceScore=5.44e-01
DTPLLFPQKITPGGYLFFFSHLLGRNNFSPHFLLLCFFFPRVGEKFFVFFFLERPNNPSLFMKEIFLKGFLGRPLQLTRWGLCKGATPPKNLGGGFYLKSPLGRLLGFQIFGKFGFPKGKRPFIPCPLQFWEAKKIRFSGSRGVFVRGA

SEQ ID NO: 7658 - protein, 145 aa, Glycine max
  misc_feature (43)..(43): Xaa can be any naturally occurring amino acid
  misc_feature (47)..(48): Xaa can be any naturally occurring amino acid
  misc_feature (58)..(58): Xaa can be any naturally occurring amino acid
  misc_feature (62)..(64): Xaa can be any naturally occurring amino acid
  misc_feature (74)..(74): Xaa can be any naturally occurring amino acid
  misc_feature (78)..(78): Xaa can be any naturally occurring amino acid
  misc_feature (83)..(86): Xaa can be any naturally occurring amino acid
  misc_feature (92)..(92): Xaa can be any naturally occurring amino acid
  misc_feature (99)..(99): Xaa can be any naturally occurring amino acid
  misc_feature (101)..(102): Xaa can be any naturally occurring amino acid
  misc_feature (104)..(104): Xaa can be any naturally occurring amino acid
  misc_feature (108)..(108): Xaa can be any naturally occurring amino acid
  misc_feature (112)..(113): Xaa can be any naturally occurring amino acid
  misc_feature (117)..(118): Xaa can be any naturally occurring amino acid
  misc_feature (123)..(124): Xaa can be any naturally occurring amino acid
  misc_feature (127)..(129): Xaa can be any naturally occurring amino acid
  misc_feature (131)..(131): Xaa can be any naturally occurring amino acid
  misc_feature (133)..(133): Xaa can be any naturally occurring amino acid
  misc_feature (135)..(135): Xaa can be any naturally occurring amino acid
  misc_feature (137)..(137): Xaa can be any naturally occurring amino acid
  misc_feature (140)..(142): Xaa can be any naturally occurring amino acid
  misc_feature (145)..(145): Xaa can be any naturally occurring amino acid
  Coding DNA Sequence Number=SeqID_4236
TMNLYFHLDLLKIMRDRERRFTYRSDEIEVEFIGTEQHIGAMXPVKXXFPITVRPSTXRTPXXXLGPESKLIPXFFFXAPPPXXXXNMCPNXSIAEVYXEXXIXHARXEMVXXMIAXXAAGRXXETXXXRXGXTXDXGGXXXDEX

SEQ ID NO: 7659 - protein, 88 aa, Glycine max
  misc_feature (66)..(66): Xaa can be any naturally occurring amino acid
  Coding DNA Sequence Number=SeqID_4237
  Homolog annotation: Hit_ID=Q3E7Q5; Match level="QueryCoverage=93%, HitCoverage=10%, E-value=8e-23, Identity=67%"; Hit description =Uncharacterized protein At3g18860.2
LLLNYAVLLIETKDQEGQSQVLSAALEIGEDENVEVDPKFRALVAVGSLMLEGLVRKTPLDFDAVXIAIAAMGTREGKIAEIDPTLSC

SEQ ID NO: 7660 - protein, 76 aa, Glycine max
  misc_feature (56)..(56): Xaa can be any naturally occurring amino acid
  Coding DNA Sequence Number=SeqID_4238
  Subcellular localization annotation: CTP_CleavageSite=32; ConfidenceScore=5.28e-01
HKTRRRAQQSVSTSPHPARQQATDGEERGRCRARKRTSSRHGSCTYTDMSRGLFRXNNVSEAVDKSVRGPTTPKIH

SEQ ID NO: 7661 - protein, 50 aa, Glycine max
  misc_feature (25)..(25): Xaa can be any naturally occurring amino acid
  misc_feature (27)..(27): Xaa can be any naturally occurring amino acid
  Coding DNA Sequence Number=SeqID_4240
RVSLTIVNTIAFANAQIKERTRFKXTXQKAYERCRTAPMEGVSFTLNASV

SEQ ID NO: 7662 - protein, 102 aa, Glycine max
  Coding DNA Sequence Number=SeqID_4241
LKHKYETNMETLTHTQINTEIRIYKLTSAVIPTNSLMSLPPIPTQQVMGVDPMVPVITVVVQVQTPMQIYWQPNQRVAGRLESLIDPPDQALARLRKMDKVG

SEQ ID NO: 7663 - protein, 178 aa, Glycine max
  misc_feature (14)..(14): Xaa can be any naturally occurring amino acid
  misc_feature (153)..(153): Xaa can be any naturally occurring amino acid
  Coding DNA Sequence Number=SeqID_4242
  Subcellular localization annotation: CTP_CleavageSite=20; ConfidenceScore=5.40e-01
SVSHHFILNSLTNXHLFDVYPSLRSPPSPRRFSRIEFHHSFRLRSHIFRLSLCSPRLLSLHVIILILSISRYLLVYSISELSTTLTMFSFSLSAHTLESFSTSTLSNHTTSLSPPTYVLIASAHPTHPFASSLSLRRSMIRHPYHETLDIDDXVPPPAYNLPIYSVARLSSSICLCLS

SEQ ID NO: 7664 - protein, 99 aa, Glycine max
  misc_feature (13)..(13): Xaa can be any naturally occurring amino acid
  misc_feature (71)..(71): Xaa can be any naturally occurring amino acid
  misc_feature (97)..(97): Xaa can be any naturally occurring amino acid
  Coding DNA Sequence Number=SeqID_4244
PHGHLSARKGAHXSQLCCREPIVTSAAESVHPTLHVSGTYSVCIHLDRISISLVASVIVLTRTGARASPAXHVPREPRTTASTSTLYIYGRPVTSSXAV

SEQ ID NO: 7665 - protein, 188 aa, Glycine max
  misc_feature (8)..(8): Xaa can be any naturally occurring amino acid
  Coding DNA Sequence Number=SeqID_4246
SSQLRRPXPPRLCVDKTKTRREKREKREKREREKMELGEYSGFISKIEEYENKIKEDYPLSRNIPTQEHVKSAAKLIEHEITKFSLVMQYEKGQEIHFSSLLNSLDKLFAMFTNLCGYAGPTMKKKIRASFGAIFSSVKNVALEFRRLELEKEEKEIEEKKPIEQREREQKERQQQKEKEQKEREQKE

SEQ ID NO: 7666 - protein, 114 aa, Glycine max
  misc_feature (25)..(25): Xaa can be any naturally occurring amino acid
  misc_feature (29)..(29): Xaa can be any naturally occurring amino acid
  misc_feature (49)..(49): Xaa can be any naturally occurring amino acid
  misc_feature (74)..(74): Xaa can be any naturally occurring amino acid
  misc_feature (95)..(95): Xaa can be any naturally occurring amino acid
  misc_feature (100)..(100): Xaa can be any naturally occurring amino acid
  misc_feature (105)..(106): Xaa can be any naturally occurring amino acid
  misc_feature (111)..(111): Xaa can be any naturally occurring amino acid
  Coding DNA Sequence Number=SeqID_4248
  Subcellular localization annotation: CTP_CleavageSite=41; ConfidenceScore=5.11e-01
VHSPLYIAHHSSTQYVSVHSSDHTXRAMXSLINVRLVIRARAARRVCQXHVYVLLSISYLTLITIDTLTITIHXTRCITSHRYVYTSDSTLRLSXLYQYXIEYYXXITSHXRYA

SEQ ID NO: 7667 - protein, 115 aa, Glycine max
  misc_feature (15)..(15): Xaa can be any naturally occurring amino acid
  misc_feature (42)..(42): Xaa can be any naturally occurring amino acid
  Coding DNA Sequence Number=SeqID_4249
YIPIIMYNILSMELXKHYNRTIFSLLAHIDSLLLFLSLSPMXVIRFYTKRHHAHEVAEEGTREYTQLDKNIPNTLSPSDSPIIHYEFRPSHSIPLPVLALLSLFSTLLPYPRTLT

SEQ ID NO: 7668 - protein, 120 aa, Glycine max
  misc_feature (62)..(62): Xaa can be any naturally occurring amino acid
  misc_feature (82)..(82): Xaa can be any naturally occurring amino acid
  Coding DNA Sequence Number=SeqID_4251
  Gene Ontology: Mol. function=protein binding
  Homolog annotation: Hit_ID=A7QW76; Match level="QueryCoverage=92%, HitCoverage=23%, E-value=5e-26, Identity=52%"; Hit description =Chromosome chr3 scaffold_199, whole genome shotgun sequence
  Pfam annotation: Domain name=DUF620; Domain location=1-66; Score= -125.8; E_value=4.8e-06; Accession=PF04788.3; Description=Protein of unknown function (DUF620)
DYKPVEGIMIAHSGHSVVTLFRFGEMALSHTKTRMEEAWTIDEVKFNVQGLSVEWYIPPAEXRTALSHRSLRTLLRSRNSGXTSLSVHNTKVVAVQRLHKCSIYSMMWNMESYGIAVRYN

SEQ ID NO: 7669 - protein, 131 aa, Glycine max
  misc_feature (4)..(4): Xaa can be any naturally occurring amino acid
  misc_feature (26)..(26): Xaa can be any naturally occurring amino acid
  misc_feature (35)..(35): Xaa can be any naturally occurring amino acid
  misc_feature (44)..(44): Xaa can be any naturally occurring amino acid
  misc_feature (64)..(64): Xaa can be any naturally occurring amino acid
  misc_feature (78)..(78): Xaa can be any naturally occurring amino acid
  misc_feature (96)..(96): Xaa can be any naturally occurring amino acid
  misc_feature (120)..(120): Xaa can be any naturally occurring amino acid
  Coding DNA Sequence Number=SeqID_4252
  Subcellular localization annotation: CTP_CleavageSite=57; ConfidenceScore=5.22e-01
CVVXILRLSFISAVLLFSSMISADIXLVLSRSSSXTHSLSSSIXDVYEPHAPRTSTRASDRPEXHMMRQSVRHVRGCXAALARWRMYTVRISMTNXFIINSTYNQYSSICACPYCVSRLXLVIMFLPVLYA

SEQ ID NO: 7670 - protein, 141 aa, Glycine max
  Coding DNA Sequence Number=SeqID_4254
  Gene Ontology: Mol. function=transferase activity, transferring hexosyl groups; Cellular component=integral to membrane; Biological process=polysaccharide biosynthetic process
  Homolog annotation: Hit_ID=Q10MK2; Match level="QueryCoverage=100%, HitCoverage=29%, E-value=2e-63, Identity=78%"; Hit description =Glycosyltransferase 5, putative, expressed
  Pfam annotation: Domain name=Glyco_transf_34; Domain location=35-141; Score=-47.0; E_value=0.00014; Accession=PF05637.3; Description =galactosyl transferase GMA12MNN10 family
LTDPPYSLGPTVDYDARRAQWLRDNPRFPAFVAPGRPRVLVVTGSSPRRCSDPDGEHLLLRAFKNKADYCRVHGFDIFYSTAVLDAELSGFWSKLPLLRTLMLAHPETELLWWVDSDVIFTDMLFEPPWDKYAAHNLVLPG

SEQ ID NO: 7671 - protein, 144 aa, Glycine max
  Coding DNA Sequence Number=SeqID_4255
ARKKTKKVYLASDHAVLATEGGGIIVSVASPLPSSSLLLLIRQAPLASPGAQLLLLVWLLLLGFVPLPVPQVAQLFPHFLLVLFCTVRSMCRSVSRSGSAGGSLAGLPDACPTSTRRGMVCSPDGRYTAPCSRSLGCSSPPPLP

SEQ ID NO: 7672 - protein, 128 aa, Glycine max; identical to SEQ ID NO: 6222
  misc_feature (21)..(21): Xaa can be any naturally occurring amino acid
  misc_feature (27)..(27): Xaa can be any naturally occurring amino acid
  misc_feature (56)..(56): Xaa can be any naturally occurring amino acid
  misc_feature (97)..(98): Xaa can be any naturally occurring amino acid
  Coding DNA Sequence Number=SeqID_4257

SEQ ID NO: 7673 - protein, 97 aa, Glycine max
  misc_feature (55)..(55): Xaa can be any naturally occurring amino acid
  misc_feature (82)..(82): Xaa can be any naturally occurring amino acid
  Coding DNA Sequence Number=SeqID_4259
  Gene Ontology: Mol. function=structural constituent of ribosome; Cellular component=ribonucleoprotein complex; Biological process =translation
  Homolog annotation: Hit_ID=Q9M5M7; Match level="QueryCoverage=95%, HitCoverage=42%, E-value=4e-37, Identity=77%"; Hit description=60S ribosomal protein L10
MGRRPARCYRQIKNKPYPKSRFCRGVPDPKIRIYDVGMKKKGVDEFPFCVHLVSXENDNVSCVALVSVLIAVNRILAQFAGXDALHFESRLHPIPFP

SEQ ID NO: 7674 - protein, 500 aa, Glycine max
  Coding DNA Sequence Number=SeqID_4260
  Gene Ontology: Mol. function=signal transducer activity; Cellular component=plasma membrane; Biological process=response to light stimulus
  Homolog annotation: Hit_ID=A7P4B3; Match level="QueryCoverage=99%, HitCoverage=69%, E-value=1e-153, Identity=60%"; Hit description =Chromosome chr1 scaffold_5, whole genome shotgun sequence
  Pfam annotation: Domain name=NPH3; Domain location=73-360; Score =365.3; E_value=1e-106; Accession=PF03000.5; Description=NPH3 family
GWKDSIVTLQTTKALPLWSEDLAISSRCIEAIASKALSHPSKVSLSHSHSRRLRNDVSSYNETESLRHKSTSKGWWAEDLADLSIDLYWRTMMAIKSGGKTPSNLIGDALKIYASRWLPNIRKNVHNVKREKTESHSDSDSASEVNSKHRLLLESIVSLLSAEKGAVSCSFLLKLLKAANILNASSSSKVELATRVGLQLEEAAVNDLLIRSVSKSTNDMIYEVDLVMTILEQFMLQGQSPPTSPPRSRFAVERRRSRSAENINLEFQESRRSSLASHSSKLKVAKLVDRYLQEVARDVNLPLSKFIAIVETIPDFARHDHDDLYRAIDIYLKAHPERSKSERKRLCRILDCKKLSMEACMHAAQNELLPLRVVVQVLFFEQVRAAAAGGKVSDMPSNIKALLTARIGIDPSKHTAPLSTTTSIHVDDNWSVSGFKSSKSTTRNPTLRMKLAEDDLDENVVPRDEIGRTSRFKGILGLPTQPKKMFSKLWSTNRSATEKN

SEQ ID NO: 7675 - protein, 108 aa, Glycine max; identical to SEQ ID NO: 6225
  misc_feature (88)..(88): Xaa can be any naturally occurring amino acid
  Coding DNA Sequence Number=SeqID_4261

SEQ ID NO: 7676 - protein, 54 aa, Glycine max
  misc_feature (34)..(34): Xaa can be any naturally occurring amino acid
  Coding DNA Sequence Number=SeqID_4263
  Homolog annotation: Hit_ID=A7QCI3; Match level="QueryCoverage=83%, HitCoverage=27%, E-value=3e-10, Identity=62%"; Hit description =Chromosome chr12 scaffold_78, whole genome shotgun sequence
MEELRSAMEEHLDLLADLVQKFSSDLRAGFRPAXENFNGFFQSLDLEGSPPNLV

SEQ ID NO: 7677 - protein, 148 aa, Glycine max
  misc_feature (63)..(63): Xaa can be any naturally occurring amino acid
  misc_feature (109)..(109): Xaa can be any naturally occurring amino acid
  misc_feature (118)..(118): Xaa can be any naturally occurring amino acid
  misc_feature (120)..(128): Xaa can be any naturally occurring amino acid
  misc_feature (131)..(132): Xaa can be any naturally occurring amino acid
  misc_feature (135)..(136): Xaa can be any naturally occurring amino acid
  misc_feature (140)..(142): Xaa can be any naturally occurring amino acid
  Coding DNA Sequence Number=SeqID_4264
LYTLIYLSYSLQSSITMNSMHNQPSDTYNTHTTHHPHTLNYIIYPHIYYIYFRIYYSHRHVIXYSSVVVRSCFVGRQRLGGEVEHAVPRAQLRARAVKLLCKAGERSYXYQTDLSDSXFXXXXXXXXXPPXXSLXXLPPXXXKKKKTT

SEQ ID NO: 7678 - protein, 250 aa, Glycine max
  Coding DNA Sequence Number=SeqID_4266
KMVSFTYYYFNARSAHVLFLSTLLTLTAYHPFSSVIFLSSLDAILGYLEWNKHYKQATALEFTIAWELKKESPHYKWSSVFLHLFVLLPYVVLWLFSWSTNAGQCIGVSVLAYALFVFAVTVQSILMYDGAVHKGLDPKLAPKIHLNIASTDRTDFVLSNLYTIAYLTYEEEKEEEEEIIAKLEDDPTKNAKQKEREKERERKRHEKSAVAYAEDPKYTHLAWRLVKHLHPSEIRQLRTYLLFSDDDKKQ

SEQ ID NO: 7679 - protein, 97 aa, Glycine max
  misc_feature (4)..(4): Xaa can be any naturally occurring amino acid
  misc_feature (8)..(8): Xaa can be any naturally occurring amino acid
  misc_feature (13)..(19): Xaa can be any naturally occurring amino acid
  misc_feature (22)..(23): Xaa can be any naturally occurring amino acid
  misc_feature (25)..(25): Xaa can be any naturally occurring amino acid
  misc_feature (30)..(30): Xaa can be any naturally occurring amino acid
  misc_feature (35)..(35): Xaa can be any naturally occurring amino acid
  misc_feature (39)..(39): Xaa can be any naturally occurring amino acid
  misc_feature (42)..(42): Xaa can be any naturally occurring amino acid
  misc_feature (46)..(47): Xaa can be any naturally occurring amino acid
  misc_feature (53)..(54): Xaa can be any naturally occurring amino acid
  misc_feature (58)..(58): Xaa can be any naturally occurring amino acid
  misc_feature (60)..(60): Xaa can be any naturally occurring amino acid
  misc_feature (65)..(65): Xaa can be any naturally occurring amino acid
  misc_feature (72)..(72): Xaa can be any naturally occurring amino acid
  misc_feature (77)..(78): Xaa can be any naturally occurring amino acid
  misc_feature (94)..(94): Xaa can be any naturally occurring amino acid
  Coding DNA Sequence Number=SeqID_4268
NRGXGFPXVGLHXXXXXXXPLXXSXCNATXKVCPXIGKXGAXMPSXXVKEKKXXSEGXVXTNGRXRFYSKAXDSRGXXRCRLARHRSRKQGFWXVDE

SEQ ID NO: 7680 - protein, 160 aa, Glycine max
  Coding DNA Sequence Number=SeqID_1486
  Gene Ontology: Mol. function=endopeptidase inhibitor activity; Cellular component=extracellular region; Biological process =biological_process
  Homolog annotation: Hit_ID=Q9LMU2; Match level="QueryCoverage=100%, HitCoverage=83%, E-value=2e-62, Identity=69%"; Hit description =F2H15.9 protein (At1g17860/F2H15_8) (Putative uncharacterized protein At1g17860) ...
  Homolog annotation: Hit description=(Putative uncharacterized protein F2H15.9) (Putative lemir (Miraculin) protein)
  Pfam annotation: Domain name=Kunitz_legume; Domain location=25-159; Score=97.2; E_value=4.9e-26; Accession=PF00197.9; Description =Trypsin and protease inhibitor
MSSLLYISLLLAVFISHTTEAALEPVTDIDGGRLTSGTKYYILPVLRGRGGGLTMSKPENKTCPKSVIQDQYEVSKGLPLEFSPSDNSRIIRVSTDLNFKFCAASVWNLDNYDEMTNQWFVTACGVAGNPGQATVDNWFKIEKYQDDYKIVFCPTVCNFC

SEQ ID NO: 7681 - protein, 228 aa, Glycine max
  misc_feature (1)..(93): Xaa can be any naturally occurring amino acid
  misc_feature (96)..(96): Xaa can be any naturally occurring amino acid
  misc_feature (98)..(98): Xaa can be any naturally occurring amino acid
  misc_feature (100)..(102): Xaa can be any naturally occurring amino acid
  misc_feature (104)..(114): Xaa can be any naturally occurring amino acid
  misc_feature (116)..(119): Xaa can be any naturally occurring amino acid
  misc_feature (121)..(126): Xaa can be any naturally occurring amino acid
  misc_feature (128)..(132): Xaa can be any naturally occurring amino acid
  misc_feature (134)..(137): Xaa can be any naturally occurring amino acid
  misc_feature (142)..(145): Xaa can be any naturally occurring amino acid
  misc_feature (149)..(149): Xaa can be any naturally occurring amino acid
  misc_feature (151)..(154): Xaa can be any naturally occurring amino acid
  misc_feature (156)..(156): Xaa can be any naturally occurring amino acid
  misc_feature (158)..(158): Xaa can be any naturally occurring amino acid
  misc_feature (162)..(162): Xaa can be any naturally occurring amino acid
  misc_feature (166)..(166): Xaa can be any naturally occurring amino acid
  misc_feature (168)..(168): Xaa can be any naturally occurring amino acid
  misc_feature (172)..(172): Xaa can be any naturally occurring amino acid
  misc_feature (174)..(174): Xaa can be any naturally occurring amino acid
  misc_feature (177)..(177): Xaa can be any naturally occurring amino acid
  misc_feature (179)..(179): Xaa can be any naturally occurring amino acid
  misc_feature (188)..(189): Xaa can be any naturally occurring amino acid
  misc_feature (197)..(197): Xaa can be any naturally occurring amino acid
  misc_feature (208)..(209): Xaa can be any naturally occurring amino acid
  misc_feature (218)..(218): Xaa can be any naturally occurring amino acid
  misc_feature (223)..(223): Xaa can be any naturally occurring amino acid
  Coding DNA Sequence Number=SeqID_1487
XXXXXXXXXXXXXXXXXXXXXXXXXXXXXXXXXXXXXXXXXXXXXXXXXXXXXXXXXXXXXXXXXXXXXXXXXXXXXXXXXXXXXXXXXXXXXQPXEXAXXXSXXXXXXXXXXXRXXXXPXXXXXXSXXXXXHXXXXSNHEXXXXIKHXTXXXXTXSXLFHXQEFXLXGLNXTXILXLXFSNSFLNFXXLSFFQFVXSFIFRSRLELXXDLVDVVPEXNINDXGFFLS

SEQ ID NO: 7682 - protein, 105 aa, Glycine max
  misc_feature (103)..(103): Xaa can be any naturally occurring amino acid
  Coding DNA Sequence Number=SeqID_1489
HIRISSPRFTGIVRTCRQSLIHPCFPVLFSDNISYLHCDPLRMVCFLSARYVSVYVCRTHLIQRAARLLLRCYYTRHADVTSYSLLRCAMLFVLCDTVPPDPXTA

SEQ ID NO: 7683 - protein, 41 aa, Glycine max
  misc_feature (33)..(33): Xaa can be any naturally occurring amino acid
  Coding DNA Sequence Number=SeqID_1491
  Gene Ontology: Mol. function=sequence-specific DNA binding; Cellular component=nucleus; Biological process=regulation of transcription, DNA-dependent
  Homolog annotation: Hit_ID=A7LHG2; Match level="QueryCoverage=85%, HitCoverage=18%, E-value=5e-13, Identity=91%"; Hit description=WRKY17
  Pfam annotation: Domain name=WRKY; Domain location=8-41; Score=9.2; E_ value=5.5e-05; Accession=PF03106.6; Description=WRKY DNA -binding domain
VPTKNKYVRDGYQWRKYGQKVTRDNPSHRAYFXCSYAPICP

SEQ ID NO: 7684 - protein, 158 aa, Glycine max
  misc_feature (87)..(87): Xaa can be any naturally occurring amino acid
  misc_feature (95)..(95): Xaa can be any naturally occurring amino acid
  Coding DNA Sequence Number=SeqID_1492
  Gene Ontology: Mol. function=nucleoside-triphosphatase activity; Cellular component=integral to membrane; Biological process=protein catabolic process
  Homolog annotation: Hit_ID=Q94ES0; Match level="QueryCoverage=100%, HitCoverage=19%, E-value=4e-61, Identity=76%"; Hit description=AAA -metalloprotease FtsH
  Pfam annotation: Domain name=AAA; Domain location=79-159; Score= -10.5; E_value=0.00016; Accession=PF00004.19; Description=ATPase family associated with various cellular activities (AAA)
MGARMQGQLGFGGSGGSKGARGIFNIGKAHTKVDKNAKNKVYFKDVAGCDEAKQEIMEFVHFLKNPKKYEELGAKIPKGALLAGPPXTGKTLLAXATAGESGVPFLCLSGSDFMEMFVGVGPSRVRNLFQEARQCSPSIIFIDEIDAFGRSKWPCGFS

SEQ ID NO: 7685 - protein, 101 aa, Glycine max
  Coding DNA Sequence Number=SeqID_1493
  Gene Ontology: Mol. function=transcription factor activity; Cellular component=nucleus; Biological process=regulation of transcription, DNA-dependent
  Homolog annotation: Hit_ID=Q8GTE5; Match level="QueryCoverage=68%, HitCoverage=19%, E-value=1e-20, Identity=68%"; Hit description =Transcription factor EREBP-like protein
MKTAMLFVFLDCESHFVQNANQQQPNFQNVVSIEDDSAKTLFEELVDIEFELKFFQMPYLEGSWGDTSLESLLSGDTTQDGGNLMNLWCFDDIPSMAGGVF

SEQ ID NO: 7686 - protein, 256 aa, Glycine max
  misc_feature (29)..(29): Xaa can be any naturally occurring amino acid
  misc_feature (69)..(69): Xaa can be any naturally occurring amino acid
  misc_feature (110)..(110): Xaa can be any naturally occurring amino acid
  misc_feature (205)..(205): Xaa can be any naturally occurring amino acid
  Coding DNA Sequence Number=SeqID_1494
LPSESISSRGACEDTTAPTRRRRYTVPTXYYGHKTSKSQTYNVERPEIDVASGLHPSPDIVSSSCVRQXPTIVCGSYPALARTEDSKAHAPAVKCLGNYYHLTRLVNAQXRYDTHHSPPRQLVGGGRGRAHLLSAKLKSYKNNKHGRGWGGLSYTHTTPTHYSQVVRRRLRFSSRHTIFIAPYCSPDCTPTLNSLPPYMHTRLVXSREEAQTAHTAVLPFWRTGPVINRSNTLPGRVLSTTSHTHHLGTKPANYPH

SEQ ID NO: 7687 - protein, 78 aa, Glycine max
  misc_feature (21)..(22): Xaa can be any naturally occurring amino acid
  misc_feature (25)..(25): Xaa can be any naturally occurring amino acid
  misc_feature (33)..(33): Xaa can be any naturally occurring amino acid
  misc_feature (52)..(52): Xaa can be any naturally occurring amino acid
  misc_feature (62)..(62): Xaa can be any naturally occurring amino acid
  Coding DNA Sequence Number=SeqID_1496
  Subcellular localization annotation: CTP_CleavageSite=42; ConfidenceScore=5.25e-01
TITTASAHHNAAAMSHGVACXXDCXRDVCLRRXSRVAPRRRRSAMRKHELLXDCSSFITHHXRTDIILYYHGRDSFAL

SEQ ID NO: 7688 - protein, 203 aa, Glycine max
  misc_feature (4)..(4): Xaa can be any naturally occurring amino acid
  misc_feature (9)..(10): Xaa can be any naturally occurring amino acid
  misc_feature (15)..(15): Xaa can be any naturally occurring amino acid
  misc_feature (19)..(20): Xaa can be any naturally occurring amino acid
  misc_feature (25)..(26): Xaa can be any naturally occurring amino acid
  misc_feature (29)..(31): Xaa can be any naturally occurring amino acid
  misc_feature (37)..(38): Xaa can be any naturally occurring amino acid
  misc_feature (41)..(41): Xaa can be any naturally occurring amino acid
  misc_feature (47)..(50): Xaa can be any naturally occurring amino acid
  misc_feature (53)..(54): Xaa can be any naturally occurring amino acid
  misc_feature (57)..(57): Xaa can be any naturally occurring amino acid
  misc_feature (59)..(59): Xaa can be any naturally occurring amino acid
  misc_feature (64)..(64): Xaa can be any naturally occurring amino acid
  misc_feature (66)..(67): Xaa can be any naturally occurring amino acid
  misc_feature (70)..(71): Xaa can be any naturally occurring amino acid
  misc_feature (73)..(76): Xaa can be any naturally occurring amino acid
  misc_feature (78)..(79): Xaa can be any naturally occurring amino acid
  misc_feature (83)..(95): Xaa can be any naturally occurring amino acid
  misc_feature (98)..(99): Xaa can be any naturally occurring amino acid
  misc_feature (102)..(104): Xaa can be any naturally occurring amino acid
  misc_feature (106)..(108): Xaa can be any naturally occurring amino acid
  misc_feature (112)..(113): Xaa can be any naturally occurring amino acid
  misc_feature (115)..(138): Xaa can be any naturally occurring amino acid
  misc_feature (142)..(143): Xaa can be any naturally occurring amino acid
  misc_feature (147)..(149): Xaa can be any naturally occurring amino acid
  misc_feature (156)..(163): Xaa can be any naturally occurring amino acid
  misc_feature (169)..(169): Xaa can be any naturally occurring amino acid
  misc_feature (171)..(183): Xaa can be any naturally occurring amino acid
  misc_feature (186)..(186): Xaa can be any naturally occurring amino acid
  misc_feature (190)..(190): Xaa can be any naturally occurring amino acid
  misc_feature (192)..(199): Xaa can be any naturally occurring amino acid
  misc_feature (202)..(202): Xaa can be any naturally occurring amino acid
  Coding DNA Sequence Number=SeqID_4270
CRCXRVPSXXIPSVXGIAXXAGYVXXDMXXXVVCAEXXETXPARTRXXXXINXXAPXPXEQSFXLXXWVXXRXXXXLXXLIYXXXXXXXXXXXXXGWXXERXXXIXXXAPHXXSXXXXXXXXXXXXXXXXXXXXXXXXRSYXXTRRXXXFFLILFXXXXXXXXCIYNDXGXXXXXXXXXXXXXHGXLKVXLXXXXXXXXHIXK

SEQ ID NO: 7689 - protein, 120 aa, Glycine max
  misc_feature (7)..(7): Xaa can be any naturally occurring amino acid
  misc_feature (45)..(45): Xaa can be any naturally occurring amino acid
  misc_feature (73)..(73): Xaa can be any naturally occurring amino acid
  misc_feature (75)..(75): Xaa can be any naturally occurring amino acid
  misc_feature (91)..(91): Xaa can be any naturally occurring amino acid
  misc_feature (96)..(96): Xaa can be any naturally occurring amino acid
  misc_feature (106)..(106): Xaa can be any naturally occurring amino acid
  Coding DNA Sequence Number=SeqID_4272
GDSDGCXSCLRRCGYTMHLMKSASTCAMLWRQLLRQPLLIRPTCXDVDPHYHDCRLTTTADDIETVNECRCYXRXRDDLSVYISQKSTRSXDLSMXVLARRHRYNXIRTPYQDHSITTSK

SEQ ID NO: 7690 - protein, 182 aa, Glycine max
  Coding DNA Sequence Number=SeqID_4273
  Gene Ontology: Mol. function=sequence-specific DNA binding; Cellular component=intracellular; Biological process=regulation of transcription
  Homolog annotation: Hit_ID=Q10AH3; Match level="QueryCoverage=57%, HitCoverage=32%, E-value=2e-17, Identity=42%"; Hit description =Histone-like transcription factor and archaeal histone family protein, expressed
  Pfam annotation: Domain name=CBFD_NFYB_HMF; Domain location=84-148; Score=99.7; E_value=9.2e-27; Accession=PF00808.13; Description =Histone-like transcription factor (CBFNF-Y) and archaeal histone
  Pfam annotation: Domain name=Histone; Domain location=78-151; Score =14.5; E_value=0.0059; Accession=PF00125.14; Description=Core histone H2AH2BH3H4
  Pfam module annotation: Pfam domain module=CBFD_NFYB_HMF::Histone; Domain location=84-148::78-151
  Subcellular localization annotation: CTP_CleavageSite=41; ConfidenceScore=5.20e-01
MVSSKKPNQEKKPRSDGVNKAGGGNTRSSGSKPKKKNTNVQANAKKEPEVHEISESSSSDSAGEARRDEPVKSNGGGVEDAKMIRFPMNRIRRIMRSDNSAPQIMQDAVFLVNKATELFIERFSEEAYESSVQDKKKFIHYKHLSSVVSNDERYEFLADCVREKLKADVAMEEWERSMTDAG

SEQ ID NO: 7691 - protein, 152 aa, Glycine max
  Coding DNA Sequence Number=SeqID_4274
DFAPPDLFPPVSWYLYAFALGACPGLVVKVRGDRLHLLAPRPPCALSSSLPSCEPPPVRPLHSARSSISDRSSSVGCPRPTAPDESPAQTACKTSTRSHQRTCGQQQQHGEEDGREELARELHFFLGSQRRRATLCDRVGIQAETSPVWFFD

SEQ ID NO: 7692 - protein, 140 aa, Glycine max
  misc_feature (52)..(52): Xaa can be any naturally occurring amino acid
  misc_feature (83)..(83): Xaa can be any naturally occurring amino acid
  Coding DNA Sequence Number=SeqID_4276
  Gene Ontology: Mol. function=structural constituent of ribosome; Cellular component=intracellular; Biological process=translation
  Homolog annotation: Hit_ID=Q2HRD6; Match level="QueryCoverage=99%, HitCoverage=89%, E-value=2e-33, Identity=55%"; Hit description =Translation protein SH3-like
RKGPGSEVKSHPHQGPRPARFGPLQFGERKRHRKRLVTHVRHDPWRAAPLAXVAARHPVRSPHEKVLFLAGDVLRPGRFVHCXRRATRRRGTLSPLRALPLRSVPGGGVLRNVEHHVGARASGDYAIVISHNPDNGTSRI

SEQ ID NO: 7693 - protein, 80 aa, Glycine max
  misc_feature (1)..(1): Xaa can be any naturally occurring amino acid
  misc_feature (5)..(5): Xaa can be any naturally occurring amino acid
  misc_feature (7)..(7): Xaa can be any naturally occurring amino acid
  misc_feature (11)..(12): Xaa can be any naturally occurring amino acid
  misc_feature (14)..(16): Xaa can be any naturally occurring amino acid
  misc_feature (19)..(21): Xaa can be any naturally occurring amino acid
  misc_feature (24)..(24): Xaa can be any naturally occurring amino acid
  misc_feature (33)..(33): Xaa can be any naturally occurring amino acid
  misc_feature (41)..(41): Xaa can be any naturally occurring amino acid
  misc_feature (47)..(47): Xaa can be any naturally occurring amino acid
  misc_feature (63)..(63): Xaa can be any naturally occurring amino acid
  misc_feature (71)..(71): Xaa can be any naturally occurring amino acid
  misc_feature (73)..(74): Xaa can be any naturally occurring amino acid
  misc_feature (79)..(79): Xaa can be any naturally occurring amino acid
  Coding DNA Sequence Number=SeqID_4277
XTCLXTXLDTXXGXXXYCXXXRIXLLWNLLWDXPMEPPMRXTAALAXLLHAKARRSITAATIXITLLTPVXVXXPRELXI

SEQ ID NO: 7694 - protein, 132 aa, Glycine max
  Coding DNA Sequence Number=SeqID_4279
  Subcellular localization annotation: CTP_CleavageSite=45; ConfidenceScore=5.54e-01
LWSFFSVSPFSFPRLPLSGGDGHPPRPRRAPSPPIFDALAPLRPRLFLVFSAIPPLICLLIFPVASLRLRFDLPVTRPRSAPACHSHELAGIGAGIGAAVSGVNSLLLLFLSVGHLLPAVVGAVRDAVRFEV

SEQ ID NO: 7695 - protein, 145 aa, Glycine max
  misc_feature (3)..(3): Xaa can be any naturally occurring amino acid
  misc_feature (61)..(61): Xaa can be any naturally occurring amino acid
  misc_feature (70)..(70): Xaa can be any naturally occurring amino acid
  Coding DNA Sequence Number=SeqID_4281
PWXTYTLYRSTRTHSTWRGDPGICRLYNSYYSLYVTSLTTSPSSYATDNTTSPAPLPLLDXSPHPVSQSXTRQVSRRRIRHTLWRGFSQRRVRVLYKSRDRHISVSSRVTAMTSRTLLTVASSACRVTDWSRIALCSAWALSSRD

SEQ ID NO: 7696 - protein, 227 aa, Glycine max
  misc_feature (113)..(113): Xaa can be any naturally occurring amino acid
  misc_feature (168)..(168): Xaa can be any naturally occurring amino acid
  Coding DNA Sequence Number=SeqID_4283
  Gene Ontology: Cellular component=cytoplasm
  Homolog annotation: Hit_ID=O04237; Match level="QueryCoverage=94%, HitCoverage=58%, E-value=2e-28, Identity=39%"; Hit description =Transcription factor
  Pfam annotation: Domain name=HABP4_PAI-RBP1; Domain location=155-228; Score=9.2; E_value=0.0017; Accession=PF04774.5; Description =Hyaluronan  mRNA binding family
  Pfam annotation: Domain name=Stm1_N; Domain location=2-82; Score=5.0; E_value=0.0024; Accession=PF04774.5; Description=Stm1
  Pfam module annotation: Pfam domain module=HABP4_PAI-RBP1::Stm1_N; Domain location=155-228::2-82
TNPFDLLGDDAEDPSQLIAAEQLKAAAAASAATAAPKKAPAQQNKPAQLPTKPPPPAQAVRDARNEPVRGGRGGGRGGGRGFGRGRGFSRDSSNDENSFPTSRAPYNQGPFEXGDAGKSFERRGYGGPRGPYRGGGGHRGGFSNGEIGEAEEGQPQRAFDRCNGIGQXEFKREGSGRGNWGTQTDELAQVTDKVANETEKNLGDEKPTIEEDIVDVKCGRREMTQVC

SEQ ID NO: 7697 - protein, 121 aa, Glycine max
  misc_feature (3)..(3): Xaa can be any naturally occurring amino acid
  misc_feature (12)..(12): Xaa can be any naturally occurring amino acid
  Coding DNA Sequence Number=SeqID_4284
NIXDTSKYITIXFVLIIFILRLTVLCYTRTRPLPRINPEWMITSCTLYIISRRLISLCVRLREYEYRCARPIYYTLRHTTYHLYYTHSNYTSLHIYILLHRTYARRYDICGDYHDSHITYR

SEQ ID NO: 7698 - protein, 56 aa, Glycine max
  misc_feature (1)..(1): Xaa can be any naturally occurring amino acid
  misc_feature (51)..(51): Xaa can be any naturally occurring amino acid
  Coding DNA Sequence Number=SeqID_4285
  Subcellular localization annotation: CTP_CleavageSite=60; ConfidenceScore=5.52e-01
XILAGYGPVHISRSPGPSFFSWKKQPEQSPPTLRSLTSFSRSALCRKKKTXPPPLR

SEQ ID NO: 7699 - protein, 132 aa, Glycine max
  misc_feature (10)..(10): Xaa can be any naturally occurring amino acid
  misc_feature (16)..(16): Xaa can be any naturally occurring amino acid
  misc_feature (69)..(69): Xaa can be any naturally occurring amino acid
  misc_feature (88)..(88): Xaa can be any naturally occurring amino acid
  misc_feature (95)..(95): Xaa can be any naturally occurring amino acid
  misc_feature (120)..(120): Xaa can be any naturally occurring amino acid
  misc_feature (129)..(129): Xaa can be any naturally occurring amino acid
  Coding DNA Sequence Number=SeqID_4287
TFMTADIYSXISHTTXSIHRVSCHRTRPVYIYRVDSCIYYITRGATATHHLHFHSSIRSVNVLHQYPFXAHTLYILPASLAVNHSLCXVLESVCXHSIGAAGMIEVSVRALTVSCCDDIXVTARHTQIXIAY

SEQ ID NO: 7700 - protein, 109 aa, Glycine max
  misc_feature (12)..(12): Xaa can be any naturally occurring amino acid
  Coding DNA Sequence Number=SeqID_4289
  Gene Ontology: Mol. function=transporter activity; Cellular component= integral to membrane; Biological process=transport
  Homolog annotation: Hit_ID=Q5DVT4; Match level="QueryCoverage=100%, HitCoverage=43%, E-value=3e-34, Identity=66%"; Hit description =Tonoplast intrinsic protein 1;1
  Pfam annotation: Domain name=MIP; Domain location=12-109; Score= -113.9; E_value=0.024; Accession=PF00230.10; Description=Major intrinsic protein
PIRNIAVGRAEXATHPDTLKAGLTEFISTLIFVFTGSCSGIAYNNFTDNGGDTPAGLISDSIAHALHLFIDVSDCANVSGGHVDPHATFRNFRGGDITLLREILYQISQ

SEQ ID NO: 7701 - protein, 233 aa, Glycine max
  misc_feature (21)..(21): Xaa can be any naturally occurring amino acid
  misc_feature (151)..(151): Xaa can be any naturally occurring amino acid
  Coding DNA Sequence Number=SeqID_4290
IYIAIGRPEPAITIYRHPASXLLAHHPRASRTRPSTNTPQHNLHKPCTPPRVSLSHLLTTIIHIHPLIYLHMPLSTSSSALTTISSHTPNKRQTNRRANRTTECDASSVNVDNSQETPTTRPAPQPLCDARCWHTEKVDDVCTNSSLVLAXTQESPRWYTRNLTLYGPTTAHRPHCATSHASTPSMIVIKHHTREASDTSWVTCGGTQPAHSTTYSVHARDERHTTSYHDTDT

SEQ ID NO: 7702 - protein, 328 aa, Glycine max
  misc_feature (327)..(327): Xaa can be any naturally occurring amino acid
  Coding DNA Sequence Number=SeqID_4292
  Subcellular localization annotation: CTP_CleavageSite=8; ConfidenceScore=5.10e-01
PLDPFSTSSSSSAPFPSVVFDRPNQQQTLNFESILQNDILEPMDIGLGPTSGTATTFSNQIYNVDTGDAQIENIQNDVPKPNMSVNALTTLFAELKVLMDTESGNCFTELSQVRSNLAATSTKLATLESTHNAVLKELEKFKKQFFESSQHSSYSERHVQQDQLAELQKVKEELEKNVNQNEEMRQELAHLKTNYSQSLNDFQNTEKANIEHMHTTLEIHEATHARNQKEINQLKRKVSTAQKKDTKSTARIAELEKEVERIVELEEKVARTVELEKKVDRIVELEEKVARTVELEKKVERTVELENKVKELEQKLATHIQQGYTHXG

SEQ ID NO: 7703 - protein, 378 aa, Glycine max
  Coding DNA Sequence Number=SeqID_4294
  Gene Ontology: Mol. function=tRNA dihydrouridine synthase activity; Cellular component=nucleus; Biological process=metabolic process
  Homolog annotation: Hit_ID=UPI00006CFFB5; Match level="QueryCoverage =87%, HitCoverage=75%, E-value=1e-118, Identity=61%"; Hit description= dihydrouridine synthase
  Pfam annotation: Domain name=Dus; Domain location=20-313; Score =283.9; E_value=3.3e-82; Accession=PF01207.8; Description =Dihydrouridine synthase (Dus)
MQQKPHGFELYKKIGEPKFVCAPMVDQSELAFRMLCRKYGTTLCYTPMLHSRLTVEDKNYLGDNFSTCPEDRPLFVQFCGNDPDTLLKAAQMVEDQCDAVDINLGCPQGIARKGHYGSFLLSEPELIGRMVKKLADNLKVPVTCKIRVLPKEEDTFHLVRTIVENGCSLLTVHGRTKEQNKQKVGKCDWDIIKRIKQSVNIPVFANGGIYNYEDAIKCLEYTGVDGVMSSESLLENPALFSGKVYNLDQLALEYLDICKTFKTDPAYIRPHLFKFLFTGLQRNPELREELGRARTMEEFLDITHRLHKLRIAESPESKIGWYERYIPAEDKLYYNDYRITFKQTISIEESKDNFGGEKKVVVAVVEEKADMDLGGMFE

SEQ ID NO: 7704 - protein, 123 aa, Glycine max
  Coding DNA Sequence Number=SeqID_4295
  Subcellular localization annotation: CTP_CleavageSite=53; ConfidenceScore=5.86e-01
ATAGSRPVSARPAGCREPHSGGVSTPGASSTRRSSATKDSCRRRASSGVLPPRCSAMRSHCGYMRGSSSSSSLSFCRVQPDGSGAGGCELAAGGGGSTCMAEEAGNQAAGTPPSVHAWCMERR

SEQ ID NO: 7705 - protein, 80 aa, Glycine max
  misc_feature (44)..(44): Xaa can be any naturally occurring amino acid
  Coding DNA Sequence Number=SeqID_4296
  Gene Ontology: Mol. function=adenosine kinase activity; Cellular component=nucleus; Biological process=purine ribonucleoside salvage
  Homolog annotation: Hit_ID=A2X7E9; Match level="QueryCoverage=100%, HitCoverage=25%, E-value=3e-22, Identity=65%"; Hit description =Putative uncharacterized protein
IKLNDAILAEDNHKPMYEELANNPNVEYIAGGATHKSIRVAHRXLQAPCASGYLGCIGKDIFGEEMKKNCTLDGVKVIFY

SEQ ID NO: 7706 - protein, 155 aa, Glycine max
  misc_feature (68)..(68): Xaa can be any naturally occurring amino acid
  misc_feature (101)..(101): Xaa can be any naturally occurring amino acid
  misc_feature (132)..(132): Xaa can be any naturally occurring amino acid
  misc_feature (134)..(134): Xaa can be any naturally occurring amino acid
  misc_feature (138)..(138): Xaa can be any naturally occurring amino acid
  misc_feature (153)..(153): Xaa can be any naturally occurring amino acid
  Coding DNA Sequence Number=SeqID_4297
  Subcellular localization annotation: CTP_CleavageSite=35; ConfidenceScore=5.05e-01
RTTACISSLTMSERSHVYTLSRTPRRRSLSRMHIMAGMMSDVYAHSLYLLSSRHSLLRASSDIHVARXLLYIFIMRAHCAVYKYITDRIDRQLHKCTTLSXSDVTSYALHDTDSLRYNGLRARARSMRRVTXAXQKYXTSLMSTRRRDVVSDXGI

SEQ ID NO: 7707 - protein, 114 aa, Glycine max
  misc_feature (4)..(4): Xaa can be any naturally occurring amino acid
  misc_feature (77)..(77): Xaa can be any naturally occurring amino acid
  misc_feature (79)..(79): Xaa can be any naturally occurring amino acid
  misc_feature (92)..(92): Xaa can be any naturally occurring amino acid
  Coding DNA Sequence Number=SeqID_4299
ILSXSIYTRHLPLPTERRPTPQFSHYHHYRCISTRLRLISFFNNRHKPYTIPSHTEESLRNHPLPLKNKYTRPLLSXSXHRRYHTPPTQLHXDQISYTFHQRHTTINIHIIPIS

SEQ ID NO: 7708 - protein, 152 aa, Glycine max; identical to SEQ ID NO: 6250
  misc_feature (3)..(3): Xaa can be any naturally occurring amino acid
  misc_feature (35)..(35): Xaa can be any naturally occurring amino acid
  misc_feature (88)..(88): Xaa can be any naturally occurring amino acid
  Coding DNA Sequence Number=SeqID_4301
  Subcellular localization annotation: CTP_CleavageSite=41; ConfidenceScore=5.12e-01

SEQ ID NO: 7709 - protein, 208 aa, Glycine max
  Coding DNA Sequence Number=SeqID_4303
  Homolog annotation: Hit_ID=Q0U9W0; Match level="QueryCoverage=87%, HitCoverage=19%, E-value=1e-07, Identity=23%"; Hit description =Putative uncharacterized protein
SYVGPPPICDSFFTRWESIIQQLKDDEPQAYPTYAQAIKDIQTVVQAVAQTTSVNGPAPPIGSNSRAPSTQRAEPRGIGPSFHGLNTGTSSHTNRVSKREPKRPSSNSSGQNIAVALRQLADKVKDKKVDCPVYKHHLMHNTLPPCSGCSVKVMSQIRSHLNPNRAAGTHNGFPRFVEQCHRCKQDFVELPTYEAHKDAGCEFQTQTR

SEQ ID NO: 7710 - protein, 146 aa, Glycine max
  misc_feature (46)..(46): Xaa can be any naturally occurring amino acid
  misc_feature (65)..(65): Xaa can be any naturally occurring amino acid
  misc_feature (139)..(139): Xaa can be any naturally occurring amino acid
  Coding DNA Sequence Number=SeqID_4304
STYTTREGWTLARCHTTGMIIKARAKCNTGCDSDTRRQHDLYILEXCLVWFVLLRRPTAGTHGAXRSCTSVCFARLAPRSYAQSYVLRYVSRAYVYVTRYATTPHARATRGRLESQVRLIDYANLCIAWPPLVRISILXEAMNKLM

SEQ ID NO: 7711 - protein, 94 aa, Glycine max; identical to SEQ ID NO: 6253
  misc_feature (10)..(10): Xaa can be any naturally occurring amino acid
  Coding DNA Sequence Number=SeqID_4306
  Subcellular localization annotation: CTP_CleavageSite=26; ConfidenceScore=5.02e-01

SEQ ID NO: 7712 - protein, 193 aa, Glycine max
  misc_feature (4)..(5): Xaa can be any naturally occurring amino acid
  misc_feature (8)..(10): Xaa can be any naturally occurring amino acid
  misc_feature (12)..(13): Xaa can be any naturally occurring amino acid
  misc_feature (15)..(15): Xaa can be any naturally occurring amino acid
  misc_feature (22)..(22): Xaa can be any naturally occurring amino acid
  misc_feature (24)..(24): Xaa can be any naturally occurring amino acid
  misc_feature (28)..(30): Xaa can be any naturally occurring amino acid
  misc_feature (35)..(35): Xaa can be any naturally occurring amino acid
  misc_feature (38)..(40): Xaa can be any naturally occurring amino acid
  misc_feature (52)..(54): Xaa can be any naturally occurring amino acid
  misc_feature (59)..(60): Xaa can be any naturally occurring amino acid
  misc_feature (62)..(62): Xaa can be any naturally occurring amino acid
  Coding DNA Sequence Number=SeqID_4308
  Gene Ontology: Mol. function=chalcone isomerase activity; Biological process=flavonoid biosynthetic process
  Homolog annotation: Hit_ID=A7ISP5; Match level="QueryCoverage=100%, HitCoverage=85%, E-value=2e-49, Identity=57%"; Hit description =Chalcone--flavonone isomerase 2-B
  Pfam annotation: Domain name=Chalcone; Domain location=3-193; Score =98.1; E_value=2.7e-26; Accession=PF02431.6; Description=Chalcone -flavanone isomerase
TPAXXTKXXXEXXQXPAEETPXAXTKTXXXGGAGXRGXXXEEETAKPTGKGXXXEDKAXXTXGAKRKGKSAAELPDSREPYRDINKGPAEKLNRGPKPRTLDGREYERKAPDNCAAHTESAGTYSEAKQKANEELTNAHKDQNLPPGSTGLYKQSPTGTKGLSHPKDETKPKNEQAAKDNKHPSEGRRETSTG

SEQ ID NO: 7713 - protein, 336 aa, Glycine max
  misc_feature (158)..(158): Xaa can be any naturally occurring amino acid
  misc_feature (162)..(162): Xaa can be any naturally occurring amino acid
  misc_feature (200)..(200): Xaa can be any naturally occurring amino acid
  misc_feature (242)..(242): Xaa can be any naturally occurring amino acid
  misc_feature (250)..(250): Xaa can be any naturally occurring amino acid
  misc_feature (258)..(258): Xaa can be any naturally occurring amino acid
  misc_feature (264)..(264): Xaa can be any naturally occurring amino acid
  misc_feature (328)..(328): Xaa can be any naturally occurring amino acid
  misc_feature (334)..(334): Xaa can be any naturally occurring amino acid
  Coding DNA Sequence Number=SeqID_4309
IQIHTNLNIHTLSLYMPKNNIKYTTIQHYHTLSLFPPLSPTPITPHHPPLSSLPILHHSISLYSPHTSYSTHQPTSLFHLTHYSTPHSLTNNIQTTYTSLLLYISILIINLLITYSTISYLCHVHYHIIQYVLFSTHINILHTTNNTQLSHIISLHHXNILXFHHTTLNHHIFTLHTHIYPQYTYTHHPHLLTTYITLRXHTLLPHISCTHTLIYLHLIIAPHSTSHITPHTPTIHHTRQHXTSPTLTQXYTLLPHHXTNSLPXTLLSPHYIHTIILSLPTTPSPIIPLNTQSITLLSIYMLKLFLTNIISTLYTLTTHTTITLTLHXHDIIYXKH

SEQ ID NO: 7714 - protein, 93 aa, Glycine max
  misc_feature (63)..(63): Xaa can be any naturally occurring amino acid
  Coding DNA Sequence Number=SeqID_4311
KLGFSFSEFSALVFALKHRRTHIVSLTIVFYFSSNNFFWVVINGESKTKLQNQEWIVDNSSVXCLFMLSGSLVDRLHLSKPGMKTRAVSSTPG

SEQ ID NO: 7715 - protein, 129 aa, Glycine max
  misc_feature (35)..(35): Xaa can be any naturally occurring amino acid
  misc_feature (37)..(37): Xaa can be any naturally occurring amino acid
  misc_feature (40)..(40): Xaa can be any naturally occurring amino acid
  misc_feature (43)..(44): Xaa can be any naturally occurring amino acid
  misc_feature (55)..(55): Xaa can be any naturally occurring amino acid
  misc_feature (57)..(58): Xaa can be any naturally occurring amino acid
  misc_feature (63)..(64): Xaa can be any naturally occurring amino acid
  Coding DNA Sequence Number=SeqID_4313
FHHRIKSILKVHYNGGRETKNDVGVTSKTTEAAPXSXPRXFHXXRSHHRCREALXFXXRTGYXXEQVTIGSGPPGSKGRGFRLSRKKAGVIKPRYFGKKTPFPQPWERIGDSRPHGGFFFSNFSAPAPQ

SEQ ID NO: 7716 - protein, 107 aa, Glycine max; identical to SEQ ID NO: 6256
  misc_feature (31)..(31): Xaa can be any naturally occurring amino acid
  misc_feature (51)..(51): Xaa can be any naturally occurring amino acid
  misc_feature (62)..(62): Xaa can be any naturally occurring amino acid
  Coding DNA Sequence Number=SeqID_4315

SEQ ID NO: 7717 - protein, 106 aa, Glycine max
  Coding DNA Sequence Number=SeqID_4317
IGTNTGGEQRTRRQMIIRRPRRRDHTLSDHSTSPLHTGAPSFVISLLRRQPARTAPFPQYHIILYNRRLQIGKPCTCIVQLIYAHCIIGAHLPPYCQHCDGRGRRE

SEQ ID NO: 7718 - protein, 170 aa, Glycine max
  misc_feature (5)..(5): Xaa can be any naturally occurring amino acid
  misc_feature (10)..(10): Xaa can be any naturally occurring amino acid
  misc_feature (61)..(61): Xaa can be any naturally occurring amino acid
  Coding DNA Sequence Number=SeqID_4319
  Subcellular localization annotation: CTP_CleavageSite=89; ConfidenceScore=5.59e-01
YISTXPPHTXTTPTPPPTPPSLLLLSLYFIPTYLSLQLFFLSLSSPTHPTSLLHSSLTYSXYLPNSSTHYPSLSLTLIILLKIFILSPLLSYLFTHPFIYINNTLSISLILFSRLSLLHLIKLNILYSHPLISYPLPLHLSTLSSLHSISYSLNLLSLYPSHTTLTHFIL

SEQ ID NO: 7719 - protein, 120 aa, Glycine max
  Coding DNA Sequence Number=SeqID_4321
  Gene Ontology: Mol. function=microtubule binding; Cellular component =cytoplasmic vesicle; Biological process=protein transport
  Homolog annotation: Hit_ID=Q8LEM4; Match level="QueryCoverage=98%, HitCoverage=96%, E-value=5e-57, Identity=93%"; Hit description =Autophagy-related protein 8a precursor
  Pfam annotation: Domain name=MAP1_LC3; Domain location=14-117; Score =266.9; E_value=4.3e-77; Accession=PF02991.6; Description=Microtubule associated protein 1A1B, light chain 3
MAKNSFKLSNPLEIRMAESTRIREKYQDRVPVIVEKAEQSDVPDIDKKKYLVPADLTVGQFVYVVRKRIKLGAEKAIFVFVKNTLPPTAALMSAIYEEHKDEDGFLYMTYSGENTFGSAC

SEQ ID NO: 7720 - protein, 161 aa, Glycine max
  misc_feature (78)..(78): Xaa can be any naturally occurring amino acid
  misc_feature (81)..(81): Xaa can be any naturally occurring amino acid
  misc_feature (110)..(110): Xaa can be any naturally occurring amino acid
  misc_feature (139)..(139): Xaa can be any naturally occurring amino acid
  misc_feature (150)..(150): Xaa can be any naturally occurring amino acid
  Coding DNA Sequence Number=SeqID_4322
LSTSQRHTSLSHPHIDCEVPQQDHLSEVCLICRRPVRRTHAHLVYLSLLSYAYIRSIIPLIAYTLHLTPTCLSSLHAXYLXIICHPSLIMPLLFFYDLLHTIALLSLTPXYSYQQEVRRFPALAQILCYHTQHQHATHXSYIMLVTTRHXSTHIPHRARRL

SEQ ID NO: 7721 - protein, 286 aa, Glycine max
  misc_feature (1)..(1): Xaa can be any naturally occurring amino acid
  misc_feature (60)..(60): Xaa can be any naturally occurring amino acid
  Coding DNA Sequence Number=SeqID_4324
XRSYNGKYVVYVCAARVTNIYDYNTRLVARGQHAVYHLYCRARARAFSSLALSIIRGERXRRRSLIVRVSSRALPASHRERIYSLCTANGDARAHEFFFTSVSYYYIFSTRARARAHSFYSPACTAAARAAYISRRAAHYIYRTNSPAQHVHGRLNKVARWIHRHRTPPPSIYTHYITHLLVVLCARIVTESMFQTCVRKLHTRLRNALARGRSVNIALAGFHTIIISWSGYFFTLTPRHFVFRHTPRSTTTTTFSVYLPPWSYIPHTPTIFFIRGGELYILIRPN

SEQ ID NO: 7722 - protein, 192 aa, Glycine max
  Coding DNA Sequence Number=SeqID_4326
DERDVARAGGVDGVVAVDHDGAVLAEGVDRKAGDADVVAVKLLQREGLADDVERRGVEVGRLVHGDDGRGEPAVVAVVRPRDDRLVGGHLGRVNEGQNAVLERVGVDVVRHAVLDRQNVTEVNAVDLEVAPVHKHGTEGEVLVAVNQHDHASVGVDANSGEVVLGRDALEDSGVCEGDGLVVEAEAAEHARQ

SEQ ID NO: 7723 - protein, 126 aa, Glycine max
  Coding DNA Sequence Number=SeqID_4328
LTILPAFLNTNTLIFSIVHIFLLQSLPMAGVEVEKTVPNTEEKTTTTEATTIETPKETVHADDSATAVEVEIKEDEEEAPKVEKETEKTETAPVKEEKLVETPAAVEEKDVKPAAEEEKTVEVKTS

SEQ ID NO: 7724 - protein, 244 aa, Glycine max
  misc_feature (13)..(13): Xaa can be any naturally occurring amino acid
  misc_feature (23)..(23): Xaa can be any naturally occurring amino acid
  misc_feature (97)..(97): Xaa can be any naturally occurring amino acid
  misc_feature (103)..(103): Xaa can be any naturally occurring amino acid
  misc_feature (134)..(134): Xaa can be any naturally occurring amino acid
  misc_feature (169)..(169): Xaa can be any naturally occurring amino acid
  misc_feature (193)..(194): Xaa can be any naturally occurring amino acid
  misc_feature (210)..(210): Xaa can be any naturally occurring amino acid
  misc_feature (212)..(212): Xaa can be any naturally occurring amino acid
  misc_feature (219)..(219): Xaa can be any naturally occurring amino acid
  misc_feature (230)..(230): Xaa can be any naturally occurring amino acid
  misc_feature (234)..(234): Xaa can be any naturally occurring amino acid
  misc_feature (239)..(240): Xaa can be any naturally occurring amino acid
  Coding DNA Sequence Number=SeqID_4330
VTSRTRAPTRRAXITDRGQKMTXAECAMGDEMVRCARCTRRDAHACMSRVGVSKHTSSYVCSHTLFRVCLAVSVVALACTCVANTRALRSCTGEWYXIIVCDXSSYIYITLWRSSCLAESFICVGVLTSILILXISLARVIQHTIAARTVCMGSCSALPYYWTKVERYXRLFLVSACRVQQHLVRSICGYSIXXLAAVCGERLARQSNTXFXLQPATYXTTPPLCKRRGXPTTXHHNPXXTQTP

SEQ ID NO: 7725 - protein, 87 aa, Glycine max; identical to SEQ ID NO: 6580
  misc_feature (4)..(4): Xaa can be any naturally occurring amino acid
  misc_feature (76)..(76): Xaa can be any naturally occurring amino acid
  misc_feature (81)..(81): Xaa can be any naturally occurring amino acid
  Coding DNA Sequence Number=SeqID_4332
  Subcellular localization annotation: CTP_CleavageSite=44; ConfidenceScore=5.55e-01

SEQ ID NO: 7726 - protein, 145 aa, Glycine max
  misc_feature (39)..(39): Xaa can be any naturally occurring amino acid
  misc_feature (122)..(122): Xaa can be any naturally occurring amino acid
  misc_feature (130)..(130): Xaa can be any naturally occurring amino acid
  Coding DNA Sequence Number=SeqID_4333
  Gene Ontology: Mol. function=structural molecule activity; Cellular component=protein complex; Biological process=microtubule-based movement
  Homolog annotation: Hit_ID=P11139; Match level="QueryCoverage=99%, HitCoverage=32%, E-value=4e-43, Identity=57%"; Hit description =Tubulin alpha-1 chain
  Pfam annotation: Domain name=Tubulin; Domain location=46-144; Score= -74.4; E_value=0.049; Accession=PF00091.15; Description=TubulinFtsZ family, GTPase domain
KIIRLHIAQAERKAGNACWEAYWLYHGNNPDGSMPRDPXLGVAHDAGYTYFIDTGSGKHVPRALFVDLEPRAIDELRTGPYRLLLIPDLLISSKEYAANNFGRGHYTVGRDIDELWLDRMPXISDNCTGXQGFLGITCCGGTSGP

SEQ ID NO: 7727 - protein, 131 aa, Glycine max
  misc_feature (109)..(109): Xaa can be any naturally occurring amino acid
  misc_feature (121)..(121): Xaa can be any naturally occurring amino acid
  misc_feature (123)..(124): Xaa can be any naturally occurring amino acid
  Coding DNA Sequence Number=SeqID_4334
  Homolog annotation: Hit_ID=A0TL17; Match level="QueryCoverage=88%, HitCoverage=15%, E-value=3e-11, Identity=33%"; Hit description =Glycosyl transferase, group 1
MSALRFGFKRADRVWFMNQDDMKDSIRENAIKPEKAVFIRSCGVDSSEFSPDAVPDEALAALRAEFGATGDTRFVVCVGRMTWQKGVREFVEASKIVGKTVPGALFLLXGEIQKDSPDVVXEXXYINPVWT

SEQ ID NO: 7728 - protein, 65 aa, Glycine max
  Coding DNA Sequence Number=SeqID_4335
  Homolog annotation: Hit_ID=A5CBP9; Match level="QueryCoverage=100%, HitCoverage=17%, E-value=6e-15, Identity=57%"; Hit description =Putative uncharacterized protein
ELVLPPVFDYCRKVLEAGDQIVARDLYWEAVCEGGSKAEDLLLESIEKDPFVGEPYVVMSQVDLT

SEQ ID NO: 7729 - protein, 113 aa, Glycine max
  misc_feature (26)..(26): Xaa can be any naturally occurring amino acid
  misc_feature (66)..(66): Xaa can be any naturally occurring amino acid
  Coding DNA Sequence Number=SeqID_4336
  Gene Ontology: Mol. function=protein binding; Biological process=RNA metabolic process
  Homolog annotation: Hit_ID=A2XV66; Match level="QueryCoverage=97%, HitCoverage=12%, E-value=1e-34, Identity=68%"; Hit description =Putative uncharacterized protein
EEPGGKEITLKRVLFNNCQEAFEGAXCLTEELKGVTEPDRKMERTDKGRLLKLRTLGNIRPIGELXKQKMGPEKIDHYIDHELVGFPYSKSCPGDENDEAICQYFNTIWKHFR

SEQ ID NO: 7730 - protein, 449 aa, Glycine max
  misc_feature (263)..(263): Xaa can be any naturally occurring amino acid
  misc_feature (274)..(274): Xaa can be any naturally occurring amino acid
  misc_feature (292)..(292): Xaa can be any naturally occurring amino acid
  misc_feature (393)..(393): Xaa can be any naturally occurring amino acid
  misc_feature (415)..(415): Xaa can be any naturally occurring amino acid
  Coding DNA Sequence Number=SeqID_4337
  Gene Ontology: Mol. function=serine-type peptidase activity; Cellular component=cytoplasmic vesicle; Biological process=proteolysis
  Homolog annotation: Hit_ID=A9PHA7; Match level="QueryCoverage=92%, HitCoverage=95%, E-value=1e-135, Identity=56%"; Hit description =Putative uncharacterized protein
  Pfam annotation: Domain name=Peptidase_S28; Domain location=56-431; Score=67.3; E_value=5.2e-17; Accession=PF05577.2; Description=Serine carboxypeptidase S28
MREQEDWRITTALLTLLLVFVSSFPALSYGVVPPRTLLNKLSQGSYLTTQEQWFNQTLDHFSPYDHHQFRQRYYEFLDYFRIPDGPIFLVIGGEGPCNGITNDYIGVLAKKFGAAMVTLEHRYYGKSSPFNSLETENLKYLSSKQALFDLAVFRQYYQDSLNAKLNRTKTENPWFVFGGSYAGALSAWFRLKFPHLTCGSLASSAVVLAVYNYTEYDHQIGESAGAECKVELQETTQLIEHKLATTGKEMKASFDAGDLETDXDFVDFLADTSXIAFQYGHLGTDGQTYDQXKYLERTAMDRGQFRSINTTFEINVKMSTLMSKGTPKNLRSMKTISIQRGILDQEDRRIITGGQWYIQTSNILFSNGTHVPSRHASKQSPSIHMPYYNVNCXNCAHCSDCGGCLQFHFSIEGNXKTCTSPDAVHKVRQKISEHMDLWLSECVEGRSFI

SEQ ID NO: 7731 - protein, 126 aa, Glycine max; identical to SEQ ID NO: 6285
  misc_feature (8)..(8): Xaa can be any naturally occurring amino acid
  misc_feature (37)..(38): Xaa can be any naturally occurring amino acid
  misc_feature (62)..(62): Xaa can be any naturally occurring amino acid
  misc_feature (74)..(74): Xaa can be any naturally occurring amino acid
  misc_feature (79)..(80): Xaa can be any naturally occurring amino acid
  misc_feature (84)..(84): Xaa can be any naturally occurring amino acid
  misc_feature (92)..(92): Xaa can be any naturally occurring amino acid
  misc_feature (103)..(103): Xaa can be any naturally occurring amino acid
  misc_feature (113)..(113): Xaa can be any naturally occurring amino acid
  misc_feature (118)..(118): Xaa can be any naturally occurring amino acid
  misc_feature (121)..(121): Xaa can be any naturally occurring amino acid
  Coding DNA Sequence Number=SeqID_4338

SEQ ID NO: 7732 - protein, 97 aa, Glycine max
  Coding DNA Sequence Number=SeqID_4340
NSPYSNTLSTSSATLWRIPHRAFLILTFILSCHKRPTNEIPHHDKKPIKPNKRGRHHPVGQQRIPHPDAGGQQRTRQEDAGVRNQKKKTRTKQARDN

SEQ ID NO: 7733 - protein, 117 aa, Glycine max
  misc_feature (31)..(31): Xaa can be any naturally occurring amino acid
  misc_feature (73)..(73): Xaa can be any naturally occurring amino acid
  Coding DNA Sequence Number=SeqID_4342
  Gene Ontology: Mol. function=transferase activity; Biological process= metabolic process
  Homolog annotation: Hit_ID=A7PXF1; Match level="QueryCoverage=98%, HitCoverage=34%, E-value=1e-24, Identity=50%"; Hit description =Chromosome chr12 scaffold_36, whole genome shotgun sequence
  Pfam annotation: Domain name=FTCD_N; Domain location=6-117; Score= -112.3; E_value=0.0067; Accession=PF07837.3; Description =Formiminotransferase domain, N-terminal subd
TVPLHQTVVDKADATHTVINLSYHEWADPQXSARLDIIFHPLQHALLEEASRIAKAQAADIGNRYTEPVILYXQKHPTGNEGDAITRELGYYRPKSTGSQCVGWAMHETLPLSPDEG

SEQ ID NO: 7734 - protein, 104 aa, Glycine max; identical to SEQ ID NO: 6287
  misc_feature (22)..(22): Xaa can be any naturally occurring amino acid
  misc_feature (37)..(37): Xaa can be any naturally occurring amino acid
  misc_feature (93)..(93): Xaa can be any naturally occurring amino acid
  Coding DNA Sequence Number=SeqID_4343

SEQ ID NO: 7735 - protein, 129 aa, Glycine max
  misc_feature (5)..(5): Xaa can be any naturally occurring amino acid
  misc_feature (10)..(11): Xaa can be any naturally occurring amino acid
  misc_feature (17)..(17): Xaa can be any naturally occurring amino acid
  misc_feature (29)..(31): Xaa can be any naturally occurring amino acid
  misc_feature (39)..(39): Xaa can be any naturally occurring amino acid
  misc_feature (42)..(42): Xaa can be any naturally occurring amino acid
  misc_feature (48)..(48): Xaa can be any naturally occurring amino acid
  Coding DNA Sequence Number=SeqID_445
  Gene Ontology: Mol. function=structural constituent of ribosome; Cellular component=ribonucleoprotein complex; Biological process =translation
  Homolog annotation: Hit_ID=B0F825; Match level="QueryCoverage=89%, HitCoverage=71%, E-value=2e-32, Identity=65%"; Hit description =Ribosomal protein
  Pfam annotation: Domain name=Ribosomal_L14; Domain location=12-125; Score=47.7; E_value=4.1e-11; Accession=PF00238.10; Description =Ribosomal protein L14pL23e
AGNKXRKAPXXPAAATXNCADNTGAKNPXXXPGKGTKGXGNXPPSARXGDMAMATAKKGKPDPRNIVLPAGIGRQRKPWRRKDGGHTNFENNAGVTANPKGEMKGSAITGPNGKERADSRARRARGGNA

SEQ ID NO: 7736 - protein, 117 aa, Glycine max
  Coding DNA Sequence Number=SeqID_446
  Gene Ontology: Biological process=protein transport
  Homolog annotation: Hit_ID=A5C1M4; Match level="QueryCoverage=100%, HitCoverage=53%, E-value=1e-34, Identity=66%"; Hit description =Putative uncharacterized protein
ALRPEAAAMKAMQKAPNIVDVAKPMDEINDQPETMNQIQDPLSAPIGAPADFAEAKLEPDLKKLEGFELEKQFFQPAITVPAAPVQVPVGRQLSRPVPEKGTPEEDELAPFQAEMAL

SEQ ID NO: 7737 - protein, 100 aa, Glycine max
  misc_feature (17)..(17): Xaa can be any naturally occurring amino acid
  Coding DNA Sequence Number=SeqID_447
  Homolog annotation: Hit_ID=Q9YJU5; Match level="QueryCoverage=98%, HitCoverage=5%, E-value=3e-33, Identity=75%"; Hit description=RNA1 polyprotein (P1) (Genome polyprotein B) [Contains: Protease cofactor (32 kDa ...
  Homolog annotation: Hit description=protein); Putative helicase (EC 3.6.1.-) (NTP-binding protein) (NTB) (Membrane-binding protein) (58 kDa protein); Viral genome-linked protein (VPg); Picornain 3C-like protease (EC ...
  Homolog annotation: Hit description=3.4.22.-) (3C-like protease) (24 kDa protein); RNA-directed RNA polymerase (EC 2.7.7.48) (87 kDa protein)]
  Subcellular localization annotation: CTP_CleavageSite=59; ConfidenceScore=5.69e-01
ENLPWGSGRGVFPPPAXISFAVNNRSSNTNKSFRPALGKGKKIVFLTRVDPFPEALRVVFFGVKNEILSFTATNPMLTVFFENCKSLKYLVDECPLAFVT

SEQ ID NO: 7738 - protein, 138 aa, Glycine max
  misc_feature (30)..(32): Xaa can be any naturally occurring amino acid
  misc_feature (48)..(48): Xaa can be any naturally occurring amino acid
  misc_feature (126)..(126): Xaa can be any naturally occurring amino acid
  Coding DNA Sequence Number=SeqID_448
  Subcellular localization annotation: CTP_CleavageSite=70; ConfidenceScore=5.56e-01
CPYPVSFHTNQPPPPPLHLPSSCRFMSPPXXXGPSIYPAPDPSPSTPXNAPSHSGRSLELRRPSPASRANAAAVAAGLTGGFGTPEVSGGGHRSSSAASQLESDSWGWCAARRSRTRTCPSRSTTXPAASISSDGLAV

SEQ ID NO: 7739 - protein, 82 aa, Glycine max
  Coding DNA Sequence Number=SeqID_450
APPHPAPPHPKPQHPTPGPLGRLPRHDVPGTEVAQIDGAPRMGQPLEPILISGQKPAPLALRSLALPQCFGFSGEPFILGLS

SEQ ID NO: 7740 - protein, 171 aa, Glycine max; identical to SEQ ID NO: 7404
  misc_feature (3)..(3): Xaa can be any naturally occurring amino acid
  misc_feature (12)..(12): Xaa can be any naturally occurring amino acid
  misc_feature (19)..(19): Xaa can be any naturally occurring amino acid
  misc_feature (30)..(30): Xaa can be any naturally occurring amino acid
  misc_feature (39)..(42): Xaa can be any naturally occurring amino acid
  misc_feature (50)..(50): Xaa can be any naturally occurring amino acid
  misc_feature (87)..(87): Xaa can be any naturally occurring amino acid
  misc_feature (117)..(117): Xaa can be any naturally occurring amino acid
  misc_feature (134)..(134): Xaa can be any naturally occurring amino acid
  misc_feature (136)..(136): Xaa can be any naturally occurring amino acid
  misc_feature (138)..(138): Xaa can be any naturally occurring amino acid
  misc_feature (147)..(148): Xaa can be any naturally occurring amino acid
  misc_feature (155)..(155): Xaa can be any naturally occurring amino acid
  misc_feature (159)..(160): Xaa can be any naturally occurring amino acid
  misc_feature (163)..(163): Xaa can be any naturally occurring amino acid
  misc_feature (165)..(165): Xaa can be any naturally occurring amino acid
  Coding DNA Sequence Number=SeqID_452

SEQ ID NO: 7741 - protein, 172 aa, Glycine max
  misc_feature (30)..(30): Xaa can be any naturally occurring amino acid
  misc_feature (134)..(134): Xaa can be any naturally occurring amino acid
  misc_feature (158)..(158): Xaa can be any naturally occurring amino acid
  Coding DNA Sequence Number=SeqID_454
  Gene Ontology: Mol. function=nucleoside-triphosphatase activity
  Homolog annotation: Hit_ID=P0A9U1; Match level="QueryCoverage=81%, HitCoverage=24%, E-value=2e-58, Identity=84%"; Hit description =Uncharacterized ABC transporter ATP-binding protein ybhF
LNTPTYILITQPTPHTHRIRDPPRVSNKEXEPKVFPLDEPGVGVDPISRRELCHTAHELAGEGMLILWSTSYLDEAEQCRDVLLMNEGELLYQGEPKALTQTMAARSFLMTSPHEGNRKLLLRALKLPQASDGXMIQGKSARLILIKEATPYHIRHVXAMPAIHPTQTTPAS

SEQ ID NO: 7742 - protein, 151 aa, Glycine max
  misc_feature (47)..(47): Xaa can be any naturally occurring amino acid
  misc_feature (50)..(50): Xaa can be any naturally occurring amino acid
  misc_feature (54)..(54): Xaa can be any naturally occurring amino acid
  misc_feature (62)..(62): Xaa can be any naturally occurring amino acid
  misc_feature (66)..(66): Xaa can be any naturally occurring amino acid
  misc_feature (70)..(70): Xaa can be any naturally occurring amino acid
  misc_feature (72)..(72): Xaa can be any naturally occurring amino acid
  misc_feature (75)..(75): Xaa can be any naturally occurring amino acid
  misc_feature (79)..(80): Xaa can be any naturally occurring amino acid
  misc_feature (89)..(89): Xaa can be any naturally occurring amino acid
  misc_feature (104)..(104): Xaa can be any naturally occurring amino acid
  misc_feature (106)..(106): Xaa can be any naturally occurring amino acid
  misc_feature (113)..(113): Xaa can be any naturally occurring amino acid
  misc_feature (123)..(123): Xaa can be any naturally occurring amino acid
  misc_feature (126)..(126): Xaa can be any naturally occurring amino acid
  misc_feature (135)..(135): Xaa can be any naturally occurring amino acid
  misc_feature (143)..(143): Xaa can be any naturally occurring amino acid
  misc_feature (150)..(150): Xaa can be any naturally occurring amino acid
  Coding DNA Sequence Number=SeqID_455
  Subcellular localization annotation: CTP_CleavageSite=43; ConfidenceScore=5.43e-01
IAPSHAAAPHHLFSLISTARTRRRQTHMPLSLYAPSRRPHAPRTRTXTTXYIQXLTILILYXTLHXICDXVXAVXPDHXXEYVAIQSVXMTGYDADSLMLSTRXSXVHVQIAXETSVLRACLXSSXSSLVGSCRXAIARPTRXGRPETDXT

SEQ ID NO: 7743 - protein, 116 aa, Glycine max
  misc_feature (69)..(69): Xaa can be any naturally occurring amino acid
  misc_feature (93)..(93): Xaa can be any naturally occurring amino acid
  misc_feature (111)..(111): Xaa can be any naturally occurring amino acid
  Coding DNA Sequence Number=SeqID_3913
CPILALTIVAFTLLPTRMLTETLTCASQCAHMNSFYTIHLSKYSHAPNTIASRISSTAITLVTHTSTTXHGTPTCVAHDIQYDESTIRTQHGXALGYSRISTHARTTLLLXTQVDT

SEQ ID NO: 7744 - protein, 138 aa, Glycine max
  misc_feature (7)..(7): Xaa can be any naturally occurring amino acid
  misc_feature (74)..(74): Xaa can be any naturally occurring amino acid
  misc_feature (82)..(82): Xaa can be any naturally occurring amino acid
  misc_feature (86)..(86): Xaa can be any naturally occurring amino acid
  misc_feature (97)..(97): Xaa can be any naturally occurring amino acid
  misc_feature (110)..(111): Xaa can be any naturally occurring amino acid
  misc_feature (123)..(123): Xaa can be any naturally occurring amino acid
  misc_feature (135)..(135): Xaa can be any naturally occurring amino acid
  misc_feature (137)..(137): Xaa can be any naturally occurring amino acid
  Coding DNA Sequence Number=SeqID_3915
RIVVAWXTCRSTLPPTNSYVTIYLSCSYHVVCSLQCTLKLSTHLLHTSIHSASIATHIYIIYLEDIYLESIARXRMRSITTXYLEXLSRSTQRTALXCHSMSPRTLLLVXXLYDFIFVRCAPXWLLVAVYSHNHXLXS

SEQ ID NO: 7745 - protein, 184 aa, Glycine max
  misc_feature (18)..(18): Xaa can be any naturally occurring amino acid
  misc_feature (47)..(47): Xaa can be any naturally occurring amino acid
  misc_feature (52)..(52): Xaa can be any naturally occurring amino acid
  misc_feature (58)..(58): Xaa can be any naturally occurring amino acid
  misc_feature (70)..(70): Xaa can be any naturally occurring amino acid
  misc_feature (78)..(78): Xaa can be any naturally occurring amino acid
  misc_feature (105)..(106): Xaa can be any naturally occurring amino acid
  misc_feature (114)..(114): Xaa can be any naturally occurring amino acid
  misc_feature (116)..(116): Xaa can be any naturally occurring amino acid
  misc_feature (132)..(133): Xaa can be any naturally occurring amino acid
  misc_feature (137)..(138): Xaa can be any naturally occurring amino acid
  misc_feature (145)..(145): Xaa can be any naturally occurring amino acid
  misc_feature (151)..(151): Xaa can be any naturally occurring amino acid
  misc_feature (159)..(159): Xaa can be any naturally occurring amino acid
  misc_feature (163)..(163): Xaa can be any naturally occurring amino acid
  misc_feature (183)..(183): Xaa can be any naturally occurring amino acid
  Coding DNA Sequence Number=SeqID_3917
TCSALRVVAATAGCAQTXNPVVMDERVGDYVIVHSPHTSHTSSLDSXDYCYXCVVSVXYVYADSHTYIDXSETQTSAXSVAARTAAGVARARSVEAKDMSSAACXXHATAWVGXVXVRGGACRVVAARTLAXXVASXXMSCCVYXVMCMNXLYHLFVFXRVLXRVYVSMLSRIRSSLHILATXP

SEQ ID NO: 7746 - protein, 69 aa, Glycine max
  Coding DNA Sequence Number=SeqID_3919
QATIFYLHRMAIYVEIKSCSLTPTHQQNARSSRRLSPYIFDKMIVHVPPSPHDSDTLRQRPLLTHVISL

SEQ ID NO: 7747 - protein, 114 aa, Glycine max
  misc_feature (62)..(62): Xaa can be any naturally occurring amino acid
  misc_feature (79)..(80): Xaa can be any naturally occurring amino acid
  misc_feature (95)..(95): Xaa can be any naturally occurring amino acid
  Coding DNA Sequence Number=SeqID_3921
TQRQNTAQNKEDNKRVVLRVSEMRMPRVLSHSSHFKTHYTLTHLLSLTTLHLTTHLINSTTXTREQTPPLPISPRRSRXXAHTNTQQKVYLYIFXYDNTNKQKDIQNNLQHRHI

SEQ ID NO: 7748 - protein, 192 aa, Glycine max
  misc_feature (178)..(178): Xaa can be any naturally occurring amino acid
  misc_feature (187)..(187): Xaa can be any naturally occurring amino acid
  Coding DNA Sequence Number=SeqID_3923
  Gene Ontology: Mol. function=transforming growth factor beta receptor, inhibitory cytoplasmic mediator activity; Cellular component =transcription factor complex; Biological process=transforming growth factor beta receptor signaling pathway
  Homolog annotation: Hit_ID=UPI0000DB6F46; Match level="QueryCoverage =99%, HitCoverage=65%, E-value=4e-48, Identity=50%"; Hit description =PREDICTED: similar to Mothers against decapentaplegic homolog 6 (SMAD 6) (Mothers ...
  Homolog annotation: Hit description=against DPP homolog 6) (Smad6) (hSMAD6), partial
  Pfam annotation: Domain name=MH2; Domain location=74-192; Score=13.8; E_value=1.6e-09; Accession=PF03166.5; Description=MH2 domain
IELKRIPSCPNEIDPVYVCCNPTHWFRICRTDSPPPPYSKFAMERLKPEDRAPSEERVRDPSIFPGSLSTDGEEKSSSGWCQLAYWEQSQRVGRLFPVENPAVNIFAEQTRGDGLCLTTLAMQRLSATPDVVLKARQKIGLGVTLSRESDGVWIYNRSSAPVFVHSPTLSDIDSRSVXVYRVPPGHXLRAFD

SEQ ID NO: 7749 - protein, 65 aa, Glycine max
  misc_feature (25)..(25): Xaa can be any naturally occurring amino acid
  misc_feature (43)..(43): Xaa can be any naturally occurring amino acid
  misc_feature (47)..(47): Xaa can be any naturally occurring amino acid
  misc_feature (49)..(49): Xaa can be any naturally occurring amino acid
  misc_feature (52)..(52): Xaa can be any naturally occurring amino acid
  misc_feature (54)..(54): Xaa can be any naturally occurring amino acid
  misc_feature (65)..(65): Xaa can be any naturally occurring amino acid
  Coding DNA Sequence Number=SeqID_3924
INLSLVLVETEMLNNASSHSIREQXQIWLFSLNLQLQRSVRMXSLLXGXPVXRXTASSALDFNDX

SEQ ID NO: 7750 - protein, 95 aa, Glycine max
  Coding DNA Sequence Number=SeqID_3925
TIARVAIQHDYVLALRSAYNTQRDVTHAAVCNHIPLAVTGSGPIHLLILQTQLSTSAPSHSSSPTPSVLHYTHNITLPSRLTPYTLLSARSFRSL

SEQ ID NO: 7751 - protein, 190 aa, Glycine max
  Coding DNA Sequence Number=SeqID_3927
  Gene Ontology: Mol. function=calcium-dependent phospholipid binding; Cellular component=integral to membrane; Biological process=signal transduction
  Homolog annotation: Hit_ID=Q0UEG6; Match level="QueryCoverage=97%, HitCoverage=13%, E-value=6e-87, Identity=85%"; Hit description =Putative uncharacterized protein
  Pfam annotation: Domain name=C2; Domain location=46-128; Score=99.7; E_value=8.8e-27; Accession=PF00168.20; Description=C2 domain
QLRRPPPQFTLKDKNGRDNKITVMLKYIPVKMRLDPSESFNNQGTLRVDVLDAADLPAADRNGFSDPYCKFMLNDKEVYKTKTQKKTLHPAWNEYFEVPVRSRTAADFVVNVYDWDFGDKADFLGKSSINLEILEPFQQQEVTLALDGKSGAIRLRMLFKPDYVVRSRQGSSTFSGTFAVPGKVIGAPVK

SEQ ID NO: 7752 - protein, 148 aa, Glycine max
  Coding DNA Sequence Number=SeqID_3928
  Gene Ontology: Cellular component=cellulose and pectin-containing cell wall
  Homolog annotation: Hit_ID=A7QKQ1; Match level="QueryCoverage=77%, HitCoverage=28%, E-value=1e-17, Identity=41%"; Hit description =Chromosome chr2 scaffold_113, whole genome shotgun sequence
  Pfam annotation: Domain name=PAE; Domain location=11-145; Score= -182.9; E_value=0.00018; Accession=PF03283.4; Description =Pectinacetylesterase
MENARISQWLILLVCALLLLISEASYVPITIVQNAVAKGAVCLDGSPPAYHFDRGFESGIKHWLVAFAAGGWGNIVPTCLGPKTNLLRFLLSNGPGNGLFRKFGKTGKWFNPNFHKREKKKGEGIGEGPPLSGGGVKKRKPRGKISPF

SEQ ID NO: 7753 - protein, 136 aa, Glycine max
  misc_feature (52)..(52): Xaa can be any naturally occurring amino acid
  misc_feature (82)..(82): Xaa can be any naturally occurring amino acid
  misc_feature (115)..(116): Xaa can be any naturally occurring amino acid
  Coding DNA Sequence Number=SeqID_3929
RAIHRAQRTQALVCIRDNKIAGGGAGGRKRAPTRRPATYLAHNLCRATHNEXRAQHQPAHNRRATTRGHATPLPAPVLRVYXGGDSLPHNLLLYTRLPGVTTSETRAAAQPATSXXSHLYNLLTGVCVDNKHHNKS

SEQ ID NO: 7754 - protein, 89 aa, Glycine max
  misc_feature (3)..(5): Xaa can be any naturally occurring amino acid
  misc_feature (8)..(8): Xaa can be any naturally occurring amino acid
  misc_feature (10)..(10): Xaa can be any naturally occurring amino acid
  misc_feature (16)..(16): Xaa can be any naturally occurring amino acid
  misc_feature (22)..(22): Xaa can be any naturally occurring amino acid
  misc_feature (33)..(33): Xaa can be any naturally occurring amino acid
  misc_feature (42)..(42): Xaa can be any naturally occurring amino acid
  misc_feature (56)..(56): Xaa can be any naturally occurring amino acid
  misc_feature (62)..(62): Xaa can be any naturally occurring amino acid
  misc_feature (68)..(68): Xaa can be any naturally occurring amino acid
  Coding DNA Sequence Number=SeqID_3931
LNXXXATXTXSLGGRXYTIRAXIVNRYATSSTXERRRLYDEXMTTYVVGRTASVIXVQCVSXVRNTVXIHDTAHRHMSRRHAAAARAYK

SEQ ID NO: 7755 - protein, 202 aa, Glycine max
  misc_feature (24)..(24): Xaa can be any naturally occurring amino acid
  misc_feature (45)..(45): Xaa can be any naturally occurring amino acid
  misc_feature (69)..(69): Xaa can be any naturally occurring amino acid
  Coding DNA Sequence Number=SeqID_3933
  Gene Ontology: Mol. function=protein transporter activity; Cellular component=nuclear pore; Biological process=protein import into nucleus, docking
  Homolog annotation: Hit_ID=A7QF13; Match level="QueryCoverage=98%, HitCoverage=22%, E-value=6e-55, Identity=59%"; Hit description =Chromosome chr16 scaffold_86, whole genome shotgun sequence
  Pfam annotation: Domain name=IBN_N; Domain location=22-102; Score =1.7; E_value=0.073; Accession=PF03810.9; Description=Importin-beta N- terminal domain
SWLATNDLLDAQAEDGTLGERAAXSLLPVEEQKLPPDLHALAEEXEMTKKPAYTGKLTGLMLKNALDAXEHIRQLERGQRWLALDPTLKAQINAFLLRTLSSPSLDARTTASQDIATAAGVELPHTQWPELIGSLVTKAHQLPAPTRQATLETLGYICEDVYPHAVYQDHVHNILTADVQGMNSTEENNDVRLAAIKALYNA

SEQ ID NO: 7756 - protein, 73 aa, Glycine max
  Coding DNA Sequence Number=SeqID_3934
  Gene Ontology: Mol. function=electron carrier activity; Biological process=electron transport
  Homolog annotation: Hit_ID=Q2HT27; Match level="QueryCoverage=94%, HitCoverage=40%, E-value=2e-17, Identity=56%"; Hit description=Blue (Type 1) copper domain
MIFIVALVAICLGGKWVEAQVHHVVGADRGWDQTSDLVSWAAGRVFRVGDQIWLTYSVTQGLVAELKSKDEHR

SEQ ID NO: 7757 - protein, 86 aa, Glycine max
  misc_feature (1)..(1): Xaa can be any naturally occurring amino acid
  misc_feature (10)..(10): Xaa can be any naturally occurring amino acid
  misc_feature (60)..(60): Xaa can be any naturally occurring amino acid
  misc_feature (77)..(78): Xaa can be any naturally occurring amino acid
  Coding DNA Sequence Number=SeqID_3935
XRQQEEICGXCIRCYTFTLCTCGVSSIYARIAPSSSHYHNSRVSVFLVLSLIIAISIKSXELDSIRKLAPKQHCARXXRVRSRRGG

SEQ ID NO: 7758 - protein, 228 aa, Glycine max
  misc_feature (161)..(161): Xaa can be any naturally occurring amino acid
  misc_feature (163)..(163): Xaa can be any naturally occurring amino acid
  misc_feature (185)..(187): Xaa can be any naturally occurring amino acid
  misc_feature (190)..(190): Xaa can be any naturally occurring amino acid
  misc_feature (193)..(194): Xaa can be any naturally occurring amino acid
  misc_feature (209)..(210): Xaa can be any naturally occurring amino acid
  misc_feature (217)..(224): Xaa can be any naturally occurring amino acid
  misc_feature (227)..(228): Xaa can be any naturally occurring amino acid
  Coding DNA Sequence Number=SeqID_1191
TPVSIINWTTSRNVMYGRVRGRKGVRYDTRRPKVRVMERDESNEDYKIEIIKGFYLPPRRRSVLRSVLPGSAWGVGWVARGQALWAAGLLHPEAAISRRRSSLINSIIVYAFVRVYIRVRGFIRTYIHIQIWQFECSRPRLFVYLIISHALCHTAEKKVVXGXASGGALPLLSSDNGHNSAGKYXXXKDXIKXXKYNNISSQPLPPHKXXRERGEEXXXXXXXXGEXX

SEQ ID NO: 7759 - protein, 90 aa, Glycine max
  misc_feature (3)..(3): Xaa can be any naturally occurring amino acid
  misc_feature (19)..(19): Xaa can be any naturally occurring amino acid
  misc_feature (33)..(33): Xaa can be any naturally occurring amino acid
  misc_feature (38)..(38): Xaa can be any naturally occurring amino acid
  misc_feature (66)..(66): Xaa can be any naturally occurring amino acid
  misc_feature (69)..(69): Xaa can be any naturally occurring amino acid
  misc_feature (74)..(74): Xaa can be any naturally occurring amino acid
  misc_feature (77)..(77): Xaa can be any naturally occurring amino acid
  misc_feature (79)..(79): Xaa can be any naturally occurring amino acid
  misc_feature (81)..(81): Xaa can be any naturally occurring amino acid
  Coding DNA Sequence Number=SeqID_1193
MQXKSHAHRHLDPPNTLLXSRHTSGHYALLPIXATCDXMRAVNAKPSTAVKVTANFEFSSHHPPSXGLXGPYSXLTXTXTXRPDSIHMTL

SEQ ID NO: 7760 - protein, 234 aa, Glycine max
  misc_feature (139)..(139): Xaa can be any naturally occurring amino acid
  Coding DNA Sequence Number=SeqID_1195
  Homolog annotation: Hit_ID=A7PU20; Match level="QueryCoverage=94%, HitCoverage=47%, E-value=1e-44, Identity=40%"; Hit description =Chromosome chr7 scaffold_31, whole genome shotgun sequence
  Subcellular localization annotation: CTP_CleavageSite=89; ConfidenceScore=5.33e-01
MDRLVKADTKEVEMIFLKGQKCSSSFKLTNLMHTMSVAVSLTTTNSSLFSINKPFSTIPPLSTASYKLQLSQPSDQPPLSDPPDAITVRATMLPTGKATVADLRHLFSKPGPHVSRDGALVAMECGSADVVADLLRDGXSLMPLAIRVGSLQAVKLLEASGCKIDESVLHEAAAMDRIDTMKFQLERYGNDGEELEVDAVYSEGRTAIHVASREAHVRVIKSDGRKTLFLEPCG

SEQ ID NO: 7761 - protein, 178 aa, Glycine max
  Coding DNA Sequence Number=SeqID_1196
  Gene Ontology: Mol. function=catalytic activity; Cellular component =chloroplast; Biological process=cellular metabolic process
  Homolog annotation: Hit_ID=O80934; Match level="QueryCoverage=93%, HitCoverage=49%, E-value=7e-56, Identity=71%"; Hit description =Uncharacterized protein At2g37660, chloroplast precursor
  Subcellular localization annotation: CTP_CleavageSite=75; ConfidenceScore=5.96e-01
LQLMAMSTTTLFHALVPSNTYKSRAVSSSFVSVPRSSTPPSSPSLQFRSLVSDTTSIYGRRKFTGNLRRVSLTVSAAAAAEPLTVLVTGAGGRTGQIVYKKLKERSDQFVARGLVRTKESKEKIGGEDEVFVGDIRDPESIAPAVQGIDALVILTSAVPKMKPGFDSYQRKKDLKSYL

SEQ ID NO: 7762 - protein, 117 aa, Glycine max
  misc_feature (13)..(13): Xaa can be any naturally occurring amino acid
  misc_feature (15)..(15): Xaa can be any naturally occurring amino acid
  misc_feature (32)..(32): Xaa can be any naturally occurring amino acid
  misc_feature (35)..(35): Xaa can be any naturally occurring amino acid
  misc_feature (40)..(40): Xaa can be any naturally occurring amino acid
  misc_feature (113)..(113): Xaa can be any naturally occurring amino acid
  Coding DNA Sequence Number=SeqID_1197
  Gene Ontology: Biological process=electron transport
  Homolog annotation: Hit_ID=Q0UFB8; Match level="QueryCoverage=100%, HitCoverage=12%, E-value=1e-27, Identity=53%"; Hit description =Putative uncharacterized protein
  Pfam annotation: Domain name=DUF1620; Domain location=1-115; Score= -51.4; E_value=4.4e-10; Accession=PF07774.3; Description=Protein of unknown function (DUF1620)
PRRPVGRDPTAQXAXEGLVKYTPVINFDPKWXLTXKYEVXGIENIITSESGIESTSLVFAYGLDIFGTRVAPSFAFDILGKGFNKISMLLTVVGLFVGVLFVAPLVKRKQINXMWTM

SEQ ID NO: 7763 - protein, 265 aa, Glycine max
  Coding DNA Sequence Number=SeqID_1198
  Homolog annotation: Hit_ID=Q872N6; Match level="QueryCoverage=97%, HitCoverage=37%, E-value=6e-90, Identity=59%"; Hit description =Putative uncharacterized protein B19A17.160
APPPFTTDTVAAVVNNFAGRQQMVWFGSWATEWSPTSNFLQHAYIHWMTRGLFLGARKTYLSTQVDDVHLTTTMYSPPDKNFRLRPGDLAEHITWMKNINGRMPAGSNYFVELGHNGNGDIIEATADESQTVCSPADAIYYDYPPDTPQEFQKPLGSGVNNWPVTPASYSWSLACAKRDTLASWFMTAANRDAFAHVSHTFTHLPQNNITYSDANKEIVFNQAWLKQVGIASGNKWSPKGLIPPAITGLHNGDAIRAWITNGIVH

SEQ ID NO: 7764 - protein, 135 aa, Glycine max; identical to SEQ ID NO: 6505
  misc_feature (6)..(6): Xaa can be any naturally occurring amino acid
  misc_feature (20)..(20): Xaa can be any naturally occurring amino acid
  misc_feature (37)..(37): Xaa can be any naturally occurring amino acid
  misc_feature (104)..(104): Xaa can be any naturally occurring amino acid
  Coding DNA Sequence Number=SeqID_1199

SEQ ID NO: 7765 - protein, 108 aa, Glycine max
  misc_feature (8)..(8): Xaa can be any naturally occurring amino acid
  Coding DNA Sequence Number=SeqID_1201
  Gene Ontology: Mol. function=single-stranded DNA binding
  Homolog annotation: Hit_ID=A7QXV4; Match level="QueryCoverage=97%, HitCoverage=53%, E-value=3e-18, Identity=45%"; Hit description =Chromosome chr2 scaffold_233, whole genome shotgun sequence
  Subcellular localization annotation: CTP_CleavageSite=24; ConfidenceScore=5.13e-01
MANSMATXSRRLYRSLLSNPRFSQASMPFSTNNNISDLSDTESPLETKASDPNHQEERVMEERPLENGLDFGIFKAILVGQVGQLPLQKKLKNGRTITLFSVGTGGIR

SEQ ID NO: 7766 - protein, 142 aa, Glycine max
  Coding DNA Sequence Number=SeqID_1498
ILALLCTVRSATHYLLTPYIPTREILRTSFAHMRRMRIISIVLSRSLSAPVCGTSKRLARTDVSVVLSRTQSYIYFEMKGIPRLISPNTTTRKSEEGRRRERVLQIYVFRRRRCEYVLVYLSHHDRASIWRDTVCGVYVSRA

SEQ ID NO: 7767 - protein, 156 aa, Glycine max
  Coding DNA Sequence Number=SeqID_1500
  Gene Ontology: Mol. function=hydrolase activity, acting on acid anhydrides, catalyzing transmembrane movement of substances; Cellular component=integral to membrane; Biological process =metabolic process
  Homolog annotation: Hit_ID=A7QR39; Match level="QueryCoverage=100%, HitCoverage=11%, E-value=7e-44, Identity=63%"; Hit description =Chromosome undetermined scaffold_147, whole genome shotgun sequence
GAFFVNASPPTKRGHPFLDQSTEDGTKSGRQNKSKPAGEGASEAKDASKSESTSHSCANRHQAAVETQRQTLKKTMDELNEEGDGRAPIVKLGEASMACPFTAKHASVAPTTDIIRHGRSTLVTTLQMLKILGLNCLATAYVLRVMYLDGVKLGDI

SEQ ID NO: 7768 - protein, 157 aa, Glycine max; identical to SEQ ID NO: 6704
  misc_feature (35)..(35): Xaa can be any naturally occurring amino acid
  misc_feature (37)..(37): Xaa can be any naturally occurring amino acid
  misc_feature (55)..(56): Xaa can be any naturally occurring amino acid
  misc_feature (58)..(58): Xaa can be any naturally occurring amino acid
  misc_feature (61)..(62): Xaa can be any naturally occurring amino acid
  Coding DNA Sequence Number=SeqID_1501
  Subcellular localization annotation: CTP_CleavageSite=85; ConfidenceScore=5.60e-01

SEQ ID NO: 7769 - protein, 140 aa, Glycine max
  misc_feature (113)..(113): Xaa can be any naturally occurring amino acid
  misc_feature (126)..(126): Xaa can be any naturally occurring amino acid
  Coding DNA Sequence Number=SeqID_1503
  Gene Ontology: Mol. function=signal peptidase activity; Cellular component=signal peptidase complex; Biological process=signal peptide processing
  Homolog annotation: Hit_ID=P58684; Match level="QueryCoverage=100%, HitCoverage=72%, E-value=3e-64, Identity=91%"; Hit description =Probable signal peptidase complex subunit 2
  Pfam annotation: Domain name=SPC25; Domain location=10-140; Score =169.6; E_value=8.3e-48; Accession=PF06703.2; Description=Microsomal signal peptidase 25 kDa subunit (
MEEKKAESTNKNVKKANLLEHNSIKHILDESVSDIVKSRGYKEDVRLSNLKLILGTVIIVVALVAQFYNKKFPENRDFLIGCIASYVVLNGVLQLILYTKEKNAILFTNPPEXSFTSTGLVMSSKXLPRFSDEYTLTIDS

SEQ ID NO: 7770 - protein, 135 aa, Glycine max
  misc_feature (3)..(3): Xaa can be any naturally occurring amino acid
  misc_feature (14)..(14): Xaa can be any naturally occurring amino acid
  misc_feature (88)..(88): Xaa can be any naturally occurring amino acid
  misc_feature (101)..(101): Xaa can be any naturally occurring amino acid
  misc_feature (105)..(105): Xaa can be any naturally occurring amino acid
  misc_feature (120)..(120): Xaa can be any naturally occurring amino acid
  misc_feature (122)..(122): Xaa can be any naturally occurring amino acid
  Coding DNA Sequence Number=SeqID_1504
LSXSLCLTIIRTRXISRPLYILYTHVHNGMRAPQRMRACLYRRLLIYIYKYIRAHRESDISRRIYRHTSAICLRTHAAAASYIICRRXSRIILLYLYYITXDVDXHYVLSRVQLYIRRDXSXHHQRNRRASMNHQ

SEQ ID NO: 7771 - protein, 545 aa, Glycine max
  Coding DNA Sequence Number=SeqID_1506
  Gene Ontology: Mol. function=metal ion binding; Cellular component =extrinsic to vacuolar membrane; Biological process=intracellular protein transport
  Homolog annotation: Hit_ID=A7QXE5; Match level="QueryCoverage=88%, HitCoverage=96%, E-value=1e-116, Identity=73%"; Hit description =Chromosome undetermined scaffold_221, whole genome shotgun sequence
  Pfam annotation: Domain name=PA; Domain location=89-190; Score=82.3; E_value=1.6e-21; Accession=PF02225.12; Description=PA domain
  Pfam annotation: Domain name=zf-C3HC4; Domain location=283-324; Score= 31.8; E_value=2.4e-06; Accession=PF00097.15; Description=Zinc finger, C3HC4 type (RING finger)
  Pfam module annotation: Pfam domain module=PA::zf-C3HC4; Domain location=89-190::283-324
  Subcellular localization annotation: CTP_CleavageSite=61; ConfidenceScore=5.52e-01
MEADVSIIFVAFQNPPPPQIPISPSVFLLWMFFNQKIVLFKSFALMGTSNLLLFFSLMSLCAMAASKVVLIGNNITLSFDDIEANFAPAVKGSGKYGVLYLAEPLDACAELTNKVEQLPNASSPFALVVRGGCSFEEKVRIAQKAGFKAVIVYDNEEGGILVAMAGNSAGIRIHAVFVSKASGEILKKYAGLTNVEIWLIPTFENSAWSIMAISFISLLAMSAVLATCFFVRKHRIRRERPRASLVREFHGMSSRLVKAMPSLVFTSVLEDNCTSRTCTSRTCAICLEDYCVGEKLRILPCCHKFHAACVDSWLTSWRTFCPVCKRDARTGLTDPPPSESTPLLSSTPASMASSVLSSARSSLASSSAIQIARTASMASSALPSARSSLASSSAIQIARTASMASSALHSARSSLASSSAIQISRAASQTPSVSRNHSIASTPYVQPSLRSSYHQSPSLSISRSSVDLRNASQRSLASHLNSPCSMGYPSLSSLNSRYMSPHIPSPSNASVSYMGSSSHQQHPLRYSESAASFSPFASTHSLPEC

SEQ ID NO: 7772 - protein, 212 aa, Glycine max
  Coding DNA Sequence Number=SeqID_1507
  Gene Ontology: Mol. function=nucleotide binding; Cellular component =plasma membrane; Biological process=small GTPase mediated signal transduction
  Homolog annotation: Hit_ID=Q0U2V6; Match level="QueryCoverage=100%, HitCoverage=100%, E-value=1e-101, Identity=88%"; Hit description =Putative uncharacterized protein
  Pfam annotation: Domain name=GTP_EFTU; Domain location=6-171; Score= -66.0; E_value=0.0031; Accession=PF00009.17; Description=Elongation factor Tu GTP binding domain
  Pfam annotation: Domain name=MMR_HSR1; Domain location=9-124; Score= -20.3; E_value=0.077; Accession=PF01926.13; Description=GTPase of unknown function
  Pfam annotation: Domain name=Miro; Domain location=10-124; Score =66.0; E_value=1.3e-16; Accession=PF08477.3; Description=Miro-like protein
  Pfam annotation: Domain name=Ras; Domain location=10-171; Score =341.3; E_value=1.7e-99; Accession=PF00071.12; Description=Ras family
  Pfam module annotation: Pfam domain module=GTP_EFTU::MMR _HSR1::Miro::Ras; Domain location=6-171::9-124::10-124::10-171
MASKFLREYKLVVVGGGGVGKSCLTIQLIQSHFVDEYDPTIEDSYRKQCVIDNEVALLDVLDTAGQEEYSAMREQYMRTGEGFLLVYSITDRQSFEEIMTFQQQILRVKDKDYFPMIVVGNKCDLDGERQVSTQEGQTLARNFGCKFIETSAKSRINVDNAFYDIVREIRRYNKEMSSYTGAPGSNGNGPQKTTFDTDDQAEKKGCCGCVVM

SEQ ID NO: 7773 - protein, 78 aa, Glycine max
  Coding DNA Sequence Number=SeqID_1508
  Gene Ontology: Mol. function=small conjugating protein ligase activity; Cellular component=proteasome complex; Biological process =regulation of protein metabolic process
  Homolog annotation: Hit_ID=Q5YJR0; Match level="QueryCoverage=62%, HitCoverage=35%, E-value=7e-14, Identity=77%"; Hit description =Ubiquitin carrier protein
SVCKTAVSNKTSFVCEIGSRAFSIVNHKVALRSKVFHPNINSNGSICLDILKEQWSPALTISKLKLNITKLVVPFNVP

SEQ ID NO: 7774 - protein, 108 aa, Glycine max
  misc_feature (76)..(76): Xaa can be any naturally occurring amino acid
  misc_feature (80)..(80): Xaa can be any naturally occurring amino acid
  misc_feature (98)..(98): Xaa can be any naturally occurring amino acid
  misc_feature (106)..(106): Xaa can be any naturally occurring amino acid
  Coding DNA Sequence Number=SeqID_3937
RPYATNLSLCTVPIGTEPLQKVVCTAPRTTRHGNLEAHAEIFATSYIAIRYRDLFSLWVCDSVTFPLFDRRGCFRXVCVXNTPYDRSHPSPNVSYAFXAPIIYHLXDR

SEQ ID NO: 7775 - protein, 230 aa, Glycine max
  misc_feature (18)..(18): Xaa can be any naturally occurring amino acid
  misc_feature (22)..(22): Xaa can be any naturally occurring amino acid
  misc_feature (27)..(27): Xaa can be any naturally occurring amino acid
  misc_feature (38)..(38): Xaa can be any naturally occurring amino acid
  misc_feature (107)..(107): Xaa can be any naturally occurring amino acid
  misc_feature (128)..(128): Xaa can be any naturally occurring amino acid
  misc_feature (146)..(146): Xaa can be any naturally occurring amino acid
  misc_feature (156)..(156): Xaa can be any naturally occurring amino acid
  misc_feature (171)..(171): Xaa can be any naturally occurring amino acid
  misc_feature (178)..(178): Xaa can be any naturally occurring amino acid
  misc_feature (182)..(183): Xaa can be any naturally occurring amino acid
  Coding DNA Sequence Number=SeqID_3939
  Subcellular localization annotation: CTP_CleavageSite=42; ConfidenceScore=5.33e-01
PSSVSPRMTFATSARVRXHSRXRLLVXLCTSQISHLAXSHTRARDARRIIVTRVSQSFPRLLSIAAHTCTSDSPLACVCGAHSPRVAHRSTTPSPPRVYRARISLHXDLRRTCCASPSMRAYRRRNVXVHTRHTDAHADTPHEHAXAAPRTESRTXALPRAMCVVRSDSVXRRLIVPXLPPXXRTHHIASVDSLLRPTVRVYGCDCRQDVAHRSIGEGRSVAPSRYRVRE

SEQ ID NO: 7776 - protein, 95 aa, Glycine max
  Coding DNA Sequence Number=SeqID_3941
  Gene Ontology: Cellular component=nucleus; Biological process =multicellular organismal development
  Homolog annotation: Hit_ID=A7P2B0; Match level="QueryCoverage=70%, HitCoverage=16%, E-value=5e-10, Identity=45%"; Hit description =Chromosome chr19 scaffold_4, whole genome shotgun sequence
MTQAQLDFVIIFIFGFSNFPQNLIQLEVAPFIFLDLEASLKREVDSAAVAWRKRIFVEGGLLKAAEVDARGLILFIAIFGIPTVFKAAREQIVPG

SEQ ID NO: 7777 - protein, 142 aa, Glycine max
  misc_feature (141)..(142): Xaa can be any naturally occurring amino acid
  Coding DNA Sequence Number=SeqID_3942
  Gene Ontology: Mol. function=nucleic acid binding; Cellular component= ribonucleoprotein complex; Biological process=mRNA processing
  Homolog annotation: Hit_ID=Q43349; Match level="QueryCoverage=82%, HitCoverage=35%, E-value=6e-29, Identity=63%"; Hit description=29 kDa ribonucleoprotein, chloroplast precursor
  Subcellular localization annotation: CTP_CleavageSite=50; ConfidenceScore=5.86e-01
SEPCLPLLPPFSFSSFNPKSLPLCISRSASVLPPSLSFKLYSIFASSAVKCSSSPAQHPSRFARNVAVSSDFEVEEDDVFTDDDSPPPQQERSSSFSADLKLFVGNLSFDVDSAQLAQLFESAGTVEMVEVIYDKVTGRSXX

SEQ ID NO: 7778 - protein, 177 aa, Glycine max
  Coding DNA Sequence Number=SeqID_3943
  Gene Ontology: Mol. function=receptor activity; Cellular component =integral to membrane; Biological process=multicellular organismal development
  Homolog annotation: Hit_ID=Q3UH76; Match level="QueryCoverage=98%, HitCoverage=9%, E-value=1e-39, Identity=45%"; Hit description=14 days pregnant adult female placenta cDNA, RIKEN full-length enriched library, clone:...
  Homolog annotation: Hit description=M5C1068G03 product:plexin B2, full insert sequence
  Pfam annotation: Domain name=PSI; Domain location=119-160; Score =26.8; E_value=8.1e-05; Accession=PF01437.15; Description=Plexin repeat
SGDVNNHRCEDSSLSDDVIGPNMEENCPQFYEPYPSLIPMKHKSTITFNGKNLDHYKDEVFSAGNDELNFKTKVFKEDRSFSVSIPEFPAEDKETVPLGIYIKVNEKKIDSKLNVNLYNCMYGRSDCSLCLAAVSEYHCVWCNDKCVYTDMCVEQSAECPAPEITDLVPKAAPLKGG

SEQ ID NO: 7779 - protein, 130 aa, Glycine max
  misc_feature (47)..(47): Xaa can be any naturally occurring amino acid
  misc_feature (54)..(54): Xaa can be any naturally occurring amino acid
  misc_feature (82)..(82): Xaa can be any naturally occurring amino acid
  misc_feature (96)..(96): Xaa can be any naturally occurring amino acid
  misc_feature (104)..(104): Xaa can be any naturally occurring amino acid
  misc_feature (113)..(113): Xaa can be any naturally occurring amino acid
  Coding DNA Sequence Number=SeqID_3944
  Gene Ontology: Mol. function=DNA-directed RNA polymerase activity; Cellular component=chloroplast; Biological process=transcription, DNA-dependent
  Homolog annotation: Hit_ID=Q8HVY3; Match level="QueryCoverage=97%, HitCoverage=9%, E-value=6e-31, Identity=57%"; Hit description=DNA -directed RNA polymerase subunit beta''
ACTLDEVVKRTVVRLRDCGSIPGSSENTHMGMMPYRMWKPSLIERVXADDVYRXLRLTADRNQYIGIGLMSIFKSHYTLPIXCRSPLTWKNTSREXSLSHGQSXTHGHSAELXESAGVIAVPSIGEPGTQ

SEQ ID NO: 7780 - protein, 180 aa, Glycine max
  Coding DNA Sequence Number=SeqID_3945
  Subcellular localization annotation: CTP_CleavageSite=42; ConfidenceScore=5.20e-01
KRGTPRMERNIARKKSAPHPPLLPFFFPFRGTNSRGAPLSPRAHTPGAPKKYFPRGGGGESLQQPFLLISPTPHPIVFSYFAPPRFPSHSLLAPPPRLFLPTPLFSPTPPFCTPRPSCTPTPPFPPPHPISHKPYPEGDATPIFLPSYLRDHALSPHLFSPPLFIITPSSHLIPPFPRDP

SEQ ID NO: 7781 - protein, 70 aa, Glycine max
  Coding DNA Sequence Number=SeqID_3947
  Gene Ontology: Mol. function=metal ion binding; Biological process =response to stress
  Homolog annotation: Hit_ID=Q9SJM6; Match level="QueryCoverage=71%, HitCoverage=31%, E-value=2e-22, Identity=92%"; Hit description=Zinc finger A20 and AN1 domain-containing stress-associated protein 4
  Pfam annotation: Domain name=zf-A20; Domain location=13-37; Score =22.4; E_value=0.0016; Accession=PF01754.7; Description=A20-like zinc finger
MAEEHRCQTPEGHRLCANNCGFLGSSATMNLCSNCYGDLCLKQQQQASIKTTVESSLSSVSPPSTEVASV

SEQ ID NO: 7782 - protein, 81 aa, Glycine max
  misc_feature (21)..(21): Xaa can be any naturally occurring amino acid
  misc_feature (23)..(23): Xaa can be any naturally occurring amino acid
  misc_feature (44)..(46): Xaa can be any naturally occurring amino acid
  Coding DNA Sequence Number=SeqID_3948
  Gene Ontology: Mol. function=ATPase activity, coupled to transmembrane movement of substances; Cellular component=integral to membrane; Biological process=transport
  Homolog annotation: Hit_ID=A7P6T6; Match level="QueryCoverage=61%, HitCoverage=3%, E-value=2e-13, Identity=76%"; Hit description =Chromosome chr9 scaffold_7, whole genome shotgun sequence
MAIVQQVVRRECAECAVVAVXRXVAAVIDSDMVMVLSYGKLVEXXXPSELMEANSWFCRLVAEYWSSCRKNSSPNINRQQH

SEQ ID NO: 7783 - protein, 170 aa, Glycine max
  Coding DNA Sequence Number=SeqID_3949
  Gene Ontology: Mol. function=nucleotide binding; Cellular component =Golgi apparatus
  Homolog annotation: Hit_ID=A7PAF3; Match level="QueryCoverage=97%, HitCoverage=33%, E-value=9e-73, Identity=78%"; Hit description =Chromosome chr14 scaffold_9, whole genome shotgun sequence
  Pfam annotation: Domain name=DUF246; Domain location=2-170; Score =66.6; E_value=1.7e-18; Accession=PF03138.5; Description=Plant protein family
FVICAAIARHLNVTLIVPELDKASFWADSSDFKDIFDVDHFITSLRDEVRIIKILPPKIKKRVELGLLYSMPPISWSNISYYENQVLPLLLKHKVIHLNRTDARLANNGLPAEIQKLRCRVNFNALRFTTQIEELGRRIVKVLREKGPFLALHLRYEMDMLAFSGCTHDC

SEQ ID NO: 7784 - protein, 122 aa, Glycine max
  misc_feature (34)..(34): Xaa can be any naturally occurring amino acid
  misc_feature (49)..(49): Xaa can be any naturally occurring amino acid
  misc_feature (86)..(86): Xaa can be any naturally occurring amino acid
  misc_feature (89)..(89): Xaa can be any naturally occurring amino acid
  misc_feature (120)..(120): Xaa can be any naturally occurring amino acid
  Coding DNA Sequence Number=SeqID_3950
RTDVQTTRCTTHNYPTLIALLMSSLLSSASLMIXRHLHTTTSCDASILXISSYQIIHHILSILTTVYTSSLYSARLSSHISSLIAXSVXTFDMSIIDSILLIITLHIHRYSMLPTRTDDXMK

SEQ ID NO: 7785 - protein, 197 aa, Glycine max
  Coding DNA Sequence Number=SeqID_3952
  Subcellular localization annotation: CTP_CleavageSite=52; ConfidenceScore=5.76e-01
VDRQWSPPRLSSCSPFSSRRPSSSPPRPPSKLMTRRGRWPPTVPASRTAGVAAGAGGGVPGAAWAAATGPCGPVGAACRRWVPTANWHPNGCRGPPKQRSPVGPWGTPTWKGEPNLNLRLGKRWAKNGAWGLKQKGGDPHWNQNFGKRLNISLPHGVPGNKKKKNPPPGVKESQGGEPQMKCGASRILNTPIRNYSK

SEQ ID NO: 7786 - protein, 241 aa, Glycine max
  misc_feature (2)..(2): Xaa can be any naturally occurring amino acid
  misc_feature (8)..(8): Xaa can be any naturally occurring amino acid
  misc_feature (29)..(29): Xaa can be any naturally occurring amino acid
  misc_feature (43)..(44): Xaa can be any naturally occurring amino acid
  misc_feature (64)..(64): Xaa can be any naturally occurring amino acid
  misc_feature (87)..(87): Xaa can be any naturally occurring amino acid
  misc_feature (136)..(136): Xaa can be any naturally occurring amino acid
  Coding DNA Sequence Number=SeqID_3954
HXHITHPXQSQSMGRSIYSPPCFSLELCXALIQLRLALLLLLXXRLLSLSPLSTSGSLTLTSHXYSTPSSLTPTHSSPPPTNSLSSXTPTPSPYHPAHTASSHGWRATLTHAIILLISSGTYHTDADGQLERTKHXTAHHSPPGHPLYHSSLTHSALNKPLLVTTPTIPDTCRYSDHHIASTTAPQHTINYYTLNIISTSIIHCTDIHQPQQNHHHTLHHSILTIPQRGSRIELQILTTLK

SEQ ID NO: 7787 - protein, 139 aa, Glycine max
  Coding DNA Sequence Number=SeqID_3956
  Gene Ontology: Mol. function=structural constituent of ribosome; Cellular component=ribonucleoprotein complex; Biological process =translation
  Homolog annotation: Hit_ID=A8MRX2; Match level="QueryCoverage=92%, HitCoverage=88%, E-value=6e-61, Identity=90%"; Hit description =Uncharacterized protein At5g18380.2
  Pfam annotation: Domain name=Ribosomal_S9; Domain location=14-130; Score=204.2; E_value=3.1e-58; Accession=PF00380.9; Description =Ribosomal protein S9S16
MATKQAKASVQCFGRKKTAVAVTHCKPGCGLIKLNGSPIELFNPEILRFKIFEPVLLLGKHRFAGVDMRIRVNGGGHTSQVYAIRQSIAKALVAFYQKYVDEQSKKEVKDILIRYDRTLLVADPRRCEAEEVWVGVVLV

SEQ ID NO: 7788 - protein, 216 aa, Glycine max
  misc_feature (119)..(120): Xaa can be any naturally occurring amino acid
  misc_feature (123)..(123): Xaa can be any naturally occurring amino acid
  misc_feature (125)..(126): Xaa can be any naturally occurring amino acid
  misc_feature (132)..(132): Xaa can be any naturally occurring amino acid
  Coding DNA Sequence Number=SeqID_3957
  Homolog annotation: Hit_ID=A6SBY2; Match level="QueryCoverage=93%, HitCoverage=67%, E-value=2e-49, Identity=48%"; Hit description =Putative uncharacterized protein
MDSAKAAVKDFMAKSGHHDTTVHEKVAPAVKHETIERQKHEEYVSAIDKEVHQDHYHTTEQPILDKEVLPTQHHTNIIPVEHRSYEHDNNDEVEARLAKERASYVDTTERIEGATTREXXPVXAXXHKHHHXHETIQPVIQKETIEPHVTHTTVPIHEVHHNAAQHHAASALPAVSMAEFKAQGGSLTGREERQDGFIGEPKSAAHKTAHEHTLTH

SEQ ID NO: 7789 - protein, 128 aa, Glycine max
  misc_feature (38)..(38): Xaa can be any naturally occurring amino acid
  misc_feature (64)..(64): Xaa can be any naturally occurring amino acid
  misc_feature (91)..(91): Xaa can be any naturally occurring amino acid
  misc_feature (93)..(93): Xaa can be any naturally occurring amino acid
  misc_feature (115)..(115): Xaa can be any naturally occurring amino acid
  Coding DNA Sequence Number=SeqID_3958
  Subcellular localization annotation: CTP_CleavageSite=30; ConfidenceScore=5.10e-01
LSVVLVRDNYYTGHSHYIYTTLSTSHTRAVCAERTCAXVCVSIRRSACVCVTLNSLLLCATRLXYTCSGDGRYVYDGATHTPPPTHPPHSXWXLSPVLLLVVYILIGSSDILLLXWLLSLAVQYSMLA

SEQ ID NO: 7790 - protein, 161 aa, Glycine max
  Coding DNA Sequence Number=SeqID_3960
  Subcellular localization annotation: CTP_CleavageSite=46; ConfidenceScore=5.46e-01
SSQLRSAPPPPRMHRDSLMLSPLFSSNTHNGGFFSGFTPRYFSNVPHMQDGNKTFGPDDFLLRPSPTHMDIDVNARFEKAVENMKMELRNNPTQHLGDHGLDQSGLNLDIDLIDDSYLHAPMTKSPHLQFVGSQPTSKCSFKKFGEWTLSPNASFLPRKKF

SEQ ID NO: 7791 - protein, 168 aa, Glycine max
  misc_feature (112)..(112): Xaa can be any naturally occurring amino acid
  misc_feature (137)..(137): Xaa can be any naturally occurring amino acid
  Coding DNA Sequence Number=SeqID_3961
  Gene Ontology: Mol. function=nutrient reservoir activity; Cellular component=cell outer membrane; Biological process=defense response
  Homolog annotation: Hit_ID=P04405; Match level="QueryCoverage=98%, HitCoverage=34%, E-value=1e-59, Identity=74%"; Hit description =Glycinin G2 precursor [Contains: Glycinin A2 subunit; Glycinin B1a subunit]
  Pfam annotation: Domain name=Cupin_1; Domain location=6-154; Score =63.4; E_value=7.4e-16; Accession=PF00190.13; Description=Cupin
MFWRSLIVQNPSSDIYNPQAGRITTCTSLDFPALWLLKLSAHYGSLRTSAMFVPHYTLNANSIIYALNGRTLLQAVNRTGERVTDGELQEAGVLIVPQNCAVAAKYQSDHCXHVIYKINDGPSIGNLSRANSSVNAXSYEVIQHTFILESQQATLVNINIPCSFLVPP

SEQ ID NO: 7792 - protein, 101 aa, Glycine max
  misc_feature (83)..(83): Xaa can be any naturally occurring amino acid
  Coding DNA Sequence Number=SeqID_3962
  Homolog annotation: Hit_ID=Q70AJ3; Match level="QueryCoverage=91%, HitCoverage=56%, E-value=4e-19, Identity=64%"; Hit description =Putative cyclin
YSGVAVPAGKLKAATAGVGCPGAVGNMHVLGDIGNVVHATARSSTDPATGPAWINRPIIRRFSAQLLKKAQADPSKNGVELIXIPPAARATLKPHSLLLAG

SEQ ID NO: 7793 - protein, 497 aa, Glycine max
  Coding DNA Sequence Number=SeqID_3963
  Gene Ontology: Mol. function=microtubule binding; Cellular component =Golgi apparatus; Biological process=multicellular organismal development
  Homolog annotation: Hit_ID=Q171W5; Match level="QueryCoverage=97%, HitCoverage=51%, E-value=8e-83, Identity=29%"; Hit description=Lava lamp protein
QLRRPPPPKKLENQKQSFDQEHARLSKELSNNADTIAELRKEIARLMGENEKLLKNQAVAIQPESTSNRDDEIQKLEKIVNELREEKANMEAELQVLNDQVIKNLEIEDRIKSTVFELDTKNIEIAELKNSLQQIKENQNVPPAAIDPTTQQQIAELTAKLLEKDALHQSNIDLLNAQWQQVVDQKCAEVADSWRHHLQLKEEEFAAVESDLREKMLQLEQQSNTSSTTPETQNTPTSGDSRSNIQESPELKSDIANADQSELVKTMQSALEQQELEIVSLKEQLAIRSAEYARIAASVDPYAMKSTSSNSFQSVSQTEETPSKGNELDLALYMLHQRDMRCEELTEEVIHLLEERDTLQLKLSNSIRQIEEFKQRTGADATDASEAGSSSPVKSNPASSDAQSSHDGSFNEQSQNLDLKLSELHKVSHSRDKTLKEERDQRRRQMNVFQKDVANMPPEAIAELFGPDFKPNTRNTQNASSMLMDWLWGRSDNEPHN

SEQ ID NO: 7794 - protein, 124 aa, Glycine max
  misc_feature (56)..(56): Xaa can be any naturally occurring amino acid
  misc_feature (66)..(66): Xaa can be any naturally occurring amino acid
  misc_feature (78)..(78): Xaa can be any naturally occurring amino acid
  misc_feature (83)..(83): Xaa can be any naturally occurring amino acid
  misc_feature (100)..(100): Xaa can be any naturally occurring amino acid
  Coding DNA Sequence Number=SeqID_3964
NNAYRTRCRLRDDRPSTVHNSITASLQHRQLTEQQTRRDQKAVSGARVHALSVRYXPHSTPRQLVXTSQRSLSCPHDXLRRRXGVTARAATTCTTPNDCXVSHSAASTRALTREPTLAHSSCSS

SEQ ID NO: 7795 - protein, 135 aa, Glycine max
  misc_feature (3)..(3): Xaa can be any naturally occurring amino acid
  misc_feature (5)..(5): Xaa can be any naturally occurring amino acid
  misc_feature (22)..(22): Xaa can be any naturally occurring amino acid
  misc_feature (25)..(26): Xaa can be any naturally occurring amino acid
  misc_feature (38)..(38): Xaa can be any naturally occurring amino acid
  misc_feature (51)..(52): Xaa can be any naturally occurring amino acid
  misc_feature (60)..(60): Xaa can be any naturally occurring amino acid
  misc_feature (63)..(63): Xaa can be any naturally occurring amino acid
  misc_feature (66)..(66): Xaa can be any naturally occurring amino acid
  misc_feature (75)..(75): Xaa can be any naturally occurring amino acid
  misc_feature (96)..(97): Xaa can be any naturally occurring amino acid
  misc_feature (111)..(111): Xaa can be any naturally occurring amino acid
  misc_feature (120)..(120): Xaa can be any naturally occurring amino acid
  Coding DNA Sequence Number=SeqID_3966
YFXSXLYTYYISISRVHRDAVXYTXXAAVIWYLTQRQXSVDAMTRSSRHNXXDSARRNMXERXHAXTTHTHQRPXTEGGGLRPAVCCDQTEFAGWXXCGHCAQYEVVLSLXNILQKQISXSARLHLSFIQTTRWI

SEQ ID NO: 7796 - protein, 71 aa, Glycine max
  Coding DNA Sequence Number=SeqID_3968
WLKDLRKPWIFNRINIQSKRVDGRIKTQIFCDALQYYMKQNFKLSMVDQNQIYFGWWRIIPFKTGKRNMNR

SEQ ID NO: 7797 - protein, 205 aa, Glycine max
  misc_feature (2)..(2): Xaa can be any naturally occurring amino acid
  misc_feature (4)..(4): Xaa can be any naturally occurring amino acid
  misc_feature (6)..(6): Xaa can be any naturally occurring amino acid
  misc_feature (13)..(13): Xaa can be any naturally occurring amino acid
  misc_feature (17)..(17): Xaa can be any naturally occurring amino acid
  misc_feature (21)..(21): Xaa can be any naturally occurring amino acid
  misc_feature (28)..(28): Xaa can be any naturally occurring amino acid
  misc_feature (34)..(34): Xaa can be any naturally occurring amino acid
  misc_feature (42)..(42): Xaa can be any naturally occurring amino acid
  misc_feature (45)..(45): Xaa can be any naturally occurring amino acid
  misc_feature (52)..(52): Xaa can be any naturally occurring amino acid
  misc_feature (54)..(54): Xaa can be any naturally occurring amino acid
  misc_feature (60)..(60): Xaa can be any naturally occurring amino acid
  misc_feature (65)..(66): Xaa can be any naturally occurring amino acid
  misc_feature (68)..(68): Xaa can be any naturally occurring amino acid
  misc_feature (79)..(79): Xaa can be any naturally occurring amino acid
  misc_feature (86)..(86): Xaa can be any naturally occurring amino acid
  misc_feature (93)..(93): Xaa can be any naturally occurring amino acid
  misc_feature (112)..(112): Xaa can be any naturally occurring amino acid
  Coding DNA Sequence Number=SeqID_3970
KXGXRXGGEFSGXSSQXEEAXRPASRSXLRGTSXRKVEQSNXHPXGGKGAFXLXFFERSXGIRRXXLXTGTTLMRLSAXGGETSLXPLVPIQXSIRQITEVVLRSLELLGHXTLLRHAWGLAGLFRRMSVRFLTLFCPVFSPLLLILLLFRERRFGIIYDSCELSRIDQVLTARLVPRNHNRWHVFESRVREGYGGEGGEGGVWV

SEQ ID NO: 7798 - protein, 223 aa, Glycine max
  misc_feature (217)..(223): Xaa can be any naturally occurring amino acid
  Coding DNA Sequence Number=SeqID_3972
  Pfam annotation: Domain name=SPT2; Domain location=79-176; Score= -21.5; E_value=0.03; Accession=PF08243.2; Description=SPT2 chromatin protein
QLRRPPPPFKKFKINRTSKQYMRNYRDYAAELSYGEEKVLKRPASAHRGNAQQGFSNNEEGSGFGRSFGKGQRVGGGEKKLHLGKGKNYRDEEQEELSSLSGFTASDNEENDRDEIKWSLAPKNKKNVKYSESDEEEEENQWEHENRDIMLKPKDDLHERFREHDMMRRQGELEKKQREILAAAENLHNVQNSQTMPLKRPQTSNGAIRSSTNNMSXXXXXXX

SEQ ID NO: 7799 - protein, 82 aa, Glycine max
  Coding DNA Sequence Number=SeqID_3973
VYGIFDALFFQSQFSHKTDFSFHEIFAPVLICSKNTIIVSDERYCFRFSFYKKYNFINLVEKSKPDGIVIEMFQKFFLFLNK

SEQ ID NO: 7800 - protein, 84 aa, Glycine max
  Coding DNA Sequence Number=SeqID_3975
  Subcellular localization annotation: CTP_CleavageSite=44; ConfidenceScore=5.12e-01
SRSSILSLSSKAMNGIMGAHPNSTKVLNMLPAPDRKVWVAIQVRVSGIHSSEISKLAGLYFEGLSHRSELCTLRPEFDLFRLTT

SEQ ID NO: 7801 - protein, 127 aa, Glycine max
  misc_feature (56)..(56): Xaa can be any naturally occurring amino acid
  misc_feature (105)..(105): Xaa can be any naturally occurring amino acid
  Coding DNA Sequence Number=SeqID_3977
  Gene Ontology: Cellular component=integral to membrane
  Homolog annotation: Hit_ID=Q9ZUM2; Match level="QueryCoverage=62%, HitCoverage=30%, E-value=2e-23, Identity=57%"; Hit description =Expressed protein
  Pfam annotation: Domain name=DUF1084; Domain location=39-127; Score= -130.3; E_value=0.011; Accession=PF06454.2; Description=Protein of unknown function (DUF1084)
MLLLSFFISSTEEEEEDRTKAPSIIPFSDFMVARCMPAMVVVAIAALDLTESSNWXRDINSSPLWQDRIFHLLSILYRIVNVVTLVQLVRIQLRVPEYGWTTQKXWCLVFVFRRDVQKLQPKFFALF

SEQ ID NO: 7802 - protein, 213 aa, Glycine max
  misc_feature (205)..(205): Xaa can be any naturally occurring amino acid
  misc_feature (213)..(213): Xaa can be any naturally occurring amino acid
  Coding DNA Sequence Number=SeqID_3978
EQLRRPPPSKNNQYTAAIPALLLEIATTGRLKLSRLHVEGFSENIFNSISRLEKEKAAKEESLAHCNPDHDKAKISHLESELSKIEEKIAKARVSLDDIRGGIKRPCLNLIASSTPRELASIIDEKNIKSGLLGRSLVLDCGEEARERNFNIWGMNPADIGRLELAELEREICLIAQSADETAASDEQKEFSGRHGVTVKPTEAXDKMMFEIX

SEQ ID NO: 7803 - protein, 149 aa, Glycine max
  misc_feature (91)..(91): Xaa can be any naturally occurring amino acid
  misc_feature (132)..(132): Xaa can be any naturally occurring amino acid
  misc_feature (141)..(141): Xaa can be any naturally occurring amino acid
  Coding DNA Sequence Number=SeqID_3980
TDPWVHYGRGLSFATTRYPSNADITARVLCSGICPHSDPNVSFLSCPPRQSAVCCCCFPPVFFSSPHYISVEREWTTRGTQSTRAELIMVXVNPSVYTKLAIRARRVAYTILSGRQSNTCPFITYSPAIHRXLYYYYTCIXQLAPVFLR

SEQ ID NO: 7804 - protein, 121 aa, Glycine max
  misc_feature (17)..(17): Xaa can be any naturally occurring amino acid
  misc_feature (98)..(98): Xaa can be any naturally occurring amino acid
  Coding DNA Sequence Number=SeqID_3982
  Gene Ontology: Mol. function=structural molecule activity; Cellular component=protein complex; Biological process=microtubule-based movement
  Homolog annotation: Hit_ID=Q53M51; Match level="QueryCoverage=99%, HitCoverage=34%, E-value=7e-49, Identity=76%"; Hit description =Tubulin/FtsZ family, GTPase domain, putative
  Pfam annotation: Domain name=Tubulin_C; Domain location=1-95; Score =47.7; E_value=4.2e-11; Accession=PF03953.7; Description=TubulinFtsZ family, C-terminal domain
SFMMAKCDPRHAKYMAXCLMYRGHVAPKHVNAVVGIIQSKRAIQFADWCPPGFKSGINSQPPADVPGGDLAKVQRSVCMISNSSNVVEVFSGIDPKFXLMYAKRAFVHWYVGQGMEKVEFF

SEQ ID NO: 7805 - protein, 80 aa, Glycine max
  misc_feature (50)..(50): Xaa can be any naturally occurring amino acid
  misc_feature (57)..(58): Xaa can be any naturally occurring amino acid
  Coding DNA Sequence Number=SeqID_3983
  Subcellular localization annotation: CTP_CleavageSite=2; ConfidenceScore=5.11e-01
ISNMRRRPWIVHSRRLTTSSSSLLFCTTQIANTRSVCRGCDQCTHHAMMXADLRLCXXYFLPSRCIHTPVRRACLNSTPT

SEQ ID NO: 7806 - protein, 74 aa, Glycine max
  Coding DNA Sequence Number=SeqID_3985
  Subcellular localization annotation: CTP_CleavageSite=57; ConfidenceScore=5.13e-01
QKSKEEEMKCLRGKLTKNVKEKELKKSWKNWTTRSTRNPGSVRNSRLTGSSMLTVKSCSARRSGLARRCAFSRN

SEQ ID NO: 7807 - protein, 143 aa, Glycine max
  misc_feature (25)..(25): Xaa can be any naturally occurring amino acid
  misc_feature (67)..(67): Xaa can be any naturally occurring amino acid
  misc_feature (70)..(70): Xaa can be any naturally occurring amino acid
  misc_feature (78)..(78): Xaa can be any naturally occurring amino acid
  misc_feature (91)..(91): Xaa can be any naturally occurring amino acid
  misc_feature (108)..(108): Xaa can be any naturally occurring amino acid
  misc_feature (112)..(112): Xaa can be any naturally occurring amino acid
  misc_feature (124)..(124): Xaa can be any naturally occurring amino acid
  misc_feature (139)..(140): Xaa can be any naturally occurring amino acid
  Coding DNA Sequence Number=SeqID_3987
ALSPFVSLCVCIVSMCALLSPVVRXLREDFGSLASLHLHPYIPCIFLYMICPSSTRRAGLACHERSXNPXSCISSTRXFYDTSTMRAPAAXPRFSRRATIIHYVISRXLILXRRGRRHKHSIRXRPLQSSRVLVCRVSXXLCR

SEQ ID NO: 7808 - protein, 200 aa, Glycine max
  Coding DNA Sequence Number=SeqID_3989
  Subcellular localization annotation: CTP_CleavageSite=76; ConfidenceScore=5.02e-01
FIPRGPILPPILGKGPFCRNFFSAWGSPPKPAISVGITICPMWSISPGKGPPSDNHPFFRTPPTGGFPRGTRGGFQNSKGGGAPGGFFFGHKKFFPIFLPPLFGHGSFIKRFFGQIFQPFFWGANCQAPVWGFDQKDFPPVPTSVFPNFYPFGLEKSVKGVFFFPKKKKKKKKKKKKKKKKKKKKMFKHNKVGTGGGKGV

SEQ ID NO: 7809 - protein, 192 aa, Glycine max
  misc_feature (6)..(6): Xaa can be any naturally occurring amino acid
  misc_feature (10)..(10): Xaa can be any naturally occurring amino acid
  misc_feature (35)..(35): Xaa can be any naturally occurring amino acid
  misc_feature (65)..(65): Xaa can be any naturally occurring amino acid
  misc_feature (85)..(85): Xaa can be any naturally occurring amino acid
  misc_feature (120)..(120): Xaa can be any naturally occurring amino acid
  misc_feature (138)..(138): Xaa can be any naturally occurring amino acid
  misc_feature (192)..(192): Xaa can be any naturally occurring amino acid
  Coding DNA Sequence Number=SeqID_3991
LCVMCXFVLXMHAVRRHVSPASDMLAARAVCALSXSAPAPERLLCLPARLLLQSPGIAVALLPRXSITWLSRALLIAVPRRASTXVPDPASGCWRAAVRRTRACPLSPGDSTLCVSPRVXRPQRLRAARRASMTVWAXDYIYQRSAIHDSEATLSTRDACRVQGAQHPRRVTIAAACPSRDILLLTRARRVX

SEQ ID NO: 7810 - protein, 127 aa, Glycine max
  misc_feature (83)..(83): Xaa can be any naturally occurring amino acid
  misc_feature (121)..(121): Xaa can be any naturally occurring amino acid
  Coding DNA Sequence Number=SeqID_3993
SIVHYSCFGVFAGVRVGLAYISPYLPAVKSKQTRYDITINTECPPSHTHPPSTPTKRNNYEPTAHLILLWGQDVKLHITHYHXRSRAIACLRCDYALYSIIYYCNADRACSGSMTHTDARXMLCAYL

SEQ ID NO: 7811 - protein, 213 aa, Glycine max
  misc_feature (51)..(51): Xaa can be any naturally occurring amino acid
  Coding DNA Sequence Number=SeqID_3995
  Subcellular localization annotation: CTP_CleavageSite=86; ConfidenceScore=5.33e-01
IVTSPAPSRFFSPFFFHIHLLAVVFFFPTGCLLWVLRRRIKTAPLLSPPAXKKHHSRFLRPLVLFLPLGIARAGCYLLSPLDDPVPLEVRSVFLRRVFFCIYLIIGGAPALISVWGGFFILAVFSHGRFCNLYCSRREIDEVCGGGYISIYGIVTRVDATHMYYYSLYRGSVCCRVTLFLSVGLLFHYLYLCMVVYSPISRAAYLSPLNCHSA

SEQ ID NO: 7812 - protein, 134 aa, Glycine max
  misc_feature (51)..(51): Xaa can be any naturally occurring amino acid
  misc_feature (74)..(74): Xaa can be any naturally occurring amino acid
  misc_feature (77)..(77): Xaa can be any naturally occurring amino acid
  misc_feature (126)..(126): Xaa can be any naturally occurring amino acid
  Coding DNA Sequence Number=SeqID_3997
HTTTSVLDRQVRSRRENRRSTTFISYYRNRSSAVAVVRSQHATAKHSAETXHHRCRREDEEIIALATADRTGRXIVXLPPSTSPTETRRRDGCAGTDVIGEGRDPRPQYRSGRRVCARGCVGLASXVPASHATT

SEQ ID NO: 7813 - protein, 101 aa, Glycine max
  Coding DNA Sequence Number=SeqID_3999
HFYKTFLHGLRLILTHPKRFVWESAHFRDNFCNDILKHLLCTQHVVHVMNMTTTHVTLMACQAAGVYGEVGTGVRESGRGVRKYEGGIRKDMGGLHVSVSL

SEQ ID NO: 7814 - protein, 102 aa, Glycine max
  misc_feature (2)..(2): Xaa can be any naturally occurring amino acid
  misc_feature (12)..(13): Xaa can be any naturally occurring amino acid
  misc_feature (48)..(48): Xaa can be any naturally occurring amino acid
  Coding DNA Sequence Number=SeqID_4001
IXIARERRHACXXGICAAVAYRLICMVTLRSRSEMFRLRLSSYDVTDXAQHTLCESGAQAEAIGSVIHTMRMRRYERSGSVQKTRVPRCRYGQEPNRVCCYR

SEQ ID NO: 7815 - protein, 62 aa, Glycine max
  Coding DNA Sequence Number=SeqID_4003
  Gene Ontology: Mol. function=6-phosphofructokinase activity; Cellular component=6-phosphofructokinase complex; Biological process=glycolysis
  Homolog annotation: Hit_ID=A7R2M0; Match level="QueryCoverage=79%, HitCoverage=12%, E-value=1e-18, Identity=85%"; Hit description =Chromosome undetermined scaffold_435, whole genome shotgun sequence
TVLGLRQIGNDLSPSSRFAYHRAGPRKNIYFDPSIVRVAIVTCGGLCPGLNTVIRELVVGLW
